United States Patent Application Publication US 2024/0327476 A1 - sequence listing, part 38

SEQ ID NO: 64927 - protein, 1151 aa, Homo sapiens
MSSECDGGSKAVMNGLAPGSNGQDKATADPLRARSISAVKIIPVKTVKNASGLVLPTDMDLTKICTGKGAVTLRASSSYRETPSSSPASPQETRQHESKPGLEPEPSSADEWRLSSSADANGNAQPSSLAAKGYRSVHPNLPSDKSQDATSSSAAQPEVIVVPLYLVNTDRGQEGTARPPTPLGPLGCVPTIPATASAASPLTFPTLDDFIPPHLQRWPHHSQPARASGSFAPISQTPPSFSPPPPLVPPAPEDLRRVSEPDLTGAVSSTDSSPLLNEVSSSLIGTDSQAFPSVSKPSSAYPSTTIVNPTIVLLQHNREQQKRLSSLSDPVSERRVGEQDSAPTQEKPTSPGKAIEKRAKDDSRRVVKSTQDLSDVSMDEVGIPLRNTERSKDWYKTMFKQIHKLNRDTPEENPYFPTYKFPELPEIQQTSEETKSCSVMSPRLECSGTVIAHCSLKLLDSSNPPTSASQVAGTADDDSDLYSPRYSFSEDTKSPLSVPRSKSEMSYIDGEKVVKRSATLPLPARSSSLKSSSERNDWEPPDKKVDTRKYRAEPKSIYEYQPGKSSVLTNEKMSRDISPEEIDLKNEPWYKFFSELEFGKPPPKKIWDYTPGDCSILPREDRKTNLDKDLSLCQTELEADLEKMETLNKAPSANVPQSSAISPTPEISSETPGYIYSSNFHAVKRESDGAPGDLTSLENERQIYKSVLEGGDIPLQGLSGLKRPSSSASTKDSESPRHFIPADYLESTEEFIRRRHDDKEKLLADQRRLKREQEEADIAARRHTGVIPTHHQFITNERFGDLLNIDDTAKRKSGSEMRPARAKFDFKAQTLKELPLQKGDIVYIYKQIDQNWYEGEHHGRVGIFPRTYIELLPPAEKAQPKKLTPVQVLEYGEAIAKFNFNGDTQVEMSFRKGERITLLRQVDENWYEGRIPGTSRQGIFPITYVDVIKRPLVKNPVDYMDLPFSSSPSRSATASPQPWREESGQYERKAERGAGERGPGGPKISKKSCLKPSDVVRCLSTEQRLSDLNTPEESRPGKPLGSAFPGSEAEQTERHRGGEQAGRKAARRGGSQQPQAQQRRVTPDRSQTSQDLFSYQALYSYIPQNDDELELRDGDIVDVMEKCDDGWFVGTSRRTKQFGTFPGNYVKPLYL

SEQ ID NO: 64928 - protein, 781 aa, Homo sapiens
MSSECDGGSKAVMNGLAPGSNGQDKATADPLRARSISAVKIIPVKTVKNASGLVLPTDMDLTKICTGKGAVTLRASSSYRETPSSSPASPQETRQHESKPGLEPEPSSADEWRLSSSADANGNAQPSSLAAKGYRSVHPNLPSDKSQDSSPLLNEVSSSLIGTDSQAFPSVSKPSSAYPSTTIVNPTIVLLQHNREQQKRLSSLSDPVSERRVGEQDSAPTQEKPTSPGKAIEKRAKDDSRRVVKSTQDLSDVSMDEVGIPLRNTERSKDWYKTMFKQIHKLNRDDDSDLYSPRYSFSEDTKSPLSVPRSKSEMSYIDGEKVVKRSATLPLPARSSSLKSSSERNDWEPPDKKVDTRKYRAEPKSIYEYQPGKSSVLTNEKMSSAISPTPEISSETPGYIYSSNFHAVKRESDGAPGDLTSLENERQIYKSVLEGGDIPLQGLSGLKRPSSSASTKDSESPRHFIPADYLESTEEFIRRRHDDKEKLLADQRRLKREQEEADIAARRHTGVIPTHHQFITNERFGDLLNIDDTAKRKSGSEMRPARAKFDFKAQTLKELPLQKGDIVYIYKQIDQNWYEGEHHGRVGIFPRTYIELLPPAEKAQPKKLTPVQVLEYGEAIAKFNFNGDTQVEMSFRKGERITLLRQVDENWYEGRIPGTSRQGIFPITYVDVIKRPLVKNPVDYMDLPFSSSPSRSATASPQQPQAQQRRVTPDRSQTSQDLFSYQALYSYIPQNDDELELRDGDIVDVMEKCDDGWFVGTSRRTKQFGTFPGNYVKPLYL

SEQ ID NO: 64929 - protein, 846 aa, Homo sapiens
MSSECDGGSKAVMNGLAPGSNGQDKATADPLRARSISAVKIIPVKTVKNASGLVLPTDMDLTKICTGKGAVTLRASSSYRETPSSSPASPQETRQHESKPDEWRLSSSADANGNAQPSSLAAKGYRSVHPNLPSDKSQDSSPLLNEVSSSLIGTDSQAFPSVSKPSSAYPSTTIVNPTIVLLQHNREQQKRLSSLSDPVSERRVGEQDSAPTQEKPTSPGKAIEKRAKDDSRRVVKSTQDLSDVSMDEVGIPLRNTERSKDWYKTMFKQIHKLNRDTPEENPYFPTYKFPELPEIQQTSEEDNPYTPTYQFPASTPSPKSEDDDSDLYSPRYSFSEDTKSPLSVPRSKSEMSYIDGEKVVKRSATLPLPARSSSLKSSSERNDWEPPDKKVDTRKYRAEPKSIYEYQPGKSSVLTNEKMSRDISPEEIDLKNEPWYKFFSELEFGKPSSAISPTPEISSETPGYIYSSNFHAVKRESDGAPGDLTSLENERQIYKSVLEGGDIPLQGLSGLKRPSSSASTKDSESPRHFIPADYLESTEEFIRRRHDDKEKLLADQRRLKREQEEADIAARRHTGVIPTHHQFITNERFGDLLNIDDTAKRKSGSEMRPARAKFDFKAQTLKELPLQKGDIVYIYKQIDQNWYEGEHHGRVGIFPRTYIELLPPAEKAQPKKLTPVQVLEYGEAIAKFNFNGDTQVEMSFRKGERITLLRQVDENWYEGRIPGTSRQGIFPITYVDVIKRPLVKNPVDYMDLPFSSSPSRSATASPQQPQAQQRRVTPDRSQTSQDLFSYQALYSYIPQNDDELELRDGDIVDVMEKCDDGWFVGTSRRTKQFGTFPGNYVKPLYL

SEQ ID NO: 64930 - protein, 905 aa, Homo sapiens
MSSECDGGSKAVMNGLAPGSNGQDKATADPLRARSISAVKIIPVKTVKNASGLVLPTDMDLTKICTGKGAVTLRASSSYRETPSSSPASPQETRQHESKPGLEPEPSSADEWRLSSSADANGNAQPSSLAAKGYRSVHPNLPSDKSQRWPHHSQPARASGSFAPISQTPPSFSPPPPLVPPAPEDLRRVSEPDLTGAVSSTDSSPLLNEVSSSLIGTDSQAFPSVSKPSSAYPSTTIVNPTIVLLQHNREQQKRLSSLSDPVSERRVGEQDSAPTQEKPTSPGKAIEKRAKDDSRRVVKSTQDLSDVSMDEVGIPLRNTERSKDWYKTMFKQIHKLNRDDDSDLYSPRYSFSEDTKSPLSVPRSKSEMSYIDGEKVVKRSATLPLPARSSSLKSSSERNDWEPPDKKVDTRKYRAEPKSIYEYQPGKSSVLTNEKMSRDISPEEIDLKNEPWYKFFSELEFGKPPPKKIWDYTPGDCSILPREDRKSSAISPTPEISSETPGYIYSSNFHAVKRESDGAPGDLTSLENERQIYKSVLEGGDIPLQGLSGLKRPSSSASTKDSESPRHFIPADYLESTEEFIRRRHDDKEKLLADQRRLKREQEEADIAARRHTGVIPTHHQFITNERFGDLLNIDDTAKRKSGSEMRPARAKFDFKAQTLKELPLQKGDIVYIYKQIDQNWYEGEHHGRVGIFPRTYIELLPPAEKAQPKKLTPVQVLEYGEAIAKFNFNGDTQVEMSFRKGERITLLRQVDENWYEGRIPGTSRQGIFPITYVDVIKRPLVKNPVDYMDLPFSSSPSRSATASPQLSHHSLRAGPDLTESEKSYVQPQAQQRRVTPDRSQTSQDLFSYQALYSYIPQNDDELELRDGDIVDVMEKCDDGWFVGTSRRTKQFGTFPGNYVKPLYL

SEQ ID NO: 64931 - protein, 1004 aa, Homo sapiens
MSSECDGGSKAVMNGLAPGSNGQDKATADPLRARSISAVKIIPVKTVKNASGLVLPTDMDLTKICTGKGAVTLRASSSYRETPSSSPASPQETRQHESKPDEWRLSSSADANGNAQPSSLAAKGYRSVHPNLPSDKSQDATSSSAAQPEVIVVPLYLVNTDRGQEGTARPPTPLGPLGCVPTIPATASAASPLTFPTLDDFIPPHLQRWPHHSQPARASGSFAPISQTPPSFSPPPPLVPPAPEDLRRVSEPDLTGAVSSTDSSPLLNEVSSSLIGTDSQAFPSVSKPSSAYPSTTIVNPTIVLLQHNREQQKRLSSLSDPVSERRVGEQDSAPTQEKPTSPGKAIEKRAKDDSRRVVKSTQDLSDVSMDEVGIPLRNTERSKDWYKTMFKQIHKLNRDTPEENPYFPTYKFPELPEIQQTSEDDDSDLYSPRYSFSEDTKSPLSVPRSKSEMSYIDGEKVVKRSATLPLPARSSSLKSSSERNDWEPPDKKVDTRKYRAEPKSIYEYQPGKSSVLTNEKMSRDISPEEIDLKNEPWYKFFSELEFGKPPPKKIWDYTPGDCSILPREDRKTNLDKDLSLCQTELEADLEKMETLNKAPSANVPQSSAISPTPEISSETPGYIYSSNFHAVKRESDGAPGDLTSLENERQIYKSVLEGGDIPLQGLSGLKRPSSSASTKDSESPRHFIPADYLESTEEFIRRRHDDKEKLLADQRRLKREQEEADIAARRHTGVIPTHHQFITNERFGDLLNIDDTAKRKSGSEMRPARAKFDFKAQTLKELPLQKGDIVYIYKQIDQNWYEGEHHGRVGIFPRTYIELLPPAEKAQPKKLTPVQVLEYGEAIAKFNFNGDTQVEMSFRKGERITLLRQVDENWYEGRIPGTSRQGIFPITYVDVIKRPLVKNPVDYMDLPFSSSPSRSATASPQQPQAQQRRVTPDRSQTSQDLFSYQALYSYIPQNDDELELRDGDIVDVMEKCDDGWFVGTSRRTKQFGTFPGNYVKPLYL

SEQ ID NO: 64932 - protein, 1292 aa, Homo sapiens
MSSECDGGSKAVMNGLAPGSNGQDKATADPLRARSISAVKIIPVKTVKNASGLVLPTDMDLTKICTGKGAVTLRASSSYRETPSSSPASPQETRQHESKPGLEPEPSSADEWRLSSSADANGNAQPSSLAAKGYRSVHPNLPSDKSQDATSSSAAQPEVIVVPLYLVNTDRGQEGTARPPTPLGPLGCVPTIPATASAASPLTFPTLDDFIPPHLQRWPHHSQPARASGSFAPISQTPPSFSPPPPLVPPAPEDLRRVSEPDLTGAVSSTDSSPLLNEVSSSLIGTDSQAFPSVSKPSSAYPSTTIVNPTIVLLQHNREQQKRLSSLSDPVSERRVGEQDSAPTQEKPTSPGKAIEKRAKDDSRRVVKSTQDLSDVSMDEVGIPLRNTERSKDWYKTMFKQIHKLNRDTPEENPYFPTYKFPELPEIQQTSEEDNPYTPTYQFPASTPSPKSEDDDSDLYSPRYSFSEDTKSPLSVPRSKSEMSYIDGEKVVKRSATLPLPARSSSLKSSSERNDWEPPDKKVDTRKYRAEPKSIYEYQPGKSSVLTNEKMSRDISPEEIDLKNEPWYKFFSELEFGKPPPKKIWDYTPGDCSILPREDRKTNLDKDLSLCQTELEADLEKMETLNKAPSANVPQSSAISPTPEISSETPGYIYSSNFHAVKRESDGAPGDLTSLENERQIYKSVLEGGDIPLQGLSGLKRPSSSASTKDSESPRHFIPADYLESTEEFIRRRHDDKEKLLADQRRLKREQEEADIAARRHTGVIPTHHQFITNERFGDLLNIDDTAKRKSGSEMRPARAKFDFKAQTLKELPLQKGDIVYIYKQIDQNWYEGEHHGRVGIFPRTYIELLPPAEKAQPKKLTPVQVLEYGEAIAKFNFNGDTQVEMSFRKGERITLLRQVDENWYEGRIPGTSRQGIFPITYVDVIKRPLVKNPVDYMDLPFSSSPSRSATASPQFSSHSKLITPAPSSLPHSRRALSPEMHAVTSEWISLTVGVPGRRSLALTPPLPPLPEASIYNTDHLALSPRASPSLSLSLPHLSWSDRPTPRSVASPLALPSPHKTYSLAPTSQASLHMNGDGGVHTPSSGIHQDSFLQLPLGSSDSVISQLSDAFSSQSKRQPWREESGQYERKAERGAGERGPGGPKISKKSCLKPSDVVRCLSTEQRLSDLNTPEESRPGKPLGSAFPGSEAEQTERHRGGEQAGRKAARRGGSQQPQAQQRRVTPDRSQTSQDLFSYQALYSYIPQNDDELELRDGDIVDVMEKCDDGWFVGTSRRTKQFGTFPGNYVKPLYL

SEQ ID NO: 64933 - protein, 1266 aa, Homo sapiens
MSSECDGGSKAVMNGLAPGSNGQDKATADPLRARSISAVKIIPVKTVKNASGLVLPTDMDLTKICTGKGAVTLRASSSYRETPSSSPASPQETRQHESKPGLEPEPSSADEWRLSSSADANGNAQPSSLAAKGYRSVHPNLPSDKSQDATSSSAAQPEVIVVPLYLVNTDRGQEGTARPPTPLGPLGCVPTIPATASAASPLTFPTLDDFIPPHLQRWPHHSQPARASGSFAPISQTPPSFSPPPPLVPPAPEDLRRVSEPDLTGAVSSTDSSPLLNEVSSSLIGTDSQAFPSVSKPSSAYPSTTIVNPTIVLLQHNREQQKRLSSLSDPVSERRVGEQDSAPTQEKPTSPGKAIEKRAKDDSRRVVKSTQDLSDVSMDEVGIPLRNTERSKDWYKTMFKQIHKLNRDDDSDLYSPRYSFSEDTKSPLSVPRSKSEMSYIDGEKVVKRSATLPLPARSSSLKSSSERNDWEPPDKKVDTRKYRAEPKSIYEYQPGKSSVLTNEKMSRDISPEEIDLKNEPWYKFFSELEFGKPPPKKIWDYTPGDCSILPREDRKTNLDKDLSLCQTELEADLEKMETLNKAPSANVPQSSAISPTPEISSETPGYIYSSNFHAVKRESDGAPGDLTSLENERQIYKSVLEGGDIPLQGLSGLKRPSSSASTKDSESPRHFIPADYLESTEEFIRRRHDDKEKLLADQRRLKREQEEADIAARRHTGVIPTHHQFITNERFGDLLNIDDTAKRKSGSEMRPARAKFDFKAQTLKELPLQKGDIVYIYKQIDQNWYEGEHHGRVGIFPRTYIELLPPAEKAQPKKLTPVQVLEYGEAIAKFNFNGDTQVEMSFRKGERITLLRQVDENWYEGRIPGTSRQGIFPITYVDVIKRPLVKNPVDYMDLPFSSSPSRSATASPQFSSHSKLITPAPSSLPHSRRALSPEMHAVTSEWISLTVGVPGRRSLALTPPLPPLPEASIYNTDHLALSPRASPSLSLSLPHLSWSDRPTPRSVASPLALPSPHKTYSLAPTSQASLHMNGDGGVHTPSSGIHQDSFLQLPLGSSDSVISQLSDAFSSQSKRQPWREESGQYERKAERGAGERGPGGPKISKKSCLKPSDVVRCLSTEQRLSDLNTPEESRPGKPLGSAFPGSEAEQTERHRGGEQAGRKAARRGGSQLSHHSLRAGPDLTESEKSYVQPQAQQRRVTPDRSQTSQDLFSYQALYSYIPQNDDELELRDGDIVDVMEKCDDGWFVGTSRRTKQFGTFPGNYVKPLYL

SEQ ID NO: 64934 - protein, 811 aa, Homo sapiens
MSSECDGGSKAVMNGLAPGSNGQDKDMDLTKICTGKGAVTLRASSSYRETPSSSPASPQETRQHESKPGLEPEPSSADEWRLSSSADANGNAQPSSLAAKGYRSVHPNLPSDKSQDSSPLLNEVSSSLIGTDSQAFPSVSKPSSAYPSTTIVNPTIVLLQHNREQQKRLSSLSDPVSERRVGEQDSAPTQEKPTSPGKAIEKRAKDDSRRVVKSTQDLSDVSMDEVGIPLRNTERSKDWYKTMFKQIHKLNRDDDSDLYSPRYSFSEDTKSPLSVPRSKSEMSYIDGEKVVKRSATLPLPARSSSLKSSSERNDWEPPDKKVDTRKYRAEPKSIYEYQPGKSSVLTNEKMSRDISPEEIDLKNEPWYKFFSELEFGKPTNLDKDLSLCQTELEADLEKMETLNKAPSANVPQSSAISPTPEISSETPGYIYSSNFHAVKRESDGAPGDLTSLENERQIYKSVLEGGDIPLQGLSGLKRPSSSASTKDSESPRHFIPADYLESTEEFIRRRHDDKEKLLADQRRLKREQEEADIAARRHTGVIPTHHQFITNERFGDLLNIDDTAKRKSGSEMRPARAKFDFKAQTLKELPLQKGDIVYIYKQIDQNWYEGEHHGRVGIFPRTYIELLPPAEKAQPKKLTPVQVLEYGEAIAKFNFNGDTQVEMSFRKGERITLLRQVDENWYEGRIPGTSRQGIFPITYVDVIKRPLVKNPVDYMDLPFSSSPSRSATASPQQPQAQQRRVTPDRSQTSQDLFSYQALYSYIPQNDDELELRDGDIVDVMEKCDDGWFVGTSRRTKQFGTFPGNYVKPLYL

SEQ ID NO: 64935 - protein, 684 aa, Homo sapiens
MSSECDGGSKAVMNGLAPGSNGQDKDMDLTKICTGKGAVTLRASSSYRETPSSSPASPQETRQHESKPDEWRLSSSADANGNAQPSSLAAKGYRSVHPNLPSDKSQDSSPLLNEVSSSLIGTDSQAFPSVSKPSSAYPSTTIVNPTIVLLQHNREQQKRLSSLSDPVSERRVGEQDSAPTQEKPTSPGKAIEKRAKDDSRRVVKSTQDLSDVSMDEVGIPLRNTERSKDWYKTMFKQIHKLNRDDDSDLYSPRYSFSEDTKSPLSVPRSKSEMSYIDGEKVVKRSATLPLPARSSSLKSSSERNDWEPPDKKVDTRKYRAEPKSIYEYQPGKSSVLTNEKMSSAISPTPEISSETPGYIYSSNFHAVKRESDGAPGDLTSLENERQIYKSVLEGGDIPLQGLSGLKRPSSSASTKDSESPRHFIPADYLESTEEFIRRRHDDKEMRPARAKFDFKAQTLKELPLQKGDIVYIYKQIDQNWYEGEHHGRVGIFPRTYIELLPPAEKAQPKKLTPVQVLEYGEAIAKFNFNGDTQVEMSFRKGERITLLRQVDENWYEGRIPGTSRQGIFPITYVDVIKRPLVKNPVDYMDLPFSSSPSRSATASPQQPQAQQRRVTPDRSQTSQDLFSYQALYSYIPQNDDELELRDGDIVDVMEKCDDGWFVGTSRRTKQFGTFPGNYVKPLYL

SEQ ID NO: 64936 - protein, 905 aa, Homo sapiens; identical to SEQ ID NO: 64930

SEQ ID NO: 64937 - protein, 1151 aa, Homo sapiens; identical to SEQ ID NO: 64927

SEQ ID NO: 64938 - protein, 1292 aa, Homo sapiens; identical to SEQ ID NO: 64932

SEQ ID NO: 64939 - protein, 816 aa, Homo sapiens
MSSECDGGSKAVMNGLAPGSNGQDKDMDLTKICTGKGAVTLRASSSYRETPSSSPASPQETRQHESKPGLEPEPSSADEWRLSSSADANGNAQPSSLAAKGYRSVHPNLPSDKSQDATSSSAAQPEVIVVPLYLVNTDRGQEGTARPPTPLGPLGCVPTIPATASAASPLTFPTLDDFIPPHLQRWPHHSQPARASGSFAPISQTPPSFSPPPPLVPPAPEDLRRVSEPDLTGAVSSTDSSPLLNEVSSSLIGTDSQAFPSVSKPSSAYPSTTIVNPTIVLLQHNREQQKRLSSLSDPVSERRVGEQDSAPTQEKPTSPGKAIEKRAKDDSRRVVKSTQDLSDVSMDEVGIPLRNTERSKDWYKTMFKQIHKLNRDDDSDLYSPRYSFSEDTKSPLSVPRSKSEMSYIDGEKVVKRSATLPLPARSSSLKSSSERNDWEPPDKKVDTRKYRAEPKSIYEYQPGKSSVLTNEKMSSAISPTPEISSETPGYIYSSNFHAVKRESDGAPGDLTSLENERQIYKSVLEGGDIPLQGLSGLKRPSSSASTKDSESPRHFIPADYLESTEEFIRRRHDDKEMRPARAKFDFKAQTLKELPLQKGDIVYIYKQIDQNWYEGEHHGRVGIFPRTYIELLPPAEKAQPKKLTPVQVLEYGEAIAKFNFNGDTQVEMSFRKGERITLLRQVDENWYEGRIPGTSRQGIFPITYVDVIKRPLVKNPVDYMDLPFSSSPSRSATASPQQPQAQQRRVTPDRSQTSQDLFSYQALYSYIPQNDDELELRDGDIVDVMEKCDDGWFVGTSRRTKQFGTFPGNYVKPLYL

SEQ ID NO: 64940 - protein, 1004 aa, Homo sapiens; identical to SEQ ID NO: 64931

SEQ ID NO: 64941 - protein, 671 aa, Homo sapiens
MQGPPRSLRAGLSLDDFIPGHLQSHIGSSSRGTRVPVIRNGGSNTLNFQFHDPAPRTVCNGGYTPRRDASQHPDPAWYQTWPGPGSKPSASTKIPASQHTQNWSATWTKDSKRRDKRWVKYEGIGPVDESGMPIAPRSSVDRPRDWYRRMFQQIHRKMPDLQLDWTFEEPPRDPRHLGAQQRPAHRPGPATSSSGRSWDHSEELPRSTFNYRPGAFSTVLQPSNQVLRRREKVDNVWTEESWNQFLQELETGQRPKKPLVDDPGEKPSQPIEVLLERELAELSAELDKDLRAIETRLPSPKSSPAPRRAPEQRPPAGPASAWSSSYPHAPYLGSARSLSPHKMADGGSPFLGRRDFVYPSSTRDPSASNGGGSPARREEKKRKAARLKFDFQAQSPKELTLQKGDIVYIHKEVDKNWLEGEHHGRLGIFPANYVEVLPADEIPKPIKPPTYQVLEYGEAVAQYTFKGDLEVELSFRKGEHICLIRKVNENWYEGRITGTGRQGIFPASYVQVSREPRLRLCDDGPQLPTSPRLTAAARSARHPSSPSALRSPADPIDLGGQTSPRRTGFSFPTQEPRPQTQNLGTPGPALSHSRGPSHPLDLGTSSPNTSQIHWTPYRAMYQYRPQNEDELELREGDRVDVMQQCDDGWFVGVSRRTQKFGTFPGNYVAPV

SEQ ID NO: 64942 - protein, 329 aa, Homo sapiens
MADGGSPFLGRRDFVYPSSTRDPSASNGGGSPARREEKKRKAARLKFDFQAQSPKELTLQKGDIVYIHKEVDKNWLEGEHHGRLGIFPANYVEVLPADEIPKPIKPPTYQVLEYGEAVAQYTFKGDLEVELSFRKGEHICLIRKVNENWYEGRITGTGRQGIFPASYVQVSREPRLRLCDDGPQLPTSPRLTAAARSARHPSSPSALRSPADPIDLGGQTSPRRTGFSFPTQEPRPQTQNLGTPGPALSHSRGPSHPLDLGTSSPNTSQIHWTPYRAMYQYRPQNEDELELREGDRVDVMQQCDDGWFVGVSRRTQKFGTFPGNYVAPV

SEQ ID NO: 64943 - protein, 357 aa, Homo sapiens
MAAAAKPNNLSLVVHGPGDLRLENYPIPEPGPNEVLLRMHSVGICGSDVHYWEYGRIGNFIVKKPMVLGHEASGTVEKVGSSVKHLKPGDRVAIEPGAPRENDEFCKMGRYNLSPSIFFCATPPDDGNLCRFYKHNAAFCYKLPDNVTFEEGALIEPLSVGIHACRRGGVTLGHKVLVCGAGPIGMVTLLVAKAMGAAQVVVTDLSATRLSKAKEIGADLVLQISKESPQEIARKVEGQLGCKPEVTIECTGAEASIQAGIYATRSGGNLVLVGLGSEMTTVPLLHAAIREVDIKGVFRYCNTWPVAISMLASKSVNVKPLVTHRFPLEKALEAFETFKKGLGLKIMLKCDPSDQNP

SEQ ID NO: 64944 - protein, 198 aa, Homo sapiens
MAYPGHPGAGGGYYPGGYGGAPGGPAFPGQTQDPLYGYFAAVAGQDGQIDADELQRCLTQSGIAGGYKPFNLETCRLMVSMLDRDMSGTMGFNEFKELWAVLNGWRQHFISFDTDRSGTVDPQELQKALTTMGFRLSPQAVNSIAKRYSTNGKITFDDYIACCVKLRALTDSFRRRDTAQQGVVNFPYDDFIQCVMSV

SEQ ID NO: 64945 - protein, 183 aa, Homo sapiens
MQYGGAPGGPAFPGQTQDPLYGYFAAVAGQDGQIDADELQRCLTQSGIAGGYKPFNLETCRLMVSMLDRDMSGTMGFNEFKELWAVLNGWRQHFISFDTDRSGTVDPQELQKALTTMGFRLSPQAVNSIAKRYSTNGKITFDDYIACCVKLRALTDSFRRRDTAQQGVVNFPYDDFIQCVMSV

SEQ ID NO: 64946 - protein, 180 aa, Homo sapiens
MQYGGAPGGPAFPGQTQDPLYGYFAAVAGQDGQIDADELQRCLTQSGIAGGYKPFNLETCRLMVSMLDRDMSGTMGFNEFKELWAVLNGWRQHFISFDTDRSGTVDPQELQKALTTMGFRLSPQAVNSIAKRYSTNGKITFDDYIACCVKLRALTDSFRRRDTAQQGVVNFPYDDVSLRN

SEQ ID NO: 64947 - protein, 2214 aa, Homo sapiens
MATRSSRRESRLPFLFTLVALLPPGALCEVWTQRLHGGSAPLPQDRGFLVVQGDPRELRLWARGDARGASRADEKPLRRKRSAALQPEPIKVYGQVSLNDSHNQMVVHWAGEKSNVIVALARDSLALARPKSSDVYVSYDYGKSFKKISDKLNFGLGNRSEAVIAQFYHSPADNKRYIFADAYAQYLWITFDFCNTLQGFSIPFRAADLLLHSKASNLLLGFDRSHPNKQLWKSDDFGQTWIMIQEHVKSFSWGIDPYDKPNTIYIERHEPSGYSTVFRSTDFFQSRENQEVILEEVRDFQLRDKYMFATKVVHLLGSEQQSSVQLWVSFGRKPMRAAQFVTRHPINEYYIADASEDQVFVCVSHSNNRTNLYISEAEGLKFSLSLENVLYYSPGGAGSDTLVRYFANEPFADFHRVEGLQGVYIATLINGSMNEENMRSVITFDKGGTWEFLQAPAFTGYGEKINCELSQGCSLHLAQRLSQLLNLQLRRMPILSKESAPGLIIATGSVGKNLASKTNVYISSSAGARWREALPGPHYYTWGDHGGIITAIAQGMETNELKYSTNEGETWKTFIFSEKPVFVYGLLTEPGEKSTVFTIFGSNKENVHSWLILQVNATDALGVPCTENDYKLWSPSDERGNECLLGHKTVFKRRTPHATCFNGEDFDRPVVVSNCSCTREDYECDFGFKMSEDLSLEVCVPDPEFSGKSYSPPVPCPVGSTYRRTRGYRKISGDTCSGGDVEARLEGELVPCPLAEENEFILYAVRKSIYRYDLASGATEQLPLTGLRAAVALDFDYEHNCLYWSDLALDVIQRLCLNGSTGQEVIINSGLETVEALAFEPLSQLLYWVDAGFKKIEVANPDGDFRLTIVNSSVLDRPRALVLVPQEGVMFWTDWGDLKPGIYRSNMDGSAAYHLVSEDVKWPNGISVDDQWIYWTDAYLECIERITFSGQQRSVILDNLPHPYAIAVFKNEIYWDDWSQLSIFRASKYSGSQMEILANQLTGLMDMKIFYKGKNTGSNACVPRPCSLLCLPKANNSRSCRCPEDVSSSVLPSGDLMCDCPQGYQLKNNTCVKQENTCLRNQYRCSNGNCINSIWWCDFDNDCGDMSDERNCPTTICDLDTQFRCQESGTCIPLSYKCDLEDDCGDNSDESHCEMHQCRSDEYNCSSGMCIRSSWVCDGDNDCRDWSDEANCTAIYHTCEASNFQCRNGHCIPQRWACDGDTDCQDGSDEDPVNCEKKCNGFRCPNGTCIPSSKHCDGLRDCSDGSDEQHCEPLCTHFMDFVCKNRQQCLFHSMVCDGIIQCRDGSDEDAAFAGCSQDPEFHKVCDEFGFQCQNGVCISLIWKCDGMDDCGDYSDEANCENPTEAPNCSRYFQFRCENGHCIPNRWKCDRENDCGDWSDEKDCGDSHILPFSTPGPSTCLPNYYRCSSGTCVMDTWVCDGYRDCADGSDEEACPLLANVTAASTPTQLGRCDRFEFECHQPKTCIPNWKRCDGHQDCQDGRDEANCPTHSTLTCMSREFQCEDGEACIVLSERCDGFLDCSDESDEKACSDELTVYKVQNLQWTADFSGDVTLTWMRPKKMPSASCVYNVYYRVVGESIWKTLETHSNKTNTVLKVLKPDTTYQVKVQVQCLSKAHNTNDFVTLRTPEGLPDAPRNLQLSLPREAEGVIVGHWAPPIHTHGLIREYIVEYSRSGSKMWASQRAASNFTEIKNLLVNTLYTVRVAAVTSRGIGNWSDSKSITTIKGKVIPPPDIHIDSYGENYLSFTLTMESDIKVNGYVVNLFWAFDTHKQERRTLNFRGSILSHKVGNLTAHTSYEISAWAKTDLGDSPLAFEHVMTRGVRPPAPSLKAKAINQTAVECTWTGPRNVVYGIFYATSFLDLYRNPKSLTTSLHNKTVIVSKDEQYLFLVRVVVPYQGPSSDYVVVKMIPDSRLPPRHLHVVHTGKTSVVIKWESPYDSPDQDLLYAVAVKDLIRKTDRSYKVKSRNSTVEYTLNKLEPGGKYHIIVQLGNMSKDSSIKITTVSLSAPDALKIITENDHVLLFWKSLALKEKHFNESRGYEIHMFDSAMNITAYLGNTTDNFFKISNLKMGHNYTFTVQARCLFGNQICGEPAILLYDELGSGADASATQAARSTDVAAVVVPILFLILLSLGVGFAILYTKHRRLQSSFTAFANSHYSSRLGSAIFSSGDDLGEDDEDAPMITGFSDDVPMVIA

SEQ ID NO: 64948 - protein, 1168 aa, Homo sapiens
MGKVGAGGGSQARLSALLAGAGLLILCAPGVCGGGSCCPSPHPSSAPRSASTPRGFSHQGRPGRAPATPLPLVVRPLFSVAPGDRALSLERARGTGASMAVAARSGRRRRSGADQEKAERGEGASRSPRGVLRDGGQQEPGTRERDPDKATRFRMEELRLTSTTFALTGDSAHNQAMVHWSGHNSSVILILTKLYDYNLGSITESSLWRSTDYGTTYEKLNDKVGLKTILSYLYVCPTNKRKIMLLTDPEIESSLLISSDEGATYQKYRLNFYIQSLLFHPKQEDWILAYSQDQKLYSSAEFGRRWQLIQEGVVPNRFYWSVMGSNKEPDLVHLEARTVDGHSHYLTCRMQNCTEANRNQPFPGYIDPDSLIVQDHYVFVQLTSGGRPHYYVSYRRNAFAQMKLPKYALPKDMHVISTDENQVFAAVQEWNQNDTYNLYISDTRGVYFTLALENVQSSRGPEGNIMIDLYEVAGIKGMFLANKKIDNQVKTFITYNKGRDWRLLQAPDTDLRGDPVHCLLPYCSLHLHLKVSENPYTSGIIASKDTAPSIIVASGNIGSELSDTDISMFVSSDAGNTWRQIFEEEHSVLYLDQGGVLVAMKHTSLPIRHLWLSFDEGRSWSKYSFTSIPLFVDGVLGEPGEETLIMTVFGHFSHRSEWQLVKVDYKSIFDRRCAEEDYRPWQLHSQGEACIMGAKRIYKKRKSERKCMQGKYAGAMESEPCVCTEADFDCDYGYERHSNGQCLPAFWFNPSSLSKDCSLGQSYLNSTGYRKVVSNNCTDGVREQYTAKPQKCPGKAPRGLRIVTADGKLTAEQGHNVTLMVQLEEGDVQRTLIQVDFGDGIAVSYVNLSSMEDGIKHVYQNVGIFRVTVQVDNSLGSDSAVLYLHVTCPLEHVHLSLPFVTTKNKEVNATAVLWPSQVGTLTYVWWYGNNTEPLITLEGSISFRFTSEGMNTITVQVSAGNAILQDTKTIAVYEEFRSLRLSFSPNLDDYNPDIPEWRRDIGRVIKKSLVEATGVPGQHILVAVLPGLPTTAELFVLPYQDPAGENKRSTDDLEQISELLIHTLNQNSVHFELKPGVRVLVHAAHLTAAPLVDLTPTHSGSAMLMLLSVVFVGLAVFVIYKFKRRVALPSPPSPSTQPGDSSLRLQRARHATPPSTPKRGSAGAQYAI

SEQ ID NO: 64949 - protein, 1198 aa, Homo sapiens
MGKVGAGGGSQARLSALLAGAGLLILCAPGVCGGGSCCPSPHPSSAPRSASTPRGFSHQGRPGRAPATPLPLVVRPLFSVAPGDRALSLERARGTGASMAVAARSGRRRRSGADQEKAERGEGASRSPRGVLRDGGQQEPGTRERDPDKATRFRMEELRLTSTTFALTGDSAHNQAMVHWSGHNSSVILILTKLYDYNLGSITESSLWRSTDYGTTYEKLNDKVGLKTILSYLYVCPTNKRKIMLLTDPEIESSLLISSDEGATYQKYRLNFYIQSLLFHPKQEDWILAYSQDQKLYSSAEFGRRWQLIQEGVVPNRFYWSVMGSNKEPDLVHLEARTVDGHSHYLTCRMQNCTEANRNQPFPGYIDPDSLIVQDHYVFVQLTSGGRPHYYVSYRRNAFAQMKLPKYALPKDMHVISTDENQVFAAVQEWNQNDTYNLYISDTRGVYFTLALENVQSSRGPEGNIMIDLYEVAGIKGMFLANKKIDNQVKTFITYNKGRDWRLLQAPDTDLRGDPVHCLLPYCSLHLHLKVSENPYTSGIIASKDTAPSIIVASGNIGSELSDTDISMFVSSDAGNTWRQIFEEEHSVLYLDQGGVLVAMKHTSLPIRHLWLSFDEGRSWSKYSFTSIPLFVDGVLGEPGEETLIMTVFGHFSHRSEWQLVKVDYKSIFDRRCAEEDYRPWQLHSQGEACIMGAKRIYKKRKSERKCMQGKYAGAMESEPCVCTEADFDCDYGYERHSNGQCLPAFWFNPSSLSKDCSLGQSYLNSTGYRKVVSNNCTDGVREQYTAKPQKCPGKAPRGLRIVTADGKLTAEQGHNVTLMVQLEEGDVQRTLIQVDFGDGIAVSYVNLSSMEDGIKHVYQNVGIFRVTVQVDNSLGSDSAVLYLHVTCPLEHVHLSLPFVTTKNKEVNATAVLWPSQVGTLTYVWWYGNNTEPLITLEGSISFRFTSEGMNTITVQVSAGNAILQDTKTIAVYEEFRSLRLSFSPNLDDYNPDIPEWRRDIGRVIKKSLVEATGVPGQHILVAVLPGLPTTAELFVLPYQDPAGENKRSTDDLEQISELLIHTLNQNSVHFELKPGVRVLVHAAHLTAAPLVDLTPTHSGSAMLMLLSVVFVGLAVFVIYKFKRKIPGINVYAQMQNEKEQEMISPVSHSESRPNVPQTELRRPGQLIDEKVESQLIGSISIVAENQSTKEIPTYVNV

SEQ ID NO: 64950 - protein, 714 aa, Homo sapiens
MIDLYEVAGIKGMFLANKKIDNQVKTFITYNKGRDWRLLQAPDTDLRGDPVHCLLPYCSLHLHLKVSENPYTSGIIASKDTAPSIIVASGNIGSELSDTDISMFVSSDAGNTWRQIFEEEHSVLYLDQGGVLVAMKHTSLPIRHLWLSFDEGRSWSKYSFTSIPLFVDGVLGEPGEETLIMTVFGHFSHRSEWQLVKVDYKSIFDRRCAEEDYRPWQLHSQGEACIMGAKRIYKKRKSERKCMQGKYAGAMESEPCVCTEADFDCDYGYERHSNGQCLPAFWFNPSSLSKDCSLGQSYLNSTGYRKVVSNNCTDGVREQYTAKPQKCPGKAPRGLRIVTADGKLTAEQGHNVTLMVQLEEGDVQRTLIQVDFGDGIAVSYVNLSSMEDGIKHVYQNVGIFRVTVQVDNSLGSDSAVLYLHVTCPLEHVHLSLPFVTTKNKEVNATAVLWPSQVGTLTYVWWYGNNTEPLITLEGSISFRFTSEGMNTITVQVSAGNAILQDTKTIAVYEEFRSLRLSFSPNLDDYNPDIPEWRRDIGRVIKKSLVEATGVPGQHILVAVLPGLPTTAELFVLPYQDPAGENKRSTDDLEQISELLIHTLNQNSVHFELKPGVRVLVHAAHLTAAPLVDLTPTHSGSAMLMLLSVVFVGLAVFVIYKFKRKIPGINVYAQMQNEKEQEMISPVSHSESRPNVPQTELRRPGQLIDEKVESQLIGE

SEQ ID NO: 64951 - protein, 213 aa, Homo sapiens
  VARIANT 1: note = MOD_RES - Any amino acid
XLDDYNPDIPEWRRDIGRVIKKSLVEATGVPGQHILVAVLPGLPTTAELFVLPYQDPAGENKRSTDDLEQISELLIHTLNQNSVHFELKPGVRVLVHAAHLTAAPLVDLTPTHSGSAMLMLLSVVFVGLAVFVIYKFKRKIPGINVYAQMQNEKEQEMISPVSHSESRPNVPQTELRRPGQLIDEKVESQLIGSISIVAENQSTKEIPTYVNV

SEQ ID NO: 64952 - protein, 1002 aa, Homo sapiens
MGKVLESSLWRSSDFGTSYTKLTLQPGVTTVIDNFYICPTNKRKVILVSSSLSDRDQSLFLSADEGATFQKQPIPFFVETLIFHPKEEDKVLAYTKESKLYVSSDLGKKWTLLQERVTKDHVFWSVSGVDADPDLVHVEAQDLGGDFRYVTCAIHNCSEKMLTAPFAGPIDHGSLTVQDDYIFFKATSANQTKYYVSYRRNEFVLMKLPKYALPKDLQIISTDESQVFVAVQEWYQMDTYNLYQSDPRGVRYALVLQDVRSSRQAEESVLIDILEVRGVKGVFLANQKIDGKVMTLITYNKGRDWDYLRPPSMDMNGKPTNCKPPDCHLHLHLRWADNPYVSGTVHTKDTAPGLIMGAGNLGSQLVEYKEEMYITSDCGHTWRQVFEEEHHILYLDHGGVIVAIKDTSIPLKILKFSVDEGLTWSTHNFTSTSVFVDGLLSEPGDETLVMTVFGHISFRSDWELVKVDFRPSFSRQCGEEDYSSWELSNLQGDRCIMGQQRSFRKRKSTSWCIKGRSFTSALTSRVCECRDSDFLCDYGFERSSSSESSTNKCSANFWFNPLSPPDDCALGQTYTSSLGYRKVVSNVCEGGVDMQQSQVQLQCPLTPPRGLQVSIQGEAVAVRPGEDVLFVVRQEQGDVLTTKYQVDLGDGFKAMYVNLTLTGEPIRHRYESPGIYRVSVRAENTAGHDEAVLFVQVNSPLQALYLEVVPVIGLNQEVNLTAVLLPLNPNLTVFYWWIGHSLQPLLSLDNSVTTRFSDTGDVRVTVQAACGNSVLQDSRVLRVLDQFQVMPLQFSKELDAYNPNTPEWREDVGLVVTRLLSKETSVPQELLVTVVKPGLPTLADLYVLLPPPRPTRKRSLSSDKRLAAIQQVLNAQKISFLLRGGVRVLVALRDTGTGAEQLGGGGGYWAVVVLFVIGLFAAGAFILYKFKSRKRPGRTVYAQMHNEKEQEMTSPVSHSEDVQGAVQGEEFIDDDLDSQTLGNHSGVVLSINSREMHSYLVS

SEQ ID NO: 64953 - protein, 1159 aa, Homo sapiens
MAHRGPSRASKGPGPTARAPSPGAPPPPRSPRSRPLLLLLLLLGACGAAGRSPEPGRLGPHAQLTRVPRSPPAGRAEPGGGEDRQARGTEPGAPGPSPGPAPGPGEDGAPAAGYRRWERAAPLAGVASRAQVSLISTSFVLKGDATHNQAMVHWTGENSSVILILTKYYHADMGKVLESSLWRSSDFGTSYTKLTLQPGVTTVIDNFYICPTNKRKVILVSSSLSDRDQSLFLSADEGATFQKQPIPFFVETLIFHPKEEDKVLAYTKESKLYVSSDLGKKWTLLQERVTKDHVFWSVSGVDADPDLVHVEAQDLGGDFRYVTCAIHNCSEKMLTAPFAGPIDHGSLTVQDDYIFFKATSANQTKYYVSYRRNEFVLMKLPKYALPKDLQIISTDESQVFVAVQEWYQMDTYNLYQSDPRGVRYALVLQDVRSSRQAEESVLIDILEVRGVKGVFLANQKIDGKVMTLITYNKGRDWDYLRPPSMDMNGKPTNCKPPDCHLHLHLRWADNPYVSGTVHTKDTAPGLIMGAGNLGSQLVEYKEEMYITSDCGHTWRQVFEEEHHILYLDHGGVIVAIKDTSIPLKILKFSVDEGLTWSTHNFTSTSVFVDGLLSEPGDETLVMTVFGHISFRSDWELVKVDFRPSFSRQCGEEDYSSWELSNLQGDRCIMGQQRSFRKRKSTSWCIKGRSFTSALTSRVCECRDSDFLCDYGFERSSSSESSTNKCSANFWFNPLSPPDDCALGQTYTSSLGYRKVVSNVCEGGVDMQQSQVQLQCPLTPPRGLQVSIQGEAVAVRPGEDVLFVVRQEQGDVLTTKYQVDLGDGFKAMYVNLTLTGEPIRHRYESPGIYRVSVRAENTAGHDEAVLFVQVNSPLQALYLEVVPVIGLNQEVNLTAVLLPLNPNLTVFYWWIGHSLQPLLSLDNSVTTRFSDTGDVRVTVQAACGNSVLQDSRVLRVLDQFQVMPLQFSKELDAYNPNTPEWREDVGLVVTRLLSKETSVPQELLVTVVKPGLPTLADLYVLLPPPRPTRKRSLSSDKRLAAIQQVLNAQKISFLLRGGVRVLVALRDTGTGAEQLGGGGGYWAVVVLFVIGLFAAGAFILYKFKRKRPGRTVYAQMHNEKEQEMTSPVSHSEDVQGAVQGNHSGVVLSINSREMHSYLVS

SEQ ID NO: 64954 - protein, 197 aa, Homo sapiens
MGERKIFKKRKPGAQCALGRDHSGSVVSEPCVCANWDFECDYGYERHGESQCVPAFWYNPASPSKDCSLGQSYLNSTGYRRIVSNNCTDGLREKYTAKAQMCPGKAPRGLHVVTTDGRLVAEQGHNATFIILMEEGDLQRTNIQLDFGDGIAVSYANFSPIEDGIKHVYKSAGIFQVTAYAENNLGSDTAVLFLHVV

SEQ ID NO: 64955 - protein, 1222 aa, Homo sapiens
MEAARTERPAGRPGAPLVRTGLLLLSTWVLAGAEITWDATGGPGRPAAPASRPPALSPLSPRAVASQWPEELASARRAAVLGRRAGPELLPQQGGGRGGEMQVEAGGTSPAGERRGRGIPAPAKLGGARRSRRAQPPITQERGDAWATAPADGSRGSRPLAKGSREEVKAPRAGGSAAEDLRLPSTSFALTGDSAHNQAMVHWSGHNSSVILILTKLYDFNLGSVTESSLWRSTDYGTTYEKLNDKVGLKTVLSYLYVNPTNKRKIMLLSDPEMESSILISSDEGATYQKYRLTFYIQSLLFHPKQEDWVLAYSLDQKLYSSMDFGRRWQLMHERITPNRFYWSVAGLDKEADLVHMEVRTTDGYAHYLTCRIQECAETTRSGPFARSIDISSLVVQDEYIFIQVTTSGRASYYVSYRREAFAQIKLPKYSLPKDMHIISTDENQVFAAVQEWNQNDTYNLYISDTRGIYFTLAMENIKSSRGLMGNIIIELYEVAGIKGIFLANKKVDDQVKTYITYNKGRDWRLLQAPDVDLRGSPVHCLLPFCSLHLHLQLSENPYSSGRISSKETAPGLVVATGNIGPELSYTDIGVFISSDGGNTWRQIFDEEYNVWFLDWGGALVAMKHTPLPVRHLWVSFDEGHSWDKYGFTSVPLFVDGALVEAGMETHIMTVFGHFSLRSEWQLVKVDYKSIFSRHCTKEDYQTWHLLNQGEPCVMGERKIFKKRKPGAQCALGRDHSGSVVSEPCVCANWDFECDYGYERHGESQCVPAFWYNPASPSKDCSLGQSYLNSTGYRRIVSNNCTDGLREKYTAKAQMCPGKAPRGLHVVTTDGRLVAEQGHNATFIILMEEGDLQRTNIQLDFGDGIAVSYANFSPIEDGIKHVYKSAGIFQVTAYAENNLGSDTAVLFLHVVCPVEHVHLRVPFVAIRNKEVNISAVVWPSQLGTLTYFWWFGNSTKPLITLDSSISFTFLAEGTDTITVQVAAGNALIQDTKEIAVHEYFQSQLLSFSPNLDYHNPDIPEWRKDIGNVIKRALVKVTSVPEDQILIAVFPGLPTSAELFILPPKNLTERRKGNEGDLEQIVETLFNALNQNLVQFELKPGVQVIVYVTQLTLAPLVDSSAGHSSSAMLMLLSVVFVGLAVFLIYKFKRKIPWINIYAQVQHDKEQEMIGSVSQSENAPKITLSDFTEPEELLDKELDTRVIGGIATIANSESTKEIPNCTSV

SEQ ID NO: 64956 - protein, 153 aa, Homo sapiens [sequence omitted]

SEQ ID NO: 64957 - protein, 469 aa, Homo sapiens
MGTVHARSLEPLPSSGPDFGGLGEEAEFVEVEPEAKQEILENKDVVVQHVHFDGLGRTKDDIIICEIGDVFKAKNLIEVMRKSHEAREKLLRLGIFRQVDVLIDTCQGDDALPNGLDVTFEVTELRRLTGSYNTMVGNNEGSMVLGLKLPNLLGRAEKVTFQFSYGTKETSYGLSFFKPRPGNFERNFSVNLYKVTGQFPWSSLRETDRGMSAEYSFPIWKTSHTVKWEGVWRELGCLSRTASFAVRKESGHSLKSSLSHAMVIDSRNSSILPRRGALLKVNQELAGYTGGDVSFIKEDFELQLNKQLIFDSVFSASFWGGMLVPIGDKPSSIADRFYLGGPTSIRGFSMHSIGPQSEGDYLGGEAYWAGGLHLYTPLPFRPGQGGFGELFRTHFFLNAGNLCNLNYGEGPKAHIRKLAECIRWSYGAGIVLRLGNIARLELNYCVPMGVQTGDRICDGVQFGAGIRFL

SEQ ID NO: 64958 - protein, 259 aa, Homo sapiens
MSAEYSFPIWKTSHTVKWEGVWRELGCLSRTASFAVRKESGHSLKSSLSHAMVIDSRNSSILPRRGALLKVNQELAGYTGGDVSFIKEDFELQLNKQLIFDSVFSASFWGGMLVPIGDKPSSIADRFYLGGPTSIRGFSMHSIGPQSEGDYLGGEAYWAGGLHLYTPLPFRPGQGGFGELFRTHFFLNAGNLCNLNYGEGPKAHIRKLAECIRWSYGAGIVLRLGNIARLELNYCVPMGVQTGDRICDGVQFGAGIRFL

SEQ ID NO: 64959 - protein, 474 aa, Homo sapiens
MASGGGGCSASERLPPPFPGLEPESEGAAGGSEPEAGDSDTEGEDIFTGAAVVSKHQSPKITTSLLPINNGSKENGIHEEQDQEPQDLFADATVELSLDSTQNNQKKVLAKTLISLPPQEATNSSKPQPTYEELEEEEQEDQFDLTVGITDPEKIGDGMNAYVAYKVTTQTSLPLFRSKQFAVKRRFSDFLGLYEKLSEKHSQNGFIVPPPPEKSLIGMTKVKVGKEDSSSAEFLEKRRAALERYLQRIVNHPTMLQDPDVREFLEKEELPRAVGTQTLSGAGLLKMFNKATDAVSKMTIKMNESDIWFEEKLQEVECEEQRLRKLHAVVETLVNHRKELALNTAQFAKSLAMLGSSEDNTALSRALSQLAEVEEKIEQLHQEQANNDFFLLAELLSDYIRLLAIVRWESRVTQYERDFERISTVVRKEVIRFEKEKSKDFKNHVIKYLETLLYSQQQLAKYWEAFLPEAKAIS

SEQ ID NO: 64960 - protein, 522 aa, Homo sapiens
MASGGGGCSASERLPPPFPGLEPESEGAAGGSEPEAGDSDTEGEDIFTGAAVVSKHQSPKITTSLLPINNGSKENGIHEEQDQEPQDLFADATVELSLDSTQNNQKKVLAKTLISLPPQEATNSSKPQPTYEELEEEEQEDQFDLTVGITDPEKIGDGMNAYVAYKVTTQTSLPLFRSKQFAVKRRFSDFLGLYEKLSEKHSQNGFIVPPPPEKSLIGMTKVKVGKEDSSSAEFLEKRRAALERYLQRIVNHPTMLQDPDVREFLEKEELPRAVGTQTLSGAGLLKMFNKATDAVSKMTIKMNESDIWFEEKLQEVECEEQRLRKLHAVVETLVNHRKELALNTAQFAKSLAMLGSSEDNTALSRALSQLAEVEEKIEQLHQEQANNDFFLLAELLSDYIRLLAIVRAAFDQRMKTWQRWQDAQATLQKKREAEARLLWANKPDKLQQAKDEILEWESRVTQYERDFERISTVVRKEVIRFEKEKSKDFKNHVIKYLETLLYSQQQLAKYWEAFLPEAKAIS

SEQ ID NO: 64961 - protein, 457 aa, Homo sapiens
MASGGGGCSASERLPPPFPGLEPESEGAAGGSEPEAGDSDTEGEDIFTGAAVVSKHQSPKITTSLLPINNGSKENGIHEEQDQEPQDLFAGDGMNAYVAYKVTTQTSLPLFRSKQFAVKRRFSDFLGLYEKLSEKHSQNGFIVPPPPEKSLIGMTKVKVGKEDSSSAEFLEKRRAALERYLQRIVNHPTMLQDPDVREFLEKEELPRAVGTQTLSGAGLLKMFNKATDAVSKMTIKMNESDIWFEEKLQEVECEEQRLRKLHAVVETLVNHRKELALNTAQFAKSLAMLGSSEDNTALSRALSQLAEVEEKIEQLHQEQANNDFFLLAELLSDYIRLLAIVRAAFDQRMKTWQRWQDAQATLQKKREAEARLLWANKPDKLQQAKDEILEWESRVTQYERDFERISTVVRKEVIRFEKEKSKDFKNHVIKYLETLLYSQQQLAKYWEAFLPEAKAIS

SEQ ID NO: 64962 - protein, 457 aa, Homo sapiens; identical to SEQ ID NO: 64961

SEQ ID NO: 64963 - protein, 1005 aa, Homo sapiens
MAARPSRATGPRGGQRSRVKPPPGRRLKEQLPPLAAARAVFAAATAVIMLTEASLSIWGWGSLGIVLFLITFGPFVIFYLTFYILCFVGGGLVVTLLFGKTNSEKYLEQCEHSFLPPTSPGVPKCLEEMKREARTIKIDRRLTGANIIDEPLQQVIQFSLRDYVQYWYYTLSDDESFLLEIRQTLQNALIQFATRSKEIDWQPYFTTRIVDDFGTHLRVFRKAQQKITEKDDQVKGTAEDLVDTFFEVEVEMEKEVCRDLVCTSPKDEEGFLRDLCEVLLYLLLPPGDFQNKIMRYFVREILARGILLPLINQLSDPDYINQYVIWMIRDSNCNYEAFMNIIKLSDNIGELEAVRDKAAEELQYLRSLDTAGDDINTIKNQINSLLFVKKVCDSRIQRLQSGKEINTVKLAANFGKLCTVPLDSILVDNVALQFFMDYMQQTGGQAHLFFWMTVEGYRVTAQQQLEVLLSRQRDGKHQTNQTKGLLRAAAVGIYEQYLSEKASPRVTVDDYLVAKLADTLNHEDPTPEIFDDIQRKVYELMLRDERFYPSFRQNALYVRMLAELDMLKDPSFRGSDDGDGESFNGSPTGSINLSLDDLSNVSSDDSVQLHAYISDTGVCNDHGKTYALYAITVHRRNLNSEEMWKTYRRYSDFHDFHMRITEQFESLSSILKLPGKKTFNNMDRDFLEKRKKDLNAYLQLLLAPEMMKASPALAHYVYDFLENKAYSKGKGDFARKMDTFVNPLRNSMRNVSNAVKSLPDSLAEGMTKMSDNMGKMSERLGQDIKQSFFKVPPLIPKTDSDPEHRRVSAQLDDNVDDNIPLRVMLLLMDEVFDLKERNQWLRRNIKNLLQQLIRATYGDTINRKIVDHVDWMTSPEQVADSVKRFRDAFWPNGILAEAVPCRDKSIRMRTRVAGKTKLLAIMPDELKHIIGAETTRKGILRVFEMFQHNQLNRRMVYVFLEGFLETLFPQYKFRELFNKLHSRSKQMQKYKQKLQTTQAPSLQKR

SEQ ID NO: 64964 - protein, 957 aa, Homo sapiens
MLTEASLSIWGWGSLGIVLFLITFGPFVIFYLTFYILCFVGGGLVVTLLFGKTNSEKYLEQCEHSFLPPTSPGVPKCLEEMKREARTIKIDRRLTGANIIDEPLQQVIQFSLRDYVQYWYYTLSDDESFLLEIRQTLQNALIQFATRSKEIDWQPYFTTRIVDDFGTHLRVFRKAQQKITEKDDQVKGTAEDLVDTFFEVEVEMEKEVCRDLVCTSPKDEEGFLRDLCEVLLYLLLPPGDFQNKIMRYFVREILARGILLPLINQLSDPDYINQYVIWMIRDSNCNYEAFMNIIKLSDNIGELEAVRDKAAEELQYLRSLDTAGDDINTIKNQINSLLFVKKVCDSRIQRLQSGKEINTVKLAANFGKLCTVPLDSILVDNVALQFFMDYMQQTGGQAHLFFWMTVEGYRVTAQQQLEVLLSRQRDGKHQTNQTKGLLRAAAVGIYEQYLSEKASPRVTVDDYLVAKLADTLNHEDPTPEIFDDIQRKVYELMLRDERFYPSFRQNALYVRMLAELDMLKDPSFRGSDDGDGESFNGSPTGSINLSLDDLSNVSSDDSVQLHAYISDTGVCNDHGKTYALYAITVHRRNLNSEEMWKTYRRYSDFHDFHMRITEQFESLSSILKLPGKKTFNNMDRDFLEKRKKDLNAYLQLLLAPEMMKASPALAHYVYDFLENKAYSKGKGDFARKMDTFVNPLRNSMRNVSNAVKSLPDSLAEGMTKMSDNMGKMSERLGQDIKQSFFKVPPLIPKTDSDPEHRRVSAQLDDNVDDNIPLRVMLLLMDEVFDLKERNQWLRRNIKNLLQQLIRATYGDTINRKIVDHVDWMTSPEQVADSVKRFRDAFWPNGILAEAVPCRDKSIRMRTRVAGKTKLLAIMPDELKHIIGAETTRKGILRVFEMFQHNQLNRRMVYVFLEGFLETLFPQYKFRELFNKLHSRSKQMQKYKQKLQTTQAPSLQKR

SEQ ID NO: 64965 - protein, 256 aa, Homo sapiens
MSRQAKDDFLRHYTVSDPRTHPKGYTEYKVTAQFISKKDPEDVKEVVVWKRYSDFRKLHGDLAYTHRNLFRRLEEFPAFPRAQVFGRFEASVIEERRKGAEDLLRFTVHIPALNNSPQLKEFFRGGEVTRPLEVSRDLHILPPPLIPTPPPDDPRLSQLLPAERRGLEELEVPVDPPPSSPAQEALDLLFNCESTEEASGSPARGPLTEAELALFDPFSKEGDPLPARQEGVKKKAAEYLKRAEEILRLHLSQLPP

SEQ ID NO: 64966 - protein, 342 aa, Homo sapiens
MSRQAKDDFLRHYTVSDPRTHPKGYTEYKVTAQFISKKDPEDVKEVVVWKRYSDFRKLHGDLAYTHRNLFRRLEEFPAFPRAQVFGRFEASVIEERRKGAEDLLRFTVHIPALNNSPQLKEFFRGGEVTRPLEVSRDLHILPPPLIPTPPPDDPRLSQLLPAERRGLEELEVPVDPPPSSPAQEALDLLFNCESTEEASGSPARGPLTEAELALFDPFSKEEGAAPSPTHVAELATMEVESARLDQEPWEPGGQEEEEDGEGGPTPAYLSQATELITQALRDEKAGAYAAALQGYRDGVHVLLQGVPSDPLPARQEGVKKKAAEYLKRAEEILRLHLSQLPP

SEQ ID NO: 64967 - protein, 470 aa, Homo sapiens
MHFSIPETESRSGDSGGSAYVAYNIHVNGVLHCRVRYSQLLGLHEQLRKEYGANVLPAFPPKKLFSLTPAEVEQRREQLEKYMQAVRQDPLLGSSETFNSFLRRAQQETQQVPTEEVSLEVLLSNGQKVLVNVLTSDQTEDVLEAVAAKLDLPDDLIGYFSLFLVREKEDGAFSFVRKLQEFELPYVSVTSLRSQEYKIVLRKSYWDSAYDDDVMENRVGLNLLYAQTVSDIERGWILVTKEQHRQLKSLQEKVSKKEFLRLAQTLRHYGYLRFDACVADFPEKDCPVVVSAGNSELSLQLRLPGQQLREGSFRVTRMRCWRVTSSVPLPSGSTSSPGRGRGEVRLELAFEYLMSKDRLQWVTITSPQAIMMSICLQSMVDELMVKKSGGSIRKMLRRRVGGTLRRSDSQQAVKSPPLLESPDATRESMVKLSSKLSAVSLRGIGSPSTDASASDVHGNFAFEGIGDEDL

SEQ ID NO: 64968 - protein, 445 aa, Homo sapiens
MHFSIPETESRSGDSGGSAYVLRKEYGANVLPAFPPKKLFSLTPAEVEQRREQLEKYMQAVRQDPLLGSSETFNSFLRRAQQETQQVPTEEVSLEVLLSNGQKVLVNVLTSDQTEDVLEAVAAKLDLPDDLIGYFSLFLVREKEDGAFSFVRKLQEFELPYVSVTSLRSQEYKIVLRKSYWDSAYDDDVMENRVGLNLLYAQTVSDIERGWILVTKEQHRQLKSLQEKVSKKEFLRLAQTLRHYGYLRFDACVADFPEKDCPVVVSAGNSELSLQLRLPGQQLREGSFRVTRMRCWRVTSSVPLPSGSTSSPGRGRGEVRLELAFEYLMSKDRLQWVTITSPQAIMMSICLQSMVDELMVKKSGGSIRKMLRRRVGGTLRRSDSQQAVKSPPLLESPDATRESMVKLSSKLSAVSLRGIGSPSTDASASDVHGNFAFEGIGDEDL

SEQ ID NO: 64969 - protein, 256 aa, Homo sapiens
MENRVGLNLLYAQTVSDIERGWILVTKEQHRQLKSLQEKVSKKEFLRLAQTLRHYGYLRFDACVADFPEKDCPVVVSAGNSELSLQLRLPGQQLREGSFRVTRMRCWRVTSSVPLPSGSTSSPGRGRGEVRLELAFEYLMSKDRLQWVTITSPQAIMMSICLQSMVDELMVKKSGGSIRKMLRRRVGGTLRRSDSQQAVKSPPLLESPDATRESMVKLSSKLSAVSLRGIGSPSTDASASDVHGNFAFEGIGDEDL

SEQ ID NO: 64970 - protein, 256 aa, Homo sapiens; identical to SEQ ID NO: 64969

SEQ ID NO: 64971 - protein, 519 aa, Homo sapiens
MAAEREPPPLGDGKPTDFEDLEDGEDLFTSTVSTLESSPSSPEPASLPAEDISANSNGPKPTEVVLDDDREDLFAEATEEVSLDSPEREPILSSEPSPAVTPVTPTTLIAPRIESKSMSAPVIFDRSREEIEEEANGDIFDIEIGVSDPEKVGDGMNAYMAYRVTTKTSLSMFSKSEFSVKRRFSDFLGLHSKLASKYLHVGYIVPPAPEKSIVGMTKVKVGKEDSSSTEFVEKRRAALERYLQRTVKHPTLLQDPDLRQFLESSELPRAVNTQALSGAGILRMVNKAADAVNKMTIKMNESDAWFEEKQQQFENLDQQLRKLHVSVEALVCHRKELSANTAAFAKSAAMLGNSEDHTALSRALSQLAEVEEKIDQLHQEQAFADFYMFSELLSDYIRLIAAVKGVFDHRMKCWQKWEDAQITLLKKREAEAKMMVANKPDKIQQAKNEIREWEAKVQQGERDFEQISKTIRKEVGRFEKERVKDFKTVIIKYLESLVQTQQQLIKYWEAFLPEAKAIA

SEQ ID NO: 64972 - protein, 129 aa, Homo sapiens
MASPEHPGSPGCMGPITQCTARTQQEAPATGPDLPHPGPDGHLDTHSGLSSNSSMTTRELQQYWQNQKCRWKHVKLLFEIASARIEERKVSKFVMGKSRPGEMTYPGSRGETGTAPEPDPRCPRQSDML

SEQ ID NO: 64973 - protein, 316 aa, Homo sapiens
MASPEHPGSPGCMGPITQCTARTQQEAPATGPDLPHPGPDGHLDTHSGLSSNSSMTTRELQQYWQNQKCRWKHVKLLFEIASARIEERKVSKFVVYQIIVIQTGSFDNNKAVLERRYSDFAKLQKALLKTFREEIEDVEFPRKHLTGNFAEEMICERRRALQEYLGLLYAIRCVRRSREFLDFLTRPELREAFGCLRAGQYPRALELLLRVLPLQEKLTAHCPAAAVPALCAVLLCHRDLDRPAEAFAAGERALQRLQAREGHRYYAPLLDAMVRLAYALGKDFVTLQERLEESQLRRPTPRGITLKELTVREYLH

SEQ ID NO: 64974 - protein, 152 aa, Homo sapiens
MASPEHPGSPGCMGPITQCTARTQQEAPATGPDLPHPGPDGHLDTHSGLSSNSSMTTRELQQYWQNQKCRWKHVKLLFEIASARIEERKVSKFVVYQIIVIQTGSFDNNKAVLERRYSDFVTLQERLEESQLRRPTPRGITLKELTVREYLH

SEQ ID NO: 64975 - protein, 102 aa, Homo sapiens
MASPEHPGSPGCMGPITQCTARTQQEAPATGPDLPHPGPDGHLDTHSGLSSNSSMTTRELQQYWQNQKCRWKHVKLLFEIASARIEERKVSKFVAPAPDATP

SEQ ID NO: 64976 - protein, 162 aa, Homo sapiens
MAETVADTRRLITKPQNLNDAYGPPSNFLEIDVSNPQTVGVGRGRFTTYEIRVKTNLPIFKLKESTVRRRYSDFEWLRSELERESKVVVPPLPGKAFLRQLPFRGDDGIFDDNFIEERKQGLEQFINKVAGHPLAQNERCLHMFLQDEIIDKSYTPSKIRHA

SEQ ID NO: 64977 - protein, 140 aa, Homo sapiens
MAETVADTRRLITKPQNLNDAYGPPSNFLEIDTNLPIFKLKESTVRRRYSDFEWLRSELERESKVVVPPLPGKAFLRQLPFRGDDGIFDDNFIEERKQGLEQFINKVAGHPLAQNERCLHMFLQDEIIDKSYTPSKIRHA

SEQ ID NO: 64978 - protein, 113 aa, Homo sapiens
MAETVADTRRLITKPQNLNDAYGPPSNFLEIDVSNPQTVGVGRGRFTTYEIRVKTNLPIFKLKESTVRRRYSDFEWLRSELERESKPCLRMTSEARSHGRTWCAQNDEKLFCD

SEQ ID NO: 64979 - protein, 130 aa, Homo sapiens
MAETVADTRRLITKPQNLNDAYGPPSNFLEIDVSNPQTVGVGRGRFTTYEIRVKVVVPPLPGKAFLRQLPFRGDDGIFDDNFIEERKQGLEQFINKVAGHPLAQNERCLHMFLQDEIIDKSYTPSKIRHA

SEQ ID NO: 64980 - protein, 450 aa, Homo sapiens
MEQAPPDPERQLQPAPLEPLGSPDAGLGAAVGKEAEGAGEESSGVDTMTHNNFWLKKIEISVSEAEKRTGRNAMNMQETYTAYLIETRSVEHTDGQSVLTDSLWRRYSEFELLRSYLLVYYPHIVVPPLPEKRAEFVWHKLSADNMDPDFVERRRIGLENFLLRIASHPILCRDKIFYLFLTQEGNWKETVNETGFQLKADSRLKALNATFRVKNPDKRFTDLKHYSDELQSVISHLLRVRARVADRLYGVYKVHGNYGRVFSEWSAIEKEMGDGLQSAGHHMDVYASSIDDILEDEEHYADQLKEYLFYAEALRAVCRKHELMQYDLEMAAQDLASKKQQCEELVTGTVRTFSLKGMTTKLFGQETPEQREARIKVLEEQINEGEQQLKSKNLEGREFVKNAWADIERFKEQKNRDLKEALISYAVMQISMCKKGIQVWTNAKECFSKM

SEQ ID NO: 64981 - protein, 305 aa, Homo sapiens
MDPDFVERRRIGLENFLLRIASHPILCRDKIFYLFLTQEGNWKETVNETGFQLKADSRLKALNATFRVKNPDKRFTDLKHYSDELQSVISHLLRVRARVADRLYGVYKVHGNYGRVFSEWSAIEKEMGDGLQSAGHHMDVYASSIDDILEDEEHYADQLKEYLFYAEALRAVCRKHELMQYDLEMAAQDLASKKQQCEELVTGTVRTFSLKGMTTKLFGQETPEQREARIKVLEEQINEGEQQLKSKNLEGREFVKNAWADIERFKEQKNRDLKEALISYAVMQISMCKKGIQVWTNAKECFSKM

SEQ ID NO: 64982 - protein, 404 aa, Homo sapiens
MAAVPELLQQQEEDRSKLRSVSVDLNVDPSLQIDIPDALSERDKVKFTVHTKTTLPTFQSPEFSVTRQHEDFVWLHDTLIETTDYAGLIIPPAPTKPDFDGPREKMQKLGEGEGSMTKEEFAKMKQELEAEYLAVFKKTVSSHEVFLQRLSSHPVLSKDRNFHVFLEYDQDLSVRRKNTKEMFGGFFKSVVKSADEVLFTGVKEVDDFFEQEKNFLINYYNRIKDSCVKADKMTRSHKNVADDYIHTAACLHSLALEEPTVIKKYLLKVAELFEKLRKVEGRVSSDEDLKLTELLRYYMLNIEAAKDLLYRRTKALIDYENSNKALDKARLKSKDVKLAEAHQQECCQKFEQLSESAKEELINFKRKRVAAFRKNLIEMSELEIKHARNNVSLLQSCIDLFKNN

SEQ ID NO: 64983 - protein, 404 aa, Homo sapiens; identical to SEQ ID NO: 64982

SEQ ID NO: 64984 - protein, 228 aa, Homo sapiens
MAAVPELLQQQEEDRSKTTLPTFQSPEFSVTRQHEDFVWLHDTLIETTDYAGLIIPPAPTKPDFDGPREKMQKLGEGEGSMTKEEFAKMKQELEAEYLAVFKKTVSSHEVFLQRLSSHPVLSKDRNFHVFLEYDQDLSVRRKNTKEMFGGFFKSVVKSADEVLFTGVKEVDDFFEQEKNFLINYYNRIKDSCVKADKMTRSHKNVADDYIHTAACLHSLALEEPTVIK

SEQ ID NO: 64985 - protein, 269 aa, Homo sapiens
MAAVPELLQQQEEDRSKLRSVSVDLNVDPSLQIDIPDALSERDKVKFTVHTKIPPAPTKPDFDGPREKMQKLGEGEGSMTKEEFAKMKQELEAEYLAVFKKTVSSHEVFLQRLSSHPVLSKDRNFHVFLEYDQDLSVRRKNTKEMFGGFFKSVVKSADEVLFTGVKEVDDFFEQEKNFLINYYNRIKDSCVKADKMTRSHKNVADDYIHTAACLHSLALEEPTVIKKYLLKVAELFEKLRKVEGRVSSDEDLKLTELLRYYMLNIEAAK

SEQ ID NO: 64986 - protein, 294 aa, Homo sapiens
MTTLTEIKLLPSLVLLVCCEYLAIFKKTVAMHEVFLCRVAAHPILRRDLNFHVFLEYNQDLSVRGKNKKEKLEDFFKNMVKSADGVIVSGVKDVDDFFEHERTFLLEYHNRVKDASAKSDRMTRSHKSAADDYNRIGSSLYALGTQDSTDICKFFLKVSELFDKTRKIEARVSADEDLKLSDLLKYYLRESQAAKDLLYRRSRSLVDYENANKALDKARAKNKDVLQAETSQQLCCQKFEKISESAKQELIDFKTRRVAAFRKNLVELAELELKHAKGNLQLLQNCLAVLNGDT

SEQ ID NO: 64987 - protein, 418 aa, Homo sapiens
MRACAGPRLGAAMMEGLDDGPDFLSEEDRGLKAINVDLQSDAALQVDISDALSERDKVKFTVHTKSSLPNFKQNEFSVVRQHEEFIWLHDSFVENEDYAGYIIPPAPPRPDFDASREKLQKLGEGEGSMTKEEFTKMKQELEAEYLAIFKKTVAMHEVFLCRVAAHPILRRDLNFHVFLEYNQDLSVRGKNKKEKLEDFFKNMVKSADGVIVSGVKDVDDFFEHERTFLLEYHNRVKDASAKSDRMTRSHKSAADDYNRIGSSLYALGTQDSTDICKFFLKVSELFDKTRKIEARVSADEDLKLSDLLKYYLRESQAAKDLLYRRSRSLVDYENANKALDKARAKNKDVLQAETSQQLCCQKFEKISESAKQELIDFKTRRVAAFRKNLVELAELELKHAKGNLQLLQNCLAVLNGDT

SEQ ID NO: 64988 - protein, 290 aa, Homo sapiens
MTKEEFTKMKQELEAEYLAIFKKTVAMHEVFLCRVAAHPILRRDLNFHVFLEYNQDLSVRGKNKKEKLEDFFKNMVKSADGVIVSGVKDVDDFFEHERTFLLEYHNRVKDASAKSDRMTRSHKSAADDYNRIGSSLYALGTQDSTDICKFFLKVSELFDKTRKIEARVSADEDLKLSDLLKYYLRESQAAKDLLYRRSRSLVDYENANKALDKARAKNKDVLQAETSQQLCCQKFEKISESAKQELIDFKTRRVAAFRKNLVELAELELKHAKGNLQLLQNCLAVLNGDT

SEQ ID NO: 64989 - protein, 290 aa, Homo sapiens; identical to SEQ ID NO: 64988

SEQ ID NO: 64990 - protein, 395 aa, Homo sapiens
MKIPLNKFPGFAKPGTEQYLLAKQLAKPKEKIPIIVGDYGPMWVYPTSTFDCVVADPRKGSKMYGLKSYIEYQLTPTNTNRSVNHRYKHFDWLYERLLVKFGSAIPIPSLPDKQVTGRFEEEFIKMRMERLQAWMTRMCRHPVISESEVFQQFLNFRDEKEWKTGKRKAERDELAGVMIFSTMEPEAPDLDLVEIEQKCEAVGKFTKAMDDGVKELLTVGQEHWKRCTGPLPKEYQKIGKALQSLATVFSSSGYQGETDLNDAITEAGKTYEEIASLVAEQPKKDLHFLMECNHEYKGFLGCFPDIIGTHKGAIEKVKESDKLVATSKITLQDKQNMVKRVSIMSYALQAEMNHFHSNRIYDYNSVIRLYLEQQVQFYETIAEKLRQALSRFPVM

SEQ ID NO: 64991 - protein, 595 aa, Homo sapiens
MATKARVMYDFAAEPGNNELTVNEGEIITITNPDVGGGWLEGRNIKGERGLVPTDYVEILPSDGKDQFSCGNSVADQAFLDSLSASTAQASSSAASNNHQVGSGNDPWSAWSASKSGNWESSEGWGAQPEGAGAQRNTNTPNNWDTAFGHPQAYQGPATGDDDDWDEDWDGPKSSSYFKDSESADAGGAQRGNSRASSSSMKIPLNKFPGFAKPGTEQYLLAKQLAKPKEKIPIIVGDYGPMWVYPTSTFDCVVADPRKGSKMYGLKSYIEYQLTPTNTNRSVNHRYKHFDWLYERLLVKFGSAIPIPSLPDKQVTGRFEEEFIKMRMERLQAWMTRMCRHPVISESEVFQQFLNFRDEKEWKTGKRKAERDELAGVMIFSTMEPEAPDLDLVEIEQKCEAVGKFTKAMDDGVKELLTVGQEHWKRCTGPLPKEYQKIGKALQSLATVFSSSGYQGETDLNDAITEAGKTYEEIASLVAEQPKKDLHFLMECNHEYKGFLGCFPDIIGTHKGAIEKVKESDKLVATSKITLQDKQNMVKRVSIMSYALQAEMNHFHSNRIYDYNSVIRLYLEQQVQFYETIAEKLRQALSRFPVM

SEQ ID NO: 64992 - protein, 595 aa, Homo sapiens; identical to SEQ ID NO: 64991

SEQ ID NO: 64993 - protein, 435 aa, Homo sapiens
MGLSFSLFPLRNHVNVEGATHKQVVDLIRAGEKELILTVLSVPPHEADNLDPSDDSLGQSFYDYTEKQAVPISVPRYKHVEQNGEKFVVYNVYMAGRQLCSKRYREFAILHQNLKREFANFTFPRLPGKWPFSLSEQQLDARRRGLEEYLEKVCSIRVIGESDIMQEFLSESDENYNGVSDVELRVALPDGTTVTVRVKKNSTTDQVYQAIAAKVGMDSTTVNYFALFEVISHSFVRKLAPNEFPHKLYIQNYTSAVPGTCLTIRKWLFTTEEEILLNDNDLAVTYFFHQAVDDVKKGYIKAEEKSYQLQKLYEQRKMVMYLNMLRTCEGYNEIIFPHCACDSRRKGHVITAISITHFKLHACTEEGQLENQVIAFEWDEMQRWDTDEEGMAFCFEYARGEKKPRWVKIFTPYFNYMHECFERVFCELKWRKEEY

SEQ ID NO: 64994 - protein, 528 aa, Homo sapiens
MADEDGEGIHPSAPHRNGGGGGGGGSGLHCAGNGGGGGGGPRVVRIVKSESGYGFNVRGQVSEGGQLRSINGELYAPLQHVSAVLPGGAADRAGVRKGDRILEVNHVNVEGATHKQVVDLIRAGEKELILTVLSVPPHEADNLDPSDDSLGQSFYDYTEKQAVPISVPRYKHVEQNGEKFVVYNVYMAGRQLCSKRYREFAILHQNLKREFANFTFPRLPGKWPFSLSEQQLDARRRGLEEYLEKVCSIRVIGESDIMQEFLSESDENYNGVSDVELRVALPDGTTVTVRVKKNSTTDQVYQAIAAKVGMDSTTVNYFALFEVISHSFVRKLAPNEFPHKLYIQNYTSAVPGTCLTIRKWLFTTEEEILLNDNDLAVTYFFHQAVDDVKKGYIKAEEKSYQLQKLYEQRKMVMYLNMLRTCEGYNEIIFPHCACDSRRKGHVITAISITHFKLHACTEEGQLENQVIAFEWDEMQRWDTDEEGMAFCFEYARGEKKPRWVKIFTPYFNYMHECFERVFCELKWRKEEY

SEQ ID NO: 64995 - protein, 541 aa, Homo sapiens
MADEDGEGIHPSAPHRNGGGGGGGGSGLHCAGNGGGGGGGPRVVRIVKSESGYGFNVRGQVSEGGQLRSINGELYAPLQHVSAVLPGGAADRAGVRKGDRILEVNHVNVEGATHKQVVDLIRAGEKELILTVLSVPPHEADNLDPSDDSLGQSFYDYTEKQAVPISVPRYKHVEQNGEKFVVYNVYMAGRQLCSKRYREFAILHQNLKREFANFTFPRLPGKWPFSLSEQQLDARRRGLEEYLEKVCSIRVIGESDIMQEFLSESDENYNGVSDVELRVALPDGTTVTVRVKKNSTTDQVYQAIAAKVGMDSTTVNYFALFEVISHSFVRKLAPNEFPHKLYIQNYTSAVPGTCLTIRKWLFTTEEEILLNDNDLAVTYFFHQAVDDVKKGYIKAEEKSYQLQKLYEQRKMVMYLNMLRTCEGYNEIIFPHCACDSRRKGHVITAISITHFKLHACTEEGQLENQVIAFEWDEMQRWDTDEEGMAFCFEYARGEKKPRWVKIFTPYFNYMHECFERVFCELKWRKENIFQMARSQQRDVAT

SEQ ID NO: 64996 - protein, 879 aa, Homo sapiens
MAGGGGDLSTRRLNECISPVANEMNHLPAHSHDLQRMFTEDQGVDDRLLYDIVFKHFKRNKVEISNAIKKTFPFLEGLRDRDLITNKMFEDSQDSCRNLVPVQRVVYNVLSELEKTFNLPVLEALFSDVNMQEYPDLIHIYKGFENVIHDKLPLQESEEEEREERSGLQLSLEQGTGENSFRSLTWPPSGSPSHAGTTPPENGLSEHPCETEQINAKRKDTTSDKDDSLGSQQTNEQCAQKAEPTESCEQIAVQVNNGDAGREMPCPLPCDEESPEAELHNHGIQINSCSVRLVDIKKEKPFSNSKVECQAQARTHHNQASDIIVISSEDSEGSTDVDEPLEVFISAPRSEPVINNDNPLESNDEKEGQEATCSRPQIVPEPMDFRKLSTFRESFKKRVIGQDHDFSESSEEEAPAEASSGALRSKHGEKAPMTSRSTSTWRIPSRKRRFSSSDFSDLSNGEELQETCSSSLRRGSGSQPQEPENKKCSCVMCFPKGVPRSQEARTESSQASDMMDTMDVENNSTLEKHSGKRRKKRRHRSKVNGLQRGRKKDRPRKHLTLNNKVQKKRWQQRGRKANTRPLKRRRKRGPRIPKDENINFKQSELPVTCGEVKGTLYKERFKQGTSKKCIQSEDKKWFTPREFEIEGDRGASKNWKLSIRCGGYTLKVLMENKFLPEPPSTRKKRILESHNNTLVDPCEEHKKKNPDASVKFSEFLKKCSETWKTIFAKEKGKFEDMAKADKAHYEREMKTYIPPKGEKKKKFKDPNAPKRPPLAFFLFCSEYRPKIKGEHPGLSIDDVVKKLAGMWNNTAAADKQFYEKKAAKLKEKYKKDIAAYRAKGKPNSAKKRVVKAEKSKKKKEEEEDEEDEQEEENEEDDDK

SEQ ID NO: 64997 - protein, 885 aa, Homo sapiens
MAGGGGDLSTRRLNECISPVANEMNHLPAHSHDLQRMFTEDQGVDDRLLYDIVFKHFKRNKVEISNAIKKTFPFLEGLRDRDLITNKMFEDSQDSCRNLVPVQRVVYNVLSELEKTFNLPVLEALFSDVNMQEYPDLIHIYKGFENVIHDKLPLQESEEEEREERSGLQLSLEQGTGENSFRSLTWPPSGSPSHAGTTPPENGLSEHPCETEQINAKRKDTTSDKDDSLGSQQTNEQCAQKAEPTESCEQIAVQVNNGDAGREMPCPLPCDEESPEAELHNHGIQINSCSVRLVDIKKEKPFSNSKVECQAQARTHHNQASDIIVISSEDSEGSTDVDEPLEVFISAPRSEPVINNDNPLESNDEKEGQEATCSRPQIVPEPMDFRKLSTFRESFKKRVIGQDHDFSESSEEEAPAEASSGALRSKHGEKAPMTSRSTSTWRIPSRKRRFSSSDFSDLSNGEELQETCSSSLRRGSGSQPQEPENKKCSCVMCFPKGVPRSQEARTESSQASDMMDTMDVENNSTLEKHSGKRRKKRRHRSKVNGLQRGRKKDRPRKHLTLNNKVQKKRWQQRGRKANTRPLKRRRKRGPRIPKDENINFKQSELPVTCGEVKGTLYKERFKQGTSKKCIQSEDKKWFTPREFEIEGDRGASKNWKLSIRCGGYTLKVLMENKFLPEPPSTRKKRILESHNNTLVDPCPENSNICEVCNKWGRLFCCDTCPRSFHEHCHIPSVEANKNPWSCIFCRIKTIQERCPESQSGHQESEVLMRQMLPEEQLKCEFLLLKVYCDSKSCFFASEPYYNREGSQGPQKPMWLNKVKTSLNEQMYTRVEGFVQDMRLIFHNHKEFYREDKFTRLGIQVQDIFEKNFRNIFAIQETSKNIIMFI

SEQ ID NO: 64998 - protein, 473 aa, Homo sapiens
MAGGGGDLSTRRLNECISPVANEMNHLPAHSHDLQRMFTEDQGVDDRLLYDIVFKHFKRNKVEISNAIKKTFPFLEGLRDRDLITNKMFEDSQDSCRNLVPVQRVVYNVLSELEKTFNLPVLEALFSDVNMQEYPDLIHIYKGFENVIHDKLPLQESEEEEREERSGLQLSLEQGTGENSFRSLTWPPSGSPSHAGTTPPENGLSEHPCETEQINAKRKDTTSDKDDSLGSQQTNEQCAQKAEPTESCEQIAVQVNNGDAGREMPCPLPCDEESPEAELHNHGIQINSCSVRLVDIKKEKPFSNSKVECQAQARTHHNQASDIIVISSEDSEGSTDVDEPLEVFISAPRSEPVINNDNPLESNDEKEGQEATCSRPQIVPEPMDFRKLSTFRESFKKRVIGQDHDFSESSEEEAPAEASSGALRSKHGEKAPMTSRSTSTWRIPSRKRQLKKKKKKKQCHPQPQPQRGLLEQS

SEQ ID NO: 64999 - protein, 688 aa, Homo sapiens
MAGGGGDLSTRRLNECISPVANEMNHLPAHSHDLQRMFTEDQGVDDRLLYDIVFKHFKRNKVEISNAIKKTFPFLEGLRDRDLITNKMFEDSQDSCRNLVPVQRVVYNVLSELEKTFNLPVLEALFSDVNMQEYPDLIHIYKGFENVIHDKLPLQESEEEEREERSGLQLSLEQGTGENSFRSLTWPPSGSPSHAGTTPPENGLSEHPCETEQINAKRKDTTSDKDDSLGSQQTNEQCAQKAEPTESCEQIAVQVNNGDAGREMPCPLPCDEESPEAELHNHGIQINSCSVRLVDIKKEKPFSNSKVECQAQARTHHNQASDIIVISSEDSEGSTDVDEPLEVFISAPRSEPVINNDNPLESNDEKEGQEATCSRPQIVPEPMDFRKLSTFRESFKKRVIGQDHDFSESSEEEAPAEASSGALRSKHGEKAPMTSRSTSTWRIPSRKRRFSSSDFSDLSNGEELQETCSSSLRRGSGSQPQEPENKKCSCVMCFPKGVPRSQEARTESSQASDMMDTMDVENNSTLEKHSGKRRKKRRHRSKVNGLQRGRKKDRPRKHLTLNNKVQKKRWQQRGRKANTRPLKRRRKRGPRIPKDENINFKQSELPVTCGEVKGTLYKERFKQGTSKKCIQSEDKKWFTPREFEIEGDRGASKNWKLSIRCGGYTLKVLMENKFLPEPPSTRKKVMIK

SEQ ID NO: 65000 - protein, 480 aa, Homo sapiens
MAGGGGDLSTRRLNECISPVANEMNHLPAHSHDLQRMFTEDQGVDDRLLYDIVFKHFKRNKVEISNAIKKTFPFLEGLRDRDLITNKMFEDSQDSCRNLVPVQRVVYNVLSELEKTFNLPVLEALFSDVNMQEYPDLIHIYKGFENVIHDKLPLQESEEEEREERSGLQLSLEQGTGENSFRSLTWPPSGSPSHAGTTPPENGLSEHPCETEQINAKRKDTTSDKDDSLGSQQTNEQCAQKAEPTESCEQIAVQVNNGDAGREMPCPLPCDEESPEAELHNHGIQINSCSVRLVDIKKEKPFSNSKVECQAQARTHHNQASDIIVISSEDSEGSTDVDEPLEVFISAPRSEPVINNDNPLESNDEKEGQEATCSRPQIVPEPMDFRKLSTFRESFKKRVIGQDHDFSESSEEEAPAEASSGALRSKHGEKAPMTSRSTSTWRIPSRKRRFSSSDFSDLSNGEELQETCSSSLRRGSGKED

SEQ ID NO: 65001 - protein, 355 aa, Homo sapiens
MDVENNSTLEKHSGKRRKKRRHRSKVNGLQRGRKKDRPRKHLTLNNKVQKKRWQQRGRKANTRPLKRRRKRGPRIPKDENINFKQSELPVTCGEVKGTLYKERFKQGTSKKCIQSEDKKWFTPREFEIEGDRGASKNWKLSIRCGGYTLKVLMERILESHNNTLVDPCPENSNICEVCNKWGRLFCCDTCPRSFHEHCHIPSVEANKNPWSCIFCRIKTIQERCPESQSGHQESEVLMRQMLPEEQLKCEFLLLKVYCDSKSCFFASEPYYNREGSQGPQKPMWLNKVKTSLNEQMYTRVEGFVQDMRLIFHNHKEFYREDKFTRLGIQVQDIFEKNFRNIFAIQETSKNIIMFI

SEQ ID NO: 65002 - protein, 452 aa, Homo sapiens
MAGGGGDLSTRMFTEDQGVDDRLLYDIVFKHFKRNKVEISNAIKKTFPFLEGLRDRDLITNKMFEDSQDSCRNLVPVQRVVYNVLSELEKTFNLPVLEALFSDVNMQEYPDLIHIYKGFENVIHDKLPLQESEEEEREERSGLQLSLEQGTGENSFRSLTWPPSGSPSHAGTTPPENGLSEHPCETEQINAKRKDTTSDKDDSLGSQQTNEQCAQKAEPTESCEQIAVQVNNGDAGREMPCPLPCDEESPEAELHNHGIQINSCSVRLVDIKKEKPFSNSKVECQAQARTHHNQASDIIVISSEDSEGSTDVDEPLEVFISAPRSEPVINNDNPLESNDEKEGQEATCSRPQIVPEPMDFRKLSTFRESFKKRVIGQDHDFSESSEEEAPAEASSGALRSKHAPMTSRSTSTWRIPSRKRRFSSSDFSDLSNGEELQETCSSSLRRGSGKED

SEQ ID NO: 65003 - protein, 445 aa, Homo sapiens
MMFTEDQGVDDRLLYDIVFKHFKRNKVEISNAIKKTFPFLEGLRDRDLITNKMFEDSQDSCRNLVPVQRVVYNVLSELEKTFNLPVLEALFSDVNMQEYPDLIHIYKGFENVIHDKLPLQESEEEEREERSGLQLSLEQGTGENSFRSLTWPPSGSPSHAGTTPPENGLSEHPCETEQINAKRKDTTSDKDDSLGSQQTNEQCAQKAEPTESCEQIAVQVNNGDAGREMPCPLPCDEESPEAELHNHGIQINSCSVRLVDIKKEKPFSNSKVECQAQARTHHNQASDIIVISSEDSEGSTDVDEPLEVFISAPRSEPVINNDNPLESNDEKEGQEATCSRPQIVPEPMDFRKLSTFRESFKKRVIGQDHDFSESSEEEAPAEASSGALRSKHGEKAPMTSRSTSTWRIPSRKRRFSSSDFSDLSNGEELQETCSSSLRRGSGKED

SEQ ID NO: 65004 - protein, 713 aa, Homo sapiens
MFTMTRAMEEALFQHFMHQKLGIAYAIHKPFPFFEGLLDNSIITKRMYMESLEACRNLIPVSRVVHNILTQLERTFNLSLLVTLFSQINLREYPNLVTIYRSFKRVGASYEWQSRDTPILLEAPTGLAEGSSLHTPLALPPPQPPQPSCSPCAPRVSEPGTSSQQSDEILSESPSPSDPVLPLPALIQEGRSTSVTNDKLTSKMNAEEDSEEMPSLLTSTVQVASDNLIPQIRDKEDPQEMPHSPLGSMPEIRDNSPEPNDPEEPQEVSSTPSDKKGKKRKRCIWSTPKRRHKKKSLPGGTASSRHGIQKKLKRVDQVPQKKDDSTCNSTVETRAQKARTECARKSRSEEIIDGTSEMNEGKRSQKTPSTPRRVTQGAASPGHGIQEKLQVVDKVTQRKDDSTWNSEVMMRVQKARTKCARKSRLKEKKKEKDICSSSKRRFQKNIHRRGKPKSDTVDFHCSKLPVTCGEAKGILYKKKMKHGSSVKCIRNEDGTWLTPNEFEVEGKGRNAKNWKRNIRCEGMTLGELLKRKNSDECEVCCQGGQLLCCGTCPRVFHEDCHIPPVEAKRMLWSCTFCRMKRSSGSQQCHHVSKTLERQMQPQDQLKCEFLLLKAYCHPQSSFFTGIPFNIRDYGEPFQEAMWLDLVKERLITEMYTVAWFVRDMRLMFRNHKTFYKASDFGQVGLDLEAEFEKDLKDVLGFHEANDGGFWTLP

SEQ ID NO: 65005 - protein, 549 aa, Homo sapiens
MFTMTRAMEEALFQHFMHQKLGIAYAIHKPFPFFEGLLDNSIITKRMYMESLEACRNLIPVSRVVHNILTQLERTFNLSLLVTLFSQINLREYPNLVTIYRSFKRVGASYEWQSRDTPILLEAPTGLAEGSSLHTPLALPPPQPPQPSCSPCAPRVSEPGTSSQQSDEILSESPSPSDPVLPLPALIQEGRSTSVTNDKLTSKMNAEEDSEEMPSLLTSTVQVASDNLIPQIRDKEDPQEMPHSPLGSMPEIRDNSPEPNDPEEPQEVSSTPSDKKGKKRKRCIWSTPKRRHKKKSLPGGTASSRHGIQKKLKRVDQVPQKKDDSTCNSTVETRAQKARTECARKSRSEEIIDGTSEMNEGKRSQKTPSTPRRVTQGAASPGHGIQEKLQVVDKVTQRKDDSTWNSEVMMRVQKARTKCARKSRLKEKKKEKDICSSSKRRFQKNIHRRGKPKSDTVDFHCSKLPVTCGEAKGILYKKKMKHGSSVKCIRNEDGTWLTPNEFEVEGKGRNAKNWKRNIRCEGMTLGELLKSGLLLCPPRINLKRELNSK

SEQ ID NO: 65006 - protein, 251 aa, Homo sapiens
MPEIRDNSPEPNDPEEPQEVSSTPSDKKGKKRKRCIWSTPKRRHKKKSLPGEIIDGTSEMNEGKRSQKTPSTPRRVTQGAASPGHGIQEKLQVVDKVTQRKDDSTWNSEVMMRVQKARTKCARKSRLKEKKKEKDICSSSKRRFQKNIHRRGKPKSDTVDFHCSKLPVTCGEAKGILYKKKMKHGSSVKCIRNEDGTWLTPNEFEVEGKGRNAKNWKRNIRCEGMTLGELLKSGLLLCPPRINLKRELNSK

SEQ ID NO: 65007 - protein, 689 aa, Homo sapiens
MFTMTRAMEEALFQHFMHQKLGIAYAIHKPFPFFEGLLDNSIITKRMYMESLEACRNLIPVSRVVHNILTQLERTFNLSLLVTLFSQINLREYPNLVTIYRSFKRVGASYEWQSRDTPILLEAPTGLAEGSSLHTPLALPPPQPPQPSCSPCAPRVSEPGTSSQQSDEILSESPSPSDPVLPLPALIQEGRSTSVTNDKLTSKMNAEEDSEEMPSLLTSTVQVASDNLIPQIRDKEDPQEMPHSPLGSMPEIRDNSPEPNDPEEPQEVSSTPSDKKGKKRKRCIWSTPKRRHKKKSLPGGTASSRHGIQKKLKRVDQVPQKKDDSTCNSTVETRAQKARTECARKSRSEEIIDGTSEMNEGKRSQKTPSTPRRVTQGAASPGHGIQEKLQVVDKVTQRKDDSTWNSEVMMRVQKARTKCARKSRLKEKKKEKDICSSSKRRFQKNIHRRGKPKSDTVDFHCSKLPVTCGEAKGILYKKKMKHGSSVKCIRNEDGTWLTPNEFEVEGKGRNAKNWKRNIRCEGMTLGELLKRKNSDECEVCCQGGQLLCCGTCPRVFHEDCHIPPVEAKRMLWSCTFCRMKRSSGSQQCHHVSKTLERQMQPQDQLIRDYGEPFQEAMWLDLVKERLITEMYTVAWFVRDMRLMFRNHKTFYKASDFGQVGLDLEAEFEKDLKDVLGFHEANDGGFWTLP

SEQ ID NO: 65008 - protein, 547 aa, Homo sapiens
MFTMTRAMEEALFQHFMHQKLGIAYAIHKPFPFFEGLLDNSIITKRMYMESLEACRNLIPVSRVVHNILTQLERTFNLSLLVTLFSQINLREYPNLVTIYRSFKRVGASYEWQSRDTPILLEAPTGLAEGSSLHTPLALPPPQPPQPSCSPCAPRVSEPGTSSQQSDEILSESPSPSDPVLPLPALIQEGRSTSVTNDKLTSKMNAEEDSEEMPSLLTSTVQVASDNLIPQIRDKEDPQEMPHSPLGSMPEIRDNSPEPNDPEEPQEVSSTPSDKKGKKRKRCIWSTPKRRHKKKSLPGASSRHGIQKKLKRVDQVPQKKDDSTCNSTVETRAQKARTECARKSRSEEIIDGTSEMNEGKRSQKTPSTPRRVTQGAASPGHGIQEKLQVVDKVTQRKDDSTWNSEVMMRVQKARTKCARKSRLKEKKKEKDICSSSKRRFQKNIHRRGKPKSDTVDFHCSKLPVTCGEAKGILYKKKMKHGSSVKCIRNEDGTWLTPNEFEVEGKGRNAKNWKRNIRCEGMTLGELLKSGLLLCPPRINLKRELNSK

SEQ ID NO: 65009 - protein, 221 aa, Homo sapiens
MFTMTRAMEEALFQHFMHQKLGIAYAIHKPFPFFEGLLDNSIITKRMYMESLEACRNLIPVSRVVHNILTQLERTFNLSLLVTLFSQINLREYPNLVTIYRSFKRVGASYEWQSRDTPILLEAPTGLAEGSSLHTPLALPPPQPPQPSCSPCAPRVSEPGTSSQQSDEILSESPSPSDPVLPLPALIQEGRSTSVTNDKLTSKMNAEEDSEEMPSLLTSTV

SEQ ID NO: 65010 - protein, 101 aa, Homo sapiens
MFTMTRAMEEALFQHFMHQKLGIAYAIHKPFPFFEGLLDNSIITKRMYMESLEACRNLIPVSRVVHNILTQLERTFNLSLLVTLFSQINLREYPNLVTIYR

SEQ ID NO: 65011 - protein, 555 aa, Homo sapiens
MGRGFRMFTMTRAMEEALFQHFMHQKLGIAYAIHKPFPFFEGLLDNSIITKRMYMESLEACRNLIPVSRVVHNILTQLERTFNLSLLVTLFSQINLREYPNLVTIYRSFKRVGASYEWQSRDTPILLEAPTGLAEGSSLHTPLALPPPQPPQPSCSPCAPRVSEPGTSSQQSDEILSESPSPSDPVLPLPALIQEGRSTSVTNDKLTSKMNAEEDSEEMPSLLTSTVQVASDNLIPQIRDKEDPQEMPHSPLGSMPEIRDNSPEPNDPEEPQEVSSTPSDKKGKKRKRCIWSTPKRRHKKKSLPGGTASSRHGIQKKLKRVDQVPQKKDDSTCNSTVETRAQKARTECARKSRSEEIIDGTSEMNEGKRSQKTPSTPRRVTQGAASPGHGIQEKLQVVDKVTQRKDDSTWNSEVMMRVQKARTKCARKSRLKEKKKEKDICSSSKRRFQKNIHRRGKPKSDTVDFHCSKLPVTCGEAKGILYKKKMKHGSSVKCIRNEDGTWLTPNEFEVEGKGRNAKNWKRNIRCEGMTLGELLKSGLLLCPPRINLKRELNSK

SEQ ID NO: 65012 - protein, 781 aa, Homo sapiens
MTAPEKPVKQEEMAALDVDSGGGGGGGGGHGEYLQQQQQHGNGAVAAAAAAQDTQPSPLALLAATCSKIGPPSPGDDEEEAAAAAGAPAAAGATGDLASAQLGGAPNRWEVLSATPTTIKDEAGNLVQIPSAATSSGQYVLPLQNLQNQQIFSVAPGSDSSNGTVSSVQYQVIPQIQSADGQQVQIGFTGSSDNGGINQESSQIQIIPGSNQTLLASGTPSANIQNLIPQTGQVQVQGVAIGGSSFPGQTQVVANVPLGLPGNITFVPINSVDLDSLGLSGSSQTMTAGINADGHLINTGQAMDSSDNSERTGERVSPDINETNTDTDLFVPTSSSSQLPVTIDSTGILQQNTNSLTTSSGQVHSSDLQGNYIQSPVSEETQAQNIQVSTAQPVVQHLQLQESQQPTSQAQIVQGITPQTIHGVQASGQNISQQALQNLQLQLNPGTFLIQAQTVTPSGQVTWQTFQVQGVQNLQNLQIQNTAAQQITLTPVQTLTLGQVAAGGAFTSTPVSLSTGQLPNLQTVTVNSIDSAGIQLHPGENADSPADIRIKEEEPDPEEWQLSGDSTLNTNDLTHLRVQVVDEEGDQQHQEGKRLRRVACTCPNCKEGGGRGTNLGKKKQHICHIPGCGKVYGKTSHLRAHLRWHSGERPFVCNWMYCGKRFTRSDELQRHRRTHTGEKKFVCPECSKRFMRSDHLAKHIKTHQNKKGIHSSSTVLASVEAARDDTLITAGGTTLILANIQQGSVSGIGTVNTSATSNQDILTNTEIPLQLVTVSGNETME

SEQ ID NO: 65013 - protein, 738 aa, Homo sapiens
  VARIANT 1: note = MOD_RES - Any amino acid
XPEKPVKQEEMAALDVDSGGGGGGGGGHGEYLQQQQQHGNGAVAAAAAAQTGDLASAQLGGAPNRWEVLSATPTTIKDEAGNLVQIPSAATSSGQYVLPLQNLQNQQIFSVAPGSDSSNGTVSSVQYQVIPQIQSADGQQVQIGFTGSSDNGGINQESSQIQIIPGSNQTLLASGTPSANIQNLIPQTGQVQVQGVAIGGSSFPGQTQVVANVPLGLPGNITFVPINSVDLDSLGLSGSSQTMTAGINADGHLINTGQAMDSSDNSERTGERVSPDINETNTDTDLFVPTSSSSQLPVTIDSTGILQQNTNSLTTSSGQVHSSDLQGNYIQSPVSEETQAQNIQVSTAQPVVQHLQLQESQQPTSQAQIVQGITPQTIHGVQASGQNISQQALQNLQLQLNPGTFLIQAQTVTPSGQVTWQTFQVQGVQNLQNLQIQNTAAQQITLTPVQTLTLGQVAAGGAFTSTPVSLSTGQLPNLQTVTVNSIDSAGIQLHPGENADSPADIRIKEEEPDPEEWQLSGDSTLNTNDLTHLRVQVVDEEGDQQHQEGKRLRRVACTCPNCKEGGGRGTNLGKKKQHICHIPGCGKVYGKTSHLRAHLRWHSGERPFVCNWMYCGKRFTRSDELQRHRRTHTGEKKFVCPECSKRFMRSDHLAKHIKTHQNKKGIHSSSTVLASVEAARDDTLITAGGTTLILANIQQGSVSGIGTVNTSATSNQDILTNTEIPLQLVTVSGNETME

SEQ ID NO: 65014 - protein, 713 aa, Homo sapiens
IGPPSPGDDEEEAAAAAGAPAAAGATGDLASAQLGGAPNRWEVLSATPTTIKDEAGNLVQIPSAATSSGQYVLPLQNLQNQQIFSVAPGSDSSNGTVSSVQYQVIPQIQSADGQQVQIGFTGSSDNGGINQESSQIQIIPGSNQTLLASGTPSANIQNLIPQTGQVQVQGVAIGGSSFPGQTQVVANVPLGLPGNITFVPINSVDLDSLGLSGSSQTMTAGINADGHLINTGQAMDSSDNSERTGERVSPDINETNTDTDLFVPTSSSSQLPVTIDSTGILQQNTNSLTTSSGQVHSSDLQGNYIQSPVSEETQAQNIQVSTAQPVVQHLQLQESQQPTSQAQIVQGITPQTIHGVQASGQNISQQALQNLQLQLNPGTFLIQAQTVTPSGQVTWQTFQVQGVQNLQNLQIQNTAAQQITLTPVQTLTLGQVAAGGAFTSTPVSLSTGQLPNLQTVTVNSIDSAGIQLHPGENADSPADIRIKEEEPDPEEWQLSGDSTLNTNDLTHLRVQVVDEEGDQQHQEGKRLRRVACTCPNCKEGGGRGTNLGKKKQHICHIPGCGKVYGKTSHLRAHLRWHSGERPFVCNWMYCGKRFTRSDELQRHRRTHTGEKKFVCPECSKRFMRSDHLAKHIKTHQNKKGIHSSSTVLASVEAARDDTLITAGGTTLILANIQQGSVSGIGTVNTSATSNQDILTNTEIPLQLVTVSGNETME

SEQ ID NO: 65015 - protein, 728 aa, Homo sapiens
MAALDVDSGGGGGGGGGHGEYLQQQQQHGNGAVAAAAAAQTGDLASAQLGGAPNRWEVLSATPTTIKDEAGNLVQIPSAATSSGQYVLPLQNLQNQQIFSVAPGSDSSNGTVSSVQYQVIPQIQSADGQQVQIGFTGSSDNGGINQESSQIQIIPGSNQTLLASGTPSANIQNLIPQTGQVQVQGVAIGGSSFPGQTQVVANVPLGLPGNITFVPINSVDLDSLGLSGSSQTMTAGINADGHLINTGQAMDSSDNSERTGERVSPDINETNTDTDLFVPTSSSSQLPVTIDSTGILQQNTNSLTTSSGQVHSSDLQGNYIQSPVSEETQAQNIQVSTAQPVVQHLQLQESQQPTSQAQIVQGITPQTIHGVQASGQNISQQALQNLQLQLNPGTFLIQAQTVTPSGQVTWQTFQVQGVQNLQNLQIQNTAAQQITLTPVQTLTLGQVAAGGAFTSTPVSLSTGQLPNLQTVTVNSIDSAGIQLHPGENADSPADIRIKEEEPDPEEWQLSGDSTLNTNDLTHLRVQVVDEEGDQQHQEGKRLRRVACTCPNCKEGGGRGTNLGKKKQHICHIPGCGKVYGKTSHLRAHLRWHSGERPFVCNWMYCGKRFTRSDELQRHRRTHTGEKKFVCPECSKRFMRSDHLAKHIKTHQNKKGIHSSSTVLASVEAARDDTLITAGGTTLILANIQQGSVSGIGTVNTSATSNQDILTNTEIPLQLVTVSGNETME

SEQ ID NO: 65016 - protein, 784 aa, Homo sapiens
MSDQKKEEEEEAAAAAAMATEGGKTSEPENNNKKPKTSGSQDSQPSPLALLAATCSKIGTPGENQATGQQQIIIDPSQGLVQLQNQPQQLELVTTQLAGNAWQLVASTPPASKENNVSQPASSSSSSSSSNNGSASPTKTKSGNSSTPGQFQVIQVQNPSGSVQYQVIPQLQTVEGQQIQINPTSSSSLQDLQGQIQLISAGNNQAILTAANRTASGNILAQNLANQTVPVQIRPGVSIPLQLQTLPGTQAQVVTTLPINIGGVTLALPVINNVAAGGGTGQVGQPAATADSGTSNGNQLVSTPTNTTTSASTMPESPSSSTTCTTTASTSLTSSDTLVSSADTGQYASTSASSSERTIEESQTPAATESEAQSSSQLQPNGMQNAQDQSNSLQQVQIVGQPILQQIQIQQPQQQIIQAIPPQSFQLQSGQTIQTIQQQPLQNVQLQAVNPTQVLIRAPTLTPSGQISWQTVQVQNIQSLSNLQVQNAGLSQQLTITPVSSSGGTTLAQIAPVAVAGAPITLNTAQLASVPNLQTVSVANLGAAGVQVQGVPVTITSVAGQQQGQDGVKVQQATIAPVTVAVGGIANATIGAVSPDQLTQVHLQQGQQTSDQEVQPGKRLRRVACSCPNCREGEGRGSNEPGKKKQHICHIEGCGKVYGKTSHLRAHLRWHTGERPFICNWMFCGKRFTRSDELQRHRRTHTGEKRFECPECSKRFMRSDHLSKHVKTHQNKKGGGTALAIVTSGELDSSVTEVLGSPRIVTVAAISQDSNPATPNVSTNMEEF

SEQ ID NO: 65017 - protein, 143 aa, Homo sapiens
MSDQKKEEEEEAAAAAAMATEGGKTSEPENNNKKPKTSGSQDSQPSPLALLAATCSKIGTPGENQATGQQQRNLLETLGNLLPPLLLLQKRITFLNQPLVRLVLPAVITGVHLLQKLNQVILPPLVNFKSYKYKIQVVVYSTK

SEQ ID NO: 65018 - protein, 431 aa, Homo sapiens
MASSLLEEEVHYGSSPLAMLTAACSKFGGSSPLRDSTTLGKAGTKKPYSVGSDLSASKTMGDAYPAPFTSTNGLLSPAGSPPAPTSGYANDYPPFSHSFPGPTGTQDPGLLVPKGHSSSDCLPSVYTSLDMTHPYGSWYKAGIHAGISPGPGNTPTPWWDMHPGGNWLGGGQGQGDGLQGTLPTGPAQPPLNPQLPTYPSDFAPLNPAPYPAPHLLQPGPQHVLPQDVYKPKAVGNSGQLEGSGGAKPPRGASTGGSGGYGGSGAGRSSCDCPNCQELERLGAAAAGLRKKPIHSCHIPGCGKVYGKASHLKAHLRWHTGERPFVCNWLFCGKRFTRSDELERHVRTHTREKKFTCLLCSKRFTRSDHLSKHQRTHGEPGPGPPPSGPKELGEGRSTGEEEASQTPRPSASPATPEKAPGGSPEQSNLLEI

SEQ ID NO: 65019 - protein, 431 aa, Homo sapiens; identical to SEQ ID NO: 65018

SEQ ID NO: 65020 - protein, 413 aa, Homo sapiens
MLTAACSKFGGSSPLRDSTTLGKAGTKKPYSVGSDLSASKTMGDAYPAPFTSTNGLLSPAGSPPAPTSGYANDYPPFSHSFPGPTGTQDPGLLVPKGHSSSDCLPSVYTSLDMTHPYGSWYKAGIHAGISPGPGNTPTPWWDMHPGGNWLGGGQGQGDGLQGTLPTGPAQPPLNPQLPTYPSDFAPLNPAPYPAPHLLQPGPQHVLPQDVYKPKAVGNSGQLEGSGGAKPPRGASTGGSGGYGGSGAGRSSCDCPNCQELERLGAAAAGLRKKPIHSCHIPGCGKVYGKASHLKAHLRWHTGERPFVCNWLFCGKRFTRSDELERHVRTHTREKKFTCLLCSKRFTRSDHLSKHQRTHGEPGPGPPPSGPKELGEGRSTGEEEASQTPRPSASPATPEKAPGGSPEQSNLLEI

SEQ ID NO: 65021 - protein, 466 aa, Homo sapiens [sequence omitted]

SEQ ID NO: 65022 - protein, 490 aa, Homo sapiens
MLAATCNKIGSPSPSPSSLSDSSSSFGKGFHPWKRSSSSSSASCNVVGSSLSSFGVSGASRNGGSSSAAAAAAAAAAAAAALVSDSFSCGGSPGSSAFSLTSSSAAAAAAAAAAAASSSPFANDYSVFQAPGVSGGSGGGGGGGGGGSSAHSQDGSHQPVFISKVHTSVDGLQGIYPRVGMAHPYESWFKPSHPGLGAAGEVGSAGASSWWDVGAGWIDVQNPNSAAALPGSLHPAAGGLQTSLHSPLGGYNSDYSGLSHSAFSSGASSHLLSPAGQHLMDGFKPVLPGSYPDSAPSPLAGAGGSMLSAGPSAPLGGSPRSSARRYSGRATCDCPNCQEAERLGPAGASLRRKGLHSCHIPGCGKVYGKTSHLKAHLRWHTGERPFVCNWLFCGKRFTRSDELQRHLRTHTGEKRFACPVCNKRFMRSDHLSKHVKTHSGGGGGGGSAGSGSGGKKGSDTDSEHSAAGSPPCHSPELLQPPEPGHRNGLE

SEQ ID NO: 65023 - protein, 508 aa, Homo sapiens
MATSLLGEEPRLGSTPLAMLAATCNKIGSPSPSPSSLSDSSSSFGKGFHPWKRSSSSSSASCNVVGSSLSSFGVSGASRNGGSSSAAAAAAAAAAAAAALVSDSFSCGGSPGSSAFSLTSSSAAAAAAAAAAAASSSPFANDYSVFQAPGVSGGSGGGGGGGGGGSSAHSQDGSHQPVFISKVHTSVDGLQGIYPRVGMAHPYESWFKPSHPGLGAAGEVGSAGASSWWDVGAGWIDVQNPNSAAALPGSLHPAAGGLQTSLHSPLGGYNSDYSGLSHSAFSSGASSHLLSPAGQHLMDGFKPVLPGSYPDSAPSPLAGAGGSMLSAGPSAPLGGSPRSSARRYSGRATCDCPNCQEAERLGPAGASLRRKGLHSCHIPGCGKVYGKTSHLKAHLRWHTGERPFVCNWLFCGKRFTRSDELQRHLRTHTGEKRFACPVCNKRFMRSDHLSKHVKTHSGGGGGGGSAGSGSGGKKGSDTDSEHSAAGSPPCHSPELLQPPEPGHRNGLE

SEQ ID NO: 65024 - protein, 97 aa, Homo sapiens
MDKQSSAGGVKRSVPCDSNEANEMMPETPTGDSDPQPAPKKMKTSESSTILVVRYRRNFKRTSPEELLNDHARENRINPLQMEEEEFMEIMVEIPAK

SEQ ID NO: 65025 - protein, 97 aa, Homo sapiens
MDKQSSAGGVKRSVPCESNEVNETMPETPTGDSDPQPAPKKMKTSESSTILVVRYRRNVKRTSPEELLNDHARENRINPLQMEEEEFMEIMVEIPAK

SEQ ID NO: 65026 - protein, 435 aa, Homo sapiens
MLPARCARLLTPHLLLVLVQLSPARGHRTTGPRFLISDRDPQCNLHCSRTQPKPICASDGRSYESMCEYQRAKCRDPTLGVVHRGRCKDAGQSKCRLERAQALEQAKKPQEAVFVPECGEDGSFTQVQCHTYTGYCWCVTPDGKPISGSSVQNKTPVCSGSVTDKPLSQGNSGRKDDGSKPTPTMETQPVFDGDEITAPTLWIKHLVIKDSKLNNTNIRNSEKVYSCDQERQSALEEAQQNPREGIVIPECAPGGLYKPVQCHQSTGYCWCVLVDTGRPLPGTSTRYVMPSCESDARAKTTEADDPFKDRELPGCPEGKKMEFITSLLDALTTDMVQAINSAAPTGGGRFSEPDPSHTLEERVVHWYFSQLDSNSSNDINKREMKPFKRYVKKKAKPKKCARRFTDYCDLNKDKVISLPELKGCLGVSKEVGRLV

SEQ ID NO: 65027 - protein, 434 aa, Homo sapiens
MLPARCARLLTPHLLLVLVQLSPARGHRTTGPRFLISDRDPQCNLHCSRTQPKPICASDGRSYESMCEYQRAKCRDPTLGVVHRGRCKDAGQSKCRLERAQALEQAKKPQEAVFVPECGEDGSFTQVQCHTYTGYCWCVTPDGKPISGSSVQNKTPVCSGSVTDKPLSQGNSGRKDDGSKPTPTMETQPVFDGDEITAPTLWIKHLVIKDSKLNNTNIRNSEKVYSCDQERQSALEEAQQNPREGIVIPECAPGGLYKPVQCHQSTGYCWCVLVDTGRPLPGTSTRYVMPSCESDARAKTTEADDPFKDRELPGCPEGKKMEFITSLLDALTTDMVQAINSAAPTGGGRFSEPDPSHTLEERVVHWYFSQLDSNSSNDINKREMKPFKRYVKKKAKPKKCARRFTDYCDLNKDKVISLPELKGCLGVSKEGRLV

SEQ ID NO: 65028 - protein, 457 aa, Homo sapiens
MLLPQLCWLPLLAGLLPPVPAQKFSALTFLRVDQDKDKDCSLDCAGSPQKPLCASDGRTFLSRCEFQRAKCKDPQLEIAYRGNCKDVSRCVAERKYTQEQARKEFQQVFIPECNDDGTYSQVQCHSYTGYCWCVTPNGRPISGTAVAHKTPRCPGSVNEKLPQREGTGKTVSLQIFSVLNSDDAAAPALETQPQGDEEDIASRYPTLWTEQVKSRQNKTNKNSVSSCDQEHQSALEEAKQPKNDNVVIPECAHGGLYKPVQCHPSTGYCWCVLVDTGRPIPGTSTRYEQPKCDNTARAHPAKARDLYKGRQLQGCPGAKKHEFLTSVLDALSTDMVHAASDPSSSSGRLSEPDPSHTLEERVVHWYFKLLDKNSSGDIGKKEIKPFKRFLRKKSKPKKCVKKFVEYCDVNNDKSISVQELMGCLGVAKEDGKADTKKRHTPRGHAESTSNRQPRKQG

SEQ ID NO: 65029 - protein, 446 aa, Homo sapiens
MLLPQLCWLPLLAGLLPPVPAQKFSALTFLRVDQDKDKDCSLDCAGSPQKPLCASDGRTFLSRCEFQRAKCKDPQLEIAYRGNCKDVSRCVAERKYTQEQARKEFQQVFIPECNDDGTYSQVQCHSYTGYCWCVTPNGRPISGTAVAHKTPRCPGSVNEKLPQREGTGKTDDAAAPALETQPQGDEEDIASRYPTLWTEQVKSRQNKTNKNSVSSCDQEHQSALEEAKQPKNDNVVIPECAHGGLYKPVQCHPSTGYCWCVLVDTGRPIPGTSTRYEQPKCDNTARAHPAKARDLYKGRQLQGCPGAKKHEFLTSVLDALSTDMVHAASDPSSSSGRLSEPDPSHTLEERVVHWYFKLLDKNSSGDIGKKEIKPFKRFLRKKSKPKKCVKKFVEYCDVNNDKSISVQELMGCLGVAKEDGKADTKKRHTPRGHAESTSNRQPRKQG

SEQ ID NO: 65030 - protein, 448 aa, Homo sapiens
MLLPQLCWLPLLAGLLPPVPAQKFSALTFLRVDQDKDKDCSLDCAGSPQKPLCASDGRTFLSRCEFQRAKCKDPQLEIAYRGNCKDVSRCVAERKYTQEQARKEFQQVFIPECNDDGTYSQVQCHSYTGYCWCVTPNGRPISGTAVAHKTPRCPGSVNEKLPQREGTGKTDDAAAPALETQPQGDEEDIASRYPTLWTEQVKSRQNKTNKNSVSSCDQEHQSALEEAKQPKNDNVVIPECAHGGLYKPVQCHPSTGYCWCVLVDTGRPIPGTSTRYEQPKCDNTARAHPAKARDLYKGRQLQGCPGAKKHEFLTSVLDALSTDMVHAASDPSSSSGRLSEPDPSHTLEERVVHWYFKLLDKNSSGDIGKKEIKPFKRFLRKKSKPKKCVKKFVEYCDVNNDKSISVQELMGCLGVAKEDGKADTKKRHTPRGHAESTSNRQENPRKEG

SEQ ID NO: 65031 - protein, 84 aa, Homo sapiens
KKSKPKKCVKKFVEYCDVNNDKSISVQELMGCLGVAKEDGKADTKKRHTPRGHAESTSNRQDAMVVSSRPKATTHRKSRTLSRR

SEQ ID NO: 65032 - protein, 424 aa, Homo sapiens
MRAPGCGRLVLPLLLLAAAALAEGDAKGLKEGETPGNFMEDEQWLSSISQYSGKIKHWNRFRDEVEDDYIKSWEDNQQGDEALDTTKDPCQKVKCSRHKVCIAQGYQRAMCISRKKLEHRIKQPTVKLHGNKDSICKPCHMAQLASVCGSDGHTYSSVCKLEQQACLSSKQLAVRCEGPCPCPTEQAATSTADGKPETCTGQDLADLGDRLRDWFQLLHENSKQNGSASSVAGPASGLDKSLGASCKDSIGWMFSKLDTSADLFLDQTELAAINLDKYEVCIRPFFNSCDTYKDGRVSTAEWCFCFWREKPPCLAELERIQIQEAAKKKPGIFIPSCDEDGYYRKMQCDQSSGDCWCVDQLGLELTGTRTHGSPDCDDIVGFSGDFGSGVGWEDEEEKETEEAGEEAEEEEGEAGEADDGGYIW

SEQ ID NO: 65033 - protein, 421 aa, Homo sapiens
MRAPGCGRLVLPLLLLAAAALAEGDAKGLKEGETPGNFMEDEQWLSSISQYSGKIKHWNRFRDDDYIKSWEDNQQGDEALDTTKDPCQKVKCSRHKVCIAQGYQRAMCISRKKLEHRIKQPTVKLHGNKDSICKPCHMAQLASVCGSDGHTYSSVCKLEQQACLSSKQLAVRCEGPCPCPTEQAATSTADGKPETCTGQDLADLGDRLRDWFQLLHENSKQNGSASSVAGPASGLDKSLGASCKDSIGWMFSKLDTSADLFLDQTELAAINLDKYEVCIRPFFNSCDTYKDGRVSTAEWCFCFWREKPPCLAELERIQIQEAAKKKPGIFIPSCDEDGYYRKMQCDQSSGDCWCVDQLGLELTGTRTHGSPDCDDIVGFSGDFGSGVGWEDEEEKETEEAGEEAEEEEGEAGEADDGGYIW

SEQ ID NO: 65034 - protein, 77 aa, Homo sapiens
MRAPGCGRLVLPLLLLAAAALAEGDAKGLKEGETPGNFMEDEQWLSSISQYSGKIKHWNRFRDVPSSDPPSTTQATP

SEQ ID NO: 65035 - protein, 424 aa, Homo sapiens
MRAPGCGRLVLPLLLLAAAALAEGDAKGLKEGETPGNFMEDEQWLSSISQYSGKIKHWNRFRDGIEDDYIKSWEDNQQGDEALDTTKDPCQKVKCSRHKVCIAQGYQRAMCISRKKLEHRIKQPTVKLHGNKDSICKPCHMAQLASVCGSDGHTYSSVCKLEQQACLSSKQLAVRCEGPCPCPTEQAATSTADGKPETCTGQDLADLGDRLRDWFQLLHENSKQNGSASSVAGPASGLDKSLGASCKDSIGWMFSKLDTSADLFLDQTELAAINLDKYEVCIRPFFNSCDTYKDGRVSTAEWCFCFWREKPPCLAELERIQIQEAAKKKPGIFIPSCDEDGYYRKMQCDQSSGDCWCVDQLGLELTGTRTHGSPDCDDIVGFSGDFGSGVGWEDEEEKETEEAGEEAEEEEGEAGEADDGGYIW

SEQ ID NO: 65036 - protein, 436 aa, Homo sapiens
MLKVSAVLCVCAAAWCSQSLAAAAAVAAAGGRSDGGNFLDDKQWLTTISQYDKEVGQWNKFRDEVEDDYFRTWSPGKPFDQALDPAKDPCLKMKCSRHKVCIAQDSQTAVCISHRRLTHRMKEAGVDHRQWRGPILSTCKQCPVVYPSPVCGSDGHTYSFQCKLEYQACVLGKQISVKCEGHCPCPSDKPTSTSRNVKRACSDLEFREVANRLRDWFKALHESGSQNKKTKTLLRPERSRFDTSILPICKDSLGWMFNRLDTNYDLLLDQSELRSIYLDKNEQCTKAFFNSCDTYKDSLISNNEWCYCFQRQQDPPCQTELSNIQKRQGVKKLLGQYIPLCDEDGYYKPTQCHGSVGQCWCVDRYGNEVMGSRINGVADCAIDFEISGDFASGDFHEWTDDEDDEDDIMNDEDEIEDDDEDEGDDDDGGDDHDVYI

SEQ ID NO: 65037 - protein, 433 aa, Homo sapiens
MLKVSAVLCVCAAAWCSQSLAAAAAVAAAGGRSDGGNFLDDKQWLTTISQYDKEVGQWNKFRDDDYFRTWSPGKPFDQALDPAKDPCLKMKCSRHKVCIAQDSQTAVCISHRRLTHRMKEAGVDHRQWRGPILSTCKQCPVVYPSPVCGSDGHTYSFQCKLEYQACVLGKQISVKCEGHCPCPSDKPTSTSRNVKRACSDLEFREVANRLRDWFKALHESGSQNKKTKTLLRPERSRFDTSILPICKDSLGWMFNRLDTNYDLLLDQSELRSIYLDKNEQCTKAFFNSCDTYKDSLISNNEWCYCFQRQQDPPCQTELSNIQKRQGVKKLLGQYIPLCDEDGYYKPTQCHGSVGQCWCVDRYGNEVMGSRINGVADCAIDFEISGDFASGDFHEWTDDEDDEDDIMNDEDEIEDDDEDEGDDDDGGDDHDVYI

SEQ ID NO: 65038 - protein, 385 aa, Homo sapiens
MITQDHIHMSSGLSQDDYFRTWSPGKPFDQALDPAKDPCLKMKCSRHKVCIAQDSQTAVCISHRRLTHRMKEAGVDHRQWRGPILSTCKQCPVVYPSPVCGSDGHTYSFQCKLEYQACVLGKQISVKCEGHCPCPSDKPTSTSRNVKRACSDLEFREVANRLRDWFKALHESGSQNKKTKTLLRPERSRFDTSILPICKDSLGWMFNRLDTNYDLLLDQSELRSIYLDKNEQCTKAFFNSCDTYKDSLISNNEWCYCFQRQQDPPCQTELSNIQKRQGVKKLLGQYIPLCDEDGYYKPTQCHGSVGQCWCVDRYGNEVMGSRINGVADCAIDFEISGDFASGDFHEWTDDEDDEDDIMNDEDEIEDDDEDEGDDDDGGDDHDVYI

SEQ ID NO: 65039 - protein, 436 aa, Homo sapiens; identical to SEQ ID NO: 65036

SEQ ID NO: 65040 - protein, 433 aa, Homo sapiens; identical to SEQ ID NO: 65037

SEQ ID NO: 65041 - protein, 115 aa, Homo sapiens
MLKVSAVLCVCAAAWCSQSLAAAAAVAAAGGRSDGGNFLDDKQWLTTISQYDKEVGQWNKFRDEVEDDYFRTWSPGKPFDQALDPAKDPCLKMKCSRHKVCIAQDSQTAVCISHR

SEQ ID NO: 65042 - protein, 436 aa, Homo sapiens; identical to SEQ ID NO: 65036

SEQ ID NO: 65043 - protein, 161 aa, Homo sapiens
MLKVSAVLCVCAAAWCSQSLAAAAAVAAAGGRSDGGNFLDDKQWLTTISQYDKEVGQWNKFRDDDYFRTWSPGKPFDQALDPAKDPCLKMKCSRHKVCIAQDSQTAVCISHRRLTHRMKEAGVDHRQWRGPILSTCKQCPVVYPSPVCGSDGHTYSFQCKL

SEQ ID NO: 65044 - protein, 173 aa, Homo sapiens [sequence omitted]

SEQ ID NO: 65045 - protein, 393 aa, Homo sapiens
MLKVSAVLCVCAAAWCSQSLAAAAAVAAAGGRSDGGNFLDDKQWLTTISQYDKEVGQWNKFRDDDYFRTWSPGKPFDQALDPAKDPCLKMKCSRHKVCIAQDSQTAVCISHRRLTHRMKEAGVDHRQWRGPILSTCKQCPVVYPSPVCGSDGHTYSFQCKLEYQACVLGKQISVKCEGHCPCPSDKPTSTSRNVKRGFDTSILPICKDSLGWMFNRLDTNYDLLLDQSELRSIYLDKNEQCTKAFFNSCDTYKDSLISNNEWCYCFQRQQDPPCQTELSNIQKRQGVKKLLGQYIPLCDEDGYYKPTQCHGSVGQCWCVDRYGNEVMGSRINGVADCAIDFEISGDFASGDFHEWTDDEDDEDDIMNDEDEIEDDDEDEGDDDDGGDDHDVYI

SEQ ID NO: 65046 - protein, 433 aa, Homo sapiens; identical to SEQ ID NO: 65037

SEQ ID NO: 65047 - protein, 436 aa, Homo sapiens; identical to SEQ ID NO: 65036

SEQ ID NO: 65048 - protein, 115 aa, Homo sapiens; identical to SEQ ID NO: 65041

SEQ ID NO: 65049 - protein, 313 aa, Homo sapiens
MLKVSAVLCVCAAAWCSQSLAAAAAVAAAGGRSDGGNFLDDKQWLTTISQYDKEVGQWNKFRDDDYFRTWSPGKPFDQALDPAKDPCLKMKCSRHKVCIAQDSQTAVCISHRRLTHRMKEAGVDHRQWRGPILSTCKQCPVVYPSPVCGSDGHTYSFQCKLEYQACVLGKQISVKCEGHCPCPSDKPTSTSRNVKRACSDLEFREVANRLRDWFKALHESGSQNKKTKTLLRPERSRFDTSILPICKDSLGWMFNRLDTNYDLLLDQSELRSIYLDKNEQCTKAFFNSCDTYKDSLISNNEWCYCFQRQQGKR

SEQ ID NO: 65050 - protein, 338 aa, Homo sapiens
MLKVSAVLCVCAAAWCSQSLAAAAAVAAAGGRSDGGNFLDDKQWLTTISQYDKEVGQWNKFRDCKLEYQACVLGKQISVKCEGHCPCPSDKPTSTSRNVKRACSDLEFREVANRLRDWFKALHESGSQNKKTKTLLRPERSRFDTSILPICKDSLGWMFNRLDTNYDLLLDQSELRSIYLDKNEQCTKAFFNSCDTYKDSLISNNEWCYCFQRQQDPPCQTELSNIQKRQGVKKLLGQYIPLCDEDGYYKPTQCHGSVGQCWCVDRYGNEVMGSRINGVADCAIDFEISGDFASGDFHEWTDDEDDEDDIMNDEDEIEDDDEDEGDDDDGGDDHDVYI

SEQ ID NO: 65051 - protein, 340 aa, Homo sapiens
MINNGSPQSLSMTRKSDSGTNSETMKEAGVDHRQWRGPILSTCKQCPVVYPSPVCGSDGHTYSFQCKLEYQACVLGKQISVKCEGHCPCPSDKPTSTSRNVKRACSDLEFREVANRLRDWFKALHESGSQNKKTKTLLRPERSRFDTSILPICKDSLGWMFNRLDTNYDLLLDQSELRSIYLDKNEQCTKAFFNSCDTYKDSLISNNEWCYCFQRQQDPPCQTELSNIQKRQGVKKLLGQYIPLCDEDGYYKPTQCHGSVGQCWCVDRYGNEVMGSRINGVADCAIDFEISGDFASGDFHEWTDDEDDEDDIMNDEDEIEDDDEDEGDDDDGGDDHDVYI

SEQ ID NO: 65052 - protein, 304 aa, Homo sapiens
MKCSRHKVCIAQDSQTAVCISHRRLTHRMKEAGVDHRQWRGPILSTCKQCPVVYPSPVCGSDGHTYSFQCKLEYQACVLGKQISVKCEGHCPCPSDKPTSTSRNVKRGFDTSILPICKDSLGWMFNRLDTNYDLLLDQSELRSIYLDKNEQCTKAFFNSCDTYKDSLISNNEWCYCFQRQQDPPCQTELSNIQKRQGVKKLLGQYIPLCDEDGYYKPTQCHGSVGQCWCVDRYGNEVMGSRINGVADCAIDFEISGDFASGDFHEWTDDEDDEDDIMNDEDEIEDDDEDEGDDDDGGDDHDVYI

SEQ ID NO: 65053 - protein, 316 aa, Homo sapiens
MKEAGVDHRQWRGPILSTCKQCPVVYPSPVCGSDGHTYSFQCKLEYQACVLGKQISVKCEGHCPCPSDKPTSTSRNVKRACSDLEFREVANRLRDWFKALHESGSQNKKTKTLLRPERSRFDTSILPICKDSLGWMFNRLDTNYDLLLDQSELRSIYLDKNEQCTKAFFNSCDTYKDSLISNNEWCYCFQRQQDPPCQTELSNIQKRQGVKKLLGQYIPLCDEDGYYKPTQCHGSVGQCWCVDRYGNEVMGSRINGVADCAIDFEISGDFASGDFHEWTDDEDDEDDIMNDEDEIEDDDEDEGDDDDGGDDHDVYI

SEQ ID NO: 65054 - protein, 338 aa, Homo sapiens; identical to SEQ ID NO: 65050

SEQ ID NO: 65055 - protein, 4579 aa, Homo sapiens
METKENRWVPVTVLPGCVGCRTVAALASWTVRDVKERIFAETGFPVSEQRLWRGGRELSDWIKIGDLTSKNCHLFVNLQSKGLKGGGRFGQTTPPLVDFLKDILRRYPEGGQILKELIQNAEDAGATEVKFLYDETQYGTETLWSKDMAPYQGPALYVYNNAVFTPEDWHGIQEIARSRKKDDPLKVGRFGIGFNSVYHITDVPCIFSGDQIGMLDPHQTLFGPHESGQCWNLKDDSKEISELSDQFAPFVGIFGSTKETFINGNFPGTFFRFPLRLQPSQLSSNLYNKQKVLELFESFRADADTVLLFLKSVQDVSLYVREADGTEKLVFRVTSSESKALKHERPNSIKILGTAISNYCKKTPSNNITCVTYHVNIVLEEESTKDAQKTSWLVCNSVGGRGISSKLDSLADELKFVPIIGIAMPLSSRDDEAKGATSDFSGKAFCFLPLPPGEESSTGLPVHISGFFGLTDNRRSIKWRELDQWRDPAALWNEFLVMNVVPKAYATLILDSIKRLEMEKSSDFPLSVDVIYKLWPEASKVKVHWQPVLEPLFSELLQNAVIYSISCDWVRLEQVYFSELDENLEYTKTVLNYLQSSGKQIAKVPGNVDAAVQLTAASGTTPVRKVTPAWVRQVLRKCAHLGCAEEKLHLLEFVLSDQAYSELLGLELLPLQNGNFVPFSSSVSDQDVIYITSAEYPRSLFPSLEGRFILDNLKPHLVAALKEAAQTRGRPCTQLQLLNPERFARLIKEVMNTFWPGRELIVQWYPFDENRNHPSVSWLKMVWKNLYIHFSEDLTLFDEMPLIPRTILEEGQTCVELIRLRIPSLVILDDESEAQLPEFLADIVQKLGGFVLKKLDASIQHPLIKKYIHSPLPSAVLQIMEKMPLQKLCNQITSLLPTHKDALRKFLASLTDSSEKEKRIIQELAIFKRINHSSDQGISSYTKLKGCKVLHHTAKLPADLRLSISVIDSSDEATIRLANMLKIEQLKTTSCLKLVLKDIENAFYSHEEVTQLMLWVLENLSSLKNENPNVLEWLTPLKFIQISQEQMVSAGELFDPDIEVLKDLFCNEEGTYFPPSVFTSPDILHSLRQIGLKNEASLKEKDVVQVAKKIEALQVGACPDQDVLLKKAKTLLLVLNKNHTLLQSSEGKMTLKKIKWVPACKERPPNYPGSLVWKGDLCNLCAPPDMCDVGHAILIGSSLPLVESIHVNLEKALGIFTKPSLSAVLKHFKIVVDWYSSKTFSDEDYYQFQHILLEIYGFMHDHLNEGKDSFRALKFPWVWTGKKFCPLAQAVIKPIHDLDLQPYLHNVPKTMAKFHQLFKVCGSIEELTSDHISMVIQKIYLKSDQDLSEQESKQNLHLMLNIIRWLYSNQIPASPNTPVPIHHSKNPSKLIMKPIHECCYCDIKVDDLNDLLEDSVEPIILVHEDIPMKTAEWLKVPCLSTRLINPENMGFEQSGQREPLTVRIKNILEEYPSVSDIFKELLQNADDANATECSFLIDMRRNMDIRENLLDPGMAACHGPALWSFNNSQFSDSDFVNITRLGESLKRGEVDKVGKFGLGFNSVYHITDIPIIMSREFMIMFDPNINHISKHIKDKSNPGIKINWSKQQKRLRKFPNQFKPFIDVFGCQLPLTVEAPYSYNGTLFRLSFRTQQEAKVSEVSSTCYNTADIYSLVDEFSLCGHRLIIFTQSVKSMYLKYLKIEETNPSLAQDTVIIKKKSCSSKALNTPVLSVLKEAAKLMKTCSSSNKKLPSDEPKSSCILQITVEEFHHVFRRIADLQSPLFRGPDDDPAALFEMAKSGQSKKPSDELSQKTVECTTWLLCTCMDTGEALKFSLSESGRRLGLVPCGAVGVQLSEIQDQKWTVKPHIGEVFCYLPLRIKTGLPVHINGCFAVTSNRKEIWKTDTKGRWNTTFMRHVIVKAYLQVLSVLRDLATSGELMDYTYYAVWPDPDLVHDDFSVICQGFYEDIAHGKGKELTKVFSDGSTWVSMKNVRFLDDSILKRRDVGSAAFKIFLKYLKKTGSKNLCAVELPSSVKLGFEEAGCKQILLENTFSEKQFFSEVFFPNIQEIEAELRDPLMIFVLNEKVDEFSGVLRVTPCIPCSLEGHPLVLPSRLIHPEGRVAKLFDIKDGRFPYGSTQDYLNPIILIKLVQLGMAKDDILWDDMLERAVSVAEINKSDHVAACLRSSILLSLIDEKLKIRDPRAKDFAAKYQTIRFLPFLTKPAGFSLDWKGNSFKPETMFAATDLYTAEHQDIVCLLQPILNENSHSFRGCGSVSLAVKEFLGLLKKPTVDLVINQLKEVAKSVDDGITLYQENITNACYKYLHEALMQNEITKMSIIDKLKPFSFILVENAYVDSEKVSFHLNFEAAPYLYQLPNKYKNNFRELFETVGVRQSCTVEDFALVLESIDQERGTKQITEENFQLCRRIISEGIWSLIREKKQEFCEKNYGKILLPDTNLMLLPAKSLCYNDCPWIKVKDTTVKYCHADIPREVAVKLGAVPKRHKALERYASNVCFTTLGTEFGQKEKLTSRIKSILNAYPSEKEMLKELLQNADDAKATEICFVFDPRQHPVDRIFDDKWAPLQGPALCVYNNQPFTEDDVRGIQNLGKGTKEGNPYKTGQYGIGFNSVYHITDCPSFISGNDILCIFDPHARYAPGATSISPGRMFRDLDADFRTQFSDVLDLYLGTHFKLDNCTMFRFPLRNAEMAKVSEISSVPASDRMVQNLLDKLRSDGAELLMFLNHMEKISICEIDKSTGALNVLYSVKGKITDGDRLKRKQFHASVIDSVTKKRQLKDIPVQQITYTMDTEDSEGNLTTWLICNRSGFSSMEKVSKSVISAHKNQDITLFPRGGVAACITHNYKKPHRAFCFLPLSLETGLPFHVNGHFALDSARRNLWRDDNGVGVRSDWNNSLMTALIAPAYVELLIQLKKRYFPGSDPTLSVLQNTPIHVVKDTLKKFLSFFPVNRLDLQPDLYCLVKALYNCIHEDMKRLLPVVRAPNIDGSDLHSAVIITWINMSTSNKTRPFFDNLLQDELQHLKNADYNITTRKTVAENVYRLKHLLLEIGFNLVYNCDETANLYHCLIDADIPVSYVTPADIRSFLMTFSSPDTNCHIGKLPCRLQQTNLKLFHSLKLLVDYCFKDAEENEIEVEGLPLLITLDSVLQTFDAKRPKFLTTYHELIPSRKDLFMNTLYLKYSNILLNCKVAKVFDISSFADLLSSVLPREYKTKSCTKWKDNFASESWLKNAWHFISESVSVKEDQEETKPTFDIVVDTLKDWALLPGTKFTVSANQLVVPEGDVLLPLSLMHIAVFPNAQSDKVFHALMKAGCIQLALNKICSKDSAFVPLLSCHTANIESPTSILKALHYMVQTSTFRAEKLVENDFEALLMYFNCNLNHLMSQDDIKILKSLPCYKSISGRYVSIGKFGTCYVLTKSIPSAEVEKWTQSSSSAFLEEKIHLKELYEVIGCVPVDDLEVYLKHLLPKIENLSYDAKLEHLIYLKNRLSSAEELSEIKEQLFEKLESLLIIHDANSRLKQAKHFYDRTVRVFEVMLPEKLFIPNDFFKKLEQLIKPKNHVTFMTSWVEFLRNIGLKYILSQQQLLQFAKEISVRANTENWSKETLQNTVDILLHHIFQERMDLLSGNFLKELSLIPFLCPERAPAEFIRFHPQYQEVNGTLPLIKFNGAQVNPKFKQCDVLQLLWTSCPILPEKATPLSIKEQEGSDLGPQEQLEQVLNMLNVNLDPPLDKVINNCRNICNITTLDEEMVKTRAKVLRSIYEFLSAEKREFRFQLRGVAFVMVEDGWKLLKPEEVVINLEYESDFKPYLYKLPLELGTFHQLFKHLGTEDIISTKQYVEVLSRIFKNSEGKQLDPNEMRTVKRVVSGLFRSLQNDSVKVRSDLENVRDLALYLPSQDGRLVKSSILVFDDAPHYKSRIQGNIGVQMLVDLSQCYLGKDHGFHTKLIMLFPQKLRPRLLSSILEEQLDEETPKVCQFGALCSLQGRLQLLLSSEQFITGLIRIMKHENDNAFLANEEKAIRLCKALREGLKVSCFEKLQTTLRVKGFNPIPHSRSETFAFLKRFGNAVILLYIQHSDSKDINFLLALAMTLKSATDNLISDTSYLIAMLGCNDIYRIGEKLDSLGVKYDSSEPSKLELPMPGTPIPAEIHYTLLMDPMNVFYPGEYVGYLVDAEGGDIYGSYQPTYTYAIIVQEVEREDADNSSFLGKIYQIDIGYSEYKIVSSLDLYKFSRPEESSQSRDSAPSTPTSPTEFLTPGLRSIPPLFSGRESHKTSSKHQSPKKLKVNSLPEILKEVTSVVEQAWKLPESERKKIIRRLYLKWHPDKNPENHDIANEVFKHLQNEINRLEKQAFLDQNADRASRRTFSTSASRFQSDKYSFQRFYTSWNQEATSHKSERQQQNKEKCPPSAGQTYSQRFFVPPTFKSVGNPVEARRWLRQARANFSAARNDLHKNANEWVCFKCYLSTKLALIAADYAVRGKSDKDVKPTALAQKIEEYSQQLEGLTNDVHTLEAYGVDSLKTRYPDLLPFPQIPNDRFTSEVAMRVMECTACIIIKLENFMQQKV

SEQ ID NO: 65056 - protein, 4579 aa, Homo sapiens; identical to SEQ ID NO: 65055

SEQ ID NO: 65057 - protein, 3829 aa, Homo sapiens
MNTFWPGRELIVQWYPFDENRNHPSVSWLKMVWKNLYIHFSEDLTLFDEMPLIPRTILEEGQTCVELIRLRIPSLVILDDESEAQLPEFLADIVQKLGGFVLKKLDASIQHPLIKKYIHSPLPSAVLQIMEKMPLQKLCNQITSLLPTHKDALRKFLASLTDSSEKEKRIIQELAIFKRINHSSDQGISSYTKLKGCKVLHHTAKLPADLRLSISVIDSSDEATIRLANMLKIEQLKTTSCLKLVLKDIENAFYSHEEVTQLMLWVLENLSSLKNENPNVLEWLTPLKFIQISQEQMVSAGELFDPDIEVLKDLFCNEEGTYFPPSVFTSPDILHSLRQIGLKNEASLKEKDVVQVAKKIEALQVGACPDQDVLLKKAKTLLLVLNKNHTLLQSSEGKMTLKKIKWVPACKERPPNYPGSLVWKGDLCNLCAPPDMCDVGHAILIGSSLPLVESIHVNLEKALGIFTKPSLSAVLKHFKIVVDWYSSKTFSDEDYYQFQHILLEIYGFMHDHLNEGKDSFRALKFPWVWTGKKFCPLAQAVIKPIHDLDLQPYLHNVPKTMAKFHQLFKVCGSIEELTSDHISMVIQKIYLKSDQDLSEQESKQNLHLMLNIIRWLYSNQIPASPNTPVPIHHSKNPSKLIMKPIHECCYCDIKVDDLNDLLEDSVEPIILVHEDIPMKTAEWLKVPCLSTRLINPENMGFEQSGQREPLTVRIKNILEEYPSVSDIFKELLQNADDANATECSFLIDMRRNMDIRENLLDPGMAACHGPALWSFNNSQFSDSDFVNITRLGESLKRGEVDKVGKFGLGFNSVYHITDIPIIMSREFMIMFDPNINHISKHIKDKSNPGIKINWSKQQKRLRKFPNQFKPFIDVFGCQLPLTVEAPYSYNGTLFRLSFRTQQEAKVSEVSSTCYNTADIYSLVDEFSLCGHRLIIFTQSVKSMYLKYLKIEETNPSLAQDTVIIKKKSCSSKALNTPVLSVLKEAAKLMKTCSSSNKKLPSDEPKSSCILQITVEEFHHVFRRIADLQSPLFRGPDDDPAALFEMAKSGQSKKPSDELSQKTVECTTWLLCTCMDTGEALKFSLSESGRRLGLVPCGAVGVQLSEIQDQKWTVKPHIGEVFCYLPLRIKTGLPVHINGCFAVTSNRKEIWKTDTKGRWNTTFMRHVIVKAYLQVLSVLRDLATSGELMDYTYYAVWPDPDLVHDDFSVICQGFYEDIAHGKGKELTKVFSDGSTWVSMKNVRFLDDSILKRRDVGSAAFKIFLKYLKKTGSKNLCAVELPSSVKLGFEEAGCKQILLENTFSEKQFFSEVFFPNIQEIEAELRDPLMIFVLNEKVDEFSGVLRVTPCIPCSLEGHPLVLPSRLIHPEGRVAKLFDIKDGRFPYGSTQDYLNPIILIKLVQLGMAKDDILWDDMLERAVSVAEINKSDHVAACLRSSILLSLIDEKLKIRDPRAKDFAAKYQTIRFLPFLTKPAGFSLDWKGNSFKPETMFAATDLYTAEHQDIVCLLQPILNENSHSFRGCGSVSLAVKEFLGLLKKPTVDLVINQLKEVAKSVDDGITLYQENITNACYKYLHEALMQNEITKMSIIDKLKPFSFILVENAYVDSEKVSFHLNFEAAPYLYQLPNKYKNNFRELFETVGVRQSCTVEDFALVLESIDQERGTKQITEENFQLCRRIISEGIWSLIREKKQEFCEKNYGKILLPDTNLMLLPAKSLCYNDCPWIKVKDTTVKYCHADIPREVAVKLGAVPKRHKALERYASNVCFTTLGTEFGQKEKLTSRIKSILNAYPSEKEMLKELLQNADDAKATEICFVFDPRQHPVDRIFDDKWAPLQGPALCVYNNQPFTEDDVRGIQNLGKGTKEGNPYKTGQYGIGFNSVYHITDCPSFISGNDILCIFDPHARYAPGATSISPGRMFRDLDADFRTQFSDVLDLYLGTHFKLDNCTMFRFPLRNAEMAKVSEISSVPASDRMVQNLLDKLRSDGAELLMFLNHMEKISICEIDKSTGALNVLYSVKGKITDGDRLKRKQFHASVIDSVTKKRQLKDIPVQQITYTMDTEDSEGNLTTWLICNRSGFSSMEKVSKSVISAHKNQDITLFPRGGVAACITHNYKKPHRAFCFLPLSLETGLPFHVNGHFALDSARRNLWRDDNGVGVRSDWNNSLMTALIAPAYVELLIQLKKRYFPGSDPTLSVLQNTPIHVVKDTLKKFLSFFPVNRLDLQPDLYCLVKALYNCIHEDMKRLLPVVRAPNIDGSDLHSAVIITWINMSTSNKTRPFFDNLLQDELQHLKNADYNITTRKTVAENVYRLKHLLLEIGFNLVYNCDETANLYHCLIDADIPVSYVTPADIRSFLMTFSSPDTNCHIGKLPCRLQQTNLKLFHSLKLLVDYCFKDAEENEIEVEGLPLLITLDSVLQTFDAKRPKFLTTYHELIPSRKDLFMNTLYLKYSNILLNCKVAKVFDISSFADLLSSVLPREYKTKSCTKWKDNFASESWLKNAWHFISESVSVKEDQEETKPTFDIVVDTLKDWALLPGTKFTVSANQLVVPEGDVLLPLSLMHIAVFPNAQSDKVFHALMKAGCIQLALNKICSKDSAFVPLLSCHTANIESPTSILKALHYMVQTSTFRAEKLVENDFEALLMYFNCNLNHLMSQDDIKILKSLPCYKSISGRYVSIGKFGTCYVLTKSIPSAEVEKWTQSSSSAFLEEKIHLKELYEVIGCVPVDDLEVYLKHLLPKIENLSYDAKLEHLIYLKNRLSSAEELSEIKEQLFEKLESLLIIHDANSRLKQAKHFYDRTVRVFEVMLPEKLFIPNDFFKKLEQLIKPKNHVTFMTSWVEFLRNIGLKYILSQQQLLQFAKEISVRANTENWSKETLQNTVDILLHHIFQERMDLLSGNFLKELSLIPFLCPERAPAEFIRFHPQYQEVNGTLPLIKFNGAQVNPKFKQCDVLQLLWTSCPILPEKATPLSIKEQEGSDLGPQEQLEQVLNMLNVNLDPPLDKVINNCRNICNITTLDEEMVKTRAKVLRSIYEFLSAEKREFRFQLRGVAFVMVEDGWKLLKPEEVVINLEYESDFKPYLYKLPLELGTFHQLFKHLGTEDIISTKQYVEVLSRIFKNSEGKQLDPNEMRTVKRVVSGLFRSLQNDSVKVRSDLENVRDLALYLPSQDGRLVKSSILVFDDAPHYKSRIQGNIGVQMLVDLSQCYLGKDHGFHTKLIMLFPQKLRPRLLSSILEEQLDEETPKVCQFGALCSLQGRLQLLLSSEQFITGLIRIMKHENDNAFLANEEKAIRLCKALREGLKVSCFEKLQTTLRVKGFNPIPHSRSETFAFLKRFGNAVILLYIQHSDSKDINFLLALAMTLKSATDNLISDTSYLIAMLGCNDIYRIGEKLDSLGVKYDSSEPSKLELPMPGTPIPAEIHYTLLMDPMNVFYPGEYVGYLVDAEGGDIYGSYQPTYTYAIIVQEVEREDADNSSFLGKIYQIDIGYSEYKIVSSLDLYKFSRPEESSQSRDSAPSTPTSPTEFLTPGLRSIPPLFSGRESHKTSSKHQSPKKLKVNSLPEILKEVTSVVEQAWKLPESERKKIIRRLYLKWHPDKNPENHDIANEVFKHLQNEINRLEKQAFLDQNADRASRRTFSTSASRFQSDKYSFQRFYTSWNQEATSHKSERQQQNKEKCPPSAGQTYSQRFFVPPTFKSVGNPVEARRWLRQARANFSAARNDLHKNANEWVCFKCYLSTKLALIAADYAVRGKSDKDVKPTALAQKIEEYSQQLEGLTNDVHTLEAYGVDSLKTRYPDLLPFPQIPNDRFTSEVAMRVMECTACIIIKLENFMQQKV

SEQ ID NO: 65058 - protein, 2443 aa, Homo sapiens
MAAEEGVASAASAGGSWGTAAMGRVLPMLLVPVPAEAMGQLGSRAQLRTQPEALGSLTAAGSLQVLSLTPGSRGGGRCCLEGPFWHFLWEDSRNSSTPTEKPKLLALGENYELLIYEFNLKDGRCDATILYSCSREALQKLIDDQDISISLLSLRILSFHNNTSLLFINKCVILHIIFPERDAAIRVLNCFTLPLPAQAVDMIIDTQLCRGILFVLSSLGWIYIFDVVDGTYVAHVDLALHKEDMCNEQQQEPAKISSFTSLKVSQDLDVAVIVSSSNSAVALNLNLYFRQHPGHLLCERILEDLPIQGPKGVDEDDPVNSAYNMKLAKFSFQIDRSWKAQLSSLNETIKNSKLEVSCCAPWFQDILHLESPESGNHSTSVQSWAFIPQDIMHGQYNVLQKDHAKTSDPGRSWKIMHISEQEEPIELKCVSVTGFTALFTWEVERMGYTITLWDLETQGMQCFSLGTKCIPVDSSGDQQLCFVLTENGLSLILFGLTQEEFLNRLMIHGSASTVDTLCHLNGWGRCSIPIHALEAGIENRQLDTVNFFLKSKENLFNPSSKSSVSDQFDHLSSHLYLRNVEELIPALDLLCSAIRESYSEPQSKHFSEQLLNLTLSFLNNQIKELFIHTEELDEHLQKGVNILTSYINELRTFMIKFPWKLTDAIDEYDVHENVPKVKESNIWKKLSFEEVIASAILNNKIPEAQTFFRIDSHSAQKLEELIGIGLNLVFDNLKKNNIKEASELLKNMGFDVKGQLLKICFYTTNKNIRDFLVEILKEKNYFSEKEKRTIDFVHQVEKLYLGHFQENMQIQSFPRYWIKEQDFFKHKSVLDSFLKYDCKDEFNKQDHRIVLNWALWWDQLTQESILLPRISPEEYKSYSPEALWRYLTARHDWLNIILWIGEFQTQHSYASLQQNKWPLLTVDVINQNTSCNNYMRNEILDKLARNGVFLASELEDFECFLLRLSRIGGVIQDTLPVQNYKTKEGWDFHSQFILYCLEHSLQHLLYVYLDCYKLSPENCPFLEKKELHEAHPWFEFLVQCRQVASNLTDPKLIFQASLANAQILIPTNQASVSSMLLEGHTLLALATTMYSPGGVSQVVQNEENENCLKKVDPQLLKMALTPYPKLKTALFPQCTPPSVLPSDITIYHLIQSLSPFDPSRLFGWQSANTLAIGDAWSHLPHFSSPDLVNKYAIVERLNFAYYLHNGRPSFAFGTFLVQELIKSKTPKQLIQQVGNEAYVIGLSSFHIPSIGAACVCFLELLGLDSLKLRVDMKVANIILSYKCRNEDAQYSFIRESVAEKLSKLADGEKTTTEELLVLLEEGTWNSIQQQEIKRLSSESSSQWALVVQFCRLHNMKLSISYLRECAKANDWLQFIIHSQLHNYHPAEVKSLIQYFSPVIQDHLRLAFENLPSVPTSKMDSDQVCNKCPQELQGSKQEMTDLFEILLQCSEEPDSWHWLLVEAVKQQAPILSVLASCLQGASAISCLCVWIITSVEDNVATEAMGHIQDSTEDHTWNLEDLSVIWRTLLTRQKSKTLIRGFQLFFKDSPLLLVMEMYELCMFFRNYKEAEAKLLEFQKSLETLNTAATKVHPVIPAMWLEDQVCFLLKLMLQQCKTQYELGKLLQLFVEREHLFSDGPDVKKLCILCQILKDTSIAINHTIITSYSIENLQHECRSILERLQTDGQFALARRVAELAELPVDNLVIKEITQEMQTLKHIEQWSLKQARIDFWKKCHENFKKNSISSKAASSFFSTQAHVACEHPTGWSSMEERHLLLTLAGHWLAQEDVVPLDKLEELEKQIWLCRITQHTLGRNQEETEPRFSRQISTSGELSFDSLASEFSFSKLAALNTSKYLELNSLPSKETCENRLDWKEQESLNFLIGRLLDDGCVHEASRVCRYFHFYNPDVALVLHCRALASGEASMEDLHPEIHALLQSAELLEEEAPDIPLRRVHSTSSLDSQKFVTVPSSNEVVTNLEVLTSKCLHGKNYCRQVLCLYDLAKELGCSYTDVAAQDGEAMLRKILASQQPDRCKRAQAFISTQGLKPDTVAELVAEEVTRELLTSSQGTGHKQMFNPTEESQTFLQLTTLCQDRTLVGMKLLDKISSVPHGELSCTTELLILAHHCFTLTCHMEGIIRVLQAAHMLTDNHLAPSEEYGLVVRLLTGIGRYNEMTYIFDLLHKKHYFEVLMRKKLDPSGTLKTALLDYIKRCRPGDSEKHNMIALCFSMCREIGENHEAAARIQLKLIESQPWEDSLKDGHQLKQLLLKALTLMLDAAESYAKDSCVRQAQHCQRLTKLITLQIHFLNTGQNTMLINLGRHKLMDCILALPRFYQASIVAEAYDFVPDWAEILYQQVILKGDFNYLEEFKQQRLLKSSIFEEISKKYKQHQPTDMVMENLKKLLTYCEDVYLYYKLAYEHKFYEIVNVLLKDPQTGCCLKDMLAG

SEQ ID NO: 65059 - protein, 2330 aa, Homo sapiens
MAAEEGVASAASAGGSWGTAAMGRVLPMLLVPVPAEAMGQLGSRAQLRTQPEALGSLTAAGSLQVLSLTPGSRGGGRCCLEGPFWHFLWEDSRNSSTPTEKPKLLALGENYELLIYEFNLKDGRCDATILYSCSREALQKLIDDQDISISLLSLRILSFHNNTSLLFINKCVILHIIFPERDAAIRVLNCFTLPLPAQAVDMIIDTQLCRGILFVLSSLGWIYIFDVVDGTYVAHVDLALHKEDMCNEQQQEPAKISSFTSLKVSQDLDVAVIVSSSNSAVALNLNLYFRQHPGHLLCERILEDLPIQGPKGVDEDDPVNSAYNMKLAKFSFQIDRSWKAQLSSLNETIKNSKLEVSCCAPWFQDILHLESPESGNHSTSVQSWAFIPQDIMHGQYNVLQKDHAKTSDPGRSWKIMHISEQEEPIELKCVSVTGFTALFTWEVERMGYTITLWDLETQGMQCFSLGTKCIPVDSSGDQQLCFVLTENGLSLILFGLTQEEFLNRLMIHGSASTVDTLCHLNGWGRCSIPIHALEAGIENRQLDTVNFFLKSKENLFNPSSKSSVSDQFDHLSSHLYLRNVEELIPALDLLCSAIRESYSEPQSKHFSEQLLNLTLSFLNNQIKELFIHTEELDEHLQKGVNILTSYINELRTFMIKFPWKLTDAIDEYDVHENVPKVKESNIWKKLSFEEVIASAILNNKIPEAQTFFRIDSHSAQKLEELIGIGLNLVFDNLKKNNIKEASELLKNMGFDVKGQLLKICFYTTNKNIRDFLVEILKEKNYFSEKEKRTIDFVHQVEKLYLGHFQENMQIQSFPRYWIKEQDFFKHKSVLDSFLKYDCKDEFNKQDHRIVLNWALWWDQLTQESILLPRISPEEYKSYSPEALWRYLTARHDWLNIILWIGEFQTQHSYASLQQNKWPLLTVDVINQNTSCNNYMRNEILDKLARNGVFLASELEDFECFLLRLSRIGGVIQDTLPVQNYKTKEGWDFHSQFILYCLEHSLQHLLYVYLDCYKLSPENCPFLEKKELHEAHPWFEFLVQCRQVASNLTDPKLIFQASLANAQILIPTNQASVSSMLLEGHTLLALATTMYSPGGVSQVVQNEENENCLKKVDPQLLKMALTPYPKLKTALFPQCTPPSVLPSDITIYHLIQSLSPFDPSRLFGWQSANTLAIGDAWSHLPHFSSPDLVNKYAIVERLNFAYYLHNGRPSFAFGTFLVQELIKSKTPKQLIQQVGNEAYVIGLSSFHIPSIGAACVCFLELLGLDSLKLRVDMKVANIILSYKCRNEDAQYSFIRESVAEKLSKLADGEKTTTEELLVLLEEGTWNSIQQQEIKRLSSESSSQWALVVQFCRLHNMKLSISYLRECAKANDWLQFIIHSQLHNYHPAEVKSLIQYFSPVIQDHLRLAFENLPSVPTSKMDSDQVCNKCPQELQGSKQEMTDLFEILLQCSEEPDSWHWLLVEAVKQQAPILSVLASCLQGASAISCLCVWIITSVEDNVATEAMGHIQDSTEDHTWNLEDLSVIWRTLLTRQKSKTLIRGFQLFFKDSPLLLVMEMYELCMFFRNYKEAEAKLLEFQKSLETLNTAATKVHPVIPAMWLEDQVCFLLKLMLQQCKTQYELGKLLQLFVEREHLFSDGPDVKKLCILCQILKDTSIAINHTIITSYSIENLQHECRSILERLQTDGQFALARRVAELAELPVDNLVIKEITQEMQTLKHIEQWSLKQARIDFWKKCHENFKKNSISSKAASSFFSTQAHVACEHPTGWSSMEERHLLLTLAGHWLAQEDVVPLDKLEELEKQIWLCRITQHTLGRNQEETEPRFSRQISTSGELSFDSLASEFSFSKLAALNTSKYLELNSLPSKETCENRLDWKEQESLNFLIGRLLDDGCVHEASRVCRYFHFYNPDVALVLHCRALASGEASMEDLHPEIHALLQSAELLEEEAPDIPLRRVHSRHKQMFNPTEESQTFLQLTTLCQDRTLVGMKLLDKISSVPHGELSCTTELLILAHHCFTLTCHMEGIIRVLQAAHMLTDNHLAPSEEYGLVVRLLTGIGRYNEMTYIFDLLHKKHYFEVLMRKKLDPSGTLKTALLDYIKRCRPGDSEKHNMIALCFSMCREIGENHEAAARIQLKLIESQPWEDSLKDGHQLKQLLLKALTLMLDAAESYAKDSCVRQAQHCQRLTKLITLQIHFLNTGQNTMLINLGRHKLMDCILALPRFYQASIVAEAYDFVPDWAEILYQQVILKGDFNYLEEFKQQRLLKSSIFEEISKKYKQHQPTDMVMENLKKLLTYCEDVYLYYKLAYEHKFYEIVNVLLKDPQTGCCLKDMLAG

SEQ ID NO: 65060 - protein, 2079 aa, Homo sapiens
MAAEEGVASAASAGGSWGTAAMGRVLPMLLVPVPAEAMGQLGSRAQLRTQPEALGSLTAAGSLQVLSLTPGSRGGGRCCLEGPFWHFLWEDSRNSSTPTEKPKLLALGENYELLIYEFNLKDGRCDATILYSCSREALQKLIDDQDISISLLSLRILSFHNNTSLLFINKCVILHIIFPERDAAIRVLNCFTLPLPAQAVDMIIDTQLCRGILFVLSSLGWIYIFDVVDGTYVAHVDLALHKEDMCNEQQQEPAKISSFTSLKVSQDLDVAVIVSSSNSAVALNLNLYFRQHPGHLLCERILEDLPIQGPKGVDEDDPVNSAYNMKLAKFSFQIDRSWKAQLSSLNETIKNSKLEVSCCAPWFQDILHLESPESGNHSTSVQSWAFIPQDIMHGQYNVLQKDHAKTSDPGRSWKIMHISEQEEPIELKCVSVTGFTALFTWEVERMGYTITLWDLETQGMQCFSLGTKCIPVDSSGDQQLCFVLTENGLSLILFGLTQEEFLNRLMIHGSASTVDTLCHLNGWGRCSIPIHALEAGIENRQLDTVNFFLKSKENLFNPSSKSSVSDQFDHLSSHLYLRNVEELIPALDLLCSAIRESYSEPQSKHFSEQLLNLTLSFLNNQIKELFIHTEELDEHLQKGVNILTSYINELRTFMIKFPWKLTDAIDEYDVHENVPKVKESNIWKKLSFEEVIASAILNNKIPEAQTFFRIDSHSAQKLEELIGIGLNLVFDNLKKNNIKEASELLKNMGFDVKGQLLKICFYTTNKNIRDFLVEILKEKNYFSEKEKRTIDFVHQVEKLYLGHFQENMQIQSFPRYWIKEQDFFKHKSVLDSFLKYDCKDEFNKQDHRIVLNWALWWDQLTQESILLPRISPEEYKSYSPEALWRYLTARHDWLNIILWIGEFQTQHSYASLQQNKWPLLTVDVINQNTSCNNYMRNEILDKLARNGVFLASELEDFECFLLRLSRIGGVIQDTLPVQNYKTKEGWDFHSQFILYCLEHSLQHLLYVYLDCYKLSPENCPFLEKKELHEAHPWFEFLVQCRQVASNLTDPKLIFQASLANAQILIPTNQASVSSMLLEGHTLLALATTMYSPGGVSQVVQNEENENCLKKVDPQLLKMALTPYPKLKTALFPQCTPPSVLPSDITIYHLIQSLSPFDPSRLFGWQSANTLAIGDAWSHLPHFSSPDLVNKYAIVERLNFAYYLHNGRPSFAFGTFLVQELIKSKTPKQLIQQVGNEAYVIGLSSFHIPSIGAACVCFLELLGLDSLKLRVDMKVANIILSYKCRNEDAQYSFIRESVAEKLSKLADGEKTTTEELLVLLEEGTWNSIQQQEIKRLSSESSSQWALVVQFCRLHNMKLSISYLRECAKANDWLQFIIHSQLHNYHPAEVKSLIQYFSPVIQDHLRLAFENLPSVPTSKMDSDQVCNKCPQELQGSKQEMTDLFEILLQCSEEPDSWHWLLVEAVKQQAPILSVLASCLQGASAISCLCVWIITSVEDNVATEAMGHIQDSTEDHTWNLEDLSVIWRTLLTRQKSKTLIRGFQLFFKDSPLLLVMEMYELCMFFRNYKEAEAKLLEFQKSLETLNTAATKVHPVIPAMWLEDQVCFLLKLMLQQCKTQYELGKLLQLFVEREHLFSDGPDVKKLCILCQILKDTSIAINHTIITSYSIENLQHECRSILERLQTDGQFALARRVAELAELPVDNLVIKEITQEMQTLKHIEQWSLKQARIDFWKKCHENFKKNSISSKAASSFFSTQAHVACEHPTGWSSMEERHLLLTLAGHWLAQEDVVPLDKLEELEKQIWLCRITQHTLGRNQEETEPRFSRQISTSGELSFDSLASEFSFSKLAALNTSKYLELNSLPSKETCENRLDWKEQESLNFLIGRLLDDGCVHEASRVCRYFHFYNPDVALVLHCRALASGEASMEDLHPEIHALLQSAELLEEEAPDIPLRRVHSTSSLDSQKFVTVPSSNEVVTNLEVLTSKCLHGKNYCRQVLCLYDLAKELGCSYTDVAAQDGEAMLRKILASQQPDRCKRAQAFISTQGLKPDTVAELVAEEVTRELLTSSQGTGALPPGDSQPL

SEQ ID NO: 65061 - protein, 666 aa, Homo sapiens
MEQEPQNGEPAEIKIIREAYKKAFLFVNKGLNTDELGQKEEAKNYYKQGIGHLLRGISISSKESEHTGPGWESARQMQQKMKETLQNVRTRLEILEKGLATSLQNDLQEVPKLYPEFPPKDMCEKLPEPQSFSSAPQHAEVNGNTSTPSAGAVAAPASLSLPSQSCPAEAPPAYTPQAAEGHYTVSYGTDSGEFSSVGEEFYRNHSQPPPLETLGLDADELILIPNGVQIFFVNPAGEVSAPSYPGYLRIVRFLDNSLDTVLNRPPGFLQVCDWLYPLVPDRSPVLKCTAGAYMFPDTMLQAAGCFVGVVLSSELPEDDRELFEDLLRQMSDLRLQANWNRAEEENEFQIPGRTRPSSDQLKEASGTDVKQLDQGNKDVRHKGKRGKRAKDTSSEEVNLSHIVPCEPVPEEKPKELPEWSEKVAHNILSGASWVSWGLVKGAEITGKAIQKGASKLRERIQPEEKPVEVSPAVTKGLYIAKQATGGAAKVSQFLVDGVCTVANCVGKELAPHVKKHGSKLVPESLKKDKDGKSPLDGAMVVAASSVQGFSTVWQGLECAAKCIVNNVSAETVQTVRYKYGYNAGEATHHAVDSAVNVGVTAYNINNIGIKAMVKKTATQTGHTLLEDYQIVDNSQRENQEGAANVNVRGEKDEQTKEVKEAKKKDK

SEQ ID NO: 65062 - protein, 666 aa, Homo sapiens; identical to SEQ ID NO: 65061

SEQ ID NO: 65063 - protein, 666 aa, Homo sapiens; identical to SEQ ID NO: 65061

SEQ ID NO: 65064 - protein, 666 aa, Homo sapiens; identical to SEQ ID NO: 65061

SEQ ID NO: 65065 - protein, 281 aa, Homo sapiens
MGEIKVSPDYNWFRGTVPLKKIIVDDDDSKIWSLYDAGPRSIRCPLIFLPPVSGTADVFFRQILALTGWGYRVIAVHLFGASLGGFLAQKFAEYTHKSPRVHSLILCNSFSDTSIFNQTWTANSFWLMPAFMLKKIVLGNFSSGPVDPMMADAIDFMVDRLESLGQSELASRLTLNCQNSYVEPHKIRDIPVTIMDVFDQSALSTEAKEEMYKLYPNARRAHLKTGGNFPYLCRSAEVNLYVQIHLLQFHGTKYAAIDPSMVSAEELEVQKGSLGISQEEQ

SEQ ID NO: 65066 - protein, 308 aa, Homo sapiens
MGEIKVSPDYNWFRGTVPLKKIIVDDDDSKIWSLYDAGPRSIRCPLIFLPPVSGTADVFFRQILALTGWGYRVIALQYPVYWDHLEFCDGFRKLLDHLQLDKVHLFGASLGGFLAQKFAEYTHKSPRVHSLILCNSFSDTSIFNQTWTANSFWLMPAFMLKKIVLGNFSSGPVDPMMADAIDFMVDRLESLGQSELASRLTLNCQNSYVEPHKIRDIPVTIMDVFDQSALSTEAKEEMYKLYPNARRAHLKTGGNFPYLCRSAEVNLYVQIHLLQFHGTKYAAIDPSMVSAEELEVQKGSLGISQEEQ

SEQ ID NO: 65067 - protein, 308 aa, Homo sapiens; identical to SEQ ID NO: 65066

SEQ ID NO: 65068 - protein, 795 aa, Homo sapiens
MAVLLLLLRALRRGPGPGPRPLWGPGPAWSPGFPARPGRGRPYMASRPPGDLAEAGGRALQSLQLRLLTPTFEGINGLLLKQHLVQNPVRLWQLLGGTFYFNTSRLKQKNKEKDKSKGKAPEEDEEERRRRERDDQMYRERLRTLLVIAVVMSLLNALSTSGGSISWNDFVHEMLAKGEVQRVQVVPESDVVEVYLHPGAVVFGRPRLALMYRMQVANIDKFEEKLRAAEDELNIEAKDRIPVSYKRTGFFGNALYSVGMTAVGLAILWYVFRLAGMTGREGGFSAFNQLKMARFTIVDGKMGKGVSFKDVAGMHEAKLEVREFVDYLKSPERFLQLGAKVPKGALLLGPPGCGKTLLAKAVATEAQVPFLAMAGPEFVEVIGGLGAARVRSLFKEARARAPCIVYIDEIDAVGKKRSTTMSGFSNTEEEQTLNQLLVEMDGMGTTDHVIVLASTNRADILDGALMRPGRLDRHVFIDLPTLQERREIFEQHLKSLKLTQSSTFYSQRLAELTPGFSGADIANICNEAALHAAREGHTSVHTLNFEYAVERVLAGTAKKSKILSKEEQKVVAFHESGHALVGWMLEHTEAVMKVSITPRTNAALGFAQMLPRDQHLFTKEQLFERMCMALGGRASEALSFNEVTSGAQDDLRKVTRIAYSMVKQFGMAPGIGPISFPEAQEGLMGIGRRPFSQGLQQMMDHEARLLVAKAYRHTEKVLQDNLDKLQALANALLEKEVINYEDIEALIGPPPHGPKKMIAPQRWIDAQREKQDLGEEETEETQQPPLGGEEPTWPK

SEQ ID NO: 65069 - protein, 223 aa, Homo sapiens
MRLRCTRRGRDTLPCTLSTSSTPWSASSQVPRAQLGKAVGSCRGVGSCCARHCKTHLASLRQPCGERTGAACVLLIYFRVTIYFYVEIEKLLIIVAKQEGLSGNHKPVERKYMTYLSAQDHELIQVVQNGHLQMCGKSETGNEASPGLPKRARSCPRKNRKWLRFMSRATPWWAGCWSTRRDEGLHNPSTNAALGFAQAPQRPAPLHEQLFERMCMALGGRAS

SEQ ID NO: 65070 - protein, 205 aa, Homo sapiens
LGPQACTVVPRSKCFDLEMVSSRWEPLLLLTEVTSANEVWVTSNSTALVFVSDNVREELEEVQDLLCRTLPLPVQLSFPEEALDVARVAHVFVSPFCFSAGSEERRRRERDDQMYRERLRTLLVIAVVMSLLNALSTSGGSISWNDFVHEMLAKGEVQRVQVVPESDVVEVYLHPGAVVFGRPRLALMYRMQVANIDKFEEKLRA

SEQ ID NO: 65071 - protein, 489 aa, Homo sapiens
MAVLLLLLRALRRGPGPGPRPLWGPGPAWSPGFPARPGRGRPYMASRPPGDLAEAGGRALQSLQLRLLTPTFEGINGLLLKQHLVQNPVRLWQLLGGTFYFNTSRLKQKNKEKDKSKGKAPEEDEEERRRRERDDQMYRERLRTLLVIAVVMSLLNALSTSGGSISWNDFVHEMLAKGEVQRVQVVPESDVVEVYLHPGAVVFGRPRLALMYRMQVANIDKFEEKLRAAEDELNIEAKDRIPVSYKRTGFFGNALYSVGMTAVGLAILWYVFRLAGMTGREGGFSAFNQLKMARFTIVDGKMGKGVSFKDVAGMHEAKLEVREFVDYLKSPERFLQLGAKVPKGALLLGPPGCGKTLLAKAVATEAQVPFLAMAGPEFVEVIGGLGAARVRSLFKEARARAPCIVYIDEIDAVGKKRSTTMSGFSNTEEEQTLNQLLVEMDGASLDQLPSQGTMRKLRGKTPACSCLTEPTGSRRAMEGHSLCWGCLLH

SEQ ID NO: 65072 - protein, 616 aa, Homo sapiens
MNSPGGRGKKKGSGGASNPVPPRPPPPCLAPAPPAAGPAPPPESPHKRNLYYFSYPLFVGFALLRLVAFHLGLLFVWLCQRFSRALMAAKRSSGAAPAPASASAPAPVPGGEAERVRVFHKQAFEYISIALRIDEDEKAGQKEQAVEWYKKGIEELEKGIAVIVTGQGEQCERARRLQAKMMTNLVMAKDRLQLLEKMQPVLPFSKSQTDVYNDSTNLACRNGHLQSESGAVPKRKDPLTHTSNSLPRSKTVMKTGSAGLSGHHRAPSYSGLSMVSGVKQGSGPAPTTHKGTPKTNRTNKPSTPTTATRKKKDLKNFRNVDSNLANLIMNEIVDNGTAVKFDDIAGQDLAKQALQEIVILPSLRPELFTGLRAPARGLLLFGPPGNGKTMLAKAVAAESNATFFNISAASLTSKYVGEGEKLVRALFAVARELQPSIIFIDEVDSLLCERREGEHDASRRLKTEFLIEFDGVQSAGDDRVLVMGATNRPQELDEAVLRRFIKRVYVSLPNEETRLLLLKNLLCKQGSPLTQKELAQLARMTDGYSGSDLTALAKDAALGPIRELKPEQVKNMSASEMRNIRLSDFTESLKKIKRSVSPQTLEAYIRWNKDFGDTTV

SEQ ID NO: 65073 - protein, 584 aa, Homo sapiens
MNSPGGRGKKKGSGGASNPVPPRPPPPCLAPAPPAAGPAPPPESPHKRNLYYFSYPLFVGFALLRLVAFHLGLLFVWLCQRFSRALMAAKRSSGAAPAPASASAPAPVPGGEAERVRVFHKQAFEYISIALRIDEDEKAGQKEQAVEWYKKGIEELEKGIAVIVTGQGEQCERARRLQAKMMTNLVMAKDRLQLLESGAVPKRKDPLTHTSNSLPRSKTVMKTGSAGLSGHHRAPSYSGLSMVSGVKQGSGPAPTTHKGTPKTNRTNKPSTPTTATRKKKDLKNFRNVDSNLANLIMNEIVDNGTAVKFDDIAGQDLAKQALQEIVILPSLRPELFTGLRAPARGLLLFGPPGNGKTMLAKAVAAESNATFFNISAASLTSKYVGEGEKLVRALFAVARELQPSIIFIDEVDSLLCERREGEHDASRRLKTEFLIEFDGVQSAGDDRVLVMGATNRPQELDEAVLRRFIKRVYVSLPNEETRLLLLKNLLCKQGSPLTQKELAQLARMTDGYSGSDLTALAKDAALGPIRELKPEQVKNMSASEMRNIRLSDFTESLKKIKRSVSPQTLEAYIRWNKDFGDTTV

SEQ ID NO: 65074 - protein, 8797 aa, Homo sapiens
MATSRGASRCPRDIANVMQRLQDEQEIVQKRTFTKWINSHLAKRKPPMVVDDLFEDMKDGVKLLALLEVLSGQKLPCEQGRRMKRIHAVANIGTALKFLEGRKIKLVNINSTDIADGRPSIVLGLMWTIILYFQIEELTSNLPQLQSLSSSASSVDSIVSSETPSPPSKRKVTTKIQGNAKKALLKWVQYTAGKQTGIEVKDFGKSWRSGVAFHSVIHAIRPELVDLETVKGRSNRENLEDAFTIAETELGIPRLLDPEDVDVDKPDEKSIMTYVAQFLKHYPDIHNASTDGQEDDEILPGFPSFANSVQNFKREDRVIFKEMKVWIEQFERDLTRAQMVESNLQDKYQSFKHFRVQYEMKRKQIEHLIQPLHRDGKLSLDQALVKQSWDRVTSRLFDWHIQLDKSLPAPLGTIGAWLYRAEVALREEITVQQVHEETANTIQRKLEQHKDLLQNTDAHKRAFHEIYRTRSVNGIPVPPDQLEDMAERFHFVSSTSELHLMKMEFLELKYRLLSLLVLAESKLKSWIIKYGRRESVEQLLQNYVSFIENSKFFEQYEVTYQILKQTAEMYVKADGSVEEAENVMKFMNETTAQWRNLSVEVRSVRSMLEEVISNWDRYGNTVASLQAWLEDAEKMLNQSENAKKDFFRNLPHWIQQHTAMNDAGNFLIETCDEMVSRDLKQQLLLLNGRWRELFMEVKQYAQADEMDRMKKEYTDCVVTLSAFATEAHKKLSEPLEVSFMNVKLLIQDLEDIEQRVPVMDAQYKIITKTAHLITKESPQEEGKEMFATMSKLKEQLTKVKECYSPLLYESQQLLIPLEELEKQMTSFYDSLGKINEIITVLEREAQSSALFKQKHQELLACQENCKKTLTLIEKGSQSVQKFVTLSNVLKHFDQTRLQRQIADIHVAFQSMVKKTGDWKKHVETNSRLMKKFEESRAELEKVLRIAQEGLEEKGDPEELLRRHTEFFSQLDQRVLNAFLKACDELTDILPEQEQQGLQEAVRKLHKQWKDLQGEAPYHLLHLKIDVEKNRFLASVEECRTELDRETKLMPQEGSEKIIKEHRVFFSDKGPHHLCEKRLQLIEELCVKLPVRDPVRDTPGTCHVTLKELRAAIDSTYRKLMEDPDKWKDYTSRFSEFSSWISTNETQLKGIKGEAIDTANHGEVKRAVEEIRNGVTKRGETLSWLKSRLKVLTEVSSENEAQKQGDELAKLSSSFKALVTLLSEVEKMLSNFGDCVQYKEIVKNSLEELISGSKEVQEQAEKILDTENLFEAQQLLLHHQQKTKRISAKKRDVQQQIAQAQQGEGGLPDRGHEELRKLESTLDGLERSRERQERRIQVTLRKWERFETNKETVVRYLFQTGSSHERFLSFSSLESLSSELEQTKEFSKRTESIAVQAENLVKEASEIPLGPQNKQLLQQQAKSIKEQVKKLEDTLEEDIKTMEMVKTKWDHFGSNFETLSVWITEKEKELNALETSSSAMDMQISQIKVTIQEIESKLSSIVGLEEEAQSFAQFVTTGESARIKAKLTQIRRYGEELREHAQCLEGTILGHLSQQQKFEENLRKIQQSVSEFEDKLAVPIKICSSATETYKVLQEHMDLCQALESLSSAITAFSASARKVVNRDSCVQEAAALQQQYEDILRRAKERQTALENLLAHWQRLEKELSSFLTWLERGEAKASSPEMDISADRVKVEGELQLIQALQNEVVSQASFYSKLLQLKESLFSVASKDDVKMMKLHLEQLDERWRDLPQIINKRINFLQSVVAEHQQFDELLLSFSVWIKLFLSELQTTSEISIMDHQVALTRHKDHAAEVESKKGELQSLQGHLAKLGSLGRAEDLHLLQGKAEDCFQLFEEASQVVERRQLALSHLAEFLQSHASLSGILRQLRQTVEATNSMNKNESDLIEKDLNDALQNAKALESAAVSLDGILSKAQYHLKIGSSEQRTSCRATADQLCGEVERIQNLLGTKQSEADALAVLKKAFQDQKEELLKSIEDIEERTDKERLKEPTRQALQQRLRVFNQLEDELNSHEHELCWLKDKAKQIAQKDVAFAPEVDREINRLEVTWDDTKRLIHENQGQCCGLIDLMREYQNLKSAVSKVLENASSVIVTRTTIKDQEDLKWAFSKHETAKNKMNYKQKDLDNFTSKGKHLLSELKKIHSSDFSLVKTDMESTVDKWLDVSEKLEENMDRLRVSLSIWDDVLSTRDEIEGWSNNCVPQMAENISNLDNHLRAEELLKEFESEVKNKALRLEELHSKVNDLKELTKNLETPPDLQFIEADLMQKLEHAKEITEVAKGTLKDFTAQSTQVEKFINDITTWFTKVEESLMNCAQNETCEALKKVKDIQKELQSQQSNISSTQENLNSLCRKYHSAELESLGRAMTGLIKKHEAVSQLCSKTQASLQESLEKHFSESMQEFQEWFLGAKAAAKESSDRTGDSKVLEAKLHDLQNILDSVSDGQSKLDAVTQEGQTLYAHLSKQIVSSIQEQITKANEEFQAFLKQCLKDKQALQDCASELGSFEDQHRKLNLWIHEMEERFNTENLGESKQHIPEKKNEVHKVEMFLGELLAARESLDKLSQRGQLLSEEGHGAGQEGRLCSQLLTSHQNLLRMTKEKLRSCQVALQEHEALEEALQSMWFWVKAIQDRLACAESTLGSKDTLEKRLSQIQDILLMKGEGEVKLNMAIGKGEQALRSSNKEGQRVIQTQLETLKEVWADIMSSSVHAQSTLESVISQWNDYVERKNQLEQWMESVDQKIEHPLQPQPGLKEKFVLLDHLQSILSEAEDHTRALHRLIAKSRELYEKTEDESFKDTAQEELKTQFNDIMTVAKEKMRKVEEIVKDHLMYLDAVHEFTDWLHSAKEELHRWSDMSGDSSATQKKLSKIKELIDSREIGASRLSRVESLAPEVKQNTTASGCELMHTEMQALRADWKQWEDSVFQTQSCLENLVSQMALSEQEFSGQVAQLEQALEQFSALLKTWAQQLTLLEGKNTDEEIVECWHKGQEILDALQKAEPRTEDLKSQLNELCRFSRDLSTYSGKVSGLIKEYNCLCLQASKGCQNKEQILQQRFRKAFRDFQQWLVNAKITTAKCFDIPQNISEVSTSLQKIQEFLSESENGQHKLNMMLSKGELLSTLLTKEKAKGIQAKVTAAKEDWKNFHSNLHQKESALENLKIQMKDFEVSAEPIQDWLSKTEKMVHESSNRLYDLPAKRREQQKLQSVLEEIHCYEPQLNRLKEKAQQLWEGQAASKSFRHRVSQLSSQYLALSNLTKEKVSRLDRIVAEHNQFSLGIKELQDWMTDAIHMLDSYCHPTSDKSVLDSRTLKLEALLSVKQEKEIQMKMIVTRGESVLQNTSPEGIPTIQQQLQSVKDMWASLLSAGIRCKSQLEGALSKWTSYQDGVRQFSGWMDSMEANLNESERQHAELRDKTTMLGKAKLLNEEVLSYSSLLETIEVKGAGMTEHYVTQLELQDLQERYRAIQERAKEAVTKSEKLVRLHQEYQRDLKAFEVWLGQEQEKLDQYSVLEGDAHTHETTLRDLQELQVHCAEGQALLNSVLHTREDVIPSGIPQAEDRALESLRQDWQAYQHRLSETRTQFNNVVNKLRLMEQKFQQVDEWLKTAEEKVSPRTRRQSNRATKEIQLHQMKKWHEEVTAYRDEVEEVGARAQEILDESHVNSRMGCQATQLTSRYQALLLQVLEQIKFLEEEIQSLEESESSLSSYSDWYGSTHKNFKNVATKIDKVDTVMMGKKLKTLEVLLKDMEKGHSLLKSAREKGERAVKYLEEGEAERLRKEIHDHMEQLKELTSTVRKEHMTLEKGLHLAKEFSDKCKALTQWIAEYQEILHVPEEPKMELYEKKAQLSKYKSLQQTVLSHEPSVKSVREKGEALLELVQDVTLKDKIDQLQSDYQDLCSIGKEHVFSLEAKVKDHEDYNSELQEVEKWLLQMSGRLVAPDLLETSSLETITQQLAHHKAMMEEIAGFEDRLNNLQMKGDTLIGQCADHLQAKLKQNVHAHLQGTKDSYSAICSTAQRMYQSLEHELQKHVSRQDTLQQCQAWLSAVQPDLEPSPQPPLSRAEAIKQVKHFRALQEQARTYLDLLCSMCDLSNASVKTTAKDIQQTEQTIEQKLVQAQNLTQGWEEIKHLKSELWIYLQDADQQLQNMKRRHSELELNIAQNMVSQVKDFVKKLQSKQASVNTIIEKVNKLTKKEESPEHKEINHLNDQWLDLCRQSNNLCLQREEDLQRTRDYHDCMNVVEVFLEKFTTEWDNLARSDAESTAVHLEALKKLALALQERKYAIEDLKDQKQKMIEHLNLDDKELVKEQTSHLEQRWFQLEDLIKRKIQVSVTNLEELNVVQSRFQELMEWAEEQQPNIAEALKQSPPPDMAQNLLMDHLAICSELEAKQMLLKSLIKDADRVMADLGLNERQVIQKALSDAQSHVNCLSDLVGQRRKYLNKALSEKTQFLMAVFQATSQIQQHERKIMFREHICLLPDDVSKQVKTCKSAQASLKTYQNEVTGLWAQGRELMKEVTEQEKSEVLGKLQELQSVYDSVLQKCSHRLQELEKNLVSRKHFKEDFDKACHWLKQADIVTFPEINLMNESSELHTQLAKYQNILEQSPEYENLLLTLQRTGQTILPSLNEVDHSYLSEKLNALPRQFNVIVALAKDKFYKVQEAILARKEYASLIELTTQSLSELEAQFLRMSKVPTDLAVEEALSLQDGCRAILDEVAGLGEAVDELNQKKEGFRSTGQPWQPDKMLHLVTLYHRLKRQTEQRVSLLEDTTSAYQEHEKMCQQLERQLKSVKEEQSKVNEETLPAEEKLKMYHSLAGSLQDSGIVLKRVTIHLEDLAPHLDPLAYEKARHQIQSWQGELKLLTSAIGETVTECESRMVQSIDFQTEMSRSLDWLRRVKAELSGPVYLDLNLQDIQEEIRKIQIHQEEVQSSLRIMNALSHKEKEKFTKAKELISADLEHSLAELSELDGDIQEALRTRQATLTEIYSQCQRYYQVFQAANDWLEDAQELLQLAGNGLDVESAEENLKSHMEFFSTEDQFHSNLEELHSLVATLDPLIKPTGKEDLEQKVASLELRSQRMSRDSGAQVDLLQRCTAQWHDYQKAREEVIELMNDTEKKLSEFSLLKTSSSHEAEEKLSEHKALVSVVNSFHEKIVALEEKASQLEKTGNDASKATLSRSMTTVWQRWTRLRAVAQDQEKILEDAVDEWTGFNNKVKKATEMIDQLQDKLPGSSAEKASKAELLTLLEYHDTFVLELEQQQSALGMLRQQTLSMLQDGAAPTPGEEPPLMQEITAMQDRCLNMQEKVKTNGKLVKQELKDREMVETQINSVKCWVQETKEYLGNPTIEIDAQLEELQILLTEATNHRQNIEKMAEEQKEKYLGLYTILPSELSLQLAEVALDLKIRDQIQDKIKEVEQSKATSQELSRQIQKLAKDLTTILTKLKAKTDNVVQAKTDQKVLGEELDGCNSKLMELDAAVQKFLEQNGQLGKPLAKKIGKLTELHQQTIRQAENRLSKLNQAASHLEEYNEMLELILKWIEKAKVLAHGTIAWNSASQLREQYILHQTLLEESKEIDSELEAMTEKLQYLTSVYCTEKMSQQVAELGRETEELRQMIKIRLQNLQDAAKDMKKFEAELKKLQAALEQAQATLTSPEVGRLSLKEQLSHRQHLLSEMESLKPKVQAVQLCQSALRIPEDVVASLPLCHAALRLQEEASRLQHTAIQQCNIMQAAVVQYEQYEQEMKHLQQLIEGAHREIEDKPVATSNIQELQAQISRHEELAQKIKGYQEQIASLNSKCKMLTMKAKHATMLLTVTEVEGLAEGTEDLDGELLPTPSAHPSVVMMTAGRCHTLLSPVTEESGEEGTNSEISSPPACRSPSPVANTDASVNQDIAYYQALSAERLQTDAAKIHPSTSASQEFYEPGLEPSATAKLGDLQRSWETLKNVISEKQRTLYEALERQQKYQDSLQSISTKMEAIELKLSESPEPGRSPESQMAEHQALMDEILMLQDEINELQSSLAEELVSESCEADPAEQLALQSTLTVLAERMSTIRMKASGKRQLLEEKLNDQLEEQRQEQALQRYRCEADELDSWLLSTKATLDTALSPPKEPMDMEAQLMDCQNMLVEIEQKVVALSELSVHNENLLLEGKAHTKDEAEQLAGKLRRLKGSLLELQRALHDKQLNMQGTAQEKEESDVDLTATQSPGVQEWLAQARTTWTQQRQSSLQQQKELEQELAEQKSLLRSVASRGEEILIQHSAAETSGDAGEKPDVLSQELGMEGEKSSAEDQMRMKWESLHQEFSTKQKLLQNVLEQEQEQVLYSRPNRLLSGVPLYKGDVPTQDKSAVTSLLDGLNQAFEEVSSQSGGAKRQSIHLEQKLYDGVSATSTWLDDVEERLFVATALLPEETETCLFNQEILAKDIKEMSEEMDKNKNLFSQAFPENGDNRDVIEDTLGCLLGRLSLLDSVVNQRCHQMKERLQQILNFQNDLKVLFTSLADNKYIILQKLANVFEQPVAEQIEAIQQAEDGLKEFDAGIIELKRRGDKLQVEQPSMQELSKLQDMYDELMMIIGSRRSGLNQNLTLKSQYERALQDLADLLETGQEKMAGDQKIIVSSKEEIQQLLDKHKEYFQGLESHMILTETLFRKIISFAVQKETQFHTELMAQASAVLKRAHKRGVELEYILETWSHLDEDQQELSRQLEVVESSIPSVGLVEENEDRLIDRITLYQHLKSSLNEYQPKLYQVLDDGKRLLISISCSDLESQLNQLGECWLSNTNKMSKELHRLETILKHWTRYQSESADLIHWLQSAKDRLEFWTQQSVTVPQELEMVRDHLNAFLEFSKEVDAQSSLKSSVLSTGNQLLRLKKVDTATLRSELSRIDSQWTDLLTNIPAVQEKLHQLQMDKLPSRHAISEVMSWISLMENVIQKDEDNIKNSIGYKAIHEYLQKYKGFKIDINCKQLTVDFVNQSVLQISSQDVESKRSDKTDFAEQLGAMNKSWQILQGLVTEKIQLLEGLLESWSEYENNVQCLKTWFETQEKRLKQQHRIGDQASVQNALKDCQDLEDLIKAKEKEVEKIEQNGLALIQNKKEDVSSIVMSTLRELGQTWANLDHMVGQLKILLKSVLDQWSSHKVAFDKINSYLMEARYSLSRFRLLTGSLEAVQVQVDNLQNLQDDLEKQERSLQKFGSITNQLLKECHPPVTETLTNTLKEVNMRWNNLLEEIAEQLQSSKALLQLWQRYKDYSKQCASTVQQQEDRTNELLKAATNKDIADDEVATWIQDCNDLLKGLGTVKDSLFFLHELGEQLKQQVDASAASAIQSDQLSLSQHLCALEQALCKQQTSLQAGVLDYETFAKSLEALEAWIVEAEEILQGQDPSHSSDLSTIQERMEELKGQMLKFSSMAPDLDRLNELGYRLPLNDKEIKRMQNLNRHWSLISSQTTERFSKLQSFLLQHQTFLEKCETWMEFLVQTEQKLAVEISGNYQHLLEQQRAHELFQAEMFSRQQILHSIIIDGQRLLEQGQVDDRDEFNLKLTLLSNQWQGVIRRAQQRRGIIDSQIRQWQRYREMAEKLRKWLVEVSYLPMSGLGSVPIPLQQARTLFDEVQFKEKVFLRQQGSYILTVEAGKQLLLSADSGAEAALQAELAEIQEKWKSASMRLEEQKKKLAFLLKDWEKCEKGIADSLEKLRTFKKKLSQSLPDHHEELHAEQMRCKELENAVGSWTDDLTQLSLLKDTLSAYISADDISILNERVELLQRQWEELCHQLSLRRQQIGERLNEWAVFSEKNKELCEWLTQMESKVSQNGDILIEEMIEKLKKDYQEEIAIAQENKIQLQQMGERLAKASHESKASEIEYKLGKVNDRWQHLLDLIAARVKKLKETLVAVQQLDKNMSSLRTWLAHIESELAKPIVYDSCNSEEIQRKLNEQQELQRDIEKHSTGVASVLNLCEVLLHDCDACATDAECDSIQQATRNLDRRWRNICAMSMERRLKIEETWRLWQKFLDDYSRFEDWLKSSERTAAFPSSSGVIYTVAKEELKKFEAFQRQVHECLTQLELINKQYRRLARENRTDSACSLKQMVHEGNQRWDNLQKRVTSILRRLKHFIGQREEFETARDSILVWLTEMDLQLTNIEHFSECDVQAKIKQLKAFQQEISLNHNKIEQIIAQGEQLIEKSEPLDAAIIEEELDELRRYCQEVFGRVERYHKKLIRLPLPDDEHDLSDRELELEDSAALSDLHWHDRSADSLLSPQPSSNLSLSLAQPLRSERSGRDTPASVDSIPLEWDHDYDLSRDLESAMSRALPSEDEEGQDDKDFYLRGAVGLSGDHSALESQIRQLGKALDDSRFQIQQTENIIRSKTPTGPELDTSYKGYMKLLGECSSSIDSVKRLEHKLKEEEESLPGFVNLHSTETQTAGVIDRWELLQAQALSKELRMKQNLQKWQQFNSDLNSIWAWLGDTEEELEQLQRLELSTDIQTIELQIKKLKELQKAVDHRKAIILSINLCSPEFTQADSKESRDLQDRLSQMNGRWDRVCSLLEEWRGLLQDALMQCQGFHEMSHGLLLMLENIDRRKNEIVPIDSNLDAEILQDHHKQLMQIKHELLESQLRVASLQDMSCQLLVNAEGTDCLEAKEKVHVIGNRLKLLLKEVSRHIKELEKLLDVSSSQQDLSSWSSADELDTSGSVSPTSGRSTPNRQKTPRGKCSLSQPGPSVSSPHSRSTKGGSDSSLSEPGPGRSGRGFLFRVLRAALPLQLLLLLLIGLACLVPMSEEDYSCALSNNFARSFHPMLRYTNGPPPL

SEQ ID NO: 65075 - protein, 8409 aa, Homo sapiens
MATSRGASRCPRDIANVMQRLQDEQEIVQKRTFTKWINSHLAKRKPPMVVDDLFEDMKDGVKLLALLEVLSGQKLPCEQGRRMKRIHAVANIGTALKFLEGRKIKLVNINSTDIADGRPSIVLGLMWTIILYFQIEELTSNLPQLQSLSSSASSVDSIVSSETPSPPSKRKVTTKIQGNAKKALLKWVQYTAGKQTGIEVKDFGKSWRSGVAFHSVIHAIRPELVDLETVKGRSNRENLEDAFTIAETELGIPRLLDPEDVDVDKPDEKSIMTYVAQFLKHYPDIHNASTDGQEDDEILPGFPSFANSVQNFKREDRVIFKEMKVWIEQFERDLTRAQMVESNLQDKYQSFKHFRVQYEMKRKQIEHLIQPLHRDGKLSLDQALVKQSWDRVTSRLFDWHIQLDKSLPAPLGTIGAWLYRAEVALREEITVQQVHEETANTIQRKLEQHKRKLRNVIDLLQNTDAHKRAFHEIYRTRSVNGIPVPPDQLEDMAERFHFVSSTSELHLMKMEFLELKYRLLSLLVLAESKLKSWIIKYGRRESVEQLLQNYVSFIENSKFFEQYEVTYQILKQTAEMYVKADGSVEEAENVMKFMNETTAQWRNLSVEVRSVRSMLEEVISNWDRYGNTVASLQAWLEDAEKMLNQSENAKKDFFRNLPHWIQQHTAMNDAGNFLIETCDEMVSRDLKQQLLLLNGRWRELFMEVKQYAQADEMDRMKKEYTDCVVTLSAFATEAHKKLSEPLEVSFMNVKLLIQDLEDIEQRVPVMDAQYKIITKTAHLITKESPQEEGKEMFATMSKLKEQLTKVKECYSPLLYESQQLLIPLEELEKQMTSFYDSLGKINEIITVLEREAQSSALFKQKHQLRILKCKWCNSSQKMTLCLVLGSMISMLSTAKITIAGYKSEVEVSELLACQENCKKTLTLIEKGSQSVQKFVTLSNVLKHFDQTRLQTDCRYSCCFSVMRKQHHIMIVFHIKSMVKKTGDWKKHVETNSRLMKKFEESRAELEKVLRIAQEGLEEKGDPEELLRRHTEFFSQLDQRVLNAFLKACDELTDILPEQEQQGLQEAVRKLHKQWKDLQGEAPYHLLHLKIDVEKNRFLASVEECRTELDRETKLMPQEGSEKIIKEHRVFFSDKGPHHLCEKRLQLIEELCVKLPVRDPVRDTPGTCHVTLKELRAAIDSTYRKLMEDPDKWKDYTSRFSEFSSWISTNETQLKGIKGEAIDTANHGEVKRAVEEIRNGVTKRGETLSWLKSRLKVLTEVSSENEAQKQGDELAKLSSSFKALVTLLSEVEKMLSNFGDCVQYKEIVKNSLEELISGSKEVQEQAEKILDTENLFEAQQLLLHHQQKTKRISAKKRDVQQQIAQAQQGEGGLPDRGHEELRKLESTLDGLERSRERQERRIQVTLRKWERFETNKETVVRYLFQTGSSHERFLSFSSLESLSSELEQTKEFSKRTESIAVQAENLVKEASEIPLGPQNKQLLQQQAKSIKEQVKKLEDTLEEEYVIDNKTMEMVKTKWDHFGSNFETLSVWITEKEKELNALETSSSAMDMQISQIKVTIQEIESKLSSIVGLEEEAQSFAQFVTTGESARIKAKLTQIRRYGEELREHAQCLEGTILGHLSQQQKFEENLRKIQQSVSEFEDKLAVPIKICSSATETYKVLQEHMDLCQALESLSSAITAFSASARKVVNRDSCVQEAAALQQQYEDILRRAKERQTALENLLAHWQRLEKELSSFLTWLERGEAKASSPEMDISADRVKVEASKDDVKMMKLHLEQLDERWRDLPQIINKRINFLQSVVAEHQQFDELLLSFSVWIKLFLSELQTTSEISIMDHQVALTRHKDHAAEVESKKGELQSLQGHLAKLGSLGRAEDLHLLQGKAEDCFQLFEEASQVVERRQLALSHLAEFLQSHASLSGILRQLRQTVEATNSMNKNESDLIEKDLNDALQNAKALESAAVSLDGILSKAQYHLKIGSSEQRTSCRATADQLCGEVERIQNLLGTKQSEADALAVLKKAFQDQKEELLKSIEDIEERTDKERLKEPTRQALQQRLRVFNQLEDELNSHEHELCWLKDKAKQIAQKDVAFAPEVDREINRLEVTWDDTKRLIHENQGQCCGLIDLMREYQNLKSAVSKVLENASSVIVTRTTIKDQEDLKWAFSKHETAKNKMNYKQKDLDNFTSKGKHLLSELKKIHSSDFSLVKTDMESTVDKWLDVSEKLEENMDRLRVSLSIWDDVLSTRDEIEGWSNNCVPQMAENISNLDNHLRAEELLKEFESEVKNKALRLEELHSKVNDLKELTKNLETPPDLQFIEADLMQKLEHAKEITEVAKGTLKDFTAQSTQVEKFINDITTWFTKVEESLMNCAQNETCEALKKVKDIQKELQSQQSNISSTQENLNSLCRKYHSAELESLGRAMTGLIKKHEAVSQLCSKTQASLQESLEKHFSEESMQEFQEWFLGAKAAAKESSDRTGDSKVLEAKLHDLQQNILDSVSDGQSKLDAVTQEGQTLYAHLSKQIVSSIQEQITKANEEFQAFLKQCLKDKQALQDCASELGSFEDQHRKLNLWIHEMEERFNTENLGESKQHIPEKKNEVHKVEMFLGELLAARESLDKLSQRGQLLSEEGHGAGQEGRLCSQLLTSHQNLLRMTKEKLRSCQVALQEHEALEEALQSMWFWVKAIQDRLACAESTLGSKDTLEKRLSQIQDILLMKGEGEVKLNMAIGKGEQALRSSNKEGQRVIQTQLETLKEVWADIMSSSVHAQSTLESVISQWNDYVERKNQLEQWMESVDQKIEHPLQPQPGLKEKFVLLDHLQSILSEAEDHTRALHRLIAKSRELYEKTEDESFKDTAQEELKTQFNDIMTVAKEKMRKVEEIVKDHLMYLDAVHEFTDWLHSAKEELHRWSDMSGDSSATQKKLSKIKELIDSREIGASRLSRVESLAPEVKQNTTASGCELMHTEMQALRADWKQWEDSVFQTQSCLENLVSQMALSEQEFSGQVAQLEQALEQFSALLKTWAQQLTLLEGKNTDEEIVECWHKGQEILDALQKAEPRTEDLKSQLNELCRFSRDLSTYSGKVSGLIKEYNCLCLQASKGCQNKEQILQQRFRKAFRDFQQWLVNAKITTAKCFDIPQNISEVSTSLQKIQEFLSESENGQHKLNMMLSKGELLSTLLTKEKAKGIQAKVTAAKEDWKNFHSNLHQKESALENLKIQMKDFEVSAEPIQDWLSKTEKMVHESSNRLYDLPAKRREQQKLQSVLEEIHCYEPQLNRLKEKAQQLWEGQAASKSFRHRVSQLSSQYLALSNLTKEKVSRLDRIVAEHNQFSLGIKELQDWMTDAIHMLDSYCHPTSDKSVLDSRTLKLEALLSVKQEKEIQMKMIVTRGESVLQNTSPEGIPTIQQQLQSVKDMWASLLSAGIRCKRVRLPCAYIALKLRVHQHAELRDKTTMLGKAKEAVTKSEKLVRLHQEYQRDLKAFEVWLGQEQEKLDQYSVLEGDAHTHETTLRDLQELQVHCAEGQALLNSVLHTREDVIPSGIPQAEDRALESLRQDWQAYQHRLSETRTQFNNVVNKLRLMEQKFQQVDEWLKTAEEKVSPRTRRQSNRATKEIQLHQMKKWHEEVTAYRDEVEEVGARAQEILDESHVNSRMGCQATQLTSRYQALLLQVLEQIKFLEEEIQSLEESESSLSSYSDWYGSTHKNFKNVATKIDKVDTVMMGKKLKTLEVLLKDMEKGHSLLKSAREKGERAVKYLEEGEAERLRKEIHDHMEQLKELTSTVRKEHMTLEKSLQQTVLSHEPSVKSVREKGEALLELVQDVTLKDKIDQLQSDYQDLCSIGKEHVFSLEAKVKDHEDYNSELQEVEKWLLQMSGRLVAPDLLETSSLETITQQLAHHKMYQSLEHELQKHVSRQDTLQQCQAWLSAVQPDLEPSPQPPLSRAEAIKQVKHFRALQEQARTYLDLLCSMCDLSNASVKTTAKDIQQTEQTIEQKLVQAQNLTQGWEEIKHLKSELWIYLQDADQQLQNMKRRHSELELNIAQNMVSQVKDFVKKLQSKQASVNTIIEKVNKLTKKEESPEHKEINHLNDQWLDLCRQSNNLCLQREEDLQRTRDYHDCMNVVEVFLEKFTTEWDNLARSDAESTAVHLEALKKLALALQERKYAIEDLKDQKQKMIEHLNLDDKELVKEQTSHLEQRWFQLEDLIKRKIQVSVTNLEELNVVQSRFQELMEWAEEQQPNIAEALKQSPPPDMAQNLLMDHLAICSELEAKQMLLKSLIKDADRVMADLGLNERQVIQKALSDAQSHVNCLSDLVGQRRKKHFKEDFDKACHWLKQADIVTFPEINLMNESSELHTQLAKYQNILEQSPEYENLLLTLQRTGQTILPSLNEVDHSYLSEKLNALPRQFNVIVALAKDKFYKVQEAILARKEYASLIELTTQSLSELEAQFLRMSKVPTDLAVEEALSLQDGCRAILDEVAGLGEAVDELNQKKEGFRSTGQPWQPDKMLHLVTLYHRLKRQTEQRVSLLEDTTSAYQEHEKMCQQLERQLKSVKEEQSKVNEETLPAEEKLKMYHSLAGSLQDSGIVLKRVTIHLEDLAPHLDPLAYEKARHQIQSWQGELKLLTSAIGETVTECESRMVQSIDFQTEMSRSLDWLRRVKAELSGPVYLDLNLQDIQEEIRKIQIHQEEVQSSLRIMNALSHKEKEKFTKAKELISADLEHSLAELSELDGDIQEALRTRQATLTEIYSQCQRYYQVFQAANDWLEDAQELLQLAGNGLDVESAEENLKSHMEFFSTEDQFHSNLEELHSLVATLDPLIKPTGKEDLEQKVASLELRSQRMSRDSGAQALVSVVNSFHEKIVALEEKASQLEKTGNDASKATLSRSMTTVWQRWTRLRAVAQDQEKILEDAVDEWTGFNNKVKKATEMIDQLQDKLPGSSAEKASKAELLTLLEYHDTFVLELEQQQSALGMLRQQTLSMLQDGAAPTPGEEPPLMQEITAMQDRCLKMVETQINSVKCWVQETKEYLGNPTIEIDAQLEELQILLTEATNHRQNIEKMAEEQKEKYLGLYTILPSELSLQLAEVALDLKIRDQIQDKIKEVEQSKATSQELSRQIQKLAKDLTTILTKLKAKTDNVVQAKTDQKAASHLEEYNEMLELILKWIEKAKVLAHGTIAWNSASQLREQYILHQTLLEESKEIDSELEAMTEKLQYLTSVYCTEKMSQQVAELGRETEELRQMIKIRLQNLQDAAKDMKKFEAELKKLQAALEQAQATLTSPEVGRLSLKEQLSHRQHLLSEMESLKPKVQAVQLCQSALRIPEDVVASLPLCHAALRLQEEASRLQHTAIQQCNIMQEAVVQYEQYEQEMKHLQQLIEGAHREIEDKPVATSNIQELQAQISRHEELAQKIKGYQEQIASLNSKCKMLTMKAKHATMLLTVTEVEGLAEGTEDLDGELLPTPSAHPSVVMMTAGRCHTLLSPVTEESGEEGTNSEISSPPACRSPSPVANTDASVNQDIAYYQALSAERLQTDAAKIHPSTSASQEFYEPGLEPSATAKLGDLQRSWETLKNVISEKQRTLYEALERQQKYQDSLQSISTKMEAIELKLSESPEPGRSPESQMAEHQALMDEILMLQDEINELQSSLAEELVSESCEADPAEQLALQSTLTVLAERMSTIRMKASGKRQLLEEKLNDQLEEQRQEQALQRYRCEADELDSWLLSTKATLDTALSPPKEPMDMEAQLMDCQNMLVEIEQKVVALSELSVHNENLLLEGKAHTKDEAEQLAGKLRRLKGSLLELQRALHDKQLNMQGTAQEKEESDVDLTATQSPGVQEWLAQARTTWTQQRQSSLQQQKELEQELAEQKSLLRSVASRGEEILIQHSAAETSGDAGEKPDVLSQELGMEGEKSSAEDQMRMKWESLHQEFSTKQKLLQNVLEQEQEQVLYSRPNRLLSGVPLYKGDVPTQDKSAVTSLLDGLNQAFEEVSSQSGGAKRQSIHLEQKLYDGVSATSTWLDDVEERLFVATALLPEETETCLFNQEILAKDIKEMSEEMDKNKNLFSQAFPENGDNRDVIEDTLGCLLGRLSLLDSVVNQRCHQMKERLQQILNFQNDLKVLFTSLADNKYIILQKLANVFEQPVAEQIEAIQQAEDGLKEFDAGIIELKRRGDKLQVEQPSMQELSKLQDMYDELMMIIGSRRSGLNQNLTLKSQYERALQDLADLLETGQEKMAGDQKIIVSSKEEIQQLLDKHKEYFQGLESHMILTETLFRKIISFAVQKETQFHTELMAQASAVLKRAHKRGVELEYILETWSHLDEDQQELSRQLEVVESSIPSVGLVEENEDRLIDRITLYQHLKSSLNEYQPKLYQVLDDGKRLLISISCSDLESQLNQLGECWLSNTNKMSKELHRLETILKHWTRYQSESADLIHWLQSAKDRLEFWTQQSVTVPQELEMVRDHLNAFLEFSKEVDAQSSLKSSVLSTGNQLLRLKKVDTATLRSELSRIDSQWTDLLTNIPAVQEKLHQLQMDKLPSRHAISEVMSWISLMENVIQKDEDNIKNSIGYKAIHEYLQKYKGFKIDINCKQLTVDFVNQSVLQISSQDVESKRSDKTDFAEQLGAMNKSWQILQGLVTEKIQLLEGLLESWSEYENNVQCLKTWFETQEKRLKQQHRIGDQASVQNALKDCQDLEDLIKAKEKEVEKIEQNGLALIQNKKEDVSSIVMSTLRELGQTWANLDHMVGQLKILLKSVLDQWSSHKVAFDKINSYLMEARYSLSRFRLLTGSLEAVQVQVDNLQNLQDDLEKQERSLQKFGSITNQLLKECHPPVTETLTNTLKEVNMRWNNLLEEIAEQLQSSKALLQLWQRYKDYSKQCASTVQQQEDRTNELLKAATNKDIADDEVATWIQDCNDLLKGLGTVKDSLFFLHELGEQLKQQVDASAASAIQSDQLSLSQHLCALEQALCKQQTSLQAGVLDYETFAKSLEALEAWIVEAEEILQGQDPSHSSDLSTIQERMEELKGQMLKFSSMAPDLDRLNELGYRLPLNDKEIKRMQNLNRHWSLISSQTTERFSKLQSFLLQHQTFLEKCETWMEFLVQTEQKLAVEISGNYQHLLEQQRAHELFQAEMFSRQQILHSIIIDGQRLLEQGQVDDRDEFNLKLTLLSNQWQGVIRRAQQRRGIIDSQIRQWQRYREMAEKLRKWLVEVSYLPMSGLGSVPIPLQQARTLFDEVQFKEKVFLRQQGSYILTVEAGKQLLLSADSGAEAALQAELAEIQEKWKSASMRLEEQKKKLAFLLKDWEKCEKGIADSLEKLRTFKKKLSQSLPDHHEELHAEQMRCKELENAVGSWTDDLTQLSLLKDTLSAYISADDISILNERVELLQRQWEELCHQLSLRRQQIGERLNEWAVFSEKNKELCEWLTQMESKVSQNGDILIEEMIEKLKKDYQEEIAIAQENKIQLQQMGERLAKASHESKASEIEYKLGKVNDRWQHLLDLIAARVKKLKETLVAVQQLDKNMSSLRTWLAHIESELAKPIVYDSCNSEEIQRKLNEQQELQRDIEKHSTGVASVLNLCEVLLHDCDACATDAECDSIQQATRNLDRRWRNICAMSMERRLKIEETWRLWQKFLDDYSRFEDWLKSSERTAAFPSSSGVIYTVAKEELKKFEAFQRQVHECLTQLELINKQYRRLARENRTDSACSLKQMVHEGNQRWDNLQKRVTSILRRLKHFIGQREEFETARDSILVWLTEMDLQLTNIEHFSECDVQAKIKQLKAFQQEISLNHNKIEQIIAQGEQLIEKSEPLDAAIIEEELDELRRYCQEVFGRVERYHKKLIRLPLPDDEHDLSDRELELEDSAALSDLHWHDRSADSLLSPQPSSNLSLSLAQPLRSERSGRDTPASVDSIPLEWDHDYDLSRDLESAMSRALPSEDEEGQDDKDFYLRGAVGLSGDHSALESQIRQLGKALDDSRFQIQQTENIIRSKTPTGPELDTSYKGYMKLLGECSSSIDSVKRLEHKLKEEEESLPGFVNLHSTETQTAGVIDRWELLQAQALSKELRMKQNLQKWQQFNSDLNSIWAWLGDTEEELEQLQRLELSTDIQTIELQIKKLKELQKAVDHRKAIILSINLCSPEFTQADSKESRDLQDRLSQMNGRWDRVCSLLEEWRGLLQDALMQCQGFHEMSHGLLLMLENIDRRKNEIVPIDSNLDAEILQDHHKQLMQIKHELLESQLRVASLQDMSCQLLVNAEGTDCLEAKEKVHVIGNRLKLLLKEVSRHIKELEKLLDVSSSQQDLSSWSSADELDTSGSVSPTSGRSTPNRQKTPRGKCSLSQPGPSVSSPHSRSTKGGSDSSLSEPGPGRSGRGFLFRVLRAALPLQLLLLLLIGLACLVPMSEEDYSCALSNNFARSFHPMLRYTNGPPPL

SEQ ID NO: 65076 - protein, 3321 aa, Homo sapiens
MELDAAVQKFLEQNGQLGKPLAKKIGKLTELHQQTIRQAENRLSKLNQAASHLEEYNEMLELILKWIEKAKVLAHGTIAWNSASQLREQYILHQTLLEESKEIDSELEAMTEKLQYLTSVYCTEKMSQQVAELGRETEELRQMIKIRLQNLQDAAKDMKKFEAELKKLQAALEQAQATLTSPEVGRLSLKEQLSHRQHLLSEMESLKPKVQAVQLCQSALRIPEDVVASLPLCHAALRLQEEASRLQHTAIQQCNIMQAAVVQYEQYEQEMKHLQQLIEGAHREIEDKPVATSNIQELQAQISRHEELAQKIKGYQEQIASLNSKCKMLTMKAKHATMLLTVTEVEGLAEGTEDLDGELLPTPSAHPSVVMMTAGRCHTLLSPVTEESGEEGTNSEISSPPACRSPSPVANTDASVNQDIAYYQALSAERLQTDAAKIHPSTSASQEFYEPGLEPSATAKLGDLQRSWETLKNVISEKQRTLYEALERQQKYQDSLQSISTKMEAIELKLSESPEPGRSPESQMAEHQALMDEILMLQDEINELQSSLAEELVSESCEADPAEQLALQSTLTVLAERMSTIRMKASGKRQLLEEKLNDQLEEQRQEQALQRYRCEADELDSWLLSTKATLDTALSPPKEPMDMEAQLMDCQNMLVEIEQKVVALSELSVHNENLLLEGKAHTKDEAEQLAGKLRRLKGSLLELQRALHDKQLNMQGTAQEKEESDVDLTATQSPGVQEWLAQARTTWTQQRQSSLQQQKELEQELAEQKSLLRSVASRGEEILIQHSAAETSGDAGEKPDVLSQELGMEGEKSSAEDQMRMKWESLHQEFSTKQKLLQNVLEQEQEQVLYSRPNRLLSGVPLYKGDVPTQDKSAVTSLLDGLNQAFEEVSSQSGGAKRQSIHLEQKLYDGVSATSTWLDDVEERLFVATALLPEETETCLFNQEILAKDIKEMSEEMDKNKNLFSQAFPENGDNRDVIEDTLGCLLGRLSLLDSVVNQRCHQMKERLQQILNFQNDLKVLFTSLADNKYIILQKLANVFEQPVAEQIEAIQQAEDGLKEFDAGIIELKRRGDKLQVEQPSMQELSKLQDMYDELMMIIGSRRSGLNQNLTLKSQYERALQDLADLLETGQEKMAGDQKIIVSSKEEIQQLLDKHKEYFQGLESHMILTETLFRKIISFAVQKETQFHTELMAQASAVLKRAHKRGVELEYILETWSHLDEDQQELSRQLEVVESSIPSVGLVEENEDRLIDRITLYQHLKSSLNEYQPKLYQVLDDGKRLLISISCSDLESQLNQLGECWLSNTNKMSKELHRLETILKHWTRYQSESADLIHWLQSAKDRLEFWTQQSVTVPQELEMVRDHLNAFLEFSKEVDAQSSLKSSVLSTGNQLLRLKKVDTATLRSELSRIDSQWTDLLTNIPAVQEKLHQLQMDKLPSRHAISEVMSWISLMENVIQKDEDNIKNSIGYKAIHEYLQKYKGFKIDINCKQLTVDFVNQSVLQISSQDVESKRSDKTDFAEQLGAMNKSWQILQGLVTEKIQLLEGLLESWSEYENNVQCLKTWFETQEKRLKQQHRIGDQASVQNALKDCQDLEDLIKAKEKEVEKIEQNGLALIQNKKEDVSSIVMSTLRELGQTWANLDHMVGQLKILLKSVLDQWSSHKVAFDKINSYLMEARYSLSRFRLLTGSLEAVQVQVDNLQNLQDDLEKQERSLQKFGSITNQLLKECHPPVTETLTNTLKEVNMRWNNLLEEIAEQLQSSKALLQLWQRYKDYSKQCASTVQQQEDRTNELLKAATNKDIADDEVATWIQDCNDLLKGLGTVKDSLFFLHELGEQLKQQVDASAASAIQSDQLSLSQHLCALEQALCKQQTSLQAGVLDYETFAKSLEALEAWIVEAEEILQGQDPSHSSDLSTIQERMEELKGQMLKFSSMAPDLDRLNELGYRLPLNDKEIKRMQNLNRHWSLISSQTTERFSKLQSFLLQHQTFLEKCETWMEFLVQTEQKLAVEISGNYQHLLEQQRAHELFQAEMFSRQQILHSIIIDGQRLLEQGQVDDRDEFNLKLTLLSNQWQGVIRRAQQRRGIIDSQIRQWQRYREMAEKLRKWLVEVSYLPMSGLGSVPIPLQQARTLFDEVQFKEKVFLRQQGSYILTVEAGKQLLLSADSGAEAALQAELAEIQEKWKSASMRLEEQKKKLAFLLKDWEKCEKGIADSLEKLRTFKKKLSQSLPDHHEELHAEQMRCKELENAVGSWTDDLTQLSLLKDTLSAYISADDISILNERVELLQRQWEELCHQLSLRRQQIGERLNEWAVFSEKNKELCEWLTQMESKVSQNGDILIEEMIEKLKKDYQEEIAIAQENKIQLQQMGERLAKASHESKASEIEYKLGKVNDRWQHLLDLIAARVKKLKETLVAVQQLDKNMSSLRTWLAHIESELAKPIVYDSCNSEEIQRKLNEQQELQRDIEKHSTGVASVLNLCEVLLHDCDACATDAECDSIQQATRNLDRRWRNICAMSMERRLKIEETWRLWQKFLDDYSRFEDWLKSSERTAAFPSSSGVIYTVAKEELKKFEAFQRQVHECLTQLELINKQYRRLARENRTDSACSLKQMVHEGNQRWDNLQKRVTSILRRLKHFIGQREEFETARDSILVWLTEMDLQLTNIEHFSECDVQAKIKQLKAFQQEISLNHNKIEQIIAQGEQLIEKSEPLDAAIIEEELDELRRYCQEVFGRVERYHKKLIRLPLPDDEHDLSDRELELEDSAALSDLHWHDRSADSLLSPQPSSNLSLSLAQPLRSERSGRDTPASVDSIPLEWDHDYDLSRDLESAMSRALPSEDEEGQDDKDFYLRGAVGLSGDHSALESQIRQLGKALDDSRFQIQQTENIIRSKTPTGPELDTSYKGYMKLLGECSSSIDSVKRLEHKLKEEEESLPGFVNLHSTETQTAGVIDRWELLQAQALSKELRMKQNLQKWQQFNSDLNSIWAWLGDTEEELEQLQRLELSTDIQTIELQIKKLKELQKAVDHRKAIILSINLCSPEFTQADSKESRDLQDRLSQMNGRWDRVCSLLEEWRGLLQDALMQCQGFHEMSHGLLLMLENIDRRKNEIVPIDSNLDAEILQDHHKQLMQIKHELLESQLRVASLQDMSCQLLVNAEGTDCLEAKEKVHVIGNRLKLLLKEVSRHIKELEKLLDVSSSQQDLSSWSSADELDTSGSVSPTSGRSTPNRQKTPRGKCSLSQPGPSVSSPHSRSTKGGSDSSLSEPGPGRSGRGFLFRVLRAALPLQLLLLLLIGLACLVPMSEEDYSCALSNNFARSFHPMLRYTNGPPPL

SEQ ID NO: 65077 - protein, 977 aa, Homo sapiens
MVVAEDLSALRMAEDSCVDADLPDCNCDVTRQRVKKLKETLVAVQQLDKNMSSLRTWLAHIESELAKPIVYDSCNSEEIQRKLNEQQELQRDIEKHSTGVASVLNLCEVLLHDCDACATDAECDSIQQATRNLDRRWRNICAMSMERRLKIEETWRLWQKFLDDYSRFEDWLKSSERTAAFPSSSGVIYTVAKEELKKFEAFQRQVHECLTQLELINKQYRRLARENRTDSACSLKQMVHEGNQRWDNLQKRVTSILRRLKHFIGQREEFETARDSILVWLTEMDLQLTNIEHFSECDVQAKIKQLKAFQQEISLNHNKIEQIIAQGEQLIEKSEPLDAAIIEEELDELRRYCQEVFGRVERYHKKLIRLPLPDDEHDLSDRELELEDSAALSDLHWHDRSADSLLSPQPSSNLSLSLAQPLRSERSGRDTPASVDSIPLEWDHDYDLSRDLESAMSRALPSEDEEGQDDKDFYLRGAVGLSDVMIPESPEAYVKLTENAIKNTSGDHSALESQIRQLGKALDDSRFQIQQTENIIRSKTPTGPELDTSYKGYMKLLGECSSSIDSVKRLEHKLKEEEESLPGFVNLHSTETQTAGVIDRWELLQAQALSKELRMKQNLQKWQQFNSDLNSIWAWLGDTEEELEQLQRLELSTDIQTIELQIKKLKELQKAVDHRKAIILSINLCSPEFTQADSKESRDLQDRLSQMNGRWDRVCSLLEEWRGLLQDALMQCQGFHEMSHGLLLMLENIDRRKNEIVPIDSNLDAEILQDHHKQLMQIKHELLESQLRVASLQDMSCQLLVNAEGTDCLEAKEKVHVIGNRLKLLLKEVSRHIKELEKLLDVSSSQQDLSSWSSADELDTSGSVSPTSGRSTPNRQKTPRGKCSLSQPGPSVSSPHSRSTKGGSDSSLSEPGPGRSGRGFLFRVLRAALPLQLLLLLLIGLACLVPMSEEDYSCALSNNFARSFHPMLRYTNGPPPL

SEQ ID NO: 65078 - protein, 8797 aa, Homo sapiens
MATSRGASRCPRDIANVMQRLQDEQEIVQKRTFTKWINSHLAKRKPPMVVDDLFEDMKDGVKLLALLEVLSGQKLPCEQGRRMKRIHAVANIGTALKFLEGRKIKLVNINSTDIADGRPSIVLGLMWTIILYFQIEELTSNLPQLQSLSSSASSVDSIVSSETPSPPSKRKVTTKIQGNAKKALLKWVQYTAGKQTGIEVKDFGKSWRSGVAFHSVIHAIRPELVDLETVKGRSNRENLEDAFTIAETELGIPRLLDPEDVDVDKPDEKSIMTYVAQFLKHYPDIHNASTDGQEDDEILPGFPSFANSVQNFKREDRVIFKEMKVWIEQFERDLTRAQMVESNLQDKYQSFKHFRVQYEMKRKQIEHLIQPLHRDGKLSLDQALVKQSWDRVTSRLFDWHIQLDKSLPAPLGTIGAWLYRAEVALREEITVQQVHEETANTIQRKLEQHKDLLQNTDAHKRAFHEIYRTRSVNGIPVPPDQLEDMAERFHFVSSTSELHLMKMEFLELKYRLLSLLVLAESKLKSWIIKYGRRESVEQLLQNYVSFIENSKFFEQYEVTYQILKQTAEMYVKADGSVEEAENVMKFMNETTAQWRNLSVEVRSVRSMLEEVISNWDRYGNTVASLQAWLEDAEKMLNQSENAKKDFFRNLPHWIQQHTAMNDAGNFLIETCDEMVSRDLKQQLLLLNGRWRELFMEVKQYAQADEMDRMKKEYTDCVVTLSAFATEAHKKLSEPLEVSFMNVKLLIQDLEDIEQRVPVMDAQYKIITKTAHLITKESPQEEGKEMFATMSKLKEQLTKVKECYSPLLYESQQLLIPLEELEKQMTSFYDSLGKINEIITVLEREAQSSALFKQKHQELLACQENCKKTLTLIEKGSQSVQKFVTLSNVLKHFDQTRLQRQIADIHVAFQSMVKKTGDWKKHVETNSRLMKKFEESRAELEKVLRIAQEGLEEKGDPEELLRRHTEFFSQLDQRVLNAFLKACDELTDILPEQEQQGLQEAVRKLHKQWKDLQGEAPYHLLHLKIDVEKNRFLASVEECRTELDRETKLMPQEGSEKIIKEHRVFFSDKGPHHLCEKRLQLIEELCVKLPVRDPVRDTPGTCHVTLKELRAAIDSTYRKLMEDPDKWKDYTSRFSEFSSWISTNETQLKGIKGEAIDTANHGEVKRAVEEIRNGVTKRGETLSWLKSRLKVLTEVSSENEAQKQGDELAKLSSSFKALVTLLSEVEKMLSNFGDCVQYKEIVKNSLEELISGSKEVQEQAEKILDTENLFEAQQLLLHHQQKTKRISAKKRDVQQQIAQAQQGEGGLPDRGHEELRKLESTLDGLERSRERQERRIQVTLRKWERFETNKETVVRYLFQTGSSHERFLSFSSLESLSSELEQTKEFSKRTESIAVQAENLVKEASEIPLGPQNKQLLQQQAKSIKEQVKKLEDTLEEDIKTMEMVKTKWDHFGSNFETLSVWITEKEKELNALETSSSAMDMQISQIKVTIQEIESKLSSIVGLEEEAQSFAQFVTTGESARIKAKLTQIRRYGEELREHAQCLEGTILGHLSQQQKFEENLRKIQQSVSEFEDKLAVPIKICSSATETYKVLQEHMDLCQALESLSSAITAFSASARKVVNRDSCVQEAAALQQQYEDILRRAKERQTALENLLAHWQRLEKELSSFLTWLERGEAKASSPEMDISADRVKVEGELQLIQALQNEVVSQASFYSKLLQLKESLFSVASKDDVKMMKLHLEQLDERWRDLPQIINKRINFLQSVVAEHQQFDELLLSFSVWIKLFLSELQTTSEISIMDHQVALTRHKDHAAEVESKKGELQSLQGHLAKLGSLGRAEDLHLLQGKAEDCFQLFEEASQVVERRQLALSHLAEFLQSHASLSGILRQLRQTVEATNSMNKNESDLIEKDLNDALQNAKALESAAVSLDGILSKAQYHLKIGSSEQRTSCRATADQLCGEVERIQNLLGTKQSEADALAVLKKAFQDQKEELLKSIEDIEERTDKERLKEPTRQALQQRLRVFNQLEDELNSHEHELCWLKDKAKQIAQKDVAFAPEVDREINRLEVTWDDTKRLIHENQGQCCGLIDLMREYQNLKSAVSKVLENASSVIVTRTTIKDQEDLKWAFSKHETAKNKMNYKQKDLDNFTSKGKHLLSELKKIHSSDFSLVKTDMESTVDKWLDVSEKLEENMDRLRVSLSIWDDVLSTRDEIEGWSNNCVPQMAENISNLDNHLRAEELLKEFESEVKNKALRLEELHSKVNDLKELTKNLETPPDLQFIEADLMQKLEHAKEITEVAKGTLKDFTAQSTQVEKFINDITTWFTKVEESLMNCAQNETCEALKKVKDIQKELQSQQSNISSTQENLNSLCRKYHSAELESLGRAMTGLIKKHEAVSQLCSKTQASLQESLEKHFSESMQEFQEWFLGAKAAAKESSDRTGDSKVLEAKLHDLQNILDSVSDGQSKLDAVTQEGQTLYAHLSKQIVSSIQEQITKANEEFQAFLKQCLKDKQALQDCASELGSFEDQHRKLNLWIHEMEERFNTENLGESKQHIPEKKNEVHKVEMFLGELLAARESLDKLSQRGQLLSEEGHGAGQEGRLCSQLLTSHQNLLRMTKEKLRSCQVALQEHEALEEALQSMWFWVKAIQDRLACAESTLGSKDTLEKRLSQIQDILLMKGEGEVKLNMAIGKGEQALRSSNKEGQRVIQTQLETLKEVWADIMSSSVHAQSTLESVISQWNDYVERKNQLEQWMESVDQKIEHPLQPQPGLKEKFVLLDHLQSILSEAEDHTRALHRLIAKSRELYEKTEDESFKDTAQEELKTQFNDIMTVAKEKMRKVEEIVKDHLMYLDAVHEFTDWLHSAKEELHRWSDMSGDSSATQKKLSKIKELIDSREIGASRLSRVESLAPEVKQNTTASGCELMHTEMQALRADWKQWEDSVFQTQSCLENLVSQMALSEQEFSGQVAQLEQALEQFSALLKTWAQQLTLLEGKNTDEEIVECWHKGQEILDALQKAEPRTEDLKSQLNELCRFSRDLSTYSGKVSGLIKEYNCLCLQASKGCQNKEQILQQRFRKAFRDFQQWLVNAKITTAKCFDIPQNISEVSTSLQKIQEFLSESENGQHKLNMMLSKGELLSTLLTKEKAKGIQAKVTAAKEDWKNFHSNLHQKESALENLKIQMKDFEVSAEPIQDWLSKTEKMVHESSNRLYDLPAKRREQQKLQSVLEEIHCYEPQLNRLKEKAQQLWEGQAASKSFRHRVSQLSSQYLALSNLTKEKVSRLDRIVAEHNQFSLGIKELQDWMTDAIHMLDSYCHPTSDKSVLDSRTLKLEALLSVKQEKEIQMKMIVTRGESVLQNTSPEGIPTIQQQLQSVKDMWASLLSAGIRCKSQLEGALSKWTSYQDGVRQFSGWMDSMEANLNESERQHAELRDKTTMLGKAKLLNEEVLSYSSLLETIEVKGAGMTEHYVTQLELQDLQERYRAIQERAKEAVTKSEKLVRLHQEYQRDLKAFEVWLGQEQEKLDQYSVLEGDAHTHETTLRDLQELQVHCAEGQALLNSVLHTREDVIPSGIPQAEDRALESLRQDWQAYQHRLSETRTQFNNVVNKLRLMEQKFQQVDEWLKTAEEKVSPRTRRQSNRATKEIQLHQMKKWHEEVTAYRDEVEEVGARAQEILDESHVNSRMGCQATQLTSRYQALLLQVLEQIKFLEEEIQSLEESESSLSSYSDWYGSTHKNFKNVATKIDKVDTVMMGKKLKTLEVLLKDMEKGHSLLKSAREKGERAVKYLEEGEAERLRKEIHDHMEQLKELTSTVRKEHMTLEKGLHLAKEFSDKCKALTQWIAEYQEILHVPEEPKMELYEKKAQLSKYKSLQQTVLSHEPSVKSVREKGEALLELVQDVTLKDKIDQLQSDYQDLCSIGKEHVFSLEAKVKDHEDYNSELQEVEKWLLQMSGRLVAPDLLETSSLETITQQLAHHKAMMEEIAGFEDRLNNLQMKGDTLIGQCADHLQAKLKQNVHAHLQGTKDSYSAICSTAQRMYQSLEHELQKHVSRQDTLQQCQAWLSAVQPDLEPSPQPPLSRAEAIKQVKHFRALQEQARTYLDLLCSMCDLSNASVKTTAKDIQQTEQTIEQKLVQAQNLTQGWEEIKHLKSELWIYLQDADQQLQNMKRRHSELELNIAQNMVSQVKDFVKKLQSKQASVNTIIEKVNKLTKKEESPEHKEINHLNDQWLDLCRQSNNLCLQREEDLQRTRDYHDCMNVVEVFLEKFTTEWDNLARSDAESTAVHLEALKKLALALQERKYAIEDLKDQKQKMIEHLNLDDKELVKEQTSHLEQRWFQLEDLIKRKIQVSVTNLEELNVVQSRFQELMEWAEEQQPNIAEALKQSPPPDMAQNLLMDHLAICSELEAKQMLLKSLIKDADRVMADLGLNERQVIQKALSDAQSHVNCLSDLVGQRRKYLNKALSEKTQFLMAVFQATSQIQQHERKIMFREHICLLPDDVSKQVKTCKSAQASLKTYQNEVTGLWAQGRELMKEVTEQEKSEVLGKLQELQSVYDSVLQKCSHRLQELEKNLVSRKHFKEDFDKACHWLKQADIVTFPEINLMNESSELHTQLAKYQNILEQSPEYENLLLTLQRTGQTILPSLNEVDHSYLSEKLNALPRQFNVIVALAKDKFYKVQEAILARKEYASLIELTTQSLSELEAQFLRMSKVPTDLAVEEALSLQDGCRAILDEVAGLGEAVDELNQKKEGFRSTGQPWQPDKMLHLVTLYHRLKRQTEQRVSLLEDTTSAYQEHEKMCQQLERQLKSVKEEQSKVNEETLPAEEKLKMYHSLAGSLQDSGIVLKRVTIHLEDLAPHLDPLAYEKARHQIQSWQGELKLLTSAIGETVTECESRMVQSIDFQTEMSRSLDWLRRVKAELSGPVYLDLNLQDIQEEIRKIQIHQEEVQSSLRIMNALSHKEKEKFTKAKELISADLEHSLAELSELDGDIQEALRTRQATLTEIYSQCQRYYQVFQAANDWLEDAQELLQLAGNGLDVESAEENLKSHMEFFSTEDQFHSNLEELHSLVATLDPLIKPTGKEDLEQKVASLELRSQRMSRDSGAQVDLLQRCTAQWHDYQKAREEVIELMNDTEKKLSEFSLLKTSSSHEAEEKLSEHKALVSVVNSFHEKIVALEEKASQLEKTGNDASKATLSRSMTTVWQRWTRLRAVAQDQEKILEDAVDEWTGFNNKVKKATEMIDQLQDKLPGSSAEKASKAELLTLLEYHDTFVLELEQQQSALGMLRQQTLSMLQDGAAPTPGEEPPLMQEITAMQDRCLNMQEKVKTNGKLVKQELKDREMVETQINSVKCWVQETKEYLGNPTIEIDAQLEELQILLTEATNHRQNIEKMAEEQKEKYLGLYTILPSELSLQLAEVALDLKIRDQIQDKIKEVEQSKATSQELSRQIQKLAKDLTTILTKLKAKTDNVVQAKTDQKVLGEELDGCNSKLMELDAAVQKFLEQNGQLGKPLAKKIGKLTELHQQTIRQAENRLSKLNQAASHLEEYNEMLELILKWIEKAKVLAHGTIAWNSASQLREQYILHQTLLEESKEIDSELEAMTEKLQYLTSVYCTEKMSQQVAELGRETEELRQMIKIRLQNLQDAAKDMKKFEAELKKLQAALEQAQATLTSPEVGRLSLKEQLSHRQHLLSEMESLKPKVQAVQLCQSALRIPEDVVASLPLCHAALRLQEEASRLQHTAIQQCNIMQEAVVQYEQYEQEMKHLQQLIEGAHREIEDKPVATSNIQELQAQISRHEELAQKIKGYQEQIASLNSKCKMLTMKAKHATMLLTVTEVEGLAEGTEDLDGELLPTPSAHPSVVMMTAGRCHTLLSPVTEESGEEGTNSEISSPPACRSPSPVANTDASVNQDIAYYQALSAERLQTDAAKIHPSTSASQEFYEPGLEPSATAKLGDLQRSWETLKNVISEKQRTLYEALERQQKYQDSLQSISTKMEAIELKLSESPEPGRSPESQMAEHQALMDEILMLQDEINELQSSLAEELVSESCEADPAEQLALQSTLTVLAERMSTIRMKASGKRQLLEEKLNDQLEEQRQEQALQRYRCEADELDSWLLSTKATLDTALSPPKEPMDMEAQLMDCQNMLVEIEQKVVALSELSVHNENLLLEGKAHTKDEAEQLAGKLRRLKGSLLELQRALHDKQLNMQGTAQEKEESDVDLTATQSPGVQEWLAQARTTWTQQRQSSLQQQKELEQELAEQKSLLRSVASRGEEILIQHSAAETSGDAGEKPDVLSQELGMEGEKSSAEDQMRMKWESLHQEFSTKQKLLQNVLEQEQEQVLYSRPNRLLSGVPLYKGDVPTQDKSAVTSLLDGLNQAFEEVSSQSGGAKRQSIHLEQKLYDGVSATSTWLDDVEERLFVATALLPEETETCLFNQEILAKDIKEMSEEMDKNKNLFSQAFPENGDNRDVIEDTLGCLLGRLSLLDSVVNQRCHQMKERLQQILNFQNDLKVLFTSLADNKYIILQKLANVFEQPVAEQIEAIQQAEDGLKEFDAGIIELKRRGDKLQVEQPSMQELSKLQDMYDELMMIIGSRRSGLNQNLTLKSQYERALQDLADLLETGQEKMAGDQKIIVSSKEEIQQLLDKHKEYFQGLESHMILTETLFRKIISFAVQKETQFHTELMAQASAVLKRAHKRGVELEYILETWSHLDEDQQELSRQLEVVESSIPSVGLVEENEDRLIDRITLYQHLKSSLNEYQPKLYQVLDDGKRLLISISCSDLESQLNQLGECWLSNTNKMSKELHRLETILKHWTRYQSESADLIHWLQSAKDRLEFWTQQSVTVPQELEMVRDHLNAFLEFSKEVDAQSSLKSSVLSTGNQLLRLKKVDTATLRSELSRIDSQWTDLLTNIPAVQEKLHQLQMDKLPSRHAISEVMSWISLMENVIQKDEDNIKNSIGYKAIHEYLQKYKGFKIDINCKQLTVDFVNQSVLQISSQDVESKRSDKTDFAEQLGAMNKSWQILQGLVTEKIQLLEGLLESWSEYENNVQCLKTWFETQEKRLKQQHRIGDQASVQNALKDCQDLEDLIKAKEKEVEKIEQNGLALIQNKKEDVSSIVMSTLRELGQTWANLDHMVGQLKILLKSVLDQWSSHKVAFDKINSYLMEARYSLSRFRLLTGSLEAVQVQVDNLQNLQDDLEKQERSLQKFGSITNQLLKECHPPVTETLTNTLKEVNMRWNNLLEEIAEQLQSSKALLQLWQRYKDYSKQCASTVQQQEDRTNELLKAATNKDIADDEVATWIQDCNDLLKGLGTVKDSLFFLHELGEQLKQQVDASAASAIQSDQLSLSQHLCALEQALCKQQTSLQAGVLDYETFAKSLEALEAWIVEAEEILQGQDPSHSSDLSTIQERMEELKGQMLKFSSMAPDLDRLNELGYRLPLNDKEIKRMQNLNRHWSLISSQTTERFSKLQSFLLQHQTFLEKCETWMEFLVQTEQKLAVEISGNYQHLLEQQRAHELFQAEMFSRQQILHSIIIDGQRLLEQGQVDDRDEFNLKLTLLSNQWQGVIRRAQQRRGIIDSQIRQWQRYREMAEKLRKWLVEVSYLPMSGLGSVPIPLQQARTLFDEVQFKEKVFLRQQGSYILTVEAGKQLLLSADSGAEAALQAELAEIQEKWKSASMRLEEQKKKLAFLLKDWEKCEKGIADSLEKLRTFKKKLSQSLPDHHEELHAEQMRCKELENAVGSWTDDLTQLSLLKDTLSAYISADDISILNERVELLQRQWEELCHQLSLRRQQIGERLNEWAVFSEKNKELCEWLTQMESKVSQNGDILIEEMIEKLKKDYQEEIAIAQENKIQLQQMGERLAKASHESKASEIEYKLGKVNDRWQHLLDLIAARVKKLKETLVAVQQLDKNMSSLRTWLAHIESELAKPIVYDSCNSEEIQRKLNEQQELQRDIEKHSTGVASVLNLCEVLLHDCDACATDAECDSIQQATRNLDRRWRNICAMSMERRLKIEETWRLWQKFLDDYSRFEDWLKSSERTAAFPSSSGVIYTVAKEELKKFEAFQRQVHECLTQLELINKQYRRLARENRTDSACSLKQMVHEGNQRWDNLQKRVTSILRRLKHFIGQREEFETARDSILVWLTEMDLQLTNIEHFSECDVQAKIKQLKAFQQEISLNHNKIEQIIAQGEQLIEKSEPLDAAIIEEELDELRRYCQEVFGRVERYHKKLIRLPLPDDEHDLSDRELELEDSAALSDLHWHDRSADSLLSPQPSSNLSLSLAQPLRSERSGRDTPASVDSIPLEWDHDYDLSRDLESAMSRALPSEDEEGQDDKDFYLRGAVGLSGDHSALESQIRQLGKALDDSRFQIQQTENIIRSKTPTGPELDTSYKGYMKLLGECSSSIDSVKRLEHKLKEEEESLPGFVNLHSTETQTAGVIDRWELLQAQALSKELRMKQNLQKWQQFNSDLNSIWAWLGDTEEELEQLQRLELSTDIQTIELQIKKLKELQKAVDHRKAIILSINLCSPEFTQADSKESRDLQDRLSQMNGRWDRVCSLLEEWRGLLQDALMQCQGFHEMSHGLLLMLENIDRRKNEIVPIDSNLDAEILQDHHKQLMQIKHELLESQLRVASLQDMSCQLLVNAEGTDCLEAKEKVHVIGNRLKLLLKEVSRHIKELEKLLDVSSSQQDLSSWSSADELDTSGSVSPTSGRSTPNRQKTPRGKCSLSQPGPSVSSPHSRSTKGGSDSSLSEPGPGRSGRGFLFRVLRAALPLQLLLLLLIGLACLVPMSEEDYSCALSNNFARSFHPMLRYTNGPPPL

SEQ ID NO: 65079 - protein, 8749 aa, Homo sapiens
MATSRGASRCPRDIANVMQRLQDEQEIVQKRTFTKWINSHLAKRKPPMVVDDLFEDMKDGVKLLALLEVLSGQKLPCEQGRRMKRIHAVANIGTALKFLEGRKSMHRGSPIKLVNINSTDIADGRPSIVLGLMWTIILYFQIEELTSNLPQLQSLSSSASSVDSIVSSETPSPPSKRKVTTKIQGNAKKALLKWVQYTAGKQTGIEVKDFGKSWRSGVAFHSVIHAIRPELVDLETVKGRSNRENLEDAFTIAETELGIPRLLDPEDVDVDKPDEKSIMTYVAQFLKHYPDIHNASTDGQEDDEILPGFPSFANSVQNFKREDRVIFKEMKVWIEQFERDLTRAQMVESNLQDKYQSFKHFRVQYEMKRKQIEHLIQPLHRDGKLSLDQALVKQSWDRVTSRLFDWHIQLDKSLPAPLGTIGAWLYRAEVALREEITVQQVHEETANTIQRKLEQHKDLLQNTDAHKRAFHEIYRTRSVNGIPVPPDQLEDMAERFHFVSSTSELHLMKMEFLELKYRLLSLLVLAESKLKSWIIKYGRRESVEQLLQNYVSFIENSKFFEQYEVTYQILKQTAEMYVKADGSVEEAENVMKFMNETTAQWRNLSVEVRSVRSMLEEVISNWDRYGNTVASLQAWLEDAEKMLNQSENAKKDFFRNLPHWIQQHTAMNDAGNFLIETCDEMVSRDLKQQLLLLNGRWRELFMEVKQYAQADEMDRMKKEYTDCVVTLSAFATEAHKKLSEPLEVSFMNVKLLIQDLEDIEQRVPVMDAQYKIITKTAHLITKESPQEEGKEMFATMSKLKEQLTKVKECYSPLLYESQQLLIPLEELEKQMTSFYDSLGKINEIITVLEREAQSSALFKQKHQELLACQENCKKTLTLIEKGSQSVQKFVTLSNVLKHFDQTRLQRQIADIHVAFQSMVKKTGDWKKHVETNSRLMKKFEESRAELEKVLRIAQEGLEEKGDPEELLRRHTEFFSQLDQRVLNAFLKACDELTDILPEQEQQGLQEAVRKLHKQWKDLQGEAPYHLLHLKIDVEKNRFLASVEECRTELDRETKLMPQEGSEKIIKEHRVFFSDKGPHHLCEKRLQLIEELCVKLPVRDPVRDTPGTCHVTLKELRAAIDSTYRKLMEDPDKWKDYTSRFSEFSSWISTNETQLKGIKGEAIDTANHGEVKRAVEEIRNGVTKRGETLSWLKSRLKVLTEVSSENEAQKQGDELAKLSSSFKALVTLLSEVEKMLSNFGDCVQYKEIVKNSLEELISGSKEVQEQAEKILDTENLFEAQQLLLHHQQKTKRISAKKRDVQQQIAQAQQGEGGLPDRGHEELRKLESTLDGLERSRERQERRIQVTLRKWERFETNKETVVRYLFQTGSSHERFLSFSSLESLSSELEQTKEFSKRTESIAVQAENLVKEASEIPLGPQNKQLLQQQAKSIKEQVKKLEDTLEEDIKTMEMVKTKWDHFGSNFETLSVWITEKEKELNALETSSSAMDMQISQIKVTIQEIESKLSSIVGLEEEAQSFAQFVTTGESARIKAKLTQIRRYGEELREHAQCLEGTILGHLSQQQKFEENLRKIQQSVSEFEDKLAVPIKICSSATETYKVLQEHMDLCQALESLSSAITAFSASARKVVNRDSCVQEAAALQQQYEDILRRAKERQTALENLLAHWQRLEKELSSFLTWLERGEAKASSPEMDISADRVKVEGELQLIQALQNEVVSQASFYSKLLQLKESLFSVASKDDVKMMKLHLEQLDERWRDLPQIINKRINFLQSVVAEHQQFDELLLSFSVWIKLFLSELQTTSEISIMDHQVALTRHKDHAAEVESKKGELQSLQGHLAKLGSLGRAEDLHLLQGKAEDCFQLFEEASQVVERRQLALSHLAEFLQSHASLSGILRQLRQTVEATNSMNKNESDLIEKDLNDALQNAKALESAAVSLDGILSKAQYHLKIGSSEQRTSCRATADQLCGEVERIQNLLGTKQSEADALAVLKKAFQDQKEELLKSIEDIEERTDKERLKEPTRQALQQRLRVFNQLEDELNSHEHELCWLKDKAKQIAQKDVAFAPEVDREINRLEVTWDDTKRLIHENQGQCCGLIDLMREYQNLKSAVSKVLENASSVIVTRTTIKDQEDLKWAFSKHETAKNKMNYKQKDLDNFTSKGKHLLSELKKIHSSDFSLVKTDMESTVDKWLDVSEKLEENMDRLRVSLSIWDDVLSTRDEIEGWSNNCVPQMAENISNLDNHLRAEELLKEFESEVKNKALRLEELHSKVNDLKELTKNLETPPDLQFIEADLMQKLEHAKEITEVAKGTLKDFTAQSTQVEKFINDITTWFTKVEESLMNCAQNETCEALKKVKDIQKELQSQQSNISSTQENLNSLCRKYHSAELESLGRAMTGLIKKHEAVSQLCSKTQASLQESLEKHFSESMQEFQEWFLGAKAAAKESSDRTGDSKVLEAKLHDLQNILDSVSDGQSKLDAVTQEGQTLYAHLSKQIVSSIQEQITKANEEFQAFLKQCLKDKQALQDCASELGSFEDQHRKLNLWIHEMEERFNTENLGESKQHIPEKKNEVHKVEMFLGELLAARESLDKLSQRGQLLSEEGHGAGQEGRLCSQLLTSHQNLLRMTKEKLRSCQVALQEHEALEEALQSMWFWVKAIQDRLACAESTLGSKDTLEKRLSQIQDILLMKGEGEVKLNMAIGKGEQALRSSNKEGQRVIQTQLETLKEVWADIMSSSVHAQSTLESVISQWNDYVERKNQLEQWMESVDQKIEHPLQPQPGLKEKFVLLDHLQSILSEAEDHTRALHRLIAKSRELYEKTEDESFKDTAQEELKTQFNDIMTVAKEKMRKVEEIVKDHLMYLDAVHEFTDWLHSAKEELHRWSDMSGDSSATQKKLSKIKELIDSREIGASRLSRVESLAPEVKQNTTASGCELMHTEMQALRADWKQWEDSVFQTQSCLENLVSQMALSEQEFSGQVAQLEQALEQFSALLKTWAQQLTLLEGKNTDEEIVECWHKGQEILDALQKAEPRTEDLKSQLNELCRFSRDLSTYSGKVSGLIKEYNCLCLQASKGCQNKEQILQQRFRKAFRDFQQWLVNAKITTAKCFDIPQNISEVSTSLQKIQEFLSESENGQHKLNMMLSKGELLSTLLTKEKAKGIQAKVTAAKEDWKNFHSNLHQKESALENLKIQMKDFEVSAEPIQDWLSKTEKMVHESSNRLYDLPAKRREQQKLQSVLEEIHCYEPQLNRLKEKAQQLWEGQAASKSFRHRVSQLSSQYLALSNLTKEKVSRLDRIVAEHNQFSLGIKELQDWMTDAIHMLDSYCHPTSDKSVLDSRTLKLEALLSVKQEKEIQMKMIVTRGESVLQNTSPEGIPTIQQQLQSVKDMWASLLSAGIRCKSQLEGALSKWTSYQDGVRQFSGWMDSMEANLNESERQHAELRDKTTMLGKAKLLNEEVLSYSSLLETIEVKGAGMTEHYVTQLELQDLQERYRAIQERAKEAVTKSEKLVRLHQEYQRDLKAFEVWLGQEQEKLDQYSVLEGDAHTHETTLRDLQELQVHCAEGQALLNSVLHTREDVIPSGIPQAEDRALESLRQDWQAYQHRLSETRTQFNNVVNKLRLMEQKFQQVDEWLKTAEEKKWHEEVTAYRDEVEEVGARAQEILDESHVNSRMGCQATQLTSRYQALLLQVLEQIKFLEEEIQSLEESESSLSSYSDWYGSTHKNFKNVATKIDKVDTVMMGKKLKTLEVLLKDMEKGHSLLKSAREKGERAVKYLEEGEAERLRKEIHDHMEQLKELTSTVRKEHMTLEKGLHLAKEFSDKCKALTQWIAEYQEILHVPEEPKMELYEKKAQLSKYKSLQQTVLSHEPSVKSVREKGEALLELVQDVTLKDKIDQLQSDYQDLCSIGKAMMEEIAGFEDRLNNLQMKGDTLIGQCADHLQAKLKQNVHAHLQGTKDSYSAICSTAQRMYQSLEHELQKHVSRQDTLQQCQAWLSAVQPDLEPSPQPPLSRAEAIKQVKHFRALQEQARTYLDLLCSMCDLSNASVKTTAKDIQQTEQTIEQKLVQAQNLTQGWEEIKHLKSELWIYLQDADQQLQNMKRRHSELELNIAQNMVSQVKDFVKKLQSKQASVNTIIEKVNKLTKKEESPEHKEINHLNDQWLDLCRQSNNLCLQREEDLQRTRDYHDCMNVVEVFLEKFTTEWDNLARSDAESTAVHLEALKKLALALQERKYAIEDLKDQKQKMIEHLNLDDKELVKEQTSHLEQRWFQLEDLIKRKIQVSVTNLEELNVVQSRFQELMEWAEEQQPNIAEALKQSPPPDMAQNLLMDHLAICSELEAKQMLLKSLIKDADRVMADLGLNERQVIQKALSDAQSHVNCLSDLVGQRRKYLNKALSEKTQFLMAVFQATSQIQQHERKIMFREHICLLPDDVSKQVKTCKSAQASLKTYQNEVTGLWAQGRELMKEVTEQEKSEVLGKLQELQSVYDSVLQKCSHRLQELEKNLVSRKHFKEDFDKACHWLKQADIVTFPEINLMNESSELHTQLAKYQNILEQSPEYENLLLTLQRTGQTILPSLNEVDHSYLSEKLNALPRQFNVIVALAKDKFYKVQEAILARKEYASLIELTTQSLSELEAQFLRMSKVPTDLAVEEALSLQDGCRAILDEVAGLGEAVDELNQKKEGFRSTGQPWQPDKMLHLVTLYHRLKRQTEQRVSLLEDTTSAYQEHEKMCQQLERQLKSVKEEQSKVNEETLPAEEKLKMYHSLAGSLQDSGIVLKRVTIHLEDLAPHLDPLAYEKARHQIQSWQGELKLLTSAIGETVTECESRMVQSIDFQTEMSRSLDWLRRVKAELSGPVYLDLNLQDIQEEIRKIQIHQEEVQSSLRIMNALSHKEKEKFTKAKELISADLEHSLAELSELDGDIQEALRTRQATLTEIYSQCQRYYQVFQAANDWLEDAQELLQLAGNGLDVESAEENLKSHMEFFSTEDQFHSNLEELHSLVATLDPLIKPTGKEDLEQKVASLELRSQRMSRDSGAQVDLLQRCTAQWHDYQKAREEVIELMNDTEKKLSEFSLLKTSSSHEAEEKLSEHKALVSVVNSFHEKIVALEEKASQLEKTGNDASKATLSRSMTTVWQRWTRLRAVAQDQEKILEDAVDEWTGFNNKVKKATEMIDQLQDKLPGSSAEKASKAELLTLLEYHDTFVLELEQQQSALGMLRQQTLSMLQDGAAPTPGEEPPLMQEITAMQDRCLNMQEKVKTNGKLVKQELKDREMVETQINSVKCWVQETKEYLGNPTIEIDAQLEELQILLTEATNHRQNIEKMAEEQKEKYLGLYTILPSELSLQLAEVALDLKIRDQIQDKIKEVEQSKATSQELSRQIQKLAKDLTTILTKLKAKTDNVVQAKTDQKVLGEELDGCNSKLMELDAAVQKFLEQNGQLGKPLAKKIGKLTELHQQTIRQAENRLSKLNQAASHLEEYNEMLELILKWIEKAKVLAHGTIAWNSASQLREQYILHQTLLEESKEIDSELEAMTEKLQYLTSVYCTEKMSQQVAELGRETEELRQMIKIRLQNLQDAAKDMKKFEAELKKLQAALEQAQATLTSPEVGRLSLKEQLSHRQHLLSEMESLKPKVQAVQLCQSALRIPEDVVASLPLCHAALRLQEEASRLQHTAIQQCNIMQAAVVQYEQYEQEMKHLQQLIEGAHREIEDKPVATSNIQELQAQISRHEELAQKIKGYQEQIASLNSKCKMLTMKAKHATMLLTVTEVEGLAEGTEDLDGELLPTPSAHPSVVMMTAGRCHTLLSPVTEESGEEGTNSEISSPPACRSPSPVANTDASVNQDIAYYQALSAERLQTDAAKIHPSTSASQEFYEPGLEPSATAKLGDLQRSWETLKNVISEKQRTLYEALERQQKYQDSLQSISTKMEAIELKLSESPEPGRSPESQMAEHQALMDEILMLQDEINELQSSLAEELVSESCEADPAEQLALQSTLTVLAERMSTIRMKASGKRQLLEEKLNDQLEEQRQEQALQRYRCEADELDSWLLSTKATLDTALSPPKEPMDMEAQLMDCQNMLVEIEQKVVALSELSVHNENLLLEGKAHTKDEAEQLAGKLRRLKGSLLELQRALHDKQLNMQGTAQEKEESDVDLTATQSPGVQEWLAQARTTWTQQRQSSLQQQKELEQELAEQKSLLRSVASRGEEILIQHSAAETSGDAGEKPDVLSQELGMEGEKSSAEDQMRMKWESLHQEFSTKQKLLQNVLEQEQEQVLYSRPNRLLSGVPLYKGDVPTQDKSAVTSLLDGLNQAFEEVSSQSGGAKRQSIHLEQKLYDGVSATSTWLDDVEERLFVATALLPEETETCLFNQEILAKDIKEMSEEMDKNKNLFSQAFPENGDNRDVIEDTLGCLLGRLSLLDSVVNQRCHQMKERLQQILNFQNDLKVLFTSLADNKYIILQKLANVFEQPVAEQIEAIQQAEDGLKEFDAGIIELKRRGDKLQVEQPSMQELSKLQDMYDELMMIIGSRRSGLNQNLTLKSQYERALQDLADLLETGQEKMAGDQKIIVSSKEEIQQLLDKHKEYFQGLESHMILTETLFRKIISFAVQKETQFHTELMAQASAVLKRAHKRGVELEYILETWSHLDEDQQELSRQLEVVESSIPSVGLVEENEDRLIDRITLYQHLKSSLNEYQPKLYQVLDDGKRLLISISCSDLESQLNQLGECWLSNTNKMSKELHRLETILKHWTRYQSESADLIHWLQSAKDRLEFWTQQSVTVPQELEMVRDHLNAFLEFSKEVDAQSSLKSSVLSTGNQLLRLKKVDTATLRSELSRIDSQWTDLLTNIPAVQEKLHQLQMDKLPSRHAISEVMSWISLMENVIQKDEDNIKNSIGYKAIHEYLQKYKGFKIDINCKQLTVDFVNQSVLQISSQDVESKRSDKTDFAEQLGAMNKSWQILQGLVTEKIQLLEGLLESWSEYENNVQCLKTWFETQEKRLKQQHRIGDQASVQNALKDCQDLEDLIKAKEKEVEKIEQNGLALIQNKKEDVSSIVMSTLRELGQTWANLDHMVGQLKILLKSVLDQWSSHKVAFDKINSYLMEARYSLSRFRLLTGSLEAVQVQVDNLQNLQDDLEKQERSLQKFGSITNQLLKECHPPVTETLTNTLKEVNMRWNNLLEEIAEQLQSSKALLQLWQRYKDYSKQCASTVQQQEDRTNELLKAATNKDIADDEVATWIQDCNDLLKGLGTVKDSLFFLHELGEQLKQQVDASAASAIQSDQLSLSQHLCALEQALCKQQTSLQAGVLDYETFAKSLEALEAWIVEAEEILQGQDPSHSSDLSTIQERMEELKGQMLKFSSMAPDLDRLNELGYRLPLNDKEIKRMQNLNRHWSLISSQTTERFSKLQSFLLQHQTFLEKCETWMEFLVQTEQKLAVEISGNYQHLLEQQRAHELFQAEMFSRQQILHSIIIDGQRLLEQGQVDDRDEFNLKLTLLSNQWQGVIRRAQQRRGIIDSQIRQWQRYREMAEKLRKWLVEVSYLPMSGLGSVPIPLQQARTLFDEVQFKEKVFLRQQGSYILTVEAGKQLLLSADSGAEAALQAELAEIQEKWKSASMRLEEQKKKLAFLLKDWEKCEKGIADSLEKLRTFKKKLSQSLPDHHEELHAEQMRCKELENAVGSWTDDLTQLSLLKDTLSAYISADDISILNERVELLQRQWEELCHQLSLRRQQIGERLNEWAVFSEKNKELCEWLTQMESKVSQNGDILIEEMIEKLKKDYQEEIAIAQENKIQLQQMGERLAKASHESKASEIEYKLGKVNDRWQHLLDLIAARVKKLKETLVAVQQLDKNMSSLRTWLAHIESELAKPIVYDSCNSEEIQRKLNEQQELQRDIEKHSTGVASVLNLCEVLLHDCDACATDAECDSIQQATRNLDRRWRNICAMSMERRLKIEETWRLWQKFLDDYSRFEDWLKSSERTAAFPSSSGVIYTVAKEELKKFEAFQRQVHECLTQLELINKQYRRLARENRTDSACSLKQMVHEGNQRWDNLQKRVTSILRRLKHFIGQREEFETARDSILVWLTEMDLQLTNIEHFSECDVQAKIKQLKAFQQEISLNHNKIEQIIAQGEQLIEKSEPLDAAIIEEELDELRRYCQEVFGRVERYHKKLIRLPLPDDEHDLSDRELELEDSAALSDLHWHDRSADSLLSPQPSSNLSLSLAQPLRSERSGRDTPASVDSIPLEWDHDYDLSRDLESAMSRALPSEDEEGQDDKDFYLRGAVGLSDVMIPESPEAYVKLTENAIKNTSGDHSALESQIRQLGKALDDSRFQIQQTENIIRSKTPTGPELDTSYKGYMKLLGECSSSIDSVKRLEHKLKEEEESLPGFVNLHSTETQTAGVIDRWELLQAQALSKELRMKQNLQKWQQFNSDLNSIWAWLGDTEEELEQLQRLELSTDIQTIELQIKKLKELQKAVDHRKAIILSINLCSPEFTQADSKESRDLQDRLSQMNGRWDRVCSLLEEWRGLLQDALMQCQGFHEMSHGLLLMLENIDRRKNEIVPIDSNLDAEILQDHHKQLMQIKHELLESQLRVASLQDMSCQLLVNAEGTDCLEAKEKVHVIGNRLKLLLKEVSRHIKELEKLLDVSSSQQDLSSWSSADELDTSGSVSPTSGRSTPNRQKTPRGKCSLSQPGPSVSSPHSRSTKGGSDSSLSEPGPGRSGRGFLFRVLRAALPLQLLLLLLIGLACLVPMSEEDYSCALSNNFARSFHPMLRYTNGPPPL

SEQ ID NO: 65080 - protein, 8749 aa, Homo sapiens
MATSRGASRCPRDIANVMQRLQDEQEIVQKRTFTKWINSHLAKRKPPMVVDDLFEDMKDGVKLLALLEVLSGQKLPCEQGRRMKRIHAVANIGTALKFLEGRKSMHRGSPIKLVNINSTDIADGRPSIVLGLMWTIILYFQIEELTSNLPQLQSLSSSASSVDSIVSSETPSPPSKRKVTTKIQGNAKKALLKWVQYTAGKQTGIEVKDFGKSWRSGVAFHSVIHAIRPELVDLETVKGRSNRENLEDAFTIAETELGIPRLLDPEDVDVDKPDEKSIMTYVAQFLKHYPDIHNASTDGQEDDEILPGFPSFANSVQNFKREDRVIFKEMKVWIEQFERDLTRAQMVESNLQDKYQSFKHFRVQYEMKRKQIEHLIQPLHRDGKLSLDQALVKQSWDRVTSRLFDWHIQLDKSLPAPLGTIGAWLYRAEVALREEITVQQVHEETANTIQRKLEQHKDLLQNTDAHKRAFHEIYRTRSVNGIPVPPDQLEDMAERFHFVSSTSELHLMKMEFLELKYRLLSLLVLAESKLKSWIIKYGRRESVEQLLQNYVSFIENSKFFEQYEVTYQILKQTAEMYVKADGSVEEAENVMKFMNETTAQWRNLSVEVRSVRSMLEEVISNWDRYGNTVASLQAWLEDAEKMLNQSENAKKDFFRNLPHWIQQHTAMNDAGNFLIETCDEMVSRDLKQQLLLLNGRWRELFMEVKQYAQADEMDRMKKEYTDCVVTLSAFATEAHKKLSEPLEVSFMNVKLLIQDLEDIEQRVPVMDAQYKIITKTAHLITKESPQEEGKEMFATMSKLKEQLTKVKECYSPLLYESQQLLIPLEELEKQMTSFYDSLGKINEIITVLEREAQSSALFKQKHQELLACQENCKKTLTLIEKGSQSVQKFVTLSNVLKHFDQTRLQRQIADIHVAFQSMVKKTGDWKKHVETNSRLMKKFEESRAELEKVLRIAQEGLEEKGDPEELLRRHTEFFSQLDQRVLNAFLKACDELTDILPEQEQQGLQEAVRKLHKQWKDLQGEAPYHLLHLKIDVEKNRFLASVEECRTELDRETKLMPQEGSEKIIKEHRVFFSDKGPHHLCEKRLQLIEELCVKLPVRDPVRDTPGTCHVTLKELRAAIDSTYRKLMEDPDKWKDYTSRFSEFSSWISTNETQLKGIKGEAIDTANHGEVKRAVEEIRNGVTKRGETLSWLKSRLKVLTEVSSENEAQKQGDELAKLSSSFKALVTLLSEVEKMLSNFGDCVQYKEIVKNSLEELISGSKEVQEQAEKILDTENLFEAQQLLLHHQQKTKRISAKKRDVQQQIAQAQQGEGGLPDRGHEELRKLESTLDGLERSRERQERRIQVTLRKWERFETNKETVVRYLFQTGSSHERFLSFSSLESLSSELEQTKEFSKRTESIAVQAENLVKEASEIPLGPQNKQLLQQQAKSIKEQVKKLEDTLEEDIKTMEMVKTKWDHFGSNFETLSVWITEKEKELNALETSSSAMDMQISQIKVTIQEIESKLSSIVGLEEEAQSFAQFVTTGESARIKAKLTQIRRYGEELREHAQCLEGTILGHLSQQQKFEENLRKIQQSVSEFEDKLAVPIKICSSATETYKVLQEHMDLCQALESLSSAITAFSASARKVVNRDSCVQEAAALQQQYEDILRRAKERQTALENLLAHWQRLEKELSSFLTWLERGEAKASSPEMDISADRVKVEGELQLIQASSRKFVSQASFYSKLLQLKESLFSVASKDDVKMMKLHLEQLDERWRDLPQIINKRINFLQSVVAEHQQFDELLLSFSVWIKLFLSELQTTSEISIMDHQVALTRHKDHAAEVESKKGELQSLQGHLAKLGSLGRAEDLHLLQGKAEDCFQLFEEASQVVERRQLALSHLAEFLQSHASLSGILRQLRQTVEATNSMNKNESDLIEKDLNDALQNAKALESAAVSLDGILSKAQYHLKIGSSEQRTSCRATADQLCGEVERIQNLLGTKQSEADALAVLKKAFQDQKEELLKSIEDIEERTDKERLKEPTRQALQQRLRVFNQLEDELNSHEHELCWLKDKAKQIAQKDVAFAPEVDREINRLEVTWDDTKRLIHENQGQCCGLIDLMREYQNLKSAVSKVLENASSVIVTRTTIKDQEDLKWAFSKHETAKNKMNYKQKDLDNFTSKGKHLLSELKKIHSSDFSLVKTDMESTVDKWLDVSEKLEENMDRLRVSLSIWDDVLSTRDEIEGWSNNCVPQMAENISNLDNHLRAEELLKEFESEVKNKALRLEELHSKVNDLKELTKNLETPPDLQFIEADLMQKLEHAKEITEVAKGTLKDFTAQSTQVEKFINDITTWFTKVEESLMNCAQNETCEALKKVKDIQKELQSQQSNISSTQENLNSLCRKYHSAELESLGRAMTGLIKKHEAVSQLCSKTQASLQESLEKHFSESMQEFQEWFLGAKAAAKESSDRTGDSKVLEAKLHDLQNILDSVSDGQSKLDAVTQEGQTLYAHLSKQIVSSIQEQITKANEEFQAFLKQCLKDKQALQDCASELGSFEDQHRKLNLWIHEMEERFNTENLGESKQHIPEKKNEVHKVEMFLGELLAARESLDKLSQRGQLLSEEGHGAGQEGRLCSQLLTSHQNLLRMTKEKLRSCQVALQEHEALEEALQSMWFWVKAIQDRLACAESTLGSKDTLEKRLSQIQDILLMKGEGEVKLNMAIGKGEQALRSSNKEGQRVIQTQLETLKEVWADIMSSSVHAQSTLESVISQWNDYVERKNQLEQWMESVDQKIEHPLQPQPGLKEKFVLLDHLQSILSEAEDHTRALHRLIAKSRELYEKTEDESFKDTAQEELKTQFNDIMTVAKEKMRKVEEIVKDHLMYLDAVHEFTDWLHSAKEELHRWSDMSGDSSATQKKLSKIKELIDSREIGASRLSRVESLAPEVKQNTTASGCELMHTEMQALRADWKQWEDSVFQTQSCLENLVSQMALSEQEFSGQVAQLEQALEQFSALLKTWAQQLTLLEGKNTDEEIVECWHKGQEILDALQKAEPRTEDLKSQLNELCRFSRDLSTYSGKVSGLIKEYNCLCLQASKGCQNKEQILQQRFRKAFRDFQQWLVNAKITTAKCFDIPQNISEVSTSLQKIQEFLSESENGQHKLNMMLSKGELLSTLLTKEKAKGIQAKVTAAKEDWKNFHSNLHQKESALENLKIQMKDFEVSAEPIQDWLSKTEKMVHESSNRLYDLPAKRREQQKLQSVLEEIHCYEPQLNRLKEKAQQLWEGQAASKSFRHRVSQLSSQYLALSNLTKEKVSRLDRIVAEHNQFSLGIKELQDWMTDAIHMLDSYCHPTSDKSVLDSRTLKLEALLSVKQEKEIQMKMIVTRGESVLQNTSPEGIPTIQQQLQSVKDMWASLLSAGIRCKSQLEGALSKWTSYQDGVRQFSGWMDSMEANLNESERQHAELRDKTTMLGKAKLLNEEVLSYSSLLETIEVKGAGMTEHYVTQLELQDLQERYRAIQERAKEAVTKSEKLVRLHQEYQRDLKAFEVWLGQEQEKLDQYSVLEGDAHTHETTLRDLQELQVHCAEGQALLNSVLHTREDVIPSGIPQAEDRALESLRQDWQAYQHRLSETRTQFNNVVNKLRLMEQKFQQVDEWLKTAEEKKWHEEVTAYRDEVEEVGARAQEILDESHVNSRMGCQATQLTSRYQALLLQVLEQIKFLEEEIQSLEESESSLSSYSDWYGSTHKNFKNVATKIDKVDTVMMGKKLKTLEVLLKDMEKGHSLLKSAREKGERAVKYLEEGEAERLRKEIHDHMEQLKELTSTVRKEHMTLEKGLHLAKEFSDKCKALTQWIAEYQEILHVPEEPKMELYEKKAQLSKYKSLQQTVLSHEPSVKSVREKGEALLELVQDVTLKDKIDQLQSDYQDLCSIGKAMMEEIAGFEDRLNNLQMKGDTLIGQCADHLQAKLKQNVHAHLQGTKDSYSAICSTAQRMYQSLEHELQKHVSRQDTLQQCQAWLSAVQPDLEPSPQPPLSRAEAIKQVKHFRALQEQARTYLDLLCSMCDLSNASVKTTAKDIQQTEQTIEQKLVQAQNLTQGWEEIKHLKSELWIYLQDADQQLQNMKRRHSELELNIAQNMVSQVKDFVKKLQSKQASVNTIIEKVNKLTKKEESPEHKEINHLNDQWLDLCRQSNNLCLQREEDLQRTRDYHDCMNVVEVFLEKFTTEWDNLARSDAESTAVHLEALKKLALALQERKYAIEDLKDQKQKMIEHLNLDDKELVKEQTSHLEQRWFQLEDLIKRKIQVSVTNLEELNVVQSRFQELMEWAEEQQPNIAEALKQSPPPDMAQNLLMDHLAICSELEAKQMLLKSLIKDADRVMADLGLNERQVIQKALSDAQSHVNCLSDLVGQRRKYLNKALSEKTQFLMAVFQATSQIQQHERKIMFREHICLLPDDVSKQVKTCKSAQASLKTYQNEVTGLWAQGRELMKEVTEQEKSEVLGKLQELQSVYDSVLQKCSHRLQELEKNLVSRKHFKEDFDKACHWLKQADIVTFPEINLMNESSELHTQLAKYQNILEQSPEYENLLLTLQRTGQTILPSLNEVDHSYLSEKLNALPRQFNVIVALAKDKFYKVQEAILARKEYASLIELTTQSLSELEAQFLRMSKVPTDLAVEEALSLQDGCRAILDEVAGLGEAVDELNQKKEGFRSTGQPWQPDKMLHLVTLYHRLKRQTEQRVSLLEDTTSAYQEHEKMCQQLERQLKSVKEEQSKVNEETLPAEEKLKMYHSLAGSLQDSGIVLKRVTIHLEDLAPHLDPLAYEKARHQIQSWQGELKLLTSAIGETVTECESRMVQSIDFQTEMSRSLDWLRRVKAELSGPVYLDLNLQDIQEEIRKIQIHQEEVQSSLRIMNALSHKEKEKFTKAKELISADLEHSLAELSELDGDIQEALRTRQATLTEIYSQCQRYYQVFQAANDWLEDAQELLQLAGNGLDVESAEENLKSHMEFFSTEDQFHSNLEELHSLVATLDPLIKPTGKEDLEQKVASLELRSQRMSRDSGAQVDLLQRCTAQWHDYQKAREEVIELMNDTEKKLSEFSLLKTSSSHEAEEKLSEHKALVSVVNSFHEKIVALEEKASQLEKTGNDASKATLSRSMTTVWQRWTRLRAVAQDQEKILEDAVDEWTGFNNKVKKATEMIDQLQDKLPGSSAEKASKAELLTLLEYHDTFVLELEQQQSALGMLRQQTLSMLQDGAAPTPGEEPPLMQEITAMQDRCLNMQEKVKTNGKLVKQELKDREMVETQINSVKCWVQETKEYLGNPTIEIDAQLEELQILLTEATNHRQNIEKMAEEQKEKYLGLYTILPSELSLQLAEVALDLKIRDQIQDKIKEVEQSKATSQELSRQIQKLAKDLTTILTKLKAKTDNVVQAKTDQKVLGEELDGCNSKLMELDAAVQKFLEQNGQLGKPLAKKIGKLTELHQQTIRQAENRLSKLNQAASHLEEYNEMLELILKWIEKAKVLAHGTIAWNSASQLREQYILHQTLLEESKEIDSELEAMTEKLQYLTSVYCTEKMSQQVAELGRETEELRQMIKIRLQNLQDAAKDMKKFEAELKKLQAALEQAQATLTSPEVGRLSLKEQLSHRQHLLSEMESLKPKVQAVQLCQSALRIPEDVVASLPLCHAALRLQEEASRLQHTAIQQCNIMQAAVVQYEQYEQEMKHLQQLIEGAHREIEDKPVATSNIQELQAQISRHEELAQKIKGYQEQIASLNSKCKMLTMKAKHATMLLTVTEVEGLAEGTEDLDGELLPTPSAHPSVVMMTAGRCHTLLSPVTEESGEEGTNSEISSPPACRSPSPVANTDASVNQDIAYYQALSAERLQTDAAKIHPSTSASQEFYEPGLEPSATAKLGDLQRSWETLKNVISEKQRTLYEALERQQKYQDSLQSISTKMEAIELKLSESPEPGRSPESQMAEHQALMDEILMLQDEINELQSSLAEELVSESCEADPAEQLALQSTLTVLAERMSTIRMKASGKRQLLEEKLNDQLEEQRQEQALQRYRCEADELDSWLLSTKATLDTALSPPKEPMDMEAQLMDCQNMLVEIEQKVVALSELSVHNENLLLEGKAHTKDEAEQLAGKLRRLKGSLLELQRALHDKQLNMQGTAQEKEESDVDLTATQSPGVQEWLAQARTTWTQQRQSSLQQQKELEQELAEQKSLLRSVASRGEEILIQHSAAETSGDAGEKPDVLSQELGMEGEKSSAEDQMRMKWESLHQEFSTKQKLLQNVLEQEQEQVLYSRPNRLLSGVPLYKGDVPTQDKSAVTSLLDGLNQAFEEVSSQSGGAKRQSIHLEQKLYDGVSATSTWLDDVEERLFVATALLPEETETCLFNQEILAKDIKEMSEEMDKNKNLFSQAFPENGDNRDVIEDTLGCLLGRLSLLDSVVNQRCHQMKERLQQILNFQNDLKVLFTSLADNKYIILQKLANVFEQPVAEQIEAIQQAEDGLKEFDAGIIELKRRGDKLQVEQPSMQELSKLQDMYDELMMIIGSRRSGLNQNLTLKSQYERALQDLADLLETGQEKMAGDQKIIVSSKEEIQQLLDKHKEYFQGLESHMILTETLFRKIISFAVQKETQFHTELMAQASAVLKRAHKRGVELEYILETWSHLDEDQQELSRQLEVVESSIPSVGLVEENEDRLIDRITLYQHLKSSLNEYQPKLYQVLDDGKRLLISISCSDLESQLNQLGECWLSNTNKMSKELHRLETILKHWTRYQSESADLIHWLQSAKDRLEFWTQQSVTVPQELEMVRDHLNAFLEFSKEVDAQSSLKSSVLSTGNQLLRLKKVDTATLRSELSRIDSQWTDLLTNIPAVQEKLHQLQMDKLPSRHAISEVMSWISLMENVIQKDEDNIKNSIGYKAIHEYLQKYKGFKIDINCKQLTVDFVNQSVLQISSQDVESKRSDKTDFAEQLGAMNKSWQILQGLVTEKIQLLEGLLESWSEYENNVQCLKTWFETQEKRLKQQHRIGDQASVQNALKDCQDLEDLIKAKEKEVEKIEQNGLALIQNKKEDVSSIVMSTLRELGQTWANLDHMVGQLKILLKSVLDQWSSHKVAFDKINSYLMEARYSLSRFRLLTGSLEAVQVQVDNLQNLQDDLEKQERSLQKFGSITNQLLKECHPPVTETLTNTLKEVNMRWNNLLEEIAEQLQSSKALLQLWQRYKDYSKQCASTVQQQEDRTNELLKAATNKDIADDEVATWIQDCNDLLKGLGTVKDSLFFLHELGEQLKQQVDASAASAIQSDQLSLSQHLCALEQALCKQQTSLQAGVLDYETFAKSLEALEAWIVEAEEILQGQDPSHSSDLSTIQERMEELKGQMLKFSSMAPDLDRLNELGYRLPLNDKEIKRMQNLNRHWSLISSQTTERFSKLQSFLLQHQTFLEKCETWMEFLVQTEQKLAVEISGNYQHLLEQQRAHELFQAEMFSRQQILHSIIIDGQRLLEQGQVDDRDEFNLKLTLLSNQWQGVIRRAQQRRGIIDSQIRQWQRYREMAEKLRKWLVEVSYLPMSGLGSVPIPLQQARTLFDEVQFKEKVFLRQQGSYILTVEAGKQLLLSADSGAEAALQAELAEIQEKWKSASMRLEEQKKKLAFLLKDWEKCEKGIADSLEKLRTFKKKLSQSLPDHHEELHAEQMRCKELENAVGSWTDDLTQLSLLKDTLSAYISADDISILNERVELLQRQWEELCHQLSLRRQQIGERLNEWAVFSEKNKELCEWLTQMESKVSQNGDILIEEMIEKLKKDYQEEIAIAQENKIQLQQMGERLAKASHESKASEIEYKLGKVNDRWQHLLDLIAARVKKLKETLVAVQQLDKNMSSLRTWLAHIESELAKPIVYDSCNSEEIQRKLNEQQELQRDIEKHSTGVASVLNLCEVLLHDCDACATDAECDSIQQATRNLDRRWRNICAMSMERRLKIEETWRLWQKFLDDYSRFEDWLKSSERTAAFPSSSGVIYTVAKEELKKFEAFQRQVHECLTQLELINKQYRRLARENRTDSACSLKQMVHEGNQRWDNLQKRVTSILRRLKHFIGQREEFETARDSILVWLTEMDLQLTNIEHFSECDVQAKIKQLKAFQQEISLNHNKIEQIIAQGEQLIEKSEPLDAAIIEEELDELRRYCQEVFGRVERYHKKLIRLPLPDDEHDLSDRELELEDSAALSDLHWHDRSADSLLSPQPSSNLSLSLAQPLRSERSGRDTPASVDSIPLEWDHDYDLSRDLESAMSRALPSEDEEGQDDKDFYLRGAVGLSDVMIPESPEAYVKLTENAIKNTSGDHSALESQIRQLGKALDDSRFQIQQTENIIRSKTPTGPELDTSYKGYMKLLGECSSSIDSVKRLEHKLKEEEESLPGFVNLHSTETQTAGVIDRWELLQAQALSKELRMKQNLQKWQQFNSDLNSIWAWLGDTEEELEQLQRLELSTDIQTIELQIKKLKELQKAVDHRKAIILSINLCSPEFTQADSKESRDLQDRLSQMNGRWDRVCSLLEEWRGLLQDALMQCQGFHEMSHGLLLMLENIDRRKNEIVPIDSNLDAEILQDHHKQLMQIKHELLESQLRVASLQDMSCQLLVNAEGTDCLEAKEKVHVIGNRLKLLLKEVSRHIKELEKLLDVSSSQQDLSSWSSADELDTSGSVSPTSGRSTPNRQKTPRGKCSLSQPGPSVSSPHSRSTKGGSDSSLSEPGPGRSGRGFLFRVLRAALPLQLLLLLLIGLACLVPMSEEDYSCALSNNFARSFHPMLRYTNGPPPL

SEQ ID NO: 65081 - protein, 952 aa, Homo sapiens
MVVAEDLSALRMAEDSCVDADLPDCNCDVTRVKKLKETLVAVQQLDKNMSSLRTWLAHIESELAKPIVYDSCNSEEIQRKLNEQQELQRDIEKHSTGVASVLNLCEVLLHDCDACATDAECDSIQQATRNLDRRWRNICAMSMERRLKIEETWRLWQKFLDDYSRFEDWLKSSERTAAFPSSSGVIYTVAKEELKKFEAFQRQVHECLTQLELINKQYRRLARENRTDSACSLKQMVHEGNQRWDNLQKRVTSILRRLKHFIGQREEFETARDSILVWLTEMDLQLTNIEHFSECDVQAKIKQLKAFQQEISLNHNKIEQIIAQGEQLIEKSEPLDAAIIEEELDELRRYCQEVFGRVERYHKKLIRLPLPDDEHDLSDRELELEDSAALSDLHWHDRSADSLLSPQPSSNLSLSLAQPLRSERSGRDTPASVDSIPLEWDHDYDLSRDLESAMSRALPSEDEEGQDDKDFYLRGAVGLSGDHSALESQIRQLGKALDDSRFQIQQTENIIRSKTPTGPELDTSYKGYMKLLGECSSSIDSVKRLEHKLKEEEESLPGFVNLHSTETQTAGVIDRWELLQAQALSKELRMKQNLQKWQQFNSDLNSIWAWLGDTEEELEQLQRLELSTDIQTIELQIKKLKELQKAVDHRKAIILSINLCSPEFTQADSKESRDLQDRLSQMNGRWDRVCSLLEEWRGLLQDALMQCQGFHEMSHGLLLMLENIDRRKNEIVPIDSNLDAEILQDHHKQLMQIKHELLESQLRVASLQDMSCQLLVNAEGTDCLEAKEKVHVIGNRLKLLLKEVSRHIKELEKLLDVSSSQQDLSSWSSADELDTSGSVSPTSGRSTPNRQKTPRGKCSLSQPGPSVSSPHSRSTKGGSDSSLSEPGPGRSGRGFLFRVLRAALPLQLLLLLLIGLACLVPMSEEDYSCALSNNFARSFHPMLRYTNGPPPL

SEQ ID NO: 65082 - protein, 6824 aa, Homo sapiens
MASSPELPTEDEQGSWGIDDLHISLQAEQEDTQKKAFTCWINSQLARHTSPSVISDLFTDIKKGHVLLDLLEVLSGQQLPRDKGSNTFQCRINIEHALTFLRNRSIKLINIHVTDIIDGNPSIILGLIWTIILHFHIEKLAQTLSCNYNQPSLDDVSVVDSSPASSPPAKKCSKVQARWQMSARKALLLWAQEQCATYESVNVTDFKSSWRNGMAFLAIIHALRPDLIDMKSVKHRSNKDNLREAFRIAEQELKIPRLLEPEDVDVVDPDEKSIMTYVAQFLQYSKDAPGTGEEAQGKVKDAMGWLTLQKEKLQKLLKDSENDTYFKKYNSLLSFMESFNEEKKSFLDVLSIKRDLDELDKDHLQLREAWDGLDHQINAWKIKLNYALPPPLHQTEAWLQEVEELMDEDLSASQDHSQAVTLIQEKMTLFKSLMDRFEHHSNILLTFENKDENHLPLVPPNKLEEMKRRINNILEKKFILLLEFHYYKCLVLGLVDEVKSKLDIWNIKYGSRESVELLLEDWHKFIEEKEFLARLDTSFQKCGEIYKNLAGECQNINKQYMMVKSDVCMYRKNIYNVKSTLQKVLACWATYVENLRLLRACFEETKKEEIKEVPFETLAQWNLEHATLNEAGNFLVEVSNDVVGSSISKELRRLNKRWRKLVSKTQLEMNLPLMIKKQDQPTFDNSGNILSKEEKATVEFSTDMSVELPENYNQNIKAGEKHEKENEEFTGQLKVAKDVEKLIGQVEIWEAEAKSVLDQDDVDTSMEESLKHLIAKGSMFDELMARSEDMLQMDIQNISSQESFQHVLTTGLQAKIQEAKEKVQINVVKLIAALKNLTDVSPDLDIRLKMEESQKELESYMMRAQQLLGQRESPGELISKHKEALIISNTKSLAKYLKAVEELKNNVTEDIKMSLEEKSRDVCAKWESLHHELSLYVQQLKIDIEKGKLSDNILKLEKQINKEKKLIRRGRTKGLIKEHEACFSEEGCLYQLNHHMEVLRELCEELPSQKSQQEVKRLLKDYEQKIERLLKCASEIHMTLQPTAGGTSKNEGTITTSENRGGDPHSEAPFAKSDNQPSTEKAMEPTMKFSLASVLRPLQEESIMEKDYSASINSLLERYDTYRDILEHHLQNNKFRITSDFSSEEDRSSSCLQAKLTDLQVIKNETDARWKEFEIISLKLENHVNDIKKPFVIKERDTLKERERELQMTLNTRMESLETALRLVLPVEKASLLLCGSDLPLHKMAIQGFHLIDADRIYQHLRNIQDSIAKQIEICNRLEEPGNFVLKELHPFDLHAMQNIILKYKTQFEGMNHRVQRSEDTLKALEDFLASLRTAKLSAEPVTDLSASDTQVAQENTLTVKNKEGEIHLMKDKAKHLDKCLKMLDMSFKDAERGDDTSCENLLDAFSIKLSETHGYGVQEEFTEENKLLEACIFKNNELLKNIQDVQSQISKIGLKDPTVPAVKHRKKSLIRLDKVLDEYEEEKRHLQEMANSLPHFKDGREKTVNQQCQNTVVLWENTKALVTECLEQCGRVLELLKQYQNFKSILTTLIQKEESVISLQASYMGKENLKKRIAEIEIVKEEFNEHLEVVDKINQVCKNLQFYLNKMKTFEEPPFEKEANIIVDRWLDINEKTEDYYENLGRALALWDKLFNLKNVIDEWTEKALQKMELHQLTEEDRERLKEELQVHEQKTSEFSRRVAEIQFLLQSSEIPLELQVMESSILNKMEHVQKCLTGESNCHALSGSTAELREDLDQAKTQIGMTESLLKALSPSDSLEIFTKLEEIQQQILQQKHSMILLENQIGCLTPELSELKKQYESVSDLFNTKKSVLQDHFSKLLNDQCKNFNDWFSNIKVNLKECFESSETKKSVEQKLQKLSDFLTLEGRNSKIKQVDSVLKHVKKHLPKAHVKELISWLVGQEFELEKMESICQARAKELEDSLQQLLRLQDDHRNLRKWLTNQEEKWKGMEEPGEKTELFCQALARKREQFESVAQLNNSLKEYGFTEEEEIIMEATCLMDRYQTLLRQLSEIEEEDKLLPTEDQSFNDLAHDVIHWIKEIKESLMVLNSSEGKMPLEERIQKIKEIILLKPEGDARIETIMKQAESSEAPLVQKTLTDISNQWDNTLHLASTYLSHQEKLLLEGEKYLQSKEDLRLMLIELKKKQEAGFALQHGLQEKKAQLKIYKKFLKKAQDLTSLLKELKSQGNYLLECTKNPSFSEEPWLEIKHLHESLLQQLQDSVQNLDGHVREHDSYQVCVTDLNTTLDNFSKEFVSFSDKPVDQIAVEEKLQKLQELENRLSLQDGTLKKILALAKSVKQNTSSVGQKIIKDDIKSLQCKQKDLENRLASAKQEMECCLNSILKSKRSTEKKGKFTLPGREKQATSDVQESTQESAAVEKLEEDWEINKNFVENVMAVSKNCHHSMYIFESIVKNFISDEMQDSAVEMAMSKQLSLNAQESMKNTEDERKVNELQNQPLELDTMLRNEQLEEIEKLYTQLEAKKAAIKPLEQTECLNKTETGALVLHNIGYSAQHLDNLLQALITLKKNKESQYCVLRDFQEYLAAVESSMKALLTDKESLKVGPLDSVTYLDKIKKFIASIEKEKDSLGNLKIKWENLSNHVTDMDKKLLESQIKQLEHGWEQVEQQIQKKYSQQVVEYDEFTTLMNKVQDTEISLQQQQQHLQLRLKSPEERAGNQSMIALTTDLQATKHGFSVLKGQAELQMKRIWGEKEKKNLEDGINNLKKQWETLEPLHLEAENQIKKCDIRNKMKETILWAKNLLGELNPSIPLLPDDILSQIRKCKVTHDGILARQQSVESLAEEVKDKVPSLTTYEGSDLNNTLEDLRNQYQMLVLKSTQRSQQLEFKLEERSNFFAIIRKFQLMVQESETLIIPRVETAATEAELKHHHVTLEASQKELQEIDSGISTHLQELTNIYEELNVFERLFLEDQLKNLKIRTNRIQRFIQNTCNEVEHKIKFCRQFHEKTSALQEEADSIQRNELLLNQEVNKGVKEEIYNLKDRLTAIKCCILQVLKLKKVFDYIGLNWDFSQLDQLQTQVFEKEKELEEKIKQLDTFEEEHGKYQALLSKMRAIDLQIKKMTEVVLKAPDSSPESRRLNAQILSQRIEKAKCLCDEIIKKLNENKTFDDSFKEKEILQIKLNAEENDKLYKVLQNMVLELSPKELDEKNCQDKLETSLHVLNQIKSQLQQPLLINLEIKHIQNEKDNCEAFQEQVWAEMCSIKAVTAIEKQREENSSEASDVETKLREFEDLQMQLNTSIDLRTNVLNDAYENLTRYKEAVTRAVESITSLEAIIIPYRVDVGNPEESLEMPLRKQEELESTVAHIQDLTEKLGMISSPEAKLQLQYTLQELVSKNSAMKEAFKAQETEAERYLENYKCYRKMEEDIYTNLSKMETVLGQSMSSLPLSYREALERLEQSKALVSNLISTKEELMKLRQILRLLRLRCTENDGICLLKIVSALWEKWLSLLEAAKEWEMWCEELKQEWKFVSEEIEREAIILDNLQEELPEISKTKEAATTEELSELLDCLCQYGENVEKQQLLLTLLLQRIRSIQNVPESSGAVETVPAFQEITSMKERCNKLLQKVQKNKELVQTEIQERHSFTKEIIALKNFFQQTTTSFQNMAFQDHPEKSEQFEELQSILKKGKLTFENIMEKLRIKYSEMYTIVPAEIESQVEECRKALEDIDEKISNEVLKSSPSYAMRRKIEEINNGLHNVEKMLQQKSKNIEKAQEIQKKMWDELDLWHSKLNELDSEVQDIVEQDPGQAQEWMDNLMIPFQQYQQVSQRAECRTSQLNKATVKMEEYSDLLKSTEAWIENTSHLLANPADYDSLRTLSHHASTVQMALEDSEQKHNLLHSIFMDLEDLSIIFETDELTQSIQELSNQVTALQQKIMESLPQIQRMADDVVAIESEVKSMEKRVSKIKTILLSKEIFDFSPEEHLKHGEVILENIRPMKKTIAEIVSYQVELRLPQTGMKPLPVFQRTNQLLQDIKLLENVTQEQNELLKVVIKQTNEWDEEIENLKQILNNYSAQFSLEHMSPDQADKLPQLQGEIERMEKQILSLNQRKEDLLVDLKATVLNLHQHLKQEQEGVERDRLPAVTSEEGGVAERDASERKLNRRGSMSYLAAVEEEVEESSVKSDHDKDMEEDRASSSSGTIVQEAYGKISTSDNSMAQILTPDSLNTEQGPECSLRPNQTEEGTTPPIEADTLDSSDAQGGLEPRVEKTRPEPTEVLHACKTQVAELELWLQQANVAVEPETLNADMQQVLEQQLVGCQAMLTEIEHKVAFLLETCKDQGLGDNGATQHEAEALSLKLKTVKCNLEKVQMMLQEKHSEDQHPTILKKSSEPEHQEALQPVNLSELESIVTERPQFSRQKDFQQQQVLELKPMEQKDFIKFIEFNAKKMWPQYCQHDNDTTQESSARYPTTEELKTYTTQLEDLRQEASNLQTQENMTEEAYINLDKKLFELFLTLSQCLSSVEEMLEMPRLYREDGSGQQVHYETLALELKKLYLALSDKKGDLLKAMTWPGENTNLLLECFDNLQVCLEHTQAAAVCRSKSLKAGLDYNRSYQKADAYTVELENAESRVAKLRDEGERLHLPYALLQEVYKLEDVLDSMWGMLRARYTELSSPFVTESQQDALLQGMVELVKIGKEKLAHGHLKQTKSKVALQAQIENHKVFFQKLVADMLLIQAYSAKILPSLLQNRETFWAEQVTEVKILEEKSRQCGMKLQSLLQKWEEFDENYASLEKDLEILISTLPSVSLVEETEERLVERISFYQQIKRNIGGKHARLYQTLNEGKQLVASVSCPELEGQIAKLEEQWLSLNKKIDHELHRLQALLKHLLRSAFLGVYNRDSDQLTKWLESSQHTLNYWKEQSLNVSQDLDTIRSNINNFFEFSKEVDEKSSLKTAVISIGNQLLHLKETDTATLRASLAQFEQKWTMLITQLPDIQEKLHQLQMEKLPSRKAITEMISWMNNVEHQTSDEDSVHSPSSASQVKHLLQKHKEFRMEMDYKQWIVDFVNQSLLQLSTCDVESKRYERTEFAEHLGEMNRQWHRVHGMLNRKIQHLEQLLESITESENKIQILNNWLEAQEERLKTLQKPESVISVQKLLLDCQDIENQLAIKSKALDELKQSYLTLESGAVPLLEDTASRIDELFQKRSSVLTQVNQLKTSMQSVLQEWKIYDQLYDEVNMMTIRFWYCMEHSKPVVLSLETLRCQVENLQSLQDEAESSEGSWEKLQEVIGKLKGLCPSVAEIIEEKCQNTHKRWTQVNQAIADQLQKAQSLLQLWKAYSNAHGEAAARLKQQEAKFQQLANISMSGNNLAEILPPALQDIKELQHDVQKTKEAFLQNSSVLDRLPQPAESSTHMLLPGPLHSLQRAAYLEKMLLVKANEFENHVLALTAQSPDIEHLNEVSLKLPLSDVAVKTLQNMNRQWIRATATALERCSELQGIGLNEKFLYCCEKWIQLLEKIEEALKVDVANSLPELLEQQKTYKMLEAEVSINQTIADSYVTQSLQLLDTTEIENRPEFITEFSKLTDRWQNAVQGVRQRKGDVDGLNAHVARCGGASLKKQDLRYSLHTACGAALLCRSSHGANKEIHFQRRRTTCALTLEAGEKLLLTTDLKTKESVGRRISQLQDSWKDMEPQLAEMIKQFQSTVETWDQCEKKIKELKSRLQVLKAQSEDPLPELHEDLHNEKELIKVAIRKQEIEDRLNTWVVFNEKNKELCAWLVQMENKVLQTADISIEEMIEKLQKRTVGREEVPERWECETIVSGHGTEESCFLSIRKFHQGRGLHILTCQLIPQDCMEEINLFSENKLQLKQMGDQLIKASNKSRAAEIDDKLNKINDRWQHLFDVIGSSMADQTNSRWMFFQWPRGIQRTVTWPWDHLCSCASTGHTGPFHSSVLRCFEQHIEFGIYRRTYKVNKELGGDKNGQRCPIIYPHGLVQCIRLGEPLILKRVKKLKETFAFIQQLDKNMSNLRTWLARIESELSKPVVYDVCDDQEIQKRLAEQQDLQRDIEQHSAGVESVFNICDVLLHDSDACANETECDSIQQTTRSLDRRWRNICAMSMERRMKIEETWRLWQKFLDDYSRFEDWLKSAERTAACPNSSEVLYTSAKEELKRFERQIHERLTQLELINKQYRRLARENRTDTASRLKQMVHEGNQRWDNLQRRVTAVLRRLRHFTNQREEFEGTRESILVWLTEMDLQLTNVEHFSESDADDKMRQLNGFQQEITLNTNKIDQLIVFGEQLIQKSEPLDAVLIEDELEELHRYCQEGLEDEKEASENETDMEDPREIQTDSWRKRGESEEPSSPQSLCHLVAPGHERSGCETPVSVDSIPLEWDHTGDVGGSSSHEEDEEGPYYSALSGKSISDGHSWHVPDSPSCPEHHYKQMEGDRNVPPVPPASSTPYKPPYVSLNFTGSTAYVCAFDRWEMIQAQELHNKLKIKQNLQQLNSDISAITTWLKKTEAELEMLKMAKPPSDIQEIELRVKRLQEILKAFDTYKALVVSVNVSSKEFLQTESPESTELQSRLRQLSLLWEAAQGAVDSWRGGLRQSLMQCQDFHQLSQNLLLWLASAKNRRQKAHVTDPKADPRALLECRRELMQLEKELVERQPQVDMLQEISNSLLIKGHGEDCIEAEEKVHVIEKKLKQLREQVSQDLMALQGTQNPASPLPSFDEVDSGDQPPATSVPAPRAKFLYPAVQSSENYRRRGGDREQGPRQHTATALLPLKGGPGSPTPAAAPPAAAAPGLPAALLRRRLQLHSGQQLCPVLLPHAEVHQWATPHIEGIAGHSATPPA

SEQ ID NO: 65083 - protein, 6885 aa, Homo sapiens
MASSPELPTEDEQGSWGIDDLHISLQAEQEDTQKKAFTCWINSQLARHTSPSVISDLFTDIKKGHVLLDLLEVLSGQQLPRDKGSNTFQCRINIEHALTFLRNRSIKLINIHVTDIIDGNPSIILGLIWTIILHFHIEKLAQTLSCNYNQPSLDDVSVVDSSPASSPPAKKCSKVQARWQMSARKALLLWAQEQCATYESVNVTDFKSSWRNGMAFLAIIHALRPDLIDMKSVKHRSNKDNLREAFRIAEQELKIPRLLEPEDVDVVDPDEKSIMTYVAQFLQYSKDAPGTGEEAQGKVKDAMGWLTLQKEKLQKLLKDSENDTYFKKYNSLLSFMESFNEEKKSFLDVLSIKRDLDELDKDHLQLREAWDGLDHQINAWKIKLNYALPPPLHQTEAWLQEVEELMDEDLSASQDHSQAVTLIQEKMTLFKSLMDRFEHHSNILLTFENKDENHLPLVPPNKLEEMKRRINNILEKKFILLLEFHYYKCLVLGLVDEVKSKLDIWNIKYGSRESVELLLEDWHKFIEEKEFLARLDTSFQKCGEIYKNLAGECQNINKQYMMVKSDVCMYRKNIYNVKSTLQKVLACWATYVENLRLLRACFEETKKEEIKEVPFETLAQWNLEHATLNEAGNFLVEVSNDVVGSSISKELRRLNKRWRKLVSKTQLEMNLPLMIKKQDQPTFDNSGNILSKEEKATVEFSTDMSVELPENYNQNIKAGEKHEKENEEFTGQLKVAKDVEKLIGQVEIWEAEAKSVLDQDDVDTSMEESLKHLIAKGSMFDELMARSEDMLQMDIQNISSQESFQHVLTTGLQAKIQEAKEKVQINVVKLIAALKNLTDVSPDLDIRLKMEESQKELESYMMRAQQLLGQRESPGELISKHKEALIISNTKSLAKYLKAVEELKNNVTEDIKMSLEEKSRDVCAKWESLHHELSLYVQQLKIDIEKGKLSDNILKLEKQINKEKKLIRRGRTKGLIKEHEACFSEEGCLYQLNHHMEVLRELCEELPSQKSQQEVKRLLKDYEQKIERLLKCASEIHMTLQPTAGGTSKNEGTITTSENRGGDPHSEAPFAKSDNQPSTEKAMEPTMKFSLASVLRPLQEESIMEKDYSASINSLLERYDTYRDILEHHLQNNKFRITSDFSSEEDRSSSCLQAKLTDLQVIKNETDARWKEFEIISLKLENHVNDIKKPFVIKERDTLKERERELQMTLNTRMESLETALRLVLPVEKASLLLCGSDLPLHKMAIQGFHLIDADRIYQHLRNIQDSIAKQIEICNRLEEPGNFVLKELHPFDLHAMQNIILKYKTQFEGMNHRVQRSEDTLKALEDFLASLRTAKLSAEPVTDLSASDTQVAQENTLTVKNKEGEIHLMKDKAKHLDKCLKMLDMSFKDAERGDDTSCENLLDAFSIKLSETHGYGVQEEFTEENKLLEACIFKNNELLKNIQDVQSQISKIGLKDPTVPAVKHRKKSLIRLDKVLDEYEEEKRHLQEMANSLPHFKDGREKTVNQQCQNTVVLWENTKALVTECLEQCGRVLELLKQYQNFKSILTTLIQKEESVISLQASYMGKENLKKRIAEIEIVKEEFNEHLEVVDKINQVCKNLQFYLNKMKTFEEPPFEKEANIIVDRWLDINEKTEDYYENLGRALALWDKLFNLKNVIDEWTEKALQKMELHQLTEEDRERLKEELQVHEQKTSEFSRRVAEIQFLLQSSEIPLELQVMESSILNKMEHVQKCLTGESNCHALSGSTAELREDLDQAKTQIGMTESLLKALSPSDSLEIFTKLEEIQQQILQQKHSMILLENQIGCLTPELSELKKQYESVSDLFNTKKSVLQDHFSKLLNDQCKNFNDWFSNIKVNLKECFESSETKKSVEQKLQKLSDFLTLEGRNSKIKQVDSVLKHVKKHLPKAHVKELISWLVGQEFELEKMESICQARAKELEDSLQQLLRLQDDHRNLRKWLTNQEEKWKGMEEPGEKTELFCQALARKREQFESVAQLNNSLKEYGFTEEEEIIMEATCLMDRYQTLLRQLSEIEEEDKLLPTEDQSFNDLAHDVIHWIKEIKESLMVLNSSEGKMPLEERIQKIKEIILLKPEGDARIETIMKQAESSEAPLVQKTLTDISNQWDNTLHLASTYLSHQEKLLLEGEKYLQSKEDLRLMLIELKKKQEAGFALQHGLQEKKAQLKIYKKFLKKAQDLTSLLKELKSQGNYLLECTKNPSFSEEPWLEIKHLHESLLQQLQDSVQNLDGHVREHDSYQVCVTDLNTTLDNFSKEFVSFSDKPVDQIAVEEKLQKLQELENRLSLQDGTLKKILALAKSVKQNTSSVGQKIIKDDIKSLQCKQKDLENRLASAKQEMECCLNSILKSKRSTEKKGKFTLPGREKQATSDVQESTQESAAVEKLEEDWEINKDSAVEMAMSKQLSLNAQESMKNTEDERKVNELQNQPLELDTMLRNEQLEEIEKLYTQLEAKKAAIKPLEQTECLNKTETGALVLHNIGYSAQHLDNLLQALITLKKNKESQYCVLRDFQEYLAAVESSMKALLTDKESLKVGPLDSVTYLDKIKKFIASIEKEKDSLGNLKIKWENLSNHVTDMDKKLLESQIKQLEHGWEQVEQQIQKKYSQQVVEYDEFTTLMNKVQDTEISLQQQQQHLQLRLKSPEERAGNQSMIALTTDLQATKHGFSVLKGQAELQMKRIWGEKEKKNLEDGINNLKKQWETLEPLHLEAENQIKKCDIRNKMKETILWAKNLLGELNPSIPLLPDDILSQIRKCKVTHDGILARQQSVESLAEEVKDKVPSLTTYEGSDLNNTLEDLRNQYQMLVLKSTQRSQQLEFKLEERSNFFAIIRKFQLMVQESETLIIPRVETAATEAELKHHHVTLEASQKELQEIDSGISTHLQELTNIYEELNVFERLFLEDQLKNLKIRTNRIQRFIQNTCNEVEHKIKFCRQFHEKTSALQEEADSIQRNELLLNQEVNKGVKEEIYNLKDRLTAIKCCILQVLKLKKVFDYIGLNWDFSQLDQLQTQVFEKEKELEEKIKQLDTFEEEHGKYQALLSKMRAIDLQIKKMTEVVLKAPDSSPESRRLNAQILSQRIEKAKCLCDEIIKKLNENKTFDDSFKEKEILQIKLNAEENDKLYKVLQNMVLELSPKELDEKNCQDKLETSLHVLNQIKSQLQQPLLINLEIKHIQNEKDNCEAFQEQVWAEMCSIKAVTAIEKQREENSSEASDVETKLREFEDLQMQLNTSIDLRTNVLNDAYENLTRYKEAVTRAVESITSLEAIIIPYRVDVGNPEESLEMPLRKQEELESTVAHIQDLTEKLGMISSPEAKLQLQYTLQELVSKNSAMKEAFKAQETEAERYLENYKCYRKMEEDIYTNLSKMETVLGQSMSSLPLSYREALERLEQSKALVSNLISTKEELMKLRQILRLLRLRCTENDGICLLKIVSALWEKWLSLLEAAKEWEMWCEELKQEWKFVSEEIEREAIILDNLQEELPEISKTKEAATTEELSELLDCLCQYGENVEKQQLLLTLLLQRIRSIQNVPESSGAVETVPAFQEITSMKERCNKLLQKVQKNKELVQTEIQERHSFTKEIIALKNFFQQTTTSFQNMAFQDHPEKSEQFEELQSILKKGKLTFENIMEKLRIKYSEMYTIVPAEIESQVEECRKALEDIDEKISNEVLKSSPSYAMRRKIEEINNGLHNVEKMLQQKSKNIEKAQEIQKKMWDELDLWHSKLNELDSEVQDIVEQDPGQAQEWMDNLMIPFQQYQQVSQRAECRTSQLNKATVKMEEYSDLLKSTEAWIENTSHLLANPADYDSLRTLSHHASTVQMALEDSEQKHNLLHSIFMDLEDLSIIFETDELTQSIQELSNQVTALQQKIMESLPQIQRMADDVVAIESEVKSMEKRVSKIKTILLSKEIFDFSPEEHLKHGEVILENIRPMKKTIAEIVSYQVELRLPQTGMKPLPVFQRTNQLLQDIKLLENVTQEQNELLKVVIKQTNEWDEEIENLKQILNNYSAQFSLEHMSPDQADKLPQLQGEIERMEKQILSLNQRKEDLLVDLKATVLNLHQHLKQEQEGVERDRLPAVTSEEGGVAERDASERKLNRRGSMSYLAAVEEEVEESSVKSDNGDEKAEPSPQSWSSLWKHDKDMEEDRASSSSGTIVQEAYGKISTSDNSMAQILTPDSLNTEQGPECSLRPNQTEEGTTPPIEADTLDSSDAQGGLEPRVEKTRPEPTEVLHACKTQVAELELWLQQANVAVEPETLNADMQQVLEQQLVGCQAMLTEIEHKVAFLLETCKDQGLGDNGATQHEAEALSLKLKTVKCNLEKVQMMLQEKHSEDQHPTILKKSSEPEHQEALQPVNLSELESIVTERPQFSRQKDFQQQQVLELKPMEQKDFIKFIEFNAKKMWPQYCQHDNDTTQESSASNQASSPENDVPDSILSPQGQNGDKWQYLHHELSSKIKLPLPQLVEPQVSTNMGILPSVTMYNFRYPTTEELKTYTTQLEDLRQEASNLQTQENMTEEAYINLDKKLFELFLTLSQCLSSVEEMLEMPRLYREDGSGQQVHYETLALELKKLYLALSDKKGDLLKAMTWPGENTNLLLECFDNLQVCLEHTQAAAVCRSKSLKAGLDYNRSYQNEIKRLYHQLIKSKTSLQQSLNEISGQSVAEQLQKADAYTVELENAESRVAKLRDEGERLHLPYALLQEVYKLEDVLDSMWGMLRARYTELSSPFVTESQQDALLQGMVELVKIGKEKLAHGHLKQTKSKVALQAQIENHKVFFQKLVADMLLIQAYSAKILPSLLQNRETFWAEQVTEVKILEEKSRQCGMKLQSLLQKWEEFDENYASLEKDLEILISTLPSVSLVEETEERLVERISFYQQIKRNIGGKHARLYQTLNEGKQLVASVSCPELEGQIAKLEEQWLSLNKKIDHELHRLQALLKHLLSYNRDSDQLTKWLESSQHTLNYWKEQSLNVSQDLDTIRSNINNFFEFSKEVDEKSSLKTAVISIGNQLLHLKETDTATLRASLAQFEQKWTMLITQLPDIQEKLHQLQMEKLPSRKAITEMISWMNNVEHQTSDEDSVHSPSSASQVKHLLQKHKEFRMEMDYKQWIVDFVNQSLLQLSTCDVESKRYERTEFAEHLGEMNRQWHRVHGMLNRKIQHLEQLLESITESENKIQILNNWLEAQEERLKTLQKPESVISVQKLLLDCQDIENQLAIKSKALDELKQSYLTLESGAVPLLEDTASRIDELFQKRSSVLTQVNQLKTSMQSVLQEWKIYDQLYDEVNMMTIRFWYCMEHSKPVVLSLETLRCQVENLQSLQDEAESSEGSWEKLQEVIGKLKGLCPSVAEIIEEKCQNTHKRWTQVNQAIADQLQKAQSLLQLWKAYSNAHGEAAARLKQQEAKFQQLANISMSGNNLAEILPPALQDIKELQHDVQKTKEAFLQNSSVLDRLPQPAESSTHMLLPGPLHSLQRAAYLEKMLLVKANEFEFVLSQFKDFGVRLESLKGLIMHEEENLDRLHQQEKENPDSFLNHVLALTAQSPDIEHLNEVSLKLPLSDVAVKTLQNMNRQWIRATATALERCSELQGIGLNEKFLYCCEKWIQLLEKIEEALKVDVANSLPELLEQQKTYKMLEAEVSINQTIADSYVTQSLQLLDTTEIENRPEFITEFSKLTDRWQNAVQGVRQRKGDVDGLVRQWQDFTTSVENLFRFLTDTSHLLSAVKGQERFSLYQTRSLIHELKNKEIHFQRRRTTCALTLEAGEKLLLTTDLKTKESVGRRISQLQDSWKDMEPQLAEMIKQFQSTVETWDQCEKKIKELKSRLQVLKAQSEDPLPELHEDLHNEKELIKELEQSLASWTQNLKELQTMKADLTRHVLVEDVMVLKEQIEHLHRQWEDLCLRVAIRKQEIEDRLNTWVVFNEKNKELCAWLVQMENKVLQTADISIEEMIEKLQKDCMEEINLFSENKLQLKQMGDQLIKASNKSRAAEIDDKLNKINDRWQHLFDVIGSRVKKLKETFAFIQQLDKNMSNLRTWLARIESELSKPVVYDVCDDQEIQKRLAEQQDLQRDIEQHSAGVESVFNICDVLLHDSDACANETECDSIQQTTRSLDRRWRNICAMSMERRMKIEETWRLWQKFLDDYSRFEDWLKSAERTAACPNSSEVLYTSAKEELKRFEAFQRQIHERLTQLELINKQYRRLARENRTDTASRLKQMVHEGNQRWDNLQRRVTAVLRRLRHFTNQREEFEGTRESILVWLTEMDLQLTNVEHFSESDADDKMRQLNGFQQEITLNTNKIDQLIVFGEQLIQKSEPLDAVLIEDELEELHRYCQEVFGRVSRFHRRLTSCTPGLEDEKEASENETDMEDPREIQTDSWRKRGESEEPSSPQSLCHLVAPGHERSGCETPVSVDSIPLEWDHTGDVGGSSSHEEDEEGPYYSALSGKSISDGHSWHVPDSPSCPEHHYKQMEGDRNVPPVPPASSTPYKPPYGKLLLPPGTDGGKEGPRVLNGNPQQEDGGLAGITEQQSGAFDRWEMIQAQELHNKLKIKQNLQQLNSDISAITTWLKKTEAELEMLKMAKPPSDIQEIELRVKRLQEILKAFDTYKALVVSVNVSSKEFLQTESPESTELQSRLRQLSLLWEAAQGAVDSWRGGLRQSLMQCQDFHQLSQNLLLWLASAKNRRQKAHVTDPKADPRALLECRRELMQLEKELVERQPQVDMLQEISNSLLIKGHGEDCIEAEEKVHVIEKKLKQLREQVSQDLMALQGTQNPASPLPSFDEVDSGDQPPATSVPAPRAKQFRAVRTTEGEEETESRVPGSTRPQRSFLSRVVRAALPLQLLLLLLLLLACLLPSSEEDYSCTQANNFARSFYPMLRYTNGPPPT

SEQ ID NO: 65084 - protein, 267 aa, Homo sapiens
MASSPELPTEDEQGSWGIDDLHISLQAEQEDTQKKAFTCWINSQLARHTSPSVISDLFTDIKKGHVLLDLLEVLSGQQLPRDKGSNTFQCRINIEHALTFLRNRSIKLINIHVTDIIDGNPSIILGLIWTIILHFHIEKLAQTLSCNYNQPSLDDVSVVDSSPASSPPAKKCSKVQARWQMSARKALLLWAQEQCATYESVNVTDFKSSWRNGMAFLAIIHALRPDLIDMKSVKHRSNKDNLREAFRIAEQELKIPRLLEPEAYKNF

SEQ ID NO: 65085 - protein, 3270 aa, Homo sapiens
MEKLRIKYSEMYTIVPAEIESQVEECRKALEDIDEKISNEVLKSSPSYAMRRKIEEINNGLHNVEKMLQQKSKNIEKAQEIQKKMWDELDLWHSKLNELDSEVQDIVEQDPGQAQEWMDNLMIPFQQYQQVSQRAECRTSQLNKATVKMEEYSDLLKSTEAWIENTSHLLANPADYDSLRTLSHHASTVQDSKCFRSGPRPNIYVSYYVTVIQMALEDSEQKHNLLHSIFMDLEDLSIIFETDELTQSIQELSNQVTALQQKIMESLPQIQRMADDVVAIESEVKSMEKRVSKIKTILLSKEIFDFSPEEHLKHGEVILENIRPMKKTIAEIVSYQVELRLPQTGMKPLPVFQRTNQLLQDIKLLENVTQEQNELLKVVIKQTNEWDEEIENLKQILNNYSAQFSLEHMSPDQADKLPQLQGEIERMEKQILSLNQRKEDLLVDLKATVLNLHQHLKQEQEGVERDRLPAVTSEEGGVAERDASERKLNRRGSMSYLAAVEEEVEESSVKSDNGDEKAEPSPQSWSSLWKHDKDMEEDRASSSSGTIVQEAYGKISTSDNSMAQILTPDSLNTEQGPECSLRPNQTEEGTTPPIEADTLDSSDAQGGLEPRVEKTRPEPTEVLHACKTQVAELELWLQQANVAVEPETLNADMQQVLEQQLVGCQAMLTEIEHKVAFLLETCKDQGLGDNGATQHEAEALSLKLKTVKCNLEKVQMMLQEKHSEDQHPTILKKSSEPEHQEALQPVNLSELESIVTERPQFSRQKDFQQQQVLELKPMEQKDFIKFIEFNAKKMWPQYCQHDNDTTQESSASNQASSPENDVPDSILSPQGQNGDKWQYLHHELSSKIKLPLPQLVEPQVSTNMGILPSVTMYNFRYPTTEELKTYTTQLEDLRQEASNLQTQENMTEEAYINLDKKLFELFLTLSQCLSSVEEMLEMPRLYREDGSGQQVHYETLALELKKLYLALSDKKGDLLKAMTWPGENTNLLLECFDNLQVCLEHTQAAAVCRSKSLKAGLDYNRSYQNEIKRLYHQLIKSKTSLQQSLNEISGQSVAEQLQKADAYTVELENAESRVAKLRDEGERLHLPYALLQEVYKLEDVLDSMWGMLRARYTELSSPFVTESQQDALLQGMVELVKIGKEKLAHGHLKQTKSKVALQAQIENHKVFFQKLVADMLLIQAYSAKILPSLLQNRETFWAEQVTEVKILEEKSRQCGMKLQSLLQKWEEFDENYASLEKDLEILISTLPSVSLVEETEERLVERISFYQQIKRNIGGKHARLYQTLNEGKQLVASVSCPELEGQIAKLEEQWLSLNKKIDHELHRLQALLKHLLSYNRDSDQLTKWLESSQHTLNYWKEQSLNVSQDLDTIRSNINNFFEFSKEVDEKSSLKTAVISIGNQLLHLKETDTATLRASLAQFEQKWTMLITQLPDIQEKLHQLQMEKLPSRKAITEMISWMNNVEHQTSDEDSVHSPSSASQVKHLLQKHKEFRMEMDYKQWIVDFVNQSLLQLSTCDVESKRYERTEFAEHLGEMNRQWHRVHGMLNRKIQHLEQLLESITESENKIQILNNWLEAQEERLKTLQKPESVISVQKLLLDCQDIENQLAIKSKALDELKQSYLTLESGAVPLLEDTASRIDELFQKRSSVLTQVNQLKTSMQSVLQEWKIYDQLYDEVNMMTIRFWYCMEHSKPVVLSLETLRCQVENLQSLQDEAESSEGSWEKLQEVIGKLKGLCPSVAEIIEEKCQNTHKRWTQVNQAIADQLQKAQSLLQLWKAYSNAHGEAAARLKQQEAKFQQLANISMSGNNLAEILPPALQDIKELQHDVQKTKEAFLQNSSVLDRLPQPAESSTHMLLPGPLHSLQRAAYLEKMLLVKANEFEFVLSQFKDFGVRLESLKGLIMHEEENLDRLHQQEKENPDSFLNHVLALTAQSPDIEHLNEVSLKLPLSDVAVKTLQNMNRQWIRATATALERCSELQGIGLNEKFLYCCEKWIQLLEKIEEALKVDVANSLPELLEQQKTYKMLEAEVSINQTIADSYVTQSLQLLDTTEIENRPEFITEFSKLTDRWQNAVQGVRQRKGDVDGLVRQWQDFTTSVENLFRFLTDTSHLLSAVKGQERFSLYQTRSLIHELKNKEIHFQRRRTTCALTLEAGEKLLLTTDLKTKESVGRRISQLQDSWKDMEPQLAEMIKQFQSTVETWDQCEKKIKELKSRLQVLKAQSEDPLPELHEDLHNEKELIKELEQSLASWTQNLKELQTMKADLTRHVLVEDVMVLKEQIEHLHRQWEDLCLRVAIRKQEIEDRLNTWVVFNEKNKELCAWLVQMENKVLQTADISIEEMIEKLQKDCMEEINLFSENKLQLKQMGDQLIKASNKSRAAEIDDKLNKINDRWQHLFDVIGSRVKKLKETFAFIQQLDKNMSNLRTWLARIESELSKPVVYDVCDDQEIQKRLAEQQDLQRDIEQHSAGVESVFNICDVLLHDSDACANETECDSIQQTTRSLDRRWRNICAMSMERRMKIEETWRLWQKFLDDYSRFEDWLKSAERTAACPNSSEVLYTSAKEELKRFEAFQRQIHERLTQLELINKQYRRLARENRTDTASRLKQMVHEGNQRWDNLQRRVTAVLRRLRHFTNQREEFEGTRESILVWLTEMDLQLTNVEHFSESDADDKMRQLNGFQQEITLNTNKIDQLIVFGEQLIQKSEPLDAVLIEDELEELHRYCQEVFGRVSRFHRRLTSCTPGLEDEKEASENETDMEDPREIQTDSWRKRGESEEPSSPQSLCHLVAPGHERSGCETPVSVDSIPLEWDHTGDVGGSSSHEEDEEGPYYSALSGKSISDGHSWHVPDSPSCPEHHYKQMEGDRNVPPVPPASSTPYKPPYGKLLLPPGTDGGKEGPRVLNGNPQQEDGGLAGITEQQSGAFDRWEMIQAQELHNKLKIKQNLQQLNSDISAITTWLKKTEAELEMLKMAKPPSDIQEIELRVKRLQEILKAFDTYKALVVSVNVSSKEFLQTESPESTELQSRLRQLSLLWEAAQGAVDSWRGGLRQSLMQCQDFHQLSQNLLLWLASAKNRRQKAHVTDPKADPRALLECRRELMQLEKELVERQPQVDMLQEISNSLLIKGHGEDCIEAEEKVHVIEKKLKQLREQVSQDLMALQGTQNPASPLPSFDEVDSGDQPPATSVPAPRAKQFRAVRTTEGEEETESRVPGSTRPQRSFLSRVVRAALPLQLLLLLLLLLACLLPSSEEDYSCTQANNFARSFYPMLRYTNGPPPT

SEQ ID NO: 65086 - protein, 6907 aa, Homo sapiens
MASSPELPTEDEQGSWGIDDLHISLQAEQEDTQKKAFTCWINSQLARHTSPSVISDLFTDIKKGHVLLDLLEVLSGQQLPRDKGSNTFQCRINIEHALTFLRNRSIKLINIHVTDIIDGNPSIILGLIWTIILHFHIEKLAQTLSCNYNQPSLDDVSVVDSSPASSPPAKKCSKVQARWQMSARKALLLWAQEQCATYESVNVTDFKSSWRNGMAFLAIIHALRPDLIDMKSVKHRSNKDNLREAFRIAEQELKIPRLLEPEDVDVVDPDEKSIMTYVAQFLQYSKDAPGTGEEAQGKVKDAMGWLTLQKEKLQKLLKDSENDTYFKKYNSLLSFMESFNEEKKSFLDVLSIKRDLDELDKDHLQLREAWDGLDHQINAWKIKLNYALPPPLHQTEAWLQEVEELMDEDLSASQDHSQAVTLIQEKMTLFKSLMDRFEHHSNILLTFENKDENHLPLVPPNKLEEMKRRINNILEKKFILLLEFHYYKCLVLGLVDEVKSKLDIWNIKYGSRESVELLLEDWHKFIEEKEFLARLDTSFQKCGEIYKNLAGECQNINKQYMMVKSDVCMYRKNIYNVKSTLQKVLACWATYVENLRLLRACFEETKKEEIKEVPFETLAQWNLEHATLNEAGNFLVEVSNDVVGSSISKELRRLNKRWRKLVSKTQLEMNLPLMIKKQDQPTFDNSGNILSKEEKATVEFSTDMSVELPENYNQNIKAGEKHEKENEEFTGQLKVAKDVEKLIGQVEIWEAEAKSVLDQDDVDTSMEESLKHLIAKGSMFDELMARSEDMLQMDIQNISSQESFQHVLTTGLQAKIQEAKEKVQINVVKLIAALKNLTDVSPDLDIRLKMEESQKELESYMMRAQQLLGQRESPGELISKHKEALIISNTKSLAKYLKAVEELKNNVTEDIKMSLEEKSRDVCAKWESLHHELSLYVQQLKIDIEKGKLSDNILKLEKQINKEKKLIRRGRTKGLIKEHEACFSEEGCLYQLNHHMEVLRELCEELPSQKSQQEVKRLLKDYEQKIERLLKCASEIHMTLQPTAGGTSKNEGTITTSENRGGDPHSEAPFAKSDNQPSTEKAMEPTMKFSLASVLRPLQEESIMEKDYSASINSLLERYDTYRDILEHHLQNNKFRITSDFSSEEDRSSSCLQAKLTDLQVIKNETDARWKEFEIISLKLENHVNDIKKPFVIKERDTLKERERELQMTLNTRMESLETALRLVLPVEKASLLLCGSDLPLHKMAIQGFHLIDADRIYQHLRNIQDSIAKQIEICNRLEEPGNFVLKELHPFDLHAMQNIILKYKTQFEGMNHRVQRSEDTLKALEDFLASLRTAKLSAEPVTDLSASDTQVAQENTLTVKNKEGEIHLMKDKAKHLDKCLKMLDMSFKDAERGDDTSCENLLDAFSIKLSETHGYGVQEEFTEENKLLEACIFKNNELLKNIQDVQSQISKIGLKDPTVPAVKHRKKSLIRLDKVLDEYEEEKRHLQEMANSLPHFKDGREKTVNQQCQNTVVLWENTKALVTECLEQCGRVLELLKQYQNFKSILTTLIQKEESVISLQASYMGKENLKKRIAEIEIVKEEFNEHLEVVDKINQVCKNLQFYLNKMKTFEEPPFEKEANIIVDRWLDINEKTEDYYENLGRALALWDKLFNLKNVIDEWTEKALQKMELHQLTEEDRERLKEELQVHEQKTSEFSRRVAEIQFLLQSSEIPLELQVMESSILNKMEHVQKCLTGESNCHALSGSTAELREDLDQAKTQIGMTESLLKALSPSDSLEIFTKLEEIQQQILQQKHSMILLENQIGCLTPELSELKKQYESVSDLFNTKKSVLQDHFSKLLNDQCKNFNDWFSNIKVNLKECFESSETKKSVEQKLQKLSDFLTLEGRNSKIKQVDSVLKHVKKHLPKAHVKELISWLVGQEFELEKMESICQARAKELEDSLQQLLRLQDDHRNLRKWLTNQEEKWKGMEEPGEKTELFCQALARKREQFESVAQLNNSLKEYGFTEEEEIIMEATCLMDRYQTLLRQLSEIEEEDKLLPTEDQSFNDLAHDVIHWIKEIKESLMVLNSSEGKMPLEERIQKIKEIILLKPEGDARIETIMKQAESSEAPLVQKTLTDISNQWDNTLHLASTYLSHQEKLLLEGEKYLQSKEDLRLMLIELKKKQEAGFALQHGLQEKKAQLKIYKKFLKKAQDLTSLLKELKSQGNYLLECTKNPSFSEEPWLEIKHLHESLLQQLQDSVQNLDGHVREHDSYQVCVTDLNTTLDNFSKEFVSFSDKPVDQIAVEEKLQKLQELENRLSLQDGTLKKILALAKSVKQNTSSVGQKIIKDDIKSLQCKQKDLENRLASAKQEMECCLNSILKSKRSTEKKGKFTLPGREKQATSDVQESTQESAAVEKLEEDWEINKDSAVEMAMSKQLSLNAQESMKNTEDERKVNELQNQPLELDTMLRNEQLEEIEKLYTQLEAKKAAIKPLEQTECLNKTETGALVLHNIGYSAQHLDNLLQALITLKKNKESQYCVLRDFQEYLAAVESSMKALLTDKESLKVGPLDSVTYLDKIKKFIASIEKEKDSLGNLKIKWENLSNHVTDMDKKLLESQIKQLEHGWEQVEQQIQKKYSQQVVEYDEFTTLMNKVQDTEISLQQQQQHLQLRLKSPEERAGNQSMIALTTDLQATKHGFSVLKGQAELQMKRIWGEKEKKNLEDGINNLKKQWETLEPLHLEAENQIKKCDIRNKMKETILWAKNLLGELNPSIPLLPDDILSQIRKCKVTHDGILARQQSVESLAEEVKDKVPSLTTYEGSDLNNTLEDLRNQYQMLVLKSTQRSQQLEFKLEERSNFFAIIRKFQLMVQESETLIIPRVETAATEAELKHHHVTLEASQKELQEIDSGISTHLQELTNIYEELNVFERLFLEDQLKNLKIRTNRIQRFIQNTCNEVEHKIKFCRQFHEKTSALQEEADSIQRNELLLNQEVNKGVKEEIYNLKDRLTAIKCCILQVLKLKKVFDYIGLNWDFSQLDQLQTQVFEKEKELEEKIKQLDTFEEEHGKYQALLSKMRAIDLQIKKMTEVVLKAPDSSPESRRLNAQILSQRIEKAKCLCDEIIKKLNENKTFDDSFKEKEILQIKLNAEENDKLYKVLQNMVLELSPKELDEKNCQDKLETSLHVLNQIKSQLQQPLLINLEIKHIQNEKDNCEAFQEQVWAEMCSIKAVTAIEKQREENSSEASDVETKLREFEDLQMQLNTSIDLRTNVLNDAYENLTRYKEAVTRAVESITSLEAIIIPYRVDVGNPEESLEMPLRKQEELESTVAHIQDLTEKLGMISSPEAKLQLQYTLQELVSKNSAMKEAFKAQETEAERYLENYKCYRKMEEDIYTNLSKMETVLGQSMSSLPLSYREALERLEQSKALVSNLISTKEELMKLRQILRLLRLRCTENDGICLLKIVSALWEKWLSLLEAAKEWEMWCEELKQEWKFVSEEIEREAIILDNLQEELPEISKTKEAATTEELSELLDCLCQYGENVEKQQLLLTLLLQRIRSIQNVPESSGAVETVPAFQEITSMKERCNKLLQKVQKNKELVQTEIQERHSFTKEIIALKNFFQQTTTSFQNMAFQDHPEKSEQFEELQSILKKGKLTFENIMEKLRIKYSEMYTIVPAEIESQVEECRKALEDIDEKISNEVLKSSPSYAMRRKIEEINNGLHNVEKMLQQKSKNIEKAQEIQKKMWDELDLWHSKLNELDSEVQDIVEQDPGQAQEWMDNLMIPFQQYQQVSQRAECRTSQLNKATVKMEEYSDLLKSTEAWIENTSHLLANPADYDSLRTLSHHASTVQMALEDSEQKHNLLHSIFMDLEDLSIIFETDELTQSIQELSNQVTALQQKIMESLPQIQRMADDVVAIESEVKSMEKRVSKIKTILLSKEIFDFSPEEHLKHGEVILENIRPMKKTIAEIVSYQVELRLPQTGMKPLPVFQRTNQLLQDIKLLENVTQEQNELLKVVIKQTNEWDEEIENLKQILNNYSAQFSLEHMSPDQADKLPQLQGEIERMEKQILSLNQRKEDLLVDLKATVLNLHQHLKQEQEGVERDRLPAVTSEEGGVAERDASERKLNRRGSMSYLAAVEEEVEESSVKSDNGDEKAEPSPQSWSSLWKHDKDMEEDRASSSSGTIVQEAYGKISTSDNSMAQILTPDSLNTEQGPECSLRPNQTEEGTTPPIEADTLDSSDAQGGLEPRVEKTRPEPTEVLHACKTQVAELELWLQQANVAVEPETLNADMQQVLEQQLVGCQAMLTEIEHKVAFLLETCKDQGLGDNGATQHEAEALSLKLKTVKCNLEKVQMMLQEKHSEDQHPTILKKSSEPEHQEALQPVNLSELESIVTERPQFSRQKDFQQQQVLELKPMEQKDFIKFIEFNAKKMWPQYCQHDNDTTQESSASNQASSPENDVPDSILSPQGQNGDKWQYLHHELSSKIKLPLPQLVEPQVSTNMGILPSVTMYNFRYPTTEELKTYTTQLEDLRQEASNLQTQENMTEEAYINLDKKLFELFLTLSQCLSSVEEMLEMPRLYREDGSGQQVHYETLALELKKLYLALSDKKGDLLKAMTWPGENTNLLLECFDNLQVCLEHTQAAAVCRSKSLKAGLDYNRSYQNEIKRLYHQLIKSKTSLQQSLNEISGQSVAEQLQKADAYTVELENAESRVAKLRDEGERLHLPYALLQEVYKLEDVLDSMWGMLRARYTELSSPFVTESQQDALLQGMVELVKIGKEKLAHGHLKQTKSKVALQAQIENHKVFFQKLVADMLLIQAYSAKILPSLLQNRETFWAEQVTEVKILEEKSRQCGMKLQSLLQKWEEFDENYASLEKDLEILISTLPSVSLVEETEERLVERISFYQQIKRNIGGKHARLYQTLNEGKQLVASVSCPELEGQIAKLEEQWLSLNKKIDHELHRLQALLKHLLSYNRDSDQLTKWLESSQHTLNYWKEQSLNVSQDLDTIRSNINNFFEFSKEVDEKSSLKTAVISIGNQLLHLKETDTATLRASLAQFEQKWTMLITQLPDIQEKLHQLQMEKLPSRKAITEMISWMNNVEHQTSDEDSVHSPSSASQVKHLLQKHKEFRMEMDYKQWIVDFVNQSLLQLSTCDVESKRYERTEFAEHLGEMNRQWHRVHGMLNRKIQHLEQLLESITESENKIQILNNWLEAQEERLKTLQKPESVISVQKLLLDCQDIENQLAIKSKALDELKQSYLTLESGAVPLLEDTASRIDELFQKRSSVLTQVNQLKTSMQSVLQEWKIYDQLYDEVNMMTIRFWYCMEHSKPVVLSLETLRCQVENLQSLQDEAESSEGSWEKLQEVIGKLKGLCPSVAEIIEEKCQNTHKRWTQVNQAIADQLQKAQSLLQLWKAYSNAHGEAAARLKQQEAKFQQLANISMSGNNLAEILPPALQDIKELQHDVQKTKEAFLQNSSVLDRLPQPAESSTHMLLPGPLHSLQRAAYLEKMLLVKANEFEFVLSQFKDFGVRLESLKGLIMHEEENLDRLHQQEKENPDSFLNHVLALTAQSPDIEHLNEVSLKLPLSDVAVKTLQNMNRQWIRATATALERCSELQGIGLNEKFLYCCEKWIQLLEKIEEALKVDVANSLPELLEQQKTYKMLEAEVSINQTIADSYVTQSLQLLDTTEIENRPEFITEFSKLTDRWQNAVQGVRQRKGDVDGLVRQWQDFTTSVENLFRFLTDTSHLLSAVKGQERFSLYQTRSLIHELKNKEIHFQRRRTTCALTLEAGEKLLLTTDLKTKESVGRRISQLQDSWKDMEPQLAEMIKQFQSTVETWDQCEKKIKELKSRLQVLKAQSEDPLPELHEDLHNEKELIKELEQSLASWTQNLKELQTMKADLTRHVLVEDVMVLKEQIEHLHRQWEDLCLRVAIRKQEIEDRLNTWVVFNEKNKELCAWLVQMENKVLQTADISIEEMIEKLQKDCMEEINLFSENKLQLKQMGDQLIKASNKSRAAEIDDKLNKINDRWQHLFDVIGSRVKKLKETFAFIQQLDKNMSNLRTWLARIESELSKPVVYDVCDDQEIQKRLAEQQDLQRDIEQHSAGVESVFNICDVLLHDSDACANETECDSIQQTTRSLDRRWRNICAMSMERRMKIEETWRLWQKFLDDYSRFEDWLKSAERTAACPNSSEVLYTSAKEELKRFEAFQRQIHERLTQLELINKQYRRLARENRTDTASRLKQMVHEGNQRWDNLQRRVTAVLRRLRHFTNQREEFEGTRESILVWLTEMDLQLTNVEHFSESDADDKMRQLNGFQQEITLNTNKIDQLIVFGEQLIQKSEPLDAVLIEDELEELHRYCQEVFGRVSRFHRRLTSCTPGLEDEKEASENETDMEDPREIQTDSWRKRGESEEPSSPQSLCHLVAPGHERSGCETPVSVDSIPLEWDHTGDVGGSSSHEEDEEGPYYSALSDVEIPENPEAYLKMTTKTLKASSGKSISDGHSWHVPDSPSCPEHHYKQMEGDRNVPPVPPASSTPYKPPYGKLLLPPGTDGGKEGPRVLNGNPQQEDGGLAGITEQQSGAFDRWEMIQAQELHNKLKIKQNLQQLNSDISAITTWLKKTEAELEMLKMAKPPSDIQEIELRVKRLQEILKAFDTYKALVVSVNVSSKEFLQTESPESTELQSRLRQLSLLWEAAQGAVDSWRGGLRQSLMQCQDFHQLSQNLLLWLASAKNRRQKAHVTDPKADPRALLECRRELMQLEKELVERQPQVDMLQEISNSLLIKGHGEDCIEAEEKVHVIEKKLKQLREQVSQDLMALQGTQNPASPLPSFDEVDSGDQPPATSVPAPRAKFRAVRTTEGEEETESRVPGSTRPQRSFLSRVVRAALPLQLLLLLLLLLACLLPSSEEDYSCTQANNFARSFYPMLRYTNGPPPT

SEQ ID NO: 65087 - protein, 3270 aa, Homo sapiens; identical to SEQ ID NO: 65085

SEQ ID NO: 65088 - protein, 429 aa, Homo sapiens
MEGDRNVPPVPPASSTPYKPPYGKLLLPPGTDGGKEGPRVLNGNPQQEDGGLAGITEQQSGAFDRWEMIQAQELHNKLKIKQNLQQLNSDISAITTWLKKTEAELEMLKMAKPPSDIQEIELRVKRLQEILKAFDTYKALVVSVNVSSKEFLQTESPESTELQSRLRQLSLLWEAAQGAVDSWRGGLRQSLMQCQGSKTRPRSDVLFFKDFHQLSQNLLLWLASAKNRRQKAHVTDPKADPRALLECRRELMQLEKELVERQPQVDMLQEISNSLLIKGHGEDCIEAEEKVHVIEKKLKQLREQVSQDLMALQGTQNPASPLPSFDEVDSGDQPPATSVPAPRAKFRAVRTTEGEEETESRVPGSTRPQRSFLSRVVRAALPLQLLLLLLLLLACLLPSSEEDYSCTQANNFARSFYPMLRYTNGPPPT

SEQ ID NO: 65089 - protein, 556 aa, Homo sapiens
MEDPREIQTDSWRKRGESEEPSSPQSLCHLVAPGHERSGCETPVSVDSIPLEWDHTGDVGGSSSHEEDEEGPYYSALSDVEIPENPEAYLKMTTKTLKASSGKSISDGHSWHVPDSPSCPEHHYKQMEGDRNVPPVPPASSTPYKPPYGKLLLPPGTDGGKEGPRVLNGNPQQEDGGLAGITEQQSGAFDRWEMIQAQELHNKLKIKQNLQQLNSDISAITTWLKKTEAELEMLKMAKPPSDIQEIELRVKRLQEILKAFDTYKALVVSVNVSSKEFLQTESPESTELQSRLRQLSLLWEAAQGAVDSWRGGLRQSLMQCQGSKTRPRSDVLFFKDFHQLSQNLLLWLASAKNRRQKAHVTDPKADPRALLECRRELMQLEKELVERQPQVDMLQEISNSLLIKGHGEDCIEAEEKVHVIEKKLKQLREQVSQDLMALQGTQNPASPLPSFDEVDSGDQPPATSVPAPRAKQFRAVRTTEGEEETESRVPGSTRPQRSFLSRVVRAALPLQLLLLLLLLLACLLPSSEEDYSCTQANNFARSFYPMLRYTNGPPPT

SEQ ID NO: 65090 - protein, 668 aa, Homo sapiens
MVHEGNQRWDNLQRRVTAVLRRLRHFTNQREEFEGTRESILVWLTEMDLQLTNVEHFSESDADDKMRQLNGFQQEITLNTNKIDQLIVFGEQLIQKSEPLDAVLIEDELEELHRYCQEVFGRVSRFHRRLTSCTPGLEDEKEASENETDMEDPREIQTDSWRKRGESEEPSSPQSLCHLVAPGHERSGCETPVSVDSIPLEWDHTGDVGGSSSHEEDEEGPYYSALSGKSISDGHSWHVPDSPSCPEHHYKQMEGDRNVPPVPPASSTPYKPPYGKLLLPPGTDGGKEGPRVLNGNPQQEDGGLAGITEQQSGAFDRWEMIQAQELHNKLKIKQNLQQLNSDISAITTWLKKTEAELEMLKMAKPPSDIQEIELRVKRLQEILKAFDTYKALVVSVNVSSKEFLQTESPESTELQSRLRQLSLLWEAAQGAVDSWRGGLRQSLMQCQDFHQLSQNLLLWLASAKNRRQKAHVTDPKADPRALLECRRELMQLEKELVERQPQVDMLQEISNSLLIKGHGEDCIEAEEKVHVIEKKLKQLREQVSQDLMALQGTQNPASPLPSFDEVDSGDQPPATSVPAPRAKQFRAVRTTEGEEETESRVPGSTRPQRSFLSRVVRAALPLQLLLLLLLLLACLLPSSEEDYSCTQANNFARSFYPMLRYTNGPPPT

SEQ ID NO: 65091 - protein, 3541 aa, Homo sapiens
MEEDIYTNLSKMETVLGQSMSSLPLSYREALERLEQSKALVSNLISTKEELMKLRQILRLLRLRCTENDGICLLKIVSALWEKWLSLLEAAKEWEMWCEELKQEWKFVSEEIEREAIILDNLQEELPEISKTKEAATTEELSELLDCLCQYGENVEKQQLLLTLLLQRIRSIQNVPESSGAVETVPAFQEITSMKERCNKLLQKVQKNKELVQTEIQERHSFTKEIIALKNFFQQTTTSFQNMAFQDHPEKSEQFEELQSILKKGKLTFENIMEKLRIKYSEMYTIVPAEIESQVEECRKALEDIDEKISNEVLKSSPSYAMRRKIEEINNGLHNVEKMLQQKSKNIEKAQEIQKKMWDELDLWHSKLNELDSEVQDIVEQDPGQAQEWMDNLMIPFQQYQQVSQRAECRTSQLNKATVKMEEYSDLLKSTEAWIENTSHLLANPADYDSLRTLSHHASTVQMALEDSEQKHNLLHSIFMDLEDLSIIFETDELTQSIQELSNQVTALQQKIMESLPQIQRMADDVVAIESEVKSMEKRVSKIKTILLSKEIFDFSPEEHLKHGEVILENIRPMKKTIAEIVSYQVELRLPQTGMKPLPVFQRTNQLLQDIKLLENVTQEQNELLKVVIKQTNEWDEEIENLKQILNNYSAQFSLEHMSPDQADKLPQLQGEIERMEKQILSLNQRKEDLLVDLKATVLNLHQHLKQEQEGVERDRLPAVTSEEGGVAERDASERKLNRRGSMSYLAAVEEEVEESSVKSDNGDEKAEPSPQSWSSLWKHDKDMEEDRASSSSGTIVQEAYGKISTSDNSMAQILTPDSLNTEQGPECSLRPNQTEEGTTPPIEADTLDSSDAQGGLEPRVEKTRPEPTEVLHACKTQVAELELWLQQANVAVEPETLNADMQQVLEQQLVGCQAMLTEIEHKVAFLLETCKDQGLGDNGATQHEAEALSLKLKTVKCNLEKVQMMLQEKHSEDQHPTILKKSSEPEHQEALQPVNLSELESIVTERPQFSRQKDFQQQQVLELKPMEQKDFIKFIEFNAKKMWPQYCQHDNDTTQESSASNQASSPENDVPDSILSPQGQNGDKWQYLHHELSSKIKLPLPQLVEPQVSTNMGILPSVTMYNFRYPTTEELKTYTTQLEDLRQEASNLQTQENMTEEAYINLDKKLFELFLTLSQCLSSVEEMLEMPRLYREDGSGQQVHYETLALELKKLYLALSDKKGDLLKAMTWPGENTNLLLECFDNLQVCLEHTQAAAVCRSKSLKAGLDYNRSYQNEIKRLYHQLIKSKTSLQQSLNEISGQSVAEQLQKADAYTVELENAESRVAKLRDEGERLHLPYALLQEVYKLEDVLDSMWGMLRARYTELSSPFVTESQQDALLQGMVELVKIGKEKLAHGHLKQTKSKVALQAQIENHKVFFQKLVADMLLIQAYSAKILPSLLQNRETFWAEQVTEVKILEEKSRQCGMKLQSLLQKWEEFDENYASLEKDLEILISTLPSVSLVEETEERLVERISFYQQIKRNIGGKHARLYQTLNEGKQLVASVSCPELEGQIAKLEEQWLSLNKKIDHELHRLQALLKHLLSYNRDSDQLTKWLESSQHTLNYWKEQSLNVSQDLDTIRSNINNFFEFSKEVDEKSSLKTAVISIGNQLLHLKETDTATLRASLAQFEQKWTMLITQLPDIQEKLHQLQMEKLPSRKAITEMISWMNNVEHQTSDEDSVHSPSSASQVKHLLQKHKEFRMEMDYKQWIVDFVNQSLLQLSTCDVESKRYERTEFAEHLGEMNRQWHRVHGMLNRKIQHLEQLLESITESENKIQILNNWLEAQEERLKTLQKPESVISVQKLLLDCQDIENQLAIKSKALDELKQSYLTLESGAVPLLEDTASRIDELFQKRSSVLTQVNQLKTSMQSVLQEWKIYDQLYDEVNMMTIRFWYCMEHSKPVVLSLETLRCQVENLQSLQDEAESSEGSWEKLQEVIGKLKGLCPSVAEIIEEKCQNTHKRWTQVNQAIADQLQKAQSLLQLWKAYSNAHGEAAARLKQQEAKFQQLANISMSGNNLAEILPPALQDIKELQHDVQKTKEAFLQNSSVLDRLPQPAESSTHMLLPGPLHSLQRAAYLEKMLLVKANEFEFVLSQFKDFGVRLESLKGLIMHEEENLDRLHQQEKENPDSFLNHVLALTAQSPDIEHLNEVSLKLPLSDVAVKTLQNMNRQWIRATATALERCSELQGIGLNEKFLYCCEKWIQLLEKIEEALKVDVANSLPELLEQQKTYKMLEAEVSINQTIADSYVTQSLQLLDTTEIENRPEFITEFSKLTDRWQNAVQGVRQRKGDVDGLVRQWQDFTTSVENLFRFLTDTSHLLSAVKGQERFSLYQTRSLIHELKNKEIHFQRRRTTCALTLEAGEKLLLTTDLKTKESVGRRISQLQDSWKDMEPQLAEMIKQFQSTVETWDQCEKKIKELKSRLQVLKAQSEDPLPELHEDLHNEKELIKELEQSLASWTQNLKELQTMKADLTRHVLVEDVMVLKEQIEHLHRQWEDLCLRVAIRKQEIEDRLNTWVVFNEKNKELCAWLVQMENKVLQTADISIEEMIEKLQKDCMEEINLFSENKLQLKQMGDQLIKASNKSRAAEIDDKLNKINDRWQHLFDVIGSRVKKLKETFAFIQQLDKNMSNLRTWLARIESELSKPVVYDVCDDQEIQKRLAEQQDLQRDIEQHSAGVESVFNICDVLLHDSDACANETECDSIQQTTRSLDRRWRNICAMSMERRMKIEETWRLWQKFLDDYSRFEDWLKSAERTAACPNSSEVLYTSAKEELKRFEAFQRQIHERLTQLELINKQYRRLARENRTDTASRLKQMVHEGNQRWDNLQRRVTAVLRRLRHFTNQREEFEGTRESILVWLTEMDLQLTNVEHFSESDADDKMRQLNGFQQEITLNTNKIDQLIVFGEQLIQKSEPLDAVLIEDELEELHRYCQEVFGRVSRFHRRLTSCTPGLEDEKEASENETDMEDPREIQTDSWRKRGESEEPSSPQSLCHLVAPGHERSGCETPVSVDSIPLEWDHTGDVGGSSSHEEDEEGPYYSALSDVEIPENPEAYLKMTTKTLKASSGKSISDGHSWHVPDSPSCPEHHYKQMEGDRNVPPVPPASSTPYKPPYGKLLLPPGTDGGKEGPRVLNGNPQQEDGGLAGITEQQSGAFDRWEMIQAQELHNKLKIKQNLQQLNSDISAITTWLKKTEAELEMLKMAKPPSDIQEIELRVKRLQEILKAFDTYKALVVSVNVSSKEFLQTESPESTELQSRLRQLSLLWEAAQGAVDSWRGGLRQSLMQCQDFHQLSQNLLLWLASAKNRRQKAHVTDPKADPRALLECRRELMQLEKELVERQPQVDMLQEISNSLLIKGHGEDCIEAEEKVHVIEKKLKQLREQVSQDLMALQGTQNPASPLPSFDEVDSGDQPPATSVPAPRAKFRAVRTTEGEEETESRVPGSTRPQRSFLSRVVRAALPLQLLLLLLLLLACLLPSSEEDYSCTQANNFARSFYPMLRYTNGPPPT

SEQ ID NO: 65092 - protein, 763 aa, Homo sapiens
MSMERRMKIEETWRLWQKFLDDYSRFEDWLKSAERTAACPNSSEVLYTSAKEELKRFEAFQRQIHERLTQLELINKQYRRLARENRTDTASRLKQMVHEGNQRWDNLQRRVTAVLRRLRHFTNQREEFEGTRESILVWLTEMDLQLTNVEHFSESDADDKMRQLNGFQQEITLNTNKIDQLIVFGEQLIQKSEPLDAVLIEDELEELHRYCQEVFGRVSRFHRRLTSCTPGLEDEKEASENETDMEDPREIQTDSWRKRGESEEPSSPQSLCHLVAPGHERSGCETPVSVDSIPLEWDHTGDVGGSSSHEEDEEGPYYSALSGKSISDGHSWHVPDSPSCPEHHYKQMEGDRNVPPVPPASSTPYKPPYGKLLLPPGTDGGKEGPRVLNGNPQQEDGGLAGITEQQSGAFDRWEMIQAQELHNKLKIKQNLQQLNSDISAITTWLKKTEAELEMLKMAKPPSDIQEIELRVKRLQEILKAFDTYKALVVSVNVSSKEFLQTESPESTELQSRLRQLSLLWEAAQGAVDSWRGGLRQSLMQCQDFHQLSQNLLLWLASAKNRRQKAHVTDPKADPRALLECRRELMQLEKELVERQPQVDMLQEISNSLLIKGHGEDCIEAEEKVHVIEKKLKQLREQVSQDLMALQGTQNPASPLPSFDEVDSGDQPPATSVPAPRAKQFRAVRTTEGEEETESRVPGSTRPQRSFLSRVVRAALPLQLLLLLLLLLACLLPSSEEDYSCTQANNFARSFYPMLRYTNGPPPT

SEQ ID NO: 65093 - protein, 2416 aa, Homo sapiens
MEQFPKETVVESSGPKVLETAEEIQERRQEVLTRYQSFKERVAERGQKLEDSYHLQVFKRDADDLGKWIMEKVNILTDKSYEDPTNIQGKYQKHQSLEAEVQTKSRLMSELEKTREERFTMGHSAHEETKAHIEELRHLWDLLLELTLEKGDQLLRALKFQQYVQECADILEWIGDKEAIATSVELGEDWERTEVLHKKFEDFQVELVAKEGRVVEVNQYANECAEENHPDLPLIQSKQNEVNAAWERLRGLALQRQKALSNAANLQRFKRDVTEAIQWIKEKEPVLTSEDYGKDLVASEGLFHSHKGLERNLAVMSDKVKELCAKAEKLTLSHPSDAPQIQEMKEDLVSSWEHIRALATSRYEKLQATYWYHRFSSDFDELSGWMNEKTAAINADELPTDVAGGEVLLDRHQQHKHEIDSYDDRFQSADETGQDLVNANHEASDEVREKMEILDNNWTALLELWDERHRQYEQCLDFHLFYRDSEQVDSWMSRQEAFLENEDLGNSLGSAEALLQKHEDFEEAFTAQEEKIITVDKTATKLIGDDHYDSENIKAIRDGLLARRDALREKAATRRRLLKESLLLQKLYEDSDDLKNWINKKKKLADDEDYKDIQNLKSRVQKQQVFEKELAVNKTQLENIQKTGQEMIEGGHYASDNVTTRLSEVASLWEELLEATKQKGTQLHEANQQLQFENNAEDLQRWLEDVEWQVTSEDYGKGLAEVQNRLRKHGLLESAVAARQDQVDILTDLAAYFEEIGHPDSKDIRARQESLVCRFEALKEPLATRKKKLLDLLHLQLICRDTEDEEAWIQETEPSATSTYLGKDLIASKKLLNRHRVILENIASHEPRIQEITERGNKMVEEGHFAAEDVASRVKSLNQNMESLRARAARRQNDLEANVQFQQYLADLHEAETWIREKEPIVDNTNYGADEEAAGALLKKHEAFLLDLNSFGDSMKALRNQANACQQQQAAPVEGVAGEQRVMALYDFQARSPREVTMKKGDVLTLLSSINKDWWKVEAADHQGIVPAVYVRRLAHDEFPMLPQRRREEPGNITQRQEQIENQYRSLLDRAEERRRRLLQRYNEFLLAYEAGDMLEWIQEKKAENTGVELDDVWELQKKFDEFQKDLNTNEPRLRDINKVADDLLFEGLLTPEGAQIRQELNSRWGSLQRLADEQRQLLGSAHAVEVFHREADDTKEQIEKKCQALSAADPGSDLFSVQALQRRHEGFERDLVPLGDKVTILGETAERLSESHPDATEDLQRQKMELNEAWEDLQGRTKDRKESLNEAQKFYLFLSKARDLQNWISSIGGMVSSQELAEDLTGIEILLERHQEHRADMEAEAPTFQALEDFSAELIDSGHHASPEIEKKLQAVKLERDDLEKAWEKRKKILDQCLELQMFQGNCDQVESWMVARENSLRSDDKSSLDSLEALMKKRDDLDKAITAQEGKITDLEHFAESLIADEHYAKEEIATRLQRVLDRWKALKAQLIDERTKLGDYANLKQFYRDLEELEEWISEMLPTACDESYKDATNIQRKYLKHQTFAHEVDGRSEQVHGVINLGNSLIECSACDGNEEAMKEQLEQLKEHWDHLLERTNDKGKKLNEASRQQRFNTSIRDFEFWLSEAETLLAMKDQARDLASAGNLLKKHQLLEREMLAREDALKDLNTLAEDLLSSGTFNVDQIVKKKDNVNKRFLNVQELAAAHHEKLKEAYALFQFFQDLDDEESWIEEKLIRVSSQDYGRDLQGVQNLLKKHKRLEGELVAHEPAIQNVLDMAEKLKDKAAVGQEEIQLRLAQFVEHWEKLKELAKARGLKLEESLEYLQFMQNAEEEEAWINEKNALAVRGDCGDTLAATQSLLMKHEALENDFAVHETRVQNVCAQGEDILNKEESQNKEISSKIEALNEKTPSLAKAIAAWKLQLEDDYAFQEFNWKADVVEAWIADKETSLKTNGNGADLGDFLTLLAKQDTLDASLQSFQQERLPEITDLKDKLISAQHNQSKAIEERYAALLKRWEQLLEASAVHRQKLLEKQLPLQKAEDLFVEFAHKASALNNWCEKMEENLSEPVHCVSLNEIRQLQKDHEDFLASLARAQADFKCLLELDQQIKALGVPSSPYTWLTVEVLERTWKHLSDIIEEREQELQKEEARQVKNFEMCQEFEQNASTFLQWILETRAYFLDGSLLKETGTLESQLEANKRKQKEIQAMKRQLTKIVDLGDNLEDALILDIKYSTIGLAQQWDQLYQLGLRMQHNLEQQIQAKDIKGVSEETLKEFSTIYKHFDENLTGRLTHKEFRSCLRGLNYYLPMVEEDEHEPKFEKFLDAVDPGRKGYVSLEDYTAFLIDKESENIKSSDEIENAFQALAEGKSYITKEDMKQALTPEQVSFCATHMQQYMDPRGRSHLSGYDYVGFTNSYFGN

SEQ ID NO: 65094 - protein, 2419 aa, Homo sapiens
MEQFPKETVVESSGPKVLETAEEIQERRQEVLTRYQSFKERVAERGQKLEDSYHLQVFKRDADDLGKWIMEKVNILTDKSYEDPTNIQGKYQKHQSLEAEVQTKSRLMSELEKTREERFTMGHSAHEETKAHIEELRHLWDLLLELTLEKGDQLLRALKFQQYVQECADILEWIGDKEAIATSVELGEDWERTEVLHKKFEDFQVELVAKEGRVVEVNQYANECAEENHPDLPLIQSKQNEVNAAWERLRGLALQRQKALSNAANLQRFKRDVTEAIQWIKEKEPVLTSEDYGKDLVASEGLFHSHKGLERNLAVMSDKVKELCAKAEKLTLSHPSDAPQIQEMKEDLVSSWEHIRALATSRYEKLQATYWYHRFSSDFDELSGWMNEKTAAINADELPTDVAGGEVLLDRHQQHKHEIDSYDDRFQSADETGQDLVNANHEASDEVREKMEILDNNWTALLELWDERHRQYEQCLDFHLFYRDSEQVDSWMSRQEAFLENEDLGNSLGSAEALLQKHEDFEEAFTAQEEKIITVDKTATKLIGDDHYDSENIKAIRDGLLARRDALREKAATRRRLLKESLLLQKLYEDSDDLKNWINKKKKLADDEDYKDIQNLKSRVQKQQVFEKELAVNKTQLENIQKTGQEMIEGGHYASDNVTTRLSEVASLWEELLEATKQKGTQLHEANQQLQFENNAEDLQRWLEDVEWQVTSEDYGKGLAEVQNRLRKHGLLESAVAARQDQVDILTDLAAYFEEIGHPDSKDIRARQESLVCRFEALKEPLATRKKKLLDLLHLQLICRDTEDEEAWIQETEPSATSTYLGKDLIASKKLLNRHRVILENIASHEPRIQEITERGNKMVEEGHFAAEDVASRVKSLNQNMESLRARAARRQNDLEANVQFQQYLADLHEAETWIREKEPIVDNTNYGADEEAAGALLKKHEAFLLDLNSFGDSMKALRNQANACQQQQAAPVEGVAGEQRVMALYDFQARSPREVTMKKGDVLTLLSSINKDWWKVEAADHQGIVPAVYVRRLAHDEFPMLPQRRREEPGNITQRQEQIENQYRSLLDRAEERRRRLLQRYNEFLLAYEAGDMLEWIQEKKAENTGVELDDVWELQKKFDEFQKDLNTNEPRLRDINKVADDLLFEGLLTPEGAQIRQELNSRWGSLQRLADEQRQLLGSAHAVEVFHREADDTKEQIEKKCQALSAADPGSDLFSVQALQRRHEGFERDLVPLGDKVTILGETAERLSESHPDATEDLQRQKMELNEAWEDLQGRTKDRKESLNEAQKFYLFLSKARDLQNWISSIGGMVSSQELAEDLTGIEILLERHQEHRADMEAEAPTFQALEDFSAELIDSGHHASPEIEKKLQAVKLERDDLEKAWEKRKKILDQCLELQMFQGNCDQVESWMVARENSLRSDDKSSLDSLEALMKKRDDLDKAITAQEGKITDLEHFAESLIADEHYAKEEIATRLQRVLDRWKALKAQLIDERTKLGDYANLKQFYRDLEELEEWISEMLPTACDESYKDATNIQRKYLKHQTFAHEVDGRSEQVHGVINLGNSLIECSACDGNEEAMKEQLEQLKEHWDHLLERTNDKGKKLNEASRQQRFNTSIRDFEFWLSEAETLLAMKDQARDLASAGNLLKKHQLLEREMLAREDALKDLNTLAEDLLSSGTFNVDQIVKKKDNVNKRFLNVQELAAAHHEKLKEAYALFQFFQDLDDEESWIEEKLIRVSSQDYGRDLQGVQNLLKKHKRLEGELVAHEPAIQNVLDMAEKLKDKAAVGQEEIQLRLAQFVEHWEKLKELAKARGLKLEESLEYLQFMQNAEEEEAWINEKNALAVRGDCGDTLAATQSLLMKHEALENDFAVHETRVQNVCAQGEDILNKVLQEESQNKEISSKIEALNEKTPSLAKAIAAWKLQLEDDYAFQEFNWKADVVEAWIADKETSLKTNGNGADLGDFLTLLAKQDTLDASLQSFQQERLPEITDLKDKLISAQHNQSKAIEERYAALLKRWEQLLEASAVHRQKLLEKQLPLQKAEDLFVEFAHKASALNNWCEKMEENLSEPVHCVSLNEIRQLQKDHEDFLASLARAQADFKCLLELDQQIKALGVPSSPYTWLTVEVLERTWKHLSDIIEEREQELQKEEARQVKNFEMCQEFEQNASTFLQWILETRAYFLDGSLLKETGTLESQLEANKRKQKEIQAMKRQLTKIVDLGDNLEDALILDIKYSTIGLAQQWDQLYQLGLRMQHNLEQQIQAKDIKGVSEETLKEFSTIYKHFDENLTGRLTHKEFRSCLRGLNYYLPMVEEDEHEPKFEKFLDAVDPGRKGYVSLEDYTAFLIDKESENIKSSDEIENAFQALAEGKSYITKEDMKQALTPEQVSFCATHMQQYMDPRGRSHLSGYDYVGFTNSYFGN

SEQ ID NO: 65095 - protein, 2477 aa, Homo sapiens
MDPSGVKVLETAEDIQERRQQVLDRYHRFKELSTLRRQKLEDSYRFQFFQRDAEELEKWIQEKLQIASDENYKDPTNLQGKLQKHQAFEAEVQANSGAIVKLDETGNLMISEGHFASETIRTRLMELHRQWELLLEKMREKGIKLLQAQKLVQYLRECEDVMDWINDKEAIVTSEELGQDLEHVEVLQKKFEEFQTDMAAHEERVNEVNQFAAKLIQEQHPEEELIKTKQDEVNAAWQRLKGLALQRQGKLFGAAEVQRFNRDVDETISWIKEKEQLMASDDFGRDLASVQALLRKHEGLERDLAALEDKVKALCAEADRLQQSHPLSATQIQVKREELITNWEQIRTLAAERHARLNDSYRLQRFLADFRDLTSWVTEMKALINADELASDVAGAEALLDRHQEHKGEIDAHEDSFKSADESGQALLAAGHYASDEVREKLTVLSEERAALLELWELRRQQYEQCMDLQLFYRDTEQVDNWMSKQEAFLLNEDLGDSLDSVEALLKKHEDFEKSLSAQEEKITALDEFATKLIQNNHYAMEDVATRRDALLSRRNALHERAMRRRAQLADSFHLQQFFRDSDELKSWVNEKMKTATDEAYKDPSNLQGKVQKHQAFEAELSANQSRIDALEKAGQKLIDVNHYAKDEVAARMNEVISLWKKLLEATELKGIKLREANQQQQFNRNVEDIELWLYEVEGHLASDDYGKDLTNVQNLQKKHALLEADVAAHQDRIDGITIQARQFQDAGHFDAENIKKKQEALVARYEALKEPMVARKQKLADSLRLQQLFRDVEDEETWIREKEPIAASTNRGKDLIGVQNLLKKHQALQAEIAGHEPRIKAVTQKGNAMVEEGHFAAEDVKAKLHELNQKWEALKAKASQRRQDLEDSLQAQQYFADANEAESWMREKEPIVGSTDYGKDEDSAEALLKKHEALMSDLSAYGSSIQALREQAQSCRQQVAPTDDETGKELVLALYDYQEKSPREVTMKKGDILTLLNSTNKDWWKVEVNDRQGFVPAAYVKKLDPAQSASRENLLEEQGSIALRQEQIDNQTRITKEAGSVSLRMKQVEELYHSLLELGEKRKGMLEKSCKKFMLFREANELQQWINEKEAALTSEEVGADLEQVEVLQKKFDDFQKDLKANESRLKDINKVAEDLESEGLMAEEVQAVQQQEVYGMMPRDETDSKTASPWKSARLMVHTVATFNSIKELNERWRSLQQLAEERSQLLGSAHEVQRFHRDADETKEWIEEKNQALNTDNYGHDLASVQALQRKHEGFERDLAALGDKVNSLGETAERLIQSHPESAEDLQEKCTELNQAWSSLGKRADQRKAKLGDSHDLQRFLSDFRDLMSWINGIRGLVSSDELAKDVTGAEALLERHQEHRTEIDARAGTFQAFEQFGQQLLAHGHYASPEIKQKLDILDQERADLEKAWVQRRMMLDQCLELQLFHRDCEQAENWMAAREAFLNTEDKGDSLDSVEALIKKHEDFDKAINVQEEKIAALQAFADQLIAAGHYAKGDISSRRNEVLDRWRRLKAQMIEKRSKLGESQTLQQFSRDVDEIEAWISEKLQTASDESYKDPTNIQVSLMLSKHQKHQAFEAELHANADRIRGVIDMGNSLIERGACAGSEDAVKARLAALADQWQFLVQKSAEKSQKLKEANKQQNFNTGIKDFDFWLSEVEALLASEDYGKDLASVNNLLKKHQLLEADISAHEDRLKDLNSQADSLMTSSAFDTSQVKDKRDTINGRFQKIKSMAASRRAKLNESHRLHQFFRDMDDEESWIKEKKLLVGSEDYGRDLTGVQNLRKKHKRLEAELAAHEPAIQGVLDTGKKLSDDNTIGKEEIQQRLAQFVEHWKELKQLAAARGQRLEESLEYQQFVANVEEEEAWINEKMTLVASEDYGDTLAAIQGLLKKHEAFETDFTVHKDRVNDVCTNGQDLIKKNNHHEENISSKMKGLNGKVSDLEKAAAQRKAKLDENSAFLQFNWKADVVESWIGEKENSLKTDDYGRDLSSVQTLLTKQETFDAGLQAFQQEGIANITALKDQLLAAKHVQSKAIEARHASLMKRWSQLLANSAARKKKLLEAQSHFRKVEDLFLTFAKKASAFNSWFENAEEDLTDPVRCNSLEEIKALREAHDAFRSSLSSAQADFNQLAELDRQIKSFRVASNPYTWFTMEALEETWRNLQKIIKERELELQKEQRRQEENDKLRQEFAQHANAFHQWIQETRCQPAGASCMVEESGTLESQLEATKRKHQEIRAMRSQLKKIEDLGAAMEEALILDNKYTEHSTVGLAQQWDQLDQLGMRMQHNLEQQIQARNTTGVTEEALKEFSMMFKHFDKDKSGRLNHQEFKSCLRSLGYDLPMVEEGEPDPEFEAILDTVDPNRDGHVSLQEYMAFMISRETENVKSSEEIESAFRALSSEGKPYVTKEELYQNLTREQADYCVSHMKPYVDGKGRELPTAFDYVEFTRSLFVN

SEQ ID NO: 65096 - protein, 2452 aa, Homo sapiens
MDPSGVKVLETAEDIQERRQQVLDRYHRFKELSTLRRQKLEDSYRFQFFQRDAEELEKWIQEKLQIASDENYKDPTNLQGKLQKHQAFEAEVQANSGAIVKLDETGNLMISEGHFASETIRTRLMELHRQWELLLEKMREKGIKLLQAQKLVQYLRECEDVMDWINDKEAIVTSEELGQDLEHVEVLQKKFEEFQTDMAAHEERVNEVNQFAAKLIQEQHPEEELIKTKQDEVNAAWQRLKGLALQRQGKLFGAAEVQRFNRDVDETISWIKEKEQLMASDDFGRDLASVQALLRKHEGLERDLAALEDKVKALCAEADRLQQSHPLSATQIQVKREELITNWEQIRTLAAERHARLNDSYRLQRFLADFRDLTSWVTEMKALINADELASDVAGAEALLDRHQEHKGEIDAHEDSFKSADESGQALLAAGHYASDEVREKLTVLSEERAALLELWELRRQQYEQCMDLQLFYRDTEQVDNWMSKQEAFLLNEDLGDSLDSVEALLKKHEDFEKSLSAQEEKITALDEFATKLIQNNHYAMEDVATRRDALLSRRNALHERAMRRRAQLADSFHLQQFFRDSDELKSWVNEKMKTATDEAYKDPSNLQGKVQKHQAFEAELSANQSRIDALEKAGQKLIDVNHYAKDEVAARMNEVISLWKKLLEATELKGIKLREANQQQQFNRNVEDIELWLYEVEGHLASDDYGKDLTNVQNLQKKHALLEADVAAHQDRIDGITIQARQFQDAGHFDAENIKKKQEALVARYEALKEPMVARKQKLADSLRLQQLFRDVEDEETWIREKEPIAASTNRGKDLIGVQNLLKKHQALQAEIAGHEPRIKAVTQKGNAMVEEGHFAAEDVKAKLHELNQKWEALKAKASQRRQDLEDSLQAQQYFADANEAESWMREKEPIVGSTDYGKDEDSAEALLKKHEALMSDLSAYGSSIQALREQAQSCRQQVAPTDDETGKELVLALYDYQEKSPREVTMKKGDILTLLNSTNKDWWKVEVNDRQGFVPAAYVKKLDPAQSASRENLLEEQGSIALRQEQIDNQYHSLLELGEKRKGMLEKSCKKFMLFREANELQQWINEKEAALTSEEVGADLEQVEVLQKKFDDFQKDLKANESRLKDINKVAEDLESEGLMAEEVQAVQQQEVYGMMPRDETDSKTASPWKSARLMVHTVATFNSIKELNERWRSLQQLAEERSQLLGSAHEVQRFHRDADETKEWIEEKNQALNTDNYGHDLASVQALQRKHEGFERDLAALGDKVNSLGETAERLIQSHPESAEDLQEKCTELNQAWSSLGKRADQRKAKLGDSHDLQRFLSDFRDLMSWINGIRGLVSSDELAKDVTGAEALLERHQEHRTEIDARAGTFQAFEQFGQQLLAHGHYASPEIKQKLDILDQERADLEKAWVQRRMMLDQCLELQLFHRDCEQAENWMAAREAFLNTEDKGDSLDSVEALIKKHEDFDKAINVQEEKIAALQAFADQLIAAGHYAKGDISSRRNEVLDRWRRLKAQMIEKRSKLGESQTLQQFSRDVDEIEAWISEKLQTASDESYKDPTNIQSKHQKHQAFEAELHANADRIRGVIDMGNSLIERGACAGSEDAVKARLAALADQWQFLVQKSAEKSQKLKEANKQQNFNTGIKDFDFWLSEVEALLASEDYGKDLASVNNLLKKHQLLEADISAHEDRLKDLNSQADSLMTSSAFDTSQVKDKRDTINGRFQKIKSMAASRRAKLNESHRLHQFFRDMDDEESWIKEKKLLVGSEDYGRDLTGVQNLRKKHKRLEAELAAHEPAIQGVLDTGKKLSDDNTIGKEEIQQRLAQFVEHWKELKQLAAARGQRLEESLEYQQFVANVEEEEAWINEKMTLVASEDYGDTLAAIQGLLKKHEAFETDFTVHKDRVNDVCTNGQDLIKKNNHHEENISSKMKGLNGKVSDLEKAAAQRKAKLDENSAFLQFNWKADVVESWIGEKENSLKTDDYGRDLSSVQTLLTKQETFDAGLQAFQQEGIANITALKDQLLAAKHVQSKAIEARHASLMKRWSQLLANSAARKKKLLEAQSHFRKVEDLFLTFAKKASAFNSWFENAEEDLTDPVRCNSLEEIKALREAHDAFRSSLSSAQADFNQLAELDRQIKSFRVASNPYTWFTMEALEETWRNLQKIIKERELELQKEQRRQEENDKLRQEFAQHANAFHQWIQETRCQPAGASCMVEESGTLESQLEATKRKHQEIRAMRSQLKKIEDLGAAMEEALILDNKYTEHSTVGLAQQWDQLDQLGMRMQHNLEQQIQARNTTGVTEEALKEFSMMFKHFDKDKSGRLNHQEFKSCLRSLGYDLPMVEEGEPDPEFEAILDTVDPNRDGHVSLQEYMAFMISRETENVKSSEEIESAFRALSSEGKPYVTKEELYQNLTREQADYCVSHMKPYVDGKGRELPTAFDYVEFTRSLFVN

SEQ ID NO: 65097 - protein, 494 aa, Homo sapiens
MAASRRAKLNESHRLHQFFRDMDDEESWIKEKKLLVGSEDYGRDLTGVQNLRKKHKRLEAELAAHEPAIQGVLDTGKKLSDDNTIGKEEIQQRLAQFVEHWKELKQLAAARGQRLEESLEYQQFVANVEEEEAWINEKMTLVASEDYGDTLAAIQGLLKKHEAFETDFTVHKDRVNDVCTNGQDLIKKNNHHEENISSKMKGLNGKVSDLEKAAAQRKAKLDENSAFLQFNWKADVVESWIGEKENSLKTDDYGRDLSSVQTLLTKQETFDAGLQAFQQEGIANITALKDQLLAAKHVQSKAIEARHASLMKRWSQLLANSAARKKKLLEAQSHFRKVEDLFLTFAKKASAFNSWFENAEEDLTDPVRCNSLEEIKALREAHDAFRSSLSSAQADFNQLAELDRQIKSFRVASNPYTWFTMEALEETWRNLQKIIKERELELQKEQRRQEENDKLRQEFAQHANAFHQWIQETRCQRKDGQLQGGRVGDPRIPA

SEQ ID NO: 65098 - protein, 2472 aa, Homo sapiens
MDPSGVKVLETAEDIQERRQQVLDRYHRFKELSTLRRQKLEDSYRFQFFQRDAEELEKWIQEKLQIASDENYKDPTNLQGKLQKHQAFEAEVQANSGAIVKLDETGNLMISEGHFASETIRTRLMELHRQWELLLEKMREKGIKLLQAQKLVQYLRECEDVMDWINDKEAIVTSEELGQDLEHVEVLQKKFEEFQTDMAAHEERVNEVNQFAAKLIQEQHPEEELIKTKQDEVNAAWQRLKGLALQRQGKLFGAAEVQRFNRDVDETISWIKEKEQLMASDDFGRDLASVQALLRKHEGLERDLAALEDKVKALCAEADRLQQSHPLSATQIQVKREELITNWEQIRTLAAERHARLNDSYRLQRFLADFRDLTSWVTEMKALINADELASDVAGAEALLDRHQEHKGEIDAHEDSFKSADESGQALLAAGHYASDEVREKLTVLSEERAALLELWELRRQQYEQCMDLQLFYRDTEQVDNWMSKQEAFLLNEDLGDSLDSVEALLKKHEDFEKSLSAQEEKITALDEFATKLIQNNHYAMEDVATRRDALLSRRNALHERAMRRRAQLADSFHLQQFFRDSDELKSWVNEKMKTATDEAYKDPSNLQGKVQKHQAFEAELSANQSRIDALEKAGQKLIDVNHYAKDEVAARMNEVISLWKKLLEATELKGIKLREANQQQQFNRNVEDIELWLYEVEGHLASDDYGKDLTNVQNLQKKHALLEADVAAHQDRIDGITIQARQFQDAGHFDAENIKKKQEALVARYEALKEPMVARKQKLADSLRLQQLFRDVEDEETWIREKEPIAASTNRGKDLIGVQNLLKKHQALQAEIAGHEPRIKAVTQKGNAMVEEGHFAAEDVKAKLHELNQKWEALKAKASQRRQDLEDSLQAQQYFADANEAESWMREKEPIVGSTDYGKDEDSAEALLKKHEALMSDLSAYGSSIQALREQAQSCRQQVAPTDDETGKELVLALYDYQEKSPREVTMKKGDILTLLNSTNKDWWKVEVNDRQGFVPAAYVKKLDPAQSASRENLLEEQGSIALRQEQIDNQTRITKEAGSVSLRMKQVEELYHSLLELGEKRKGMLEKSCKKFMLFREANELQQWINEKEAALTSEEVGADLEQVEVLQKKFDDFQKDLKANESRLKDINKVAEDLESEGLMAEEVQAVQQQEVYGMMPRDETDSKTASPWKSARLMVHTVATFNSIKELNERWRSLQQLAEERSQLLGSAHEVQRFHRDADETKEWIEEKNQALNTDNYGHDLASVQALQRKHEGFERDLAALGDKVNSLGETAERLIQSHPESAEDLQEKCTELNQAWSSLGKRADQRKAKLGDSHDLQRFLSDFRDLMSWINGIRGLVSSDELAKDVTGAEALLERHQEHRTEIDARAGTFQAFEQFGQQLLAHGHYASPEIKQKLDILDQERADLEKAWVQRRMMLDQCLELQLFHRDCEQAENWMAAREAFLNTEDKGDSLDSVEALIKKHEDFDKAINVQEEKIAALQAFADQLIAAGHYAKGDISSRRNEVLDRWRRLKAQMIEKRSKLGESQTLQQFSRDVDEIEAWISEKLQTASDESYKDPTNIQSKHQKHQAFEAELHANADRIRGVIDMGNSLIERGACAGSEDAVKARLAALADQWQFLVQKSAEKSQKLKEANKQQNFNTGIKDFDFWLSEVEALLASEDYGKDLASVNNLLKKHQLLEADISAHEDRLKDLNSQADSLMTSSAFDTSQVKDKRDTINGRFQKIKSMAASRRAKLNESHRLHQFFRDMDDEESWIKEKKLLVGSEDYGRDLTGVQNLRKKHKRLEAELAAHEPAIQGVLDTGKKLSDDNTIGKEEIQQRLAQFVEHWKELKQLAAARGQRLEESLEYQQFVANVEEEEAWINEKMTLVASEDYGDTLAAIQGLLKKHEAFETDFTVHKDRVNDVCTNGQDLIKKNNHHEENISSKMKGLNGKVSDLEKAAAQRKAKLDENSAFLQFNWKADVVESWIGEKENSLKTDDYGRDLSSVQTLLTKQETFDAGLQAFQQEGIANITALKDQLLAAKHVQSKAIEARHASLMKRWSQLLANSAARKKKLLEAQSHFRKVEDLFLTFAKKASAFNSWFENAEEDLTDPVRCNSLEEIKALREAHDAFRSSLSSAQADFNQLAELDRQIKSFRVASNPYTWFTMEALEETWRNLQKIIKERELELQKEQRRQEENDKLRQEFAQHANAFHQWIQETRTYLLDGSCMVEESGTLESQLEATKRKHQEIRAMRSQLKKIEDLGAAMEEALILDNKYTEHSTVGLAQQWDQLDQLGMRMQHNLEQQIQARNTTGVTEEALKEFSMMFKHFDKDKSGRLNHQEFKSCLRSLGYDLPMVEEGEPDPEFEAILDTVDPNRDGHVSLQEYMAFMISRETENVKSSEEIESAFRALSSEGKPYVTKEELYQNLTREQADYCVSHMKPYVDGKGRELPTAFDYVEFTRSLFVN

SEQ ID NO: 65099 - protein, 2477 aa, Homo sapiens
MDPSGVKVLETAEDIQERRQQVLDRYHRFKELSTLRRQKLEDSYRFQFFQRDAEELEKWIQEKLQIASDENYKDPTNLQGKLQKHQAFEAEVQANSGAIVKLDETGNLMISEGHFASETIRTRLMELHRQWELLLEKMREKGIKLLQAQKLVQYLRECEDVMDWINDKEAIVTSEELGQDLEHVEVLQKKFEEFQTDMAAHEERVNEVNQFAAKLIQEQHPEEELIKTKQDEVNAAWQRLKGLALQRQGKLFGAAEVQRFNRDVDETISWIKEKEQLMASDDFGRDLASVQALLRKHEGLERDLAALEDKVKALCAEADRLQQSHPLSATQIQVKREELITNWEQIRTLAAERHARLNDSYRLQRFLADFRDLTSWVTEMKALINADELASDVAGAEALLDRHQEHKGEIDAHEDSFKSADESGQALLAAGHYASDEVREKLTVLSEERAALLELWELRRQQYEQCMDLQLFYRDTEQVDNWMSKQEAFLLNEDLGDSLDSVEALLKKHEDFEKSLSAQEEKITALDEFATKLIQNNHYAMEDVATRRDALLSRRNALHERAMRRRAQLADSFHLQQFFRDSDELKSWVNEKMKTATDEAYKDPSNLQGKVQKHQAFEAELSANQSRIDALEKAGQKLIDVNHYAKDEVAARMNEVISLWKKLLEATELKGIKLREANQQQQFNRNVEDIELWLYEVEGHLASDDYGKDLTNVQNLQKKHALLEADVAAHQDRIDGITIQARQFQDAGHFDAENIKKKQEALVARYEALKEPMVARKQKLADSLRLQQLFRDVEDEETWIREKEPIAASTNRGKDLIGVQNLLKKHQALQAEIAGHEPRIKAVTQKGNAMVEEGHFAAEDVKAKLHELNQKWEALKAKASQRRQDLEDSLQAQQYFADANEAESWMREKEPIVGSTDYGKDEDSAEALLKKHEALMSDLSAYGSSIQALREQAQSCRQQVAPTDDETGKELVLALYDYQEKSPREVTMKKGDILTLLNSTNKDWWKVEVNDRQGFVPAAYVKKLDPAQSASRENLLEEQGSIALRQEQIDNQTRITKEAGSVSLRMKQVEELYHSLLELGEKRKGMLEKSCKKFMLFREANELQQWINEKEAALTSEEVGADLEQVEVLQKKFDDFQKDLKANESRLKDINKVAEDLESEGLMAEEVQAVQQQEVYGMMPRDETDSKTASPWKSARLMVHTVATFNSIKELNERWRSLQQLAEERSQLLGSAHEVQRFHRDADETKEWIEEKNQALNTDNYGHDLASVQALQRKHEGFERDLAALGDKVNSLGETAERLIQSHPESAEDLQEKCTELNQAWSSLGKRADQRKAKLGDSHDLQRFLSDFRDLMSWINGIRGLVSSDELAKDVTGAEALLERHQEHRTEIDARAGTFQAFEQFGQQLLAHGHYASPEIKQKLDILDQERADLEKAWVQRRMMLDQCLELQLFHRDCEQAENWMAAREAFLNTEDKGDSLDSVEALIKKHEDFDKAINVQEEKIAALQAFADQLIAAGHYAKGDISSRRNEVLDRWRRLKAQMIEKRSKLGESQTLQQFSRDVDEIEAWISEKLQTASDESYKDPTNIQLSKLLSKHQKHQAFEAELHANADRIRGVIDMGNSLIERGACAGSEDAVKARLAALADQWQFLVQKSAEKSQKLKEANKQQNFNTGIKDFDFWLSEVEALLASEDYGKDLASVNNLLKKHQLLEADISAHEDRLKDLNSQADSLMTSSAFDTSQVKDKRDTINGRFQKIKSMAASRRAKLNESHRLHQFFRDMDDEESWIKEKKLLVGSEDYGRDLTGVQNLRKKHKRLEAELAAHEPAIQGVLDTGKKLSDDNTIGKEEIQQRLAQFVEHWKELKQLAAARGQRLEESLEYQQFVANVEEEEAWINEKMTLVASEDYGDTLAAIQGLLKKHEAFETDFTVHKDRVNDVCTNGQDLIKKNNHHEENISSKMKGLNGKVSDLEKAAAQRKAKLDENSAFLQFNWKADVVESWIGEKENSLKTDDYGRDLSSVQTLLTKQETFDAGLQAFQQEGIANITALKDQLLAAKHVQSKAIEARHASLMKRWSQLLANSAARKKKLLEAQSHFRKVEDLFLTFAKKASAFNSWFENAEEDLTDPVRCNSLEEIKALREAHDAFRSSLSSAQADFNQLAELDRQIKSFRVASNPYTWFTMEALEETWRNLQKIIKERELELQKEQRRQEENDKLRQEFAQHANAFHQWIQETRTYLLDGSCMVEESGTLESQLEATKRKHQEIRAMRSQLKKIEDLGAAMEEALILDNKYTEHSTVGLAQQWDQLDQLGMRMQHNLEQQIQARNTTGVTEEALKEFSMMFKHFDKDKSGRLNHQEFKSCLRSLGYDLPMVEEGEPDPEFEAILDTVDPNRDGHVSLQEYMAFMISRETENVKSSEEIESAFRALSSEGKPYVTKEELYQNLTREQADYCVSHMKPYVDGKGRELPTAFDYVEFTRSLFVN

SEQ ID NO: 65100 - protein, 1147 aa, Homo sapiens
MENNRDKVLSPVDSGNKLVAEGNLYSDKIKEKVQLIEDRHRKNNEKAQEASVLLRDNLELQNFLQNCQELTLWINDKLLTSQDVSYDEARNLHNKWLKHQAFVAELASHEGWLENIDAEGKQLMDEKPQFTALVSQKLEALHRLWDELQATTKEKTQHLSAARSSDLRLQTHADLNKWISAMEDQLRSDDPGKDLTSVNRMLAKLKRVEDQVNVRKEELGELFAQVPSMGEEGGDADLSIEKRFLDLLEPLGRRKKQLESSRAKLQISRDLEDETLWVEERLPLAQSADYGTNLQTVQLFMKKNQTLQNEILGHTPRVEDVLQRGQQLVEAAEIDCQDLEERLGHLQSSWDRLREAAAGRLQRLRDANEAQQYYLDADEAEAWIGEQELYVISDEIPKDEEGAIVMLKRHLRQQRAVEDYGRNIKQLASRAQGLLSAGHPEGEQIIRLQGQVDKHYAGLKDVAEERKRKLENMYHLFQLKRETDDLEQWISEKELVASSPEMGQDFDHVTLLRDKFRDFARETGAIGQERVDNVNAFIERLIDAGHSEAATIAEWKDGLNEMWADLLELIDTRMQLLAASYDLHRYFYTGAEILGLIDEKHRELPEDVGLDASTAESFHRVHTAFERELHLLGVQVQQFQDVATRLQTAYAGEKAEAIQNKEQEVSAAWQALLDACAGRRTQLVDTADKFRFFSMARDLLSWMESIIRQIETQERPRDVSSVELLMKYHQGINAEIETRSKNFSACLELGESLLQRQHQASEEIREKLQQVMSRRKEMNEKWEARWERLRMLLEVCQFSRDASVAEAWLIAQEPYLASGDFGHTVDSVEKLIKRHEAFEKSTASWAERFAALEKPTTLELKERQIAERPAEETGPQEEEGETAGEAPVSHHAATERTSPGEEEGTWPQNLQQPPPPGQHKDGQKSTGDERPTTEPLFKVLDTPLSEGDEPATLPAPRDHGQSVQMEGYLGRKHDLEGPNKKASNSKGEEGEERRETEEEDEEEEETESVAVEMQQHASHVSWNNLYCVLRNSELTFYKDAKNLALGMPYHGEEPLALRHAICEIAANYKKKKHVFKLRLSNGSEWLFHGKDEEEMLSWLQGVSTAINESQSIRVKAQSLPLPSLSGPDASLGKKDKEKRFSFFPKKK

SEQ ID NO: 65101 - protein, 2106 aa, Homo sapiens
MTSATEFENVGNQPPYSRINARWDAPDDELDNDNSSARLFERSRIKALADEREVVQKKTFTKWVNSHLARVSCRITDLYKDLRDGRMLIKLLEVLSGEMLPKPTKGKMRIHCLENVDKALQFLKEQRVHLENMGSHDIVDGNHRLVLGLIWTIILRFQIQDIVVQTQEGRETRSAKDALLLWCQMKTAGYPHVNVTNFTSSWKDGLAFNALIHKHRPDLIDFDKLKDSNARHNLEHAFNVAERQLGIIPLLDPEDVFTENPDEKSIITYVVAFYHYFSKMKVLAVEGKRVGKVIDHAIETEKMIEKYSGLASDLLTWIEQTITVLNSRKFANSLTGVQQQLQAFSTYRTVEKPPKFQEKGNLEVLLFTIQSRMRANNQKVYTPHDGKLVSDINRAWESLEEAEYRRELALRNELIRQEKLEQLARRFDRKAAMRETWLSENQRLVAQDNFGYDLAAVEAAKKKHEAIETDTAAYEERVRALEDLAQELEKENYHDQKRITARKDNILRLWSYLQELLQSRRQRLETTLALQKLFQDMLHSIDWMDEIKAHLLSAEFGKHLLEVEDLLQKHKLMEADIAIQGDKVKAITAATLKFTEGKGYQPCDPQVIQDRISHLEQCFEELSNMAAGRKAQLEQSKRLWKFFWEMDEAESWIKEKEQIYSSLDYGKDLTSVLILQRKHKAFEDELRGLDAHLEQIFQEAHGMVARKQFGHPQIEARIKEVSAQWDQLKDLAAFCKKNLQDAENFFQFQGDADDLKAWLQDAHRLLSGEDVGQDEGATRALGKKHKDFLEELEESRGVMEHLEQQAQGFPEEFRDSPDVTHRLQALRELYQQVVAQADLRQQRLQEALDLYTVFGETDACELWMGEKEKWLAEMEMPDTLEDLEVVQHRFDILDQEMKTLMTQIDGVNLAANSLVESGHPRSREVKQYQDHLNTRWQAFQTLVSERREAVDSALRVHNYCVDCEETSKWITDKTKVVESTKDLGRDLAGIIAIQRKLSGLERDVAAIQARVDALERESQQLMDSHPEQKEDIGQRQKHLEELWQGLQQSLQGQEDLLGEVSQLQAFLQDLDDFQAWLSITQKAVASEDMPESLPEAEQLLQQHAGIKDEIDGHQDSYQRVKESGEKVIQGQTDPEYLLLGQRLEGLDTGWNALGRMWESRSHTLAQCLGFQEFQKDAKQAEAILSNQEYTLAHLEPPDSLEAAEAGIRKFEDFLGSMENNRDKVLSPVDSGNKLVAEGNLYSDKIKEKVQLIEDRHRKNNEKAQEASVLLRDNLELQNFLQNCQELTLWINDKLLTSQDVSYDEARNLHNKWLKHQAFVAELASHEGWLENIDAEGKQLMDEKPQFTALVSQKLEALHRLWDELQATTKEKTQHLSAARSSDLRLQTHADLNKWISAMEDQLRSDDPGKDLTSVNRMLAKLKRVEDQVNVRKEELGELFAQVPSMGEEGGDADLSIEKRFLDLLEPLGRRKKQLESSRAKLQISRDLEDETLWVEERLPLAQSADYGTNLQTVQLFMKKNQTLQNEILGHTPRVEDVLQRGQQLVEAAEIDCQDLEERLGHLQSSWDRLREAAAGRLQRLRDANEAQQYYLDADEAEAWIGEQELYVISDEIPKDEEGAIVMLKRHLRQQRAVEDYGRNIKQLASRAQGLLSAGHPEGEQIIRLQGQVDKHYAGLKDVAEERKRKLENMYHLFQLKRETDDLEQWISEKELVASSPEMGQDFDHVTLLRDKFRDFARETGAIGQERVDNVNAFIERLIDAGHSEAATIAEWKDGLNEMWADLLELIDTRMQLLAASYDLHRYFYTGAEILGLIDEKHRELPEDVGLDASTAESFHRVHTAFERELHLLGVQVQQFQDVATRLQTAYAGEKAEAIQNKEQEVSAAWQALLDACAGRRTQLVDTADKFRFFSMARDLLSWMESIIRQIETQERPRDVSSVELLMKYHQGINAEIETRSKNFSACLELGESLLQRQHQASEEIREKLQQVMSRRKEMNEKWEARWERLRMLLEVCQFSRDASVAEAWLIAQEPYLASGDFGHTVDSVEKLIKRHEAFEKSTASWAERFAALEKPTTASRGGRRDSRGGSSFPPCGHRENVPGQSLVSFV

SEQ ID NO: 65102 - protein, 2137 aa, Homo sapiens
MTSATEFENVGNQPPYSRINARWDAPDDELDNDNSSARLFERSRIKALADEREVVQKKTFTKWVNSHLARVSCRITDLYKDLRDGRMLIKLLEVLSGEMLPKPTKGKMRIHCLENVDKALQFLKEQRVHLENMGSHDIVDGNHRLVLGLIWTIILRFQIQDIVVQTQEGRETRSAKDALLLWCQMKTAGYPHVNVTNFTSSWKDGLAFNALIHKHRPDLIDFDKLKDSNARHNLEHAFNVAERQLGIIPLLDPEDVFTENPDEKSIITYVVAFYHYFSKMKVLAVEGKRVGKVIDHAIETEKMIEKYSGLASDLLTWIEQTITVLNSRKFANSLTGVQQQLQAFSTYRTVEKPPKFQEKGNLEVLLFTIQSRMRANNQKVYTPHDGKLVSDINRAWESLEEAEYRRELALRNELIRQEKLEQLARRFDRKAAMRETWLSENQRLVAQDNFGYDLAAVEAAKKKHEAIETDTAAYEERVRALEDLAQELEKENYHDQKRITARKDNILRLWSYLQELLQSRRQRLETTLALQKLFQDMLHSIDWMDEIKAHLLSAEFGKHLLEVEDLLQKHKLMEADIAIQGDKVKAITAATLKFTEGKGYQPCDPQVIQDRISHLEQCFEELSNMAAGRKAQLEQSKRLWKFFWEMDEAESWIKEKEQIYSSLDYGKDLTSVLILQRKHKAFEDELRGLDAHLEQIFQEAHGMVARKQFGHPQIEARIKEVSAQWDQLKDLAAFCKKNLQDAENFFQFQGDADDLKAWLQDAHRLLSGEDVGQDEGATRALGKKHKDFLEELEESRGVMEHLEQQAQGFPEEFRDSPDVTHRLQALRELYQQVVAQADLRQQRLQEALDLYTVFGETDACELWMGEKEKWLAEMEMPDTLEDLEVVQHRFDILDQEMKTLMTQIDGVNLAANSLVESGHPRSREVKQYQDHLNTRWQAFQTLVSERREAVDSALRVHNYCVDCEETSKWITDKTKVVESTKDLGRDLAGIIAIQRKLSGLERDVAAIQARVDALERESQQLMDSHPEQKEDIGQRQKHLEELWQGLQQSLQGQEDLLGEVSQLQAFLQDLDDFQAWLSITQKAVASEDMPESLPEAEQLLQQHAGIKDEIDGHQDSYQRVKESGEKVIQGQTDPEYLLLGQRLEGLDTGWNALGRMWESRSHTLAQCLGFQEFQKDAKQAEAILSNQEYTLAHLEPPDSLEAAEAGIRKFEDFLGSMENNRDKVLSPVDSGNKLVAEGNLYSDKIKEKVQLIEDRHRKNNEKAQEASVLLRDNLELQNFLQNCQELTLWINDKLLTSQDVSYDEARNLHNKWLKHQAFVAELASHEGWLENIDAEGKQLMDEKPQFTALVSQKLEALHRLWDELQATTKEKTQHLSAARSSDLRLQTHADLNKWISAMEDQLRSDDPGKDLTSVNRMLAKLKRVEDQVNVRKEELGELFAQVPSMGEEGGDADLSIEKRFLDLLEPLGRRKKQLESSRAKLQISRDLEDETLWVEERLPLAQSADYGTNLQTVQLFMKKNQTLQNEILGHTPRVEDVLQRGQQLVEAAEIDCQDLEERLGHLQSSWDRLREAAAGRLQRLRDANEAQQYYLDADEAEAWIGEQELYVISDEIPKDEEGAIVMLKRHLRQQRAVEDYGRNIKQLASRAQGLLSAGHPEGEQIIRLQGQVDKHYAGLKDVAEERKRKLENMYHLFQLKRETDDLEQWISEKELVASSPEMGQDFDHVTLLRDKFRDFARETGAIGQERVDNVNAFIERLIDAGHSEAATIAEWKDGLNEMWADLLELIDTRMQLLAASYDLHRYFYTGAEILGLIDEKHRELPEDVGLDASTAESFHRVHTAFERELHLLGVQVQQFQDVATRLQTAYAGEKAEAIQNKEQEVSAAWQALLDACAGRRTQLVDTADKFRFFSMARDLLSWMESIIRQIETQERPRDVSSVELLMKYHQGINAEIETRSKNFSACLELGESLLQRQHQASEEIREKLQQVMSRRKEMNEKWEARWERLRMLLEVCQFSRDASVAEAWLIAQEPYLASGDFGHTVDSVEKLIKRHEAFEKSTASWAERFAALEKPTTLELKERQIAERPAEETGPQEEEGETAGEAPVSHHAATERTSPVSLWSRLSSSWESLQPEPSHPY

SEQ ID NO: 65103 - protein, 2328 aa, Homo sapiens
MTSATEFENVGNQPPYSRINARWDAPDDELDNDNSSARLFERSRIKALADEREVVQKKTFTKWVNSHLARVSCRITDLYKDLRDGRMLIKLLEVLSGEMLPKPTKGKMRIHCLENVDKALQFLKEQRVHLENMGSHDIVDGNHRLVLGLIWTIILRFQIQDIVVQTQEGRETRSAKDALLLWCQMKTAGYPHVNVTNFTSSWKDGLAFNALIHKHRPDLIDFDKLKDSNARHNLEHAFNVAERQLGIIPLLDPEDVFTENPDEKSIITYVVAFYHYFSKMKVLAVEGKRVGKVIDHAIETEKMIEKYSGLASDLLTWIEQTITVLNSRKFANSLTGVQQQLQAFSTYRTVEKPPKFQEKGNLEVLLFTIQSRMRANNQKVYTPHDGKLVSDINRAWESLEEAEYRRELALRNELIRQEKLEQLARRFDRKAAMRETWLSENQRLVAQDNFGYDLAAVEAAKKKHEAIETDTAAYEERVRALEDLAQELEKENYHDQKRITARKDNILRLWSYLQELLQSRRQRLETTLALQKLFQDMLHSIDWMDEIKAHLLSAEFGKHLLEVEDLLQKHKLMEADIAIQGDKVKAITAATLKFTEGKGYQPCDPQVIQDRISHLEQCFEELSNMAAGRKAQLEQSKRLWKFFWEMDEAESWIKEKEQIYSSLDYGKDLTSVLILQRKHKAFEDELRGLDAHLEQIFQEAHGMVARKQFGHPQIEARIKEVSAQWDQLKDLAAFCKKNLQDAENFFQFQGDADDLKAWLQDAHRLLSGEDVGQDEGATRALGKKHKDFLEELEESRGVMEHLEQQAQGFPEEFRDSPDVTHRLQALRELYQQVVAQADLRQQRLQEALDLYTVFGETDACELWMGEKEKWLAEMEMPDTLEDLEVVQHRFDILDQEMKTLMTQIDGVNLAANSLVESGHPRSREVKQYQDHLNTRWQAFQTLVSERREAVDSALRVHNYCVDCEETSKWITDKTKVVESTKDLGRDLAGIIAIQRKLSGLERDVAAIQARVDALERESQQLMDSHPEQKEDIGQRQKHLEELWQGLQQSLQGQEDLLGEVSQLQAFLQDLDDFQAWLSITQKAVASEDMPESLPEAEQLLQQHAGIKDEIDGHQDSYQRVKESGEKVIQGQTDPEYLLLGQRLEGLDTGWNALGRMWESRSHTLAQCLGFQEFQKDAKQAEAILSNQEYTLAHLEPPDSLEAAEAGIRKFEDFLGSMENNRDKVLSPVDSGNKLVAEGNLYSDKIKEKVQLIEDRHRKNNEKAQEASVLLRDNLELQNFLQNCQELTLWINDKLLTSQDVSYDEARNLHNKWLKHQAFVAELASHEGWLENIDAEGKQLMDEKPQFTALVSQKLEALHRLWDELQATTKEKTQHLSAARSSDLRLQTHADLNKWISAMEDQLRSDDPGKDLTSVNRMLAKLKRVEDQVNVRKEELGELFAQVPSMGEEGGDADLSIEKRFLDLLEPLGRRKKQLESSRAKLQISRDLEDETLWVEERLPLAQSADYGTNLQTVQLFMKKNQTLQNEILGHTPRVEDVLQRGQQLVEAAEIDCQDLEERLGHLQSSWDRLREAAAGRLQRLRDANEAQQYYLDADEAEAWIGEQELYVISDEIPKDEEGAIVMLKRHLRQQRAVEDYGRNIKQLASRAQGLLSAGHPEGEQIIRLQGQVDKHYAGLKDVAEERKRKLENMYHLFQLKRETDDLEQWISEKELVASSPEMGQDFDHVTLLRDKFRDFARETGAIGQERVDNVNAFIERLIDAGHSEAATIAEWKDGLNEMWADLLELIDTRMQLLAASYDLHRYFYTGAEILGLIDEKHRELPEDVGLDASTAESFHRVHTAFERELHLLGVQVQQFQDVATRLQTAYAGEKAEAIQNKEQEVSAAWQALLDACAGRRTQLVDTADKFRFFSMARDLLSWMESIIRQIETQERPRDVSSVELLMKYHQGINAEIETRSKNFSACLELGESLLQRQHQASEEIREKLQQVMSRRKEMNEKWEARWERLRMLLEVCQFSRDASVAEAWLIAQEPYLASGDFGHTVDSVEKLIKRHEAFEKSTASWAERFAALEKPTTLELKERQIAERPAEETGPQEEEGETAGEAPVSHHAATERTSPGEEEGTWPQNLQQPPPPGQHKDGQKSTGDERPTTEPLFKVLDTPLSEGDEPATLPAPRDHGQSVQMEGYLGRKHDLEGPNKKASNRSWNNLYCVLRNSELTFYKDAKNLALGMPYHGEEPLALRHAICEIAANYKKKKHVFKLRLSNGSEWLFHGKDEEEMLSWLQGVSTAINESQSIRVKAQSLPLPSLSGPDASLGKKDKEKRFSFFPKKK

SEQ ID NO: 65104 - protein, 2332 aa, Homo sapiens
EPADMTSATEFENVGNQPPYSRINARWDAPDDELDNDNSSARLFERSRIKALADEREVVQKKTFTKWVNSHLARVSCRITDLYKDLRDGRMLIKLLEVLSGEMLPKPTKGKMRIHCLENVDKALQFLKEQRVHLENMGSHDIVDGNHRLVLGLIWTIILRFQIQDIVVQTQEGRETRSAKDALLLWCQMKTAGYPHVNVTNFTSSWKDGLAFNALIHKHRPDLIDFDKLKDSNARHNLEHAFNVAERQLGIIPLLDPEDVFTENPDEKSIITYVVAFYHYFSKMKVLAVEGKRVGKVIDHAIETEKMIEKYSGLASDLLTWIEQTITVLNSRKFANSLTGVQQQLQAFSTYRTVEKPPKFQEKGNLEVLLFTIQSRMRANNQKVYTPHDGKLVSDINRAWESLEEAEYRRELALRNELIRQEKLEQLARRFDRKAAMRETWLSENQRLVAQDNFGYDLAAVEAAKKKHEAIETDTAAYEERVRALEDLAQELEKENYHDQKRITARKDNILRLWSYLQELLQSRRQRLETTLALQKLFQDMLHSIDWMDEIKAHLLSAEFGKHLLEVEDLLQKHKLMEADIAIQGDKVKAITAATLKFTEGKGYQPCDPQVIQDRISHLEQCFEELSNMAAGRKAQLEQSKRLWKFFWEMDEAESWIKEKEQIYSSLDYGKDLTSVLILQRKHKAFEDELRGLDAHLEQIFQEAHGMVARKQFGHPQIEARIKEVSAQWDQLKDLAAFCKKNLQDAENFFQFQGDADDLKAWLQDAHRLLSGEDVGQDEGATRALGKKHKDFLEELEESRGVMEHLEQQAQGFPEEFRDSPDVTHRLQALRELYQQVVAQADLRQQRLQEALDLYTVFGETDACELWMGEKEKWLAEMEMPDTLEDLEVVQHRFDILDQEMKTLMTQIDGVNLAANSLVESGHPRSREVKQYQDHLNTRWQAFQTLVSERREAVDSALRVHNYCVDCEETSKWITDKTKVVESTKDLGRDLAGIIAIQRKLSGLERDVAAIQARVDALERESQQLMDSHPEQKEDIGQRQKHLEELWQGLQQSLQGQEDLLGEVSQLQAFLQDLDDFQAWLSITQKAVASEDMPESLPEAEQLLQQHAGIKDEIDGHQDSYQRVKESGEKVIQGQTDPEYLLLGQRLEGLDTGWNALGRMWESRSHTLAQCLGFQEFQKDAKQAEAILSNQEYTLAHLEPPDSLEAAEAGIRKFEDFLGSMENNRDKVLSPVDSGNKLVAEGNLYSDKIKEKVQLIEDRHRKNNEKAQEASVLLRDNLELQNFLQNCQELTLWINDKLLTSQDVSYDEARNLHNKWLKHQAFVAELASHEGWLENIDAEGKQLMDEKPQFTALVSQKLEALHRLWDELQATTKEKTQHLSAARSSDLRLQTHADLNKWISAMEDQLRSDDPGKDLTSVNRMLAKLKRVEDQVNVRKEELGELFAQVPSMGEEGGDADLSIEKRFLDLLEPLGRRKKQLESSRAKLQISRDLEDETLWVEERLPLAQSADYGTNLQTVQLFMKKNQTLQNEILGHTPRVEDVLQRGQQLVEAAEIDCQDLEERLGHLQSSWDRLREAAAGRLQRLRDANEAQQYYLDADEAEAWIGEQELYVISDEIPKDEEGAIVMLKRHLRQQRAVEDYGRNIKQLASRAQGLLSAGHPEGEQIIRLQGQVDKHYAGLKDVAEERKRKLENMYHLFQLKRETDDLEQWISEKELVASSPEMGQDFDHVTLLRDKFRDFARETGAIGQERVDNVNAFIERLIDAGHSEAATIAEWKDGLNEMWADLLELIDTRMQLLAASYDLHRYFYTGAEILGLIDEKHRELPEDVGLDASTAESFHRVHTAFERELHLLGVQVQQFQDVATRLQTAYAGEKAEAIQNKEQEVSAAWQALLDACAGRRTQLVDTADKFRFFSMARDLLSWMESIIRQIETQERPRDVSSVELLMKYHQGINAEIETRSKNFSACLELGESLLQRQHQASEEIREKLQQVMSRRKEMNEKWEARWERLRMLLEVCQFSRDASVAEAWLIAQEPYLASGDFGHTVDSVEKLIKRHEAFEKSTASWAERFAALEKPTTLELKERQIAERPAEETGPQEEEGETAGEAPVSHHAATERTSPGEEEGTWPQNLQQPPPPGQHKDGQKSTGDERPTTEPLFKVLDTPLSEGDEPATLPAPRDHGQSVQMEGYLGRKHDLEGPNKKASNRSWNNLYCVLRNSELTFYKDAKNLALGMPYHGEEPLALRHAICEIAANYKKKKHVFKLRLSNGSEWLFHGKDEEEMLSWLQGVSTAINESQSIRVKAQSLPLPSLSGPDASLGKKDKEKRFSFFPKKK

SEQ ID NO: 65105 - protein, 2137 aa, Homo sapiens; identical to SEQ ID NO: 65102

SEQ ID NO: 65106 - protein, 2328 aa, Homo sapiens; identical to SEQ ID NO: 65103

SEQ ID NO: 65107 - protein, 2155 aa, Homo sapiens
MELQRTSSISGPLSPAYTGQVPYNYNQLEGRFKQLQDEREAVQKKTFTKWVNSHLARVSCRITDLYTDLRDGRMLIKLLEVLSGERLPKPTKGRMRIHCLENVDKALQFLKEQRVHLENMGSHDIVDGNHRLTLGLIWTIILRFQIQDISVETEDNKEKKSAKDALLLWCQMKTAGYPNVNIHNFTTSWRDGMAFNALIHKHRPDLIDFDKLKKSNAHYNLQNAFNLAEQHLGLTKLLDPEDISVDHPDEKSIITYVVTYYHYFSKMKALAVEGKRIGKVLDNAIETEKMIEKYESLASDLLEWIEQTIIILNNRKFANSLVGVQQQLQAFNTYRTVEKPPKFTEKGNLEVLLFTIQSKMRANNQKVYMPREGKLISDINKAWERLEKAEHERELALRNELIRQEKLEQLARRFDRKAAMRETWLSENQRLVSQDNFGFDLPAVEAATKKHEAIETDIAAYEERVQAVVAVARELEAENYHDIKRITARKDNVIRLWEYLLELLRARRQRLEMNLGLQKIFQEMLYIMDWMDEMKVLVLSQDYGKHLLGVEDLLQKHTLVEADIGIQAERVRGVNASAQKFATDGEGYKPCDPQVIRDRVAHMEFCYQELCQLAAERRARLEESRRLWKFFWEMAEEEGWIREKEKILSSDDYGKDLTSVMRLLSKHRAFEDEMSGRSGHFEQAIKEGEDMIAEEHFGSEKIRERIIYIREQWANLEQLSAIRKKRLEEASLLHQFQADADDIDAWMLDILKIVSSSDVGHDEYSTQSLVKKHKDVAEEIANYRPTLDTLHEQASALPQEHAESPDVRGRLSGIEERYKEVAELTRLRKQALQDTLALYKMFSEADACELWIDEKEQWLNNMQIPEKLEDLEVIQHRFESLEPEMNNQASRVAVVNQIARQLMHSGHPSEKEIKAQQDKLNTRWSQFRELVDRKKDALLSALSIQNYHLECNETKSWIREKTKVIESTQDLGNDLAGVMALQRKLTGMERDLVAIEAKLSDLQKEAEKLESEHPDQAQAILSRLAEISDVWEEMKTTLKNREASLGEASKLQQFLRDLDDFQSWLSRTQTAIASEDMPNTLTEAEKLLTQHENIKNEIDNYEEDYQKMRDMGEMVTQGQTDAQYMFLRQRLQALDTGWNELHKMWENRQNLLSQSHAYQQFLRDTKQAEAFLNNQEYVLAHTEMPTTLEGAEAAIKKQEDFMTTMDANEEKINAVVETGRRLVSDGNINSDRIQEKVDSIDDRHRKNRETASELLMRLKDNRDLQKFLQDCQELSLWINEKMLTAQDMSYDEARNLHSKWLKHQAFMAELASNKEWLDKIEKEGMQLISEKPETEAVVKEKLTGLHKMWEVLESTTQTKAQRLFDANKAELFTQSCADLDKWLHGLESQIQSDDYGKDLTSVNILLKKQQMLENQMEVRKKEIEELQSQAQALSQEGKSTDEVDSKRLTVQTKFMELLEPLNERKHNLLASKEIHQFNRDVEDEILWVGERMPLATSTDHGHNLQTVQLLIKKNQTLQKEIQGHQPRIDDIFERSQNIVTDSSSLSAEAIRQRLADLKQLWGLLIEETEKRHRRLEEAHRAQQYYFDAAEAEAWMSEQELYMMSEEKAKDEQSAVSMLKKHQILEQAVEDYAETVHQLSKTSRALVADSHPESERISMRQSKVDKLYAGLKDLAEERRGKLDERHRLFQLNREVDDLEQWIAEREVVAGSHELGQDYEHVTMLQERFREFARDTGNIGQERVDTVNHLADELINSGHSDAATIAEWKDGLNEAWADLLELIDTRTQILAASYELHKFYHDAKEIFGRIQDKHKKLPEELGRDQNTVETLQRMHTTFEHDIQALGTQVRQLQEDAARLQAAYAGDKADDIQKRENEVLEAWKSLLDACESRRVRLVDTGDKFRFFSMVRDLMLWMEDVIRQIEAQEKPRDVSSVELLMNNHQGIKAEIDARNDSFTTCIELGKSLLARKHYASEEIKEKLLQLTEKRKEMIDKWEDRWEWLRLILEVHQFSRDASVAEAWLLGQEPYLSSREIGQSVDEVEKLIKRHEAFEKSAATWDERFSALERLTTLELLEVRRQQEEEERKRRPPSPEPSTKVSEEAESQQQWDTSKGEQVSQNGLPAEQGSPRVSYRSQTYQNYKNFNSRRTASDQPWSGL

SEQ ID NO: 65108 - protein, 2364 aa, Homo sapiens
MTTTVATDYDNIEIQQQYSDVNNRWDVDDWDNENSSARLFERSRIKALADEREAVQKKTFTKWVNSHLARVSCRITDLYTDLRDGRMLIKLLEVLSGERLPKPTKGRMRIHCLENVDKALQFLKEQRVHLENMGSHDIVDGNHRLTLGLIWTIILRFQIQDISVETEDNKEKKSAKDALLLWCQMKTAGYPNVNIHNFTTSWRDGMAFNALIHKHRPDLIDFDKLKKSNAHYNLQNAFNLAEQHLGLTKLLDPEDISVDHPDEKSIITYVVTYYHYFSKMKALAVEGKRIGKVLDNAIETEKMIEKYESLASDLLEWIEQTIIILNNRKFANSLVGVQQQLQAFNTYRTVEKPPKFTEKGNLEVLLFTIQSKMRANNQKVYMPREGKLISDINKAWERLEKAEHERELALRNELIRQEKLEQLARRFDRKAAMRETWLSENQRLVSQDNFGFDLPAVEAATKKHEAIETDIAAYEERVQAVVAVARELEAENYHDIKRITARKDNVIRLWEYLLELLRARRQRLEMNLGLQKIFQEMLYIMDWMDEMKVLVLSQDYGKHLLGVEDLLQKHTLVEADIGIQAERVRGVNASAQKFATDGEGYKPCDPQVIRDRVAHMEFCYQELCQLAAERRARLEESRRLWKFFWEMAEEEGWIREKEKILSSDDYGKDLTSVMRLLSKHRAFEDEMSGRSGHFEQAIKEGEDMIAEEHFGSEKIRERIIYIREQWANLEQLSAIRKKRLEEASLLHQFQADADDIDAWMLDILKIVSSSDVGHDEYSTQSLVKKHKDVAEEIANYRPTLDTLHEQASALPQEHAESPDVRGRLSGIEERYKEVAELTRLRKQALQDTLALYKMFSEADACELWIDEKEQWLNNMQIPEKLEDLEVIQHRFESLEPEMNNQASRVAVVNQIARQLMHSGHPSEKEIKAQQDKLNTRWSQFRELVDRKKDALLSALSIQNYHLECNETKSWIREKTKVIESTQDLGNDLAGVMALQRKLTGMERDLVAIEAKLSDLQKEAEKLESEHPDQAQAILSRLAEISDVWEEMKTTLKNREASLGEASKLQQFLRDLDDFQSWLSRTQTAIASEDMPNTLTEAEKLLTQHENIKNEIDNYEEDYQKMRDMGEMVTQGQTDAQYMFLRQRLQALDTGWNELHKMWENRQNLLSQSHAYQQFLRDTKQAEAFLNNQEYVLAHTEMPTTLEGAEAAIKKQEDFMTTMDANEEKINAVVETGRRLVSDGNINSDRIQEKVDSIDDRHRKNRETASELLMRLKDNRDLQKFLQDCQELSLWINEKMLTAQDMSYDEARNLHSKWLKHQAFMAELASNKEWLDKIEKEGMQLISEKPETEAVVKEKLTGLHKMWEVLESTTQTKAQRLFDANKAELFTQSCADLDKWLHGLESQIQSDDYGKDLTSVNILLKKQQMLENQMEVRKKEIEELQSQAQALSQEGKSTDEVDSKRLTVQTKFMELLEPLNERKHNLLASKEIHQFNRDVEDEILWVGERMPLATSTDHGHNLQTVQLLIKKNQTLQKEIQGHQPRIDDIFERSQNIVTDSSSLSAEAIRQRLADLKQLWGLLIEETEKRHRRLEEAHRAQQYYFDAAEAEAWMSEQELYMMSEEKAKDEQSAVSMLKKHQILEQAVEDYAETVHQLSKTSRALVADSHPESERISMRQSKVDKLYAGLKDLAEERRGKLDERHRLFQLNREVDDLEQWIAEREVVAGSHELGQDYEHVTMLQERFREFARDTGNIGQERVDTVNHLADELINSGHSDAATIAEWKDGLNEAWADLLELIDTRTQILAASYELHKFYHDAKEIFGRIQDKHKKLPEELGRDQNTVETLQRMHTTFEHDIQALGTQVRQLQEDAARLQAAYAGDKADDIQKRENEVLEAWKSLLDACESRRVRLVDTGDKFRFFSMVRDLMLWMEDVIRQIEAQEKPRDVSSVELLMNNHQGIKAEIDARNDSFTTCIELGKSLLARKHYASEEIKEKLLQLTEKRKEMIDKWEDRWEWLRLILEVHQFSRDASVAEAWLLGQEPYLSSREIGQSVDEVEKLIKRHEAFEKSAATWDERFSALERLTTLELLEVRRQQEEEERKRRPPSPEPSTKVSEEAESQQQWDTSKGEQVSQNGLPAEQGSPRMAETVDTSEMVNGATEQRTSSKESSPIPSPTSDRKAKTALPAQSAATLPARTQETPSAQMEGFLNRKHEWEAHNKKASSRSWHNVYCVINNQEMGFYKDAKTAASGIPYHSEVPVSLKEAVCEVALDYKKKKHVFKLRLNDGNEYLFQAKDDEEMNTWIQAISSAISSDKHEVSASTQSTPASSRAQTLPTSVVTITSESSPGKREKDKEKDKEKRFSLFGKKK

SEQ ID NO: 65109 - protein, 690 aa, Homo sapiens
MTTTVATDYDNIEIQQQYSDVNNRWDVDDWDNENSSARLFERSRIKALADEREAVQKKTFTKWVNSHLARVSCRITDLYTDLRDGRMLIKLLEVLSGERLPKPTKGRMRIHCLENVDKALQFLKEQRVHLENMGSHDIVDGNHRLTLGLIWTIILRFQIQDISVETEDNKEKKSAKDALLLWCQMKTAGYPNVNIHNFTTSWRDGMAFNALIHKHRPDLIDFDKLKKSNAHYNLQNAFNLAEQHLGLTKLLDPEDISVDHPDEKSIITYVVTYYHYFSKMKALAVEGKRIGKVLDNAIETEKMIEKYESLASDLLEWIEQTIIILNNRKFANSLVGVQQQLQAFNTYRTVEKPPKFTEKGNLEVLLFTIQSKMRANNQKVYMPREGKLISDINKAWERLEKAEHERELALRNELIRQEKLEQLARRFDRKAAMRETWLSENQRLVSQDNFGFDLPAVEAATKKHEAIETDIAAYEERVQAVVAVARELEAENYHDIKRITARKDNVIRLWEYLLELLRARRQRLEMNLGLQKIFQEMLYIMDWMDEMKVLVLSQDYGKHLLGVEDLLQKHTLVEADIGIQAERVRGVNASAQKFATDGEGYKPCDPQVIRDRVAHMEFCYQELCQLAAERRARLEESRRLWKFFWEMAEEEGWIREKEKILSSDDYGKDLTSVMRLLSKHRAFEDEMSGR

SEQ ID NO: 65110 - protein, 2390 aa, Homo sapiens
MSSTLSPTDFDSLEIQGQYSDINNRWDLPDSDWDNDSSSARLFERSRIKALADEREAVQKKTFTKWVNSHLARVTCRVGDLYSDLRDGRNLLRLLEVLSGEILPKPTKGRMRIHCLENVDKALQFLKEQKVHLENMGSHDIVDGNHRLTLGLVWTIILRFQIQDISVETEDNKEKKSAKDALLLWCQMKTAGYPNVNVHNFTTSWRDGLAFNAIVHKHRPDLLDFESLKKCNAHYNLQNAFNLAEKELGLTKLLDPEDVNVDQPDEKSIITYVATYYHYFSKMKALAVEGKRIGKVLDHAMEAERLVEKYESLASELLQWIEQTIVTLNDRQLANSLSGVQNQLQSFNSYRTVEKPPKFTEKGNLEVLLFTIQSKLRANNQKVYTPREGRLISDINKAWERLEKAEHERELALRTELIRQEKLEQLAARFDRKAAMRETWLSENQRLVSQDNFGLELAAVEAAVRKHEAIETDIVAYSGRVQAVDAVAAELAAERYHDIKRIAARQHNVARLWDFLRQMVAARRERLLLNLELQKVFQDLLYLMDWMEEMKGRLQSQDLGRHLAGVEDLLQLHELVEADIAVQAERVRAVSASALRFCNPGKEYRPCDPQLVSERVAKLEQSYEALCELAAARRARLEESRRLWRFLWEVGEAEAWVREQQHLLASADTGRDLTGALRLLNKHTALRGEMSGRLGPLKLTLEQGQQLVAEGHPGASQASARAAELQAQWERLEALAEERAQRLAQAASLYQFQADANDMEAWLVDALRLVSSPELGHDEFSTQALARQHRALEEEIRSHRPTLDALREQAAALPPTLSRTPEVQSRVPTLERHYEELQARAGERARALEAALALYTMLSEAGACGLWVEEKEQWLNGLALPERLEDLEVVQQRFETLEPEMNTLAAQITAVNDIAEQLLKANPPGKDRIVNTQEQLNHRWQQFRRLADGKKAALTSALSIQNYHLECTETQAWMREKTKVIESTQGLGNDLAGVLALQRKLAGTERDLEAIAARVGELTREANALAAGHPAQAVAINARLREVQTGWEDLRATMRRREESLGEARRLQDFLRSLDDFQAWLGRTQTAVASEEGPATLPEAEALLAQHAALRGEVERAQSEYSRLRALGEEVTRDQADPQCLFLRQRLEALGTGWEELGRMWESRQGRLAQAHGFQGFLRDARQAEGVLSSQEYVLSHTEMPGTLQAADAAIKKLEDFMSTMDANGERIHGLLEAGRQLVSEGNIHADKIREKADSIERRHKKNQDAAQQFLGRLRDNREQQHFLQDCHELKLWIDEKMLTAQDVSYDEARNLHTKWQKHQAFMAELAANKDWLDKVDKEGRELTLEKPELKALVSEKLRDLHRRWDELETTTQAKARSLFDANRAELFAQSCCALESWLESLQAQLHSDDYGKDLTSVNILLKKQQMLEWEMAVREKEVEAIQAQAKALAQEDQGAGEVERTSRAVEEKFRALCQPMRERCRRLQASREQHQFHRDVEDEILWVTERLPMASSMEHGKDLPSVQLLMKKNQTLQKEIQGHEPRIADLRERQRALGAAAAGPELAELQEMWKRLGHELELRGKRLEDALRAQQFYRDAAEAEAWMGEQELHMMGQEKAKDELSAQAEVKKHQVLEQALADYAQTIHQLAASSQDMIDHEHPESTRISIRQAQVDKLYAGLKELAGERRERLQEHLRLCQLRRELDDLEQWIQEREVVAASHELGQDYEHVTMLRDKFREFSRDTSTIGQERVDSANALANGLIAGGHAARATVAEWKDSLNEAWADLLELLDTRGQVLAAAYELQRFLHGARQALARVQHKQQQLPDGTGRDLNAAEALQRRHCAYEHDIQALSPQVQQVQDDGHRLQKAYAGDKAEEIGRHMQAVAEAWAQLQGSSAARRQLLLDTTDKFRFFKAVRELMLWMDEVNLQMDAQERPRDVSSADLVIKNQQGIKAEIEARADRFSSCIDMGKELLARSHYAAEEISEKLSQLQARRQETAEKWQEKMDWLQLVLEVLVFGRDAGMAEAWLCSQEPLVRSAELGCTVDEVESLIKRHEAFQKSAVAWEERFCALEKLTALEEREKERKRKREEEERRKQPPAPEPTASVPPGDLVGGQTASDTTWDGTQPRPPPSTQAPSVNGVCTDGEPSQPLLGQQRLEHSSFPEGPGPGSGDEANGPRGERQTRTRGPAPSAMPQSRSTESAHAATLPPRGPEPSAQEQMEGMLCRKQEMEAFGKKAANRSWQNVYCVLRRGSLGFYKDAKAASAGVPYHGEVPVSLARAQGSVAFDYRKRKHVFKLGLQDGKEYLFQAKDEAEMSSWLRVVNAAIATASSASGEPEEPVVPSTTRGMTRAMTMPPVSPVGAEGPVVLRSKDGREREREKRFSFFKKNK

SEQ ID NO: 65111 - protein, 934 aa, Homo sapiens
MSSTLSPTDFDSLEIQGQYSDINNRWDLPDSDWDNDSSSARLFERSRIKALADEREAVQKKTFTKWVNSHLARVTCRVGDLYSDLRDGRNLLRLLEVLSGEILPKPTKGRMRIHCLENVDKALQFLKEQKVHLENMGSHDIVDGNHRLTLGLVWTIILRFQIQDISVETEDNKEKKSAKDALLLWCQMKTAGYPNVNVHNFTTSWRDGLAFNAIVHKHRPDLLDFESLKKCNAHYNLQNAFNLAEKELGLTKLLDPEDVNVDQPDEKSIITYVATYYHYFSKMKALAVEGKRIGKVLDHAMEAERLVEKYESLASELLQWIEQTIVTLNDRQLANSLSGVQNQLQSFNSYRTVEKPPKFTEKGNLEVLLFTIQSKLRANNQKVYTPREGRLISDINKAWERLEKAEHERELALRTELIRQEKLEQLAARFDRKAAMRETWLSENQRLVSQDNFGLELAAVEAAVRKHEAIETDIVAYSGRVQAVDAVAAELAAERYHDIKRIAARQHNVARLWDFLRQMVAARRERLLLNLELQKVFQDLLYLMDWMEEMKGRLQSQDLGRHLAGVEDLLQLHELVEADIAVQAERVRAVSASALRFCNPGKEYRPCDPQLVSERVAKLTALEEREKERKRKREEEERRKQPPAPEPTASVPPGDLVGGQTASDTTWDGTQPRPPPSTQAPSVNGVCTDGEPSQPLLGQQRLEHSSFPEGPGPGSGDEANGPRGERQTRTRGPAPSAMPQSRSTESAHAATLPPRGPEPSAQEQMEGMLCRKQEMEAFGKKAANRSWQNVYCVLRRGSLGFYKDAKAASAGVPYHGEVPVSLARAQGSVAFDYRKRKHVFKLGLQDGKEYLFQAKDEAEMSSWLRVVNAAIATASSASGEPEEPVVPSTTRGMTRAMTMPPVSPVGAEGPVVLRSKDGREREREKRFSFFKKNK

SEQ ID NO: 65112 - protein, 117 aa, Homo sapiens
MSSTLSPTDFDSLEIQGQYSDINNRWDLPDSDWDNDSSSARLFERSRIKALADEREAVQKKTFTKWVNSHLARVTCRVGDLYSDLRDGRNLLRLLEVLSGEILPKPTKGRMRIHCLE

SEQ ID NO: 65113 - protein, 2365 aa, Homo sapiens
MSSTLSPTDFDSLEIQGQYSDINNRWDLPDSDWDNDSSSARLFERSRIKALADEREAVQKKTFTKWVNSHLARVTCRVGDLYSDLRDGRNLLRLLEVLSGEILPKPTKGRMRIHCLENVDKALQFLKEQKVHLENMGSHDIVDGNHRLTLGLVWTIILRFQIQDISVETEDNKEKKSAKDALLLWCQMKTAGYPNVNVHNFTTSWRDGLAFNAIVHKHRPDLLDFESLKKCNAHYNLQNAFNLAEKELGLTKLLDPEDVNVDQPDEKSIITYVATYYHYFSKMKALAVEGKRIGKVLDHAMEAERLVEKYESLASELLQWIEQTIVTLNDRQLANSLSGVQNQLQSFNSYRTVEKPPKFTEKGNLEVLLFTIQSKLRANNQKVYTPREGRLISDINKAWERLEKAEHERELALRTELIRQEKLEQLAARFDRKAAMRETWLSENQRLVSQDNFGLELAAVEAAVRKHEAIETDIVAYSGRVQAVDAVAAELAAERYHDIKRIAARQHNVARLWDFLRQMVAARRERLLLNLELQKVFQDLLYLMDWMEEMKGRLQSQDLGRHLAGVEDLLQLHELVEADIAVQAERVRAVSASALRFCNPGKEYRPCDPQLVSERVAKLEQSYEALCELAAARRARLEESRRLWRFLWEVGEAEAWVREQQHLLASADTGRDLTGALRLLNKHTALRGEMSGRLGPLKLTLEQGQQLVAEGHPGASQASARAAELQAQWERLEALAEERAQRLAQAASLYQFQADANDMEAWLVDALRLVSSPELGHDEFSTQALARQHRALEEEIRSHRPTLDALREQAAALPPTLSRTPEVQSRVPTLERHYEELQARAGERARALEAALALYTMLSEAGACGLWVEEKEQWLNGLALPERLEDLEVVQQRFETLEPEMNTLAAQITAVNDIAEQLLKANPPGKDRIVNTQEQLNHRWQQFRRLADGKKAALTSALSIQNYHLECTETQAWMREKTKVIESTQGLGNDLAGVLALQRKLAGTERDLEAIAARVGELTREANALAAGHPAQAVAINARLREVQTGWEDLRATMRRREESLGEARRLQDFLRSLDDFQAWLGRTQTAVASEEGPATLPEAEALLAQHAALRGEVERAQSEYSRLRALGEEVTRDQADPQCLFLRQRLEALGTGWEELGRMWESRQGRLAQAHGFQGFLRDARQAEGVLSSQEYVLSHTEMPGTLQAADAAIKKLEDFMSTMDANGERIHGLLEAGRQLVSEGNIHADKIREKADSIERRHKKNQDAAQQFLGRLRDNREQQHFLQDCHELKLWIDEKMLTAQDVSYDEARNLHTKWQKHQAFMAELAANKDWLDKVDKEGRELTLEKPELKALVSEKLRDLHRRWDELETTTQAKARSLFDANRAELFAQSCCALESWLESLQAQLHSDDYGKDLTSVNILLKKQQMLEWEMAVREKEVEAIQAQAKALAQEDQGAGEVERTSRAVEEKFRALCQPMRERCRRLQASREQHQFHRDVEDEILWVTERLPMASSMEHGKDLPSVQLLMKKNQTLQKEIQGHEPRIADLRERQRALGAAAAGPELAELQEMWKRLGHELELRGKRLEDALRAQQFYRDAAEAEAWMGEQELHMMGQEKAKDELSAQAEVKKHQVLEQALADYAQTIHQLAASSQDMIDHEHPESTRISIRQAQVDKLYAGLKELAGERRERLQEHLRLCQLRRELDDLEQWIQEREVVAASHELGQDYEHVTMLRDKFREFSRDTSTIGQERVDSANALANGLIAGGHAARATVAEWKDSLNEAWADLLELLDTRGQVLAAAYELQRFLHGARQALARVQHKQQQLPDGTGRDLNAAEALQRRHCAYEHDIQALSPQVQQVQDDGHRLQKAYAGDKAEEIGRHMQAVAEAWAQLQGSSAARRQLLLDTTDKFRFFKAVRELMLWMDEVNLQMDAQERPRDVSSADLVIKNQQGIKAEIEARADRFSSCIDMGKELLARSHYAAEEISEKLSQLQARRQETAEKWQEKMDWLQLVLEVLVFGRDAGMAEAWLCSQEPLVRSAELGCTVDEVESLIKRHEAFQKSAVAWEERFCALEKLTALEEREKERKRKREEEERRKQPPAPEPTASVPPGDLVGGQTASDTTWDGTQPRPPPSTQAPSVNGVCTDGEPSQPLLGQQRLEHSSFPEGPGPGSGDEANGPRGERQTRTRGPAPSAMPQSRSTESAHAATLPPRGPEPSAQEQMEGMLCRKQEMEAFGKKAANRSWQNVYCVLRRGSLGFYKDAKAASAGVPYHGEVPVSLARAQGSVAFDYRKRKHVFKLGLQDGKEYLFQAKDEVSCPSCSSLSVPFQKLPAADSPSFPVLPLFPGLVLCGKTGCVRRPHQAALPV

SEQ ID NO: 65114 - protein, 2390 aa, Homo sapiens; identical to SEQ ID NO: 65110

SEQ ID NO: 65115 - protein, 2154 aa, Homo sapiens
MAQVPGEVDNMEGLPAPNNNPAARWESPDRGWEREQPAASTAAASLFECSRIKALADEREAVQKKTFTKWVNSHLARVGCHIGDLYVDLRDGFVLTRLLEVLSGEQLPRPTRGRMRIHSLENVDKALQFLKEQRVHLENVGSHDIVDGNHRLTLGLVWTIILRFQIQVIKIETEDNRETRSAKDALLLWCQMKTAGYPEVNIQNFTTSWRDGLAFNALIHRHRPDLVDFSKLTKSNANYNLQRAFRTAEQHLGLARLLDPEDVNMEAPDEKSIITYVVSFYHYFSKMKALAVEGKRIGKVLDQVLEVGKIIERYEELAAELLAWIHRTVGLISNQKFANSLSGVQQQLQAFTAYCTLEKPVKFQEKGNLEVLLFSIQSKLRACNRRLFVPREGCGIWDIDKAWGELEKAEHEREAALRAELIRQEKLELLAQRFDHKVAMRESWLNENQRLVSQDNFGYELPAVEAAMKKHEAIEADIAAYEERVQGVAELAQALAAEGYYDIRRVAAQRDSVLRQWALLTGLVGARRTRLEQNLALQKVFQEMVYMVDWMEEMQAQLLSRECGQHLVEADDLLQKHGLLEGDIAAQSERVEALNAAALRFSQLQGYQPCDPQVICNRVNHVHGCLAELQEQAARRRAELEASRSLWALLQELEEAESWARDKERLLEAAGGGGAAGAAGAAGTAGGAHDLSSTARLLAQHKILQGELGGRRALLQQALRCGEELVAAGGAVGPGADTVHLVGLAERAASARRRWQRLEEAAARRERRLQEARALHQFGADLDGLLDWLRDAYRLAAAGDFGHDEASSRRLARQHRALTGEVEAHRGPVSGLRRQLATLGGASGAGPLVVALQVRVVEAEQLFAEVTEVAALRRQWLRDALAVYRMFGEVHACELWIGEKEQWLLSMRVPDSLDDVEVVQHRFESLDQEMNSLMGRVLDVNHTVQELVEGGHPSSDEVRSCQDHLNSRWNRIVELVEQRKEEMSAVLLVENHVLEVAEVRAQVREKRRAVESAPRAGGALQWRLSGLEAALQALEPRQAALLEEAALLAERFPAQAARLHQGAEELGAEWGALASAAQACGEAVAAAGRLQRFLHDLDAFLDWLVRAQEAAGGSEGPLPNSLEEADALLARHAALKEEVDQREEDYARIVAASEALLAADGAELGPGLALDEWLPHLELGWHKLLGLWEARREALVQAHIYQLFLRDLRQALVVLRNQEMALSGAELPGTVESVEEALKQHRDFLTTMELSQQKMQVAVQAAEGLLRQGNIYGEQAQEAVTRLLEKNQENQLRAQQWMQKLHDQLELQHFLRDCHELDGWIHEKMLMARDGTREDNHKLHKRWLRHQAFMAELAQNKEWLEKIEREGQQLMQEKPELAASVRKKLGEIRQCWAELESTTQAKARQLFEASKADQLVQSFAELDKKLLHMESQLQDVDPGGDLATVNSQLKKLQSMESQVEEWYREVGELQAQTAALPLEPASKELVGERQNAVGERLVRLLEPLQERRRLLLASKELHQVAHDLDDELAWVQERLPLAMQTERGNGLQAVQQHIKKNQGLRREIQAHGPRLEEVLERAGALASLRSPEAEAVRRGLEQLQSAWAGLREAAERRQQVLDAAFQVEQYYFDVAEVEAWLGEQELLMMSEDKGKDEQSTLQLLKKHLQLEQGVENYEESIAQLSRQCRALLEMGHPDSEQISRRQSQVDRLYVALKELGEERRVALEQQYWLYQLSRQVSELEHWIAEKEVVAGSPELGQDFEHVSVLQEKFSEFASETGMAGRERLAAVNQMVDELIECGHTAAATMAEWKDGLNEAWAELLELMGTRAQLLAASRELHKFFSDARELQGQIEEKRRRLPRLTTPPEPRPSASSMQRTLRAFEHDLQLLVSQVRQLQEGAAQLRTVYAGEHAEAIASREQEVLQGWKELLSACEDARLHVSSTADALRFHSQVRDLLSWMDGIASQIGAADKPRDVSSVEVLMNYHQGLKTELEARVPELTTCQELGRSLLLNKSAMADEIQAQLDKLGTRKEEVSEKWDRHWEWLQQMLEVHQFAQEAVVADAWLTAQEPLLQSRELGSSVDEVEQLIRRHEAFRKAAAAWEERFSSLRRLTTPRREDHLNPGVQDQPWQHTEKPSLPKPKANKEKTARRDGTCL

SEQ ID NO: 65116 - protein, 1309 aa, Homo sapiens
MAQVPGEVDNMEGLPAPNNNPAARWESPDRGWEREQPAASTAAASLFECSRIKALADEREAVQKKTFTKWVNSHLARVGCHIGDLYVDLRDGFVLTRLLEVLSGEQLPRPTRGRMRIHSLENVDKALQFLKEQRVHLENVGSHDIVDGNHRLTLGLVWTIILRFQIQVIKIETEDNRETRSAKDALLLWCQMKTAGYPEVNIQNFTTSWRDGLAFNALIHRHRPDLVDFSKLTKSNANYNLQRAFRTAEQHLGLARLLDPEDVNMEAPDEKSIITYVVSFYHYFSKMKALAVEGKRIGKVLDQVLEVGKIIERYEELAAELLAWIHRTVGLISNQKFANSLSGVQQQLQAFTAYCTLEKPVKFQEKGNLEVLLFSIQSKLRACNRRLFVPREGCGIWDIDKAWGELEKAEHEREAALRAELIRQEKLELLAQRFDHKVAMRESWLNENQRLVSQDNFGYELPAVEAAMKKHEAIEADIAAYEERVQGVAELAQALAAEGYYDIRRVAAQRDSVLRQWALLTGLVGARRTRLEQNLALQKVFQEMVYMVDWMEEMQAQLLSRECGQHLVEADDLLQKHGLLEGDIAAQSERVEALNAAALRFSQLQGYQPCDPQVICNRVNHVHGCLAELQEQAARRRAELEASRSLWALLQELEEAESWARDKERLLEAAGGGGAAGAAGAAGTAGGAHDLSSTARLLAQHKILQGELGGRRALLQQALRCGEELVAAGGAVGPGADTVHLVGLAERAASARRRWQRLEEAAARRERRLQEARALHQFGADLDGLLDWLRDAYRLAAAGDFGHDEASSRRLARQHRALTGEVEAHRGPVSGLRRQLATLGGASGAGPLVVALQVRVVEAEQLFAEVTEVAALRRQWLRDALAVYRMFGEVHACELWIGEKEQWLLSMRVPDSLDDVEVVQHRFESLDQEMNSLMGRVLDVNHTVQELVEGGHPSSDEVRSCQDHLNSRWNRIVELVEQRKEEMSAVLLVENHVLEVAEVRAQVREKRRAVESAPRAGGALQWRLSGLEAALQALEPRQAALLEEAALLAERFPAQAARLHQGAEELGAEWGALASAAQACGEAVAAAGRLQRFLHDLDAFLDWLVRAQEAAGGSEGPLPNSLEEADALLARHAALKEEVDQREEDYARIVAASEALLAADGAELGPGLALDEWLPHLELGWHKLLGLWEARREALVQAHIYQLFLRDLRQALVVLRNQEMALSGAELPGTVESVEEALKQHRDFLTTMELSQQKMQVAVQAAEGLLRQGNIYGEQAQEAVTRLLEKCLIIHPALLHPPWEPPDLPRSSS

SEQ ID NO: 65117 - protein, 2564 aa, Homo sapiens
MAQVPGEVDNMEGLPAPNNNPAARWESPDRGWEREQPAASTAAASLFECSRIKALADEREAVQKKTFTKWVNSHLARVGCHIGDLYVDLRDGFVLTRLLEVLSGEQLPRPTRGRMRIHSLENVDKALQFLKEQRVHLENVGSHDIVDGNHRLTLGLVWTIILRFQIQVIKIETEDNRETRSAKDALLLWCQMKTAGYPEVNIQNFTTSWRDGLAFNALIHRHRPDLVDFSKLTKSNANYNLQRAFRTAEQHLGLARLLDPEDVNMEAPDEKSIITYVVSFYHYFSKMKALAVEGKRIGKVLDQVLEVGKIIERYEELAAELLAWIHRTVGLISNQKFANSLSGVQQQLQAFTAYCTLEKPVKFQEKGNLEVLLFSIQSKLRACNRRLFVPREGCGIWDIDKAWGELEKAEHEREAALRAELIRQEKLELLAQRFDHKVAMRESWLNENQRLVSQDNFGYELPAVEAAMKKHEAIEADIAAYEERVQGVAELAQALAAEGYYDIRRVAAQRDSVLRQWALLTGLVGARRTRLEQNLALQKVFQEMVYMVDWMEEMQAQLLSRECGQHLVEADDLLQKHGLLEGDIAAQSERVEALNAAALRFSQLQGYQPCDPQVICNRVNHVHGCLAELQEQAARRRAELEASRSLWALLQELEEAESWARDKERLLEAAGGGGAAGAAGAAGTAGGAHDLSSTARLLAQHKILQGELGGRRALLQQALRCGEELVAAGGAVGPGADTVHLVGLAERAASARRRWQRLEEAAARRERRLQEARALHQFGADLDGLLDWLRDAYRLAAAGDFGHDEASSRRLARQHRALTGEVEAHRGPVSGLRRQLATLGGASGAGPLVVALQVRVVEAEQLFAEVTEVAALRRQWLRDALAVYRMFGEVHACELWIGEKEQWLLSMRVPDSLDDVEVVQHRFESLDQEMNSLMGRVLDVNHTVQELVEGGHPSSDEVRSCQDHLNSRWNRIVELVEQRKEEMSAVLLVENHVLEVAEVRAQVREKRRAVESAPRAGGALQWRLSGLEAALQALEPRQAALLEEAALLAERFPAQAARLHQGAEELGAEWGALASAAQACGEAVAAAGRLQRFLHDLDAFLDWLVRAQEAAGGSEGPLPNSLEEADALLARHAALKEEVDQREEDYARIVAASEALLAADGAELGPGLALDEWLPHLELGWHKLLGLWEARREALVQAHIYQLFLRDLRQALVVLRNQEMALSGAELPGTVESVEEALKQHRDFLTTMELSQQKMQVAVQAAEGLLRQGNIYGEQAQEAVTRLLEKNQENQLRAQQWMQKLHDQLELQHFLRDCHELDGWIHEKMLMARDGTREDNHKLHKRWLRHQAFMAELAQNKEWLEKIEREGQQLMQEKPELAASVRKKLGEIRQCWAELESTTQAKARQLFEASKADQLVQSFAELDKKLLHMESQLQDVDPGGDLATVNSQLKKLQSMESQVEEWYREVGELQAQTAALPLEPASKELVGERQNAVGERLVRLLEPLQERRRLLLASKELHQVAHDLDDELAWVQERLPLAMQTERGNGLQAVQQHIKKNQGLRREIQAHGPRLEEVLERAGALASLRSPEAEAVRRGLEQLQSAWAGLREAAERRQQVLDAAFQVEQYYFDVAEVEAWLGEQELLMMSEDKGKDEQSTLQLLKKHLQLEQGVENYEESIAQLSRQCRALLEMGHPDSEQISRRQSQVDRLYVALKELGEERRVALEQQYWLYQLSRQVSELEHWIAEKEVVAGSPELGQDFEHVSVLQEKFSEFASETGMAGRERLAAVNQMVDELIECGHTAAATMAEWKDGLNEAWAELLELMGTRAQLLAASRELHKFFSDARELQGQIEEKRRRLPRLTTPPEPRPSASSMQRTLRAFEHDLQLLVSQVRQLQEGAAQLRTVYAGEHAEAIASREQEVLQGWKELLSACEDARLHVSSTADALRFHSQVRDLLSWMDGIASQIGAADKPRDVSSVEVLMNYHQGLKTELEARVPELTTCQELGRSLLLNKSAMADEIQAQLDKLGTRKEEVSEKWDRHWEWLQQMLEVHQFAQEAVVADAWLTAQEPLLQSRELGSSVDEVEQLIRRHEAFRKAAAAWEERFSSLRRLTTIEKIKAEQSKQPPTPLLGRKFFGDPTELAAKAAPLLRPGGYERGLEPLARRASDTLSAEVRTRVGYVRQELKPERLQPRIDRLPEIPGRVEPAALPAAPEDAAETPATPAAAEQVRPRPERQESADRAEELPRRRRPERQESVDQSEEAARRRRPERQESAEHEAAHSLTLGRYEQMERRRERRERRLERQESSEQEMPIRGDLVKGKATLADIVEQLQEKEAGPGLPAGPSLPQPRELPPGRLPNGLELPERTPRPDRPRARDRPKPRRRPRPREGGEGGGSRRSRSAPAQGGSAPAPPPPPTHTVQHEGFLLRKRELDANRKSSNRSWVSLYCVLSKGELGFYKDSKGPASGSTHGGEPLLSLHKATSEVASDYKKKKHVFKLQTQDGSEFLLQAKDEEEMNGWLEAVASSVAEHAEIARWGQTLPTTSSTDEGNPKREGGDRRASGRRK

SEQ ID NO: 65118 - protein, 678 aa, Homo sapiens
MLMARDGTREDNHKLHKRWLRHQAFMAELAQNKEWLEKIEREGQQLMQEKPELAASVRKKLGEIRQCWAELESTTQAKARQLFEASKADQLVQSFAELDKKLLHMESQLQDVDPGGDLATVNSQLKKLQSMESQVEEWYREVGELQAQTAALPLEPASKELVGERQNAVGERLVRLLEPLQERRRLLLASKELHQVAHDLDDELAWVQERLPLAMQTERGNGLQAVQQHIKKNQGLRREIQAHGPRLEEVLERAGALASLRSPEAEAVRRGLEQLQSAWAGLREAAERRQQVLDAAFQVEQYYFDVAEVEAWLGEQELLMMSEDKGKDEQSTLQLLKKHLQLEQGVENYEESIAQLSRQCRALLEMGHPDSEQISRRQSQVDRLYVALKELGEERRVALEQQYWLYQLSRQVSELEHWIAEKEVVAGSPELGQDFEHVSVLQEKFSEFASETGMAGRERLAAVNQMVDELIECGHTAAATMAEWKDGLNEAWAELLELMGTRAQLLAASRELHKFFSDARELQGQIEEKRRRLPRLTTPPEPRPSASSMQRTLRAFEHDLQLLVSQVRQLQEGAAQLRTVYAGEHAEAIASREQEVLQGWKELLSACEDARLHVSSTADALRFHSQVRDLLSWMDGIASQIGAADKPRCPSSLLGLPASPWWPTPATPSPLTAPFSME

SEQ ID NO: 65119 - protein, 1307 aa, Homo sapiens
MPHYPSCSSAPSLGTPRPPQIQQLEARHRNQENQLRAQQWMQKLHDQLELQHFLRDCHELDGWIHEKMLMARDGTREDNHKLHKRWLRHQAFMAELAQNKEWLEKIEREGQQLMQEKPELAASVRKKLGEIRQCWAELESTTQAKARQLFEASKADQLVQSFAELDKKLLHMESQLQDVDPGGDLATVNSQLKKLQSMESQVEEWYREVGELQAQTAALPLEPASKELVGERQNAVGERLVRLLEPLQERRRLLLASKELHQVAHDLDDELAWVQERLPLAMQTERGNGLQAVQQHIKKNQGLRREIQAHGPRLEEVLERAGALASLRSPEAEAVRRGLEQLQSAWAGLREAAERRQQVLDAAFQVEQYYFDVAEVEAWLGEQELLMMSEDKGKDEQSTLQLLKKHLQLEQGVENYEESIAQLSRQCRALLEMGHPDSEQISRRQSQVDRLYVALKELGEERRVALEQQYWLYQLSRQVSELEHWIAEKEVVAGSPELGQDFEHVSVLQEKFSEFASETGMAGRERLAAVNQMVDELIECGHTAAATMAEWKDGLNEAWAELLELMGTRAQLLAASRELHKFFSDARELQGQIEEKRRRLPRLTTPPEPRPSASSMQRTLRAFEHDLQLLVSQVRQLQEGAAQLRTVYAGEHAEAIASREQEVLQGWKELLSACEDARLHVSSTADALRFHSQVRDLLSWMDGIASQIGAADKPRDVSSVEVLMNYHQGLKTELEARVPELTTCQELGRSLLLNKSAMADEIQAQLDKLGTRKEEVSEKWDRHWEWLQQMLEVHQFAQEAVVADAWLTAQEPLLQSRELGSSVDEVEQLIRRHEAFRKAAAAWEERFSSLRRLTTIEKIKAEQSKQPPTPLLGRKFFGDPTELAAKAAPLLRPGGYERGLEPLARRASDTLSAEVRTRVGYVRQELKPERLQPRIDRLPEIPGRVEPAALPAAPEDAAETPATPAAAEQVRPRPERQESADRAEELPRRRRPERQESVDQSEEAARRRRPERQESAEHEAAHSLTLGRYEQMERRRERRERRLERQESSEQEMPIRGDLVKGKATLADIVEQLQEKEAGPGLPAGPSLPQPRELPPGRLPNGLELPERTPRPDRPRARDRPKPRRRPRPREGGEGGGSRRSRSAPAQGGSAPAPPPPPTHTVQHEGFLLRKRELDANRKSSNRSWVSLYCVLSKGELGFYKDSKGPASGSTHGGEPLLSLHKATSEVASDYKKKKHVFKLQTQDGSEFLLQAKDEEEMNGWLEAVASSVAEHAEIARWGQTLPTTSSTDEGNPKREGGDRRASGRRK

SEQ ID NO: 65120 - protein, 2564 aa, Homo sapiens
MAQVPGEVDNMEGLPAPNNNPAARWESPDRGWEREQPAASTAAASLFECSRIKALADEREAVQKKTFTKWVNSHLARVGCHIGDLYVDLRDGFVLTRLLEVLSGEQLPRPTRGRMRIHSLENVDKALQFLKEQRVHLENVGSHDIVDGNHRLTLGLVWTIILRFQIQVIKIETEDNRETRSAKDALLLWCQMKTAGYPEVNIQNFTTSWRDGLAFNALIHRHRPDLVDFSKLTKSNANYNLQRAFRTAEQHLGLARLLDPEDVNMEAPDEKSIITYVVSFYHYFSKMKALAVEGKRIGKVLDQVLEVGKIIERYEELAAELLAWIHRTVGLISNQKFANSLSGVQQQLQAFTAYCTLEKPVKFQEKGNLEVLLFSIQSKLRACNRRLFVPREGCGIWDIDKAWGELEKAEHEREAALRAELIRQEKLELLAQRFDHKVAMRESWLNENQRLVSQDNFGYELPAVEAAMKKHEAIEADIAAYEERVQGVAELAQALAAEGYYDIRRVAAQRDSVLRQWALLTGLVGARRTRLEQNLALQKVFQEMVYMVDWMEEMQAQLLSRECGQHLVEADDLLQKHGLLEGDIAAQSERVEALNAAALRFSQLQGYQPCDPQVICNRVNHVHGCLAELQEQAARRRAELEASRSLWALLQELEEAESWARDKERLLEAAGGGGAAGAAGAAGTAGGAHDLSSTARLLAQHKILQGELGGRRALLQQALRCGEELVAAGGAVGPGADTVHLVGLAERAASARRRWQRLEEAAARRERRLQEARALHQFGADLDGLLDWLRDAYRLAAAGDFGHDEASSRRLARQHRALTGEVEAHRGPVSGLRRQLATLGGASGAGPLVVALQVRVVEAEQLFAEVTEVAALRRQWLRDALAVYRMFGEVHACELWIGEKEQWLLSMRVPDSLDDVEVVQHRFESLDQEMNSLMGRVLDVNHTVQELVEGGHPSSDEVRSCQDHLNSRWNRIVELVEQRKEEMSAVLLVENHVLEVAEVRAQVREKRRAVESAPRAGGALQWRLSGLEAALQALEPRQAALLEEAALLAERFPAQAARLHQGAEELGAEWGALASAAQACGEAVAAAGRLQRFLHDLDAFLDWLVRAQEAAGGSEGPLPNSLEEADALLARHAALKEEVDQREEDYARIVAASEALLAADGAELGPGLALDEWLPHLELGWHKLLGLWEARREALVQAHIYQLFLRDLRQALVVLRNQEMALSGAELPGTVESVEEALKQHRDFLTTMELSQQKMQVAVQAAEGLLRQGNIYGEQAQEAVTRLLEKNQENQLRAQQWMQKLHDQLELQHFLRDCHELDGWIHEKMLMARDGTREDNHKLHKRWLRHQAFMAELAQNKEWLEKIEREGQQLMQEKPELAASVRKKLGEIRQCWAELESTTQAKARQLFEASKADQLVQSFAELDKKLLHMESQLQDVDPGGDLATVNSQLKKLQSMESQVEEWYREVGELQAQTAALPLEPASKELVGERQNAVGERLVRLLEPLQERRRLLLASKELHQVAHDWTTSWAWVQERLPLAMQTERGNGLQAVQQHIKKNQGLRREIQAHGPRLEEVLERAGALASLRSPEAEAVRRGLEQLQSAWAGLREAAERRQQVLDAAFQVEQYYFDVAEVEAWLGEQELLMMSEDKGKDEQSTLQLLKKHLQLEQGVENYEESIAQLSRQCRALLEMGHPDSEQISRRQSQVDRLYVALKELGEERRVALEQQYWLYQLSRQVSELEHWIAEKEVVAGSPELGQDFEHVSVLQEKFSEFASETGMAGRERLAAVNQMVDELIECGHTAAATMAEWKDGLNEAWAELLELMGTRAQLLAASRELHKFFSDARELQGQIEEKRRRLPRLTTPPEPRPSASSMQRTLRAFEHDLQLLVSQVRQLQEGAAQLRTVYAGEHAEAIASREQEVLQGWKELLSACEDARLHVSSTADALRFHSQVRDLLSWMDGIASQIGAADKPRDVSSVEVLMNYHQGLKTELEARVPELTTCQELGRSLLLNKSAMADEIQAQLDKLGTRKEEVSEKWDRHWEWLQQMLEVHQFAQEAVVADAWLTAQEPLLQSRELGSSVDEVEQLIRRHEAFRKAAAAWEERFSSLRRLTTIEKIKAEQSKQPPTPLLGRKFFGDPTELAAKAAPLLRPGGYERGLEPLARRASDTLSAEVRTRVGYVRQELKPERLQPRIDRLPEIPGRVEPAALPAAPEDAAETPATPAAAEQVRPRPERQESADRAEELPRRRRPERQESVDQSEEAARRRRPERQESAEHEAAHSLTLGRYEQMERRRERRERRLERQESSEQEMPIRGDLVKGKATLADIVEQLQEKEAGPGLPAGPSLPQPRELPPGRLPNGLELPERTPRPDRPRARDRPKPRRRPRPREGGEGGGSRRSRSAPAQGGSAPAPPPPPTHTVQHEGFLLRKRELDANRKSSNRSWVSLYCVLSKGELGFYKDSKGPASGSTHGGEPLLSLHKATSEVASDYKKKKHVFKLQTQDGSEFLLQAKDEEEMNGWLEAVASSVAEHAEIARWGQTLPTTSSTDEGNPKREGGDRRASGRRK

SEQ ID NO: 65121 - protein, 3674 aa, Homo sapiens
MAGQPHSPRELLGAAGHRSRRPSTELRVPPSPSLTMDSQYETGHIRKLQARHMQMQEKTFTKWINNVFQCGQAGIKIRNLYTELADGIHLLRLLELISGEALPPPSRGRLRVHFLENSSRALAFLRAKVPVPLIGPENIVDGDQTLILGLIWVIILRFQISHISLDKEEFGASAALLSTKEALLVWCQRKTASYTNVNITDFSRSWSDGLGFNALIHAHRPDLLDYGSLRPDRPLHNLAFAFLVAEQELGIAQLLDPEDVAAAQPDERSIMTYVSLYYHYCSRLHQGQTVQRRLTKILLQLQETELLQTQYEQLVADLLRWIAEKQMQLEARDFPDSLPAMRQLLAAFTIFRTQEKPPRLQQRGAAEALLFRLQTALQAQNRRPFLPHEGLGLAELSQCWAGLEWAEAARSQALQQRLLQLQRLETLARRFQHKAALRESFLKDAEQVLDQARAPPASLATVEAAVQRLGMLEAGILPQEGRFQALAEIADILRQEQYHSWADVARRQEEVTVRWQRLLQHLQGQRKQVADMQAVLSLLQEVEAASHQLEELQEPARSTACGQQLAEVVELLQRHDLLEAQVSAHGAHVSHLAQQTAELDSSLGTSVEVLQAKARTLAQLQQSLVALVRARRALLEQTLQRAEFLRNCEEEEAWLKECGQRVGNAALGRDLSQIAGALQKHKALEAEVHRHQAVCVDLVRRGRDLSARRPPTQPDPGERAEAVQGGWQLLQTRVVGRGARLQTALLVLQYFADAAEAASWLRERRSSLERASCGQDQAAAETLLRRHVRLERVLRAFAAELRRLEEQGRAASARASLFTVNSALSPPGESLRNPGPWSEASCHPGPGDAWKMALPAEPDPDFDPNTILQTQDHLSQDYESLRALAQLRRARLEEAMALFGFCSSCGELQLWLEKQTVLLQRVQPQADTLEVMQLKYENFLTALAVGKGLWAEVSSSAEQLRQRYPGNSTQIQRQQEELSQRWGQLEALKREKAVQLAHSVEVCSFLQECGPTQVQLRDVLLQLEALQPGSSEDTCHALQLAQKKTLVLERRVHFLQSVVVKVEEPGYAESQPLQGQVETLQGLLKQVQEQVAQRARRQAETQARQSFLQESQQLLLWAESVQAQLRSKEVSVDVASAQRLLREHQDLLEEIHLWQERLQQLDAQSQPMAALDCPDSQEVPNTLRVLGQQGQELKVLWEQRQQWLQEGLELQKFGREVDGFTATCANHQAWLHLDNLGEDVREALSLLQQHREFGRLLSTLGPRAEALRAHGEKLVQSQHPAAHTVREQLQSIQAQWTRLQGRSEQRRRQLLASLQLQEWKQDVAELMQWMEEKGLMAAHEPSGARRNILQTLKRHEAAESELLATRRHVEALQQVGRELLSRRPCGQEDIQTRLQGLRSKWEALNRKMTERGDELQQAGQQEQLLRQLQDAKEQLEQLEGALQSSETGQDLRSSQRLQKRHQQLESESRTLAAKMAALASMAHGMAASPAILEETQKHLRRLELLQGHLAIRGLQLQASVELHQFCHLSNMELSWVAEHMPHGSPTSYTECLNGAQSLHRKHKELQVEVKAHQGQVQRVLSSGRSLAASGHPQAQHIVEQCQELEGHWAELERACEARAQCLQQAVTFQQYFLDVSELEGWVEEKRPLVSSRDYGRDEAATLRLINKHQALQEELAIYWSSMEELDQTAQTLTGPEVPEQQRVVQERLREQLRALQELAATRDRELEGTLRLHEFLREAEDLQGWLASQKQAAKGGESLGEDPEHALHLCTKFAKFQHQVEMGSQRVAACRLLAESLLERGHSAGPMVRQRQQDLQTAWSELWELTQARGHALRDTETTLRVHRDLLEVLTQVQEKATSLPNNVARDLCGLEAQLRSHQGLERELVGTERQLQELLETAGRVQKLCPGPQAHAVQQRQQAVTQAWAVLQRRMEQRRAQLERARLLARFRTAVRDYASWAARVRQDLQVEESSQEPSSGPLKLSAHQWLRAELEAREKLWQQATQLGQQALLAAGTPTKEVQEELRALQDQRDQVYQTWARKQERLQAEQQEQLFLRECGRLEEILAAQEVSLKTSALGSSVEEVEQLIRKHEVFLKVLTAQDKKEAALRERLKTLRRPRVRDRLPILLQRRMRVKELAESRGHALHASLLMASFTQAATQAEDWIQAWAQQLKEPVPPGDLRDKLKPLLKHQAFEAEVQAHEEVMTSVAKKGEALLAQSHPRAGEVSQRLQGLRKHWEDLRQAMALRGQELEDRRNFLEFLQRVDLAEAWIQEKEVKMNVGDLGQDLEHCLQLRRRLREFRGNSAGDTVGDACIRSISDLSLQLKNRDPEEVKIICQRRSQLNNRWASFHGNLLRYQQQLEGALEIHVLSRELDNVTKRIQEKEALIQALDCGKDLESVQRLLRKHEELEREVHPIQAQVESLEREVGRLCQRSPEAAHGLRHRQQEVAESWWQLRSRAQKRREALDALHQAQKLQAMLQELLVSAQRLRAQMDTSPAPRSPVEARRMLEEHQECKAELDSWTDSISLARSTGQQLLTAGHPFSSDIRQVLAGLEQELSSLEGAWQEHQLQLQQALELQLFLSSVEKMERWLCSKEDSLASEGLWDPLAPMEPLLWKHKMLEWDLEVQAGKISALEATARGLHQGGHPEAQSALGRCQAMLLRKEALFRQAGTRRHRLEELRQLQAFLQDSQEVAAWLREKNLVALEEGLLDTAMLPAQLQKQQNFQAELDASMHQQQELQREGQRLLQGGHPASEAIQERLEELGALWGELQDNSQKKVAKLQKACEALRLRRSMEELENWLEPIEVELRAPTVGQALPGVGELLGTQRELEAAVDKKARQAEALLGQAQAFVREGHCLAQDVEEQARRLLQRFKSLREPLQERRTALEARSLLLKFFRDADEEMAWVQEKLPLAAAQDYGQSLSAVRHLQEQHQNLESEMSSHEALTRVVLGTGYKLVQAGHFAAHEVAARVQQLEKAMAHLRAEAARRRLLLQQAQEAQQFLTELLEAGSWLAERGHVLDSEDMGHSAEATQALLRRLEATKRDLEAFSPRIERLQQTAALLESRKNPESPKVLAQLQAVREAHAELLRRAEARGHGLQEQLQLHQLERETLLLDAWLTTKAATAESQDYGQDLEGVKVLEEKFDAFRKEVQSLGQAKVYALRKLAGTLERGAPRRYPHIQAQRSRIEAAWERLDQAIKARTENLAAAHEVHSFQQAAAELQGRMQEKTALMKGEDGGHSLSSVRTLQQQHRRLERELEAMEKEVARLQTEACRLGQLHPAAPGGLAKVQEAWATLQAKAQERGQWLAQAAQGHAFLGRCQELLAWAQERQELASSEELAEDVAGAEQLLGQHEELGQEIRECRLQAQDLRQEGQQLVDNSHFMSAEVTECLQELEGRLQELEEAWALRWQRCAESWGLQKLRQRLEQAEAWLACWEGLLLKPDYGHSVSDVELLLHRHQDLEKLLAAQEEKFAQMQKTEMEQELLLQPQELKPGRAGSSLTSFQWRPSGHQGLGAQLAETRDPQDAKGTPTMEGSLEFKQHLLPGGRQPSSSSWDSCRGNLQGSSLSLFLDERMAAEKVASIALLDLTGARCERLRGRHGRKHTFSLRLTSGAEILFAAPSEEQAESWWRALGSTAAQSLSPKLKAKPVSSLNECTTKDARPGCLLRSDP

SEQ ID NO: 65122 - protein, 313 aa, Homo sapiens
MRHNQMCCETPPTVTVYVKSGSNRSHQPKKPITLKRPICKDNWQAFEKNTHNNNKSKRPKGPCLVIQRQDMTAFFKLFDDDLIQDFLWMDCCCKIADKYLLAMTFVYFKRAKFTISEHTRINFFIALYLANTVEEDEEETKYEIFPWALGKNWRKLFPNFLKLRDQLWDRIDYRAIVSRRCCEEVMAIAPTHYIWQRERSVHHSGAVRNYNRDEVQLPRGPSATPVDCSLCGKKRRYVRLGLSSSSSLSSHTAGVTEKHSQDSYNSLSMDIIGDPSQAYTGSEVVNDHQSNKGKKTNFLKKDKSMEWFTGSEE

SEQ ID NO: 65123 - protein, 313 aa, Homo sapiens; identical to SEQ ID NO: 65122

SEQ ID NO: 65124 - protein, 127 aa, Homo sapiens
MRHNQMCCETPPTVTVYVKSGSNRSHQPKKPITLKRPICKDNWQAFEKNTHNNNKSKRPKGPCLVIQRQDMTAFFKLFDDDLIQDFLWMDCCCKIADKYLLAMTFVYFKRAKFTISEHTRINFFIAL

SEQ ID NO: 65125 - protein, 293 aa, Homo sapiens
MLWAIPELGSPCPISISYEMSDSQDPTTSPVVTTQVELGGCSRQGGGNGFLRFRQHQEVQAFLSLLEDSFVQEFLSKDPCFQISDKYLLAMVLVYFQRAHLKLSEYTHSSLFLALYLANDMEEDLEGPKCEIFPWALGKDWCLRVGKFLHQRDKLWARMGFRAVVSRQCCEEVMAKEPFHWAWTRDRRPHHGGVQRVCPQVPVRLPRGPGLSPPHCSPCGLPQHCSSHLLKPVSSKCPSLTSECHRPPSQNYLSRVKNAWGGDFLIVLPPQMQLEPGTYSLRIFPKPPARPGH

SEQ ID NO: 65126 - protein, 373 aa, Homo sapiens
MNVDKFLIVCYLKKEVWGFESYSLSGTTCFQWNYFVWSLRFFFSCGSSKYHLTPLPIKKVDYPHKRGQNWGSYVHNSLPRFNWDYRSCFHTWKRASDNRERAYEHSAYGHHERGTGGFDRTRHYDQDYYRDPRERTLQHGLYYASRSRSPNRFDAHDPRYEPRAREQFTLPSVVHRDIYRDDITREVRGRRPERNYQHSRSRSPHSSQSRNQSPQRLASQASRPTRSPSGSGSRSRSSSSDSISSSSSTSSDSSDSSSSSSDDSPARSVQSAAVPAPTSQLLSSLEKDEPRKSFGIKVQNLPVRSTDTSLKDGLFHEFKKFGKVTSVQIHGTSEERYGLVFFRQQEDQEKALTASKGKLFFGMQIEVTAWIGP

SEQ ID NO: 65127 - protein, 3664 aa, Homo sapiens
MVRETRHLWVGNLPENVREEKIIEHFKRYGRVESVKILPKRGSEGGVAAFVDFVDIKSAQKAHNSVNKMGDRDLRTDYNEPGTIPSAARGLDDTVSIASRSREVSGFRGGGGGPAYGPPPSLHAREGRYERRLDGASDNRERAYEHSAYGHHERGTGGFDRTRHYDQDYYRDPRERTLQHGLYYASRSRSPNRFDAHDPRYEPRAREQFTLPSVVHRDIYRDDITREVRGRRPERNYQHSRSRSPHSSQSRNQSPQRLASQASRPTRSPSGSGSRSRSSSSDSISSSSSTSSDSSDSSSSSSDDSPARSVQSAAVPAPTSQLLSSLEKDEPRKSFGIKVQNLPVRSTDTSLKDGLFHEFKKFGKVTSVQIHGTSEERYGLVFFRQQEDQEKALTASKGKLFFGMQIEVTAWIGPETESENEFRPLDERIDEFHPKATRTLFIGNLEKTTTYHDLRNIFQRFGEIVDIDIKKVNGVPQYAFLQYCDIASVCKAIKKMDGEYLGNNRLKLGFGKSMPTNCVWLDGLSSNVSDQYLTRHFCRYGPVVKVVFDRLKGMALVLYNEIEYAQAAVKETKGRKIGGNKIKVDFANRESQLAFYHCMEKSGQDIRDFYEMLAERREERRASYDYNQDRTYYESVRTPGTYPEDSRRDYPARGREFYSEWETYQGDYYESRYYDDPREYRDYRNDPYEQDIREYSYRQRERERERERFESDRDRDHERRPIERSQSPVHLRRPQSPGASPSQAERLPSDSERRLYSRSSDRSGSCSSLSPPRYEKLDKSRLERYTKNEKTDKERTFDPERVERERRLIRKEKVEKDKTDKQKRKGKVHSPSSQSSETDQENEREQSPEKPRSCNKLSREKADKEGIAKNRLELMPCVVLTRVKEKEGKVIDHTPVEKLKAKLDNDTVKSSALDQKLQVSQTEPAKSDLSKLESVRMKVPKEKGLSSHVEVVEKEGRLKARKHLKPEQPADGVSAVDLEKLEARKRRFADSNLKAEKQKPEVKKSSPEMEDARVLSKKQPDVSSREVILLREGEAERKPVRKEILKRESKKIKLDRLNTVASPKDCQELASISVGSGSRPSSDLQARLGELAGESVENQEVQSKKPIPSKPQLKQLQVLDDQGPEREDVRKNYCSLRDETPERKSGQEKSHSVNTEEKIGIDIDHTQSYRKQMEQSRRKQQMEMEIAKSEKFGSPKKDVDEYERRSLVHEVGKPPQDVTDDSPPSKKKRMDHVDFDICTKRERNYRSSRQISEDSERTGGSPSVRHGSFHEDEDPIGSPRLLSVKGSPKVDEKVLPYSNITVREESLKFNPYDSSRREQMADMAKIKLSVLNSEDELNRWDSQMKQDAGRFDVSFPNSIIKRDSLRKRSVRDLEPGEVPSDSDEDGEHKSHSPRASALYESSRLSFLLRDREDKLRERDERLSSSLERNKFYSFALDKTITPDTKALLERAKSLSSSREENWSFLDWDSRFANFRNNKDKEKVDSAPRPIPSWYMKKKKIRTDSEGKMDDKKEDHKEEEQERQELFASRFLHSSIFEQDSKRLQHLERKEEDSDFISGRIYGKQTSEGANSTTDSIQEPVVLFHSRFMELTRMQQKEKEKDQKPKEVEKQEDTENHPKTPESAPENKDSELKTPPSVGPPSVTVVTLESAPSALEKTTGDKTVEAPLVTEEKTVEPATVSEEAKPASEPAPAPVEQLEQVDLPPGADPDKEAAMMPAGVEEGSSGDQPPYLDAKPPTPGASFSQAESNVDPEPDSTQPLSKPAQKSEEANEPKAEKPDATADAEPDANQKAEAAPESQPPASEDLEVDPPVAAKDKKPNKSKRSKTPVQAAAVSIVEKPVTRKSERIDREKLKRSNSPRGEAQKLLELKMEAEKITRTASKNSAADLEHPEPSLPLSRTRRRNVRSVYATMGDHENRSPVKEPVEQPRVTRKRLERELQEAAAVPTTPRRGRPPKTRRRADEEEENEAKEPAETLKPPEGWRSPRSQKTAAGGGPQGKKGKNEPKVDATRPEATTEVGPQIGVKESSMEPKAAEEEAGSEQKRDRKDAGTDKNPPETAPVEVVEKKPAPEKNSKSKRGRSRNSRLAVDKSASLKNVDAAVSPRGAAAQAGERESGVVAVSPEKSESPQKEDGLSSQLKSDPVDPDKEPEKEDVSASGPSPEATQLAKQMELEQAVEHIAKLAEASASAAYKADAPEGLAPEDRDKPAHQASETELAAAIGSIINDISGEPENFPAPPPYPGESQTDLQPPAGAQALQPSEEGMETDEAVSGILETEAATESSRPPVNAPDPSAGPTDTKEARGNSSETSHSVPEAKGSKEVEVTLVRKDKGRQKTTRSRRKRNTNKKVVAPVESHVPESNQAQGESPAANEGTTVQHPEAPQEEKQSEKPHSTPPQSCTSDLSKIPSTENSSQEISVEERTPTKASVPPDLPPPPQPAPVDEEPQARFRVHSIIESDPVTPPSDPSIPIPTLPSVTAAKLSPPVASGGIPHQSPPTKVTEWITRQEEPRAQSTPSPALPPDTKASDVDTSSSTLRKILMDPKYVSATSVTSTSVTTAIAEPVSAAPCLHEAPPPPVDSKKPLEEKTAPPVTNNSEIQASEVLVAADKEKVAPVIAPKITSVISRMPVSIDLENSQKITLAKPAPQTLTGLVSALTGLVNVSLVPVNALKGPVKGSVTTLKSLVSTPAGPVNVLKGPVNVLTGPVNVLTTPVNATVGTVNAAPGTVNAAASAVNATASAVTVTAGAVTAASGGVTATTGTVTMAGAVIAPSTKCKQRASANENSRFHPGSMPVIDDRPADAGSGAGLRVNTSEGVVLLSYSGQKTEGPQRISAKISQIPPASAMDIEFQQSVSKSQVKPDSVTASQPPSKGPQAPAGYANVATHSTLVLTAQTYNASPVISSVKADRPSLEKPEPIHLSVSTPVTQGGTVKVLTQGINTPPVLVHNQLVLTPSIVTTNKKLADPVTLKIETKVLQPANLGSTLTPHHPPALPSKLPTEVNHVPSGPSIPADRTVSHLAAAKLDAHSPRPSGPGPSSFPRASHPSSTASTALSTNATVMLAAGIPVPQFISSIHPEQSVIMPPHSITQTVSLSHLSQGEVRMNTPTLPSITYSIRPEALHSPRAPLQPQQIEVRAPQRASTPQPAPAGVPALASQHPPEEEVHYHLPVARATAPVQSEVLVMQSEYRLHPYTVPRDVRIMVHPHVTAVSEQPRAADGVVKVPPASKAPQQPGKEAAKTPDAKAAPTPTPAPVPVPVPLPAPAPAPHGEARILTVTPSNQLQGLPLTPPVVVTHGVQIVHSSGELFQEYRYGDIRTYHPPAQLTHTQFPAASSVGLPSRTKTAAQGPPPEGEPLQPPQPVQSTQPAQPAPPCPPSQLGQPGQPPSSKMPQVSQEAKGTQTGVEQPRLPAGPANRPPEPHTQVQRAQAETGPTSFPSPVSVSMKPDLPVSLPTQTAPKQPLFVPTTSGPSTPPGLVLPHTEFQPAPKQDSSPHLTSQRPVDMVQLLKKYPIVWQGLLALKNDTAAVQLHFVSGNNVLAHRSLPLSEGGPPLRIAQRMRLEATQLEGVARRMTVETDYCLLLALPCGRDQEDVVSQTESLKAAFITYLQAKQAAGIINVPNPGSNQPAYVLQIFPPCEFSESHLSRLAPDLLASISNISPHLMIVIASV

SEQ ID NO: 65128 - protein, 373 aa, Homo sapiens; identical to SEQ ID NO: 65126

SEQ ID NO: 65129 - protein, 297 aa, Homo sapiens
  VARIANT 1: note = MOD_RES - Any amino acid
XQASRPTRSPSGSGSRSRSSSSDSISSSSSTSSDSDSSSSSSDDSPARSVQSAAVPAPTSQLLSSLEKDEPRKSFGIKVQNLPVRSTDTSLKDGLFHEFKKFGKVTSVQIHGTSEERYGLVFFRQQEDQEKALTASKGKLFFGMQIEVTAWIGPETESENEFRPLDERIDEFHPKATRTLFIGNLEKTTTYHDLRNIFQRFGEIVDIDIKKVNGVPQYAFLQYCDIASVCKAIKKMDGEYLGNNRLKLGFGKSMPTNCVWLDGLSSNVSDQYLTRHFCRYGPVVKVVFDRLKGMALV

SEQ ID NO: 65130 - protein, 294 aa, Homo sapiens
MSPRGTGCSAGLLMTVGWLLLAGLQSARGTNVTAAVQDAGLAHEGEGEEETENNDSETAENYAPPETEDVSNRNVVKEVEFGMCTVTCGIGVREVILTNGCPGGESKCVVRVEECRGPTDCGWGKPISESLESVRLACIHTSPLNRFKYMWKLLRQDQQSIILVNDSAILEVRKESHPLAFECDTLDNNEIVATIKFTVYTSSELQMRRSSLPATDAALIFVLTIGVIICVFIIFLLIFIIINWAAVKAFWGAKASTPEVQSEQSSVRYKDSTSLDQLPTEMPGEDDALSEWNE

SEQ ID NO: 65131 - protein, 215 aa, Homo sapiens [sequence omitted]

SEQ ID NO: 65132 - protein, 208 aa, Homo sapiens
MIQEDHEGSQDGGVHSSPVSSPSVSGPRRLVSCLSSQSSALSQSGGGSTSAAGIEARSRALRRRWCPAGIMLLALVCLLSCLLPSSEAKLYGRCELARVLHDFGLDGYRGYSLADWVCLAYFTSGFNAAALDYEADGSTNNGIFQINSRRWCSNLTPNVPNVCRMYCSDLLNPNLKDTVICAMKITQEPQGLGYWEAWRHHCQGKDLT

SEQ ID NO: 65133 - protein, 112 aa, Homo sapiens
MVSALRGAPLIRVCLAYFTSGFNAAALDYEADGSTNNGIFQINSRRWCSNLTPNVPNVCRMYCSDLLNPNLKDTVICAMKITQEPQGLGYWEAWRHHCQGKDLTEWVDGCDF

SEQ ID NO: 65134 - protein, 123 aa, Homo sapiens
MTSGWTDTGDTAWLTAYALPYAGVCLAYFTSGFNAAALDYEADGSTNNGIFQINSRRWCSNLTPNVPNVCRMYCSDLLNPNLKDTVICAMKITQEPQGLGYWEAWRHHCQGKDLTEWVDGCDF

SEQ ID NO: 65135 - protein, 124 aa, Homo sapiens
MVLCWLLLLVMALPPGTTGVKDCVFCELTDSMQCPGTYMHCGDDEDCFTGHGVAPGTGPVINKGCLRATSCGLEEPVSYRGVTYSLTTNCCTGRLCNRAPSSQTVGATTSLALGLGMLLPPRLL

SEQ ID NO: 65136 - protein, 159 aa, Homo sapiens
MKAWGTVVVTLATLMVVTVDAKIYERCELAARLERAGLNGYKGYGVGDWLCMAHYESGFDTAFVDHNPDGSSEYGIFQLNSAWWCDNGITPTKNLCHMDCHDLLNRHILDDIRCAKQIVSSQNGLSAWTSWRLHCSGHDLSEWLKGCDMHVKIDPKIHP

SEQ ID NO: 65137 - protein, 159 aa, Homo sapiens; identical to SEQ ID NO: 65136

SEQ ID NO: 65138 - protein, 1068 aa, Homo sapiens
MRSAAKPWNPAIRAGGHGPDRVRPLPAASSGMKSSKSSTSLAFESRLSRLKRASSEDTLNKPGSTAASGVVRLKKTATAGAISELTESRLRSGTGAFTTTKRTGIPAPREFSVTVSRERSVPRGPSNPRKSVSSPTSSNTPTPTKHLRTPSTKPKQENEGGEKAALESQVRELLAEAKAKDSEINRLRSELKKYKEKRTLNAEGTDALGPNVDGTSVSPGDTEPMIRALEEKNKNFQKELSDLEEENRVLKEKLIYLEHSPNSEGAASHTGDSSCPTSITQESSFGSPTGNQMSSDIDEYKKNIHGNALRTSGSSSSDVTKASLSPDASDFEHITAETPSRPLSSTSNPFKSSKCSTAGSSPNSVSELSLASLTEKIQKMEENHHSTAEELQATLQELSDQQQMVQELTAENEKLVDEKTILETSFHQHRERAEQLSQENEKLMNLLQERVKNEEPTTQEGKIIELEQKCTGILEQGRFEREKLLNIQQQLTCSLRKVEEENQGALEMIKRLKEENEKLNEFLELERHNNNMMAKTLEECRVTLEGLKMENGSLKSHLQGEKQKATEASAVEQTAESCEVQEMLKVARAEKDLLELSCNELRQELLKANGEIKHVSSLLAKVEKDYSYLKEICDHQAEQLSRTSLKLQEKASESDAEIKDMKETIFELEDQVEQHRAVKLHNNQLISELESSVIKLEEQKSDLERQLKTLTKQMKEETEEWRRFQADLQTAVVVANDIKCEAQQELRTVKRKLLEEEEKNARLQKELGDVQGHGRVVTSRAAPPPVDEEPESSEVDAAGRWPGVCVSRTSPTPPESATTVKSLIKSFDLGRPGGAGQNISVHKTPRSPLSGIPVRTAPAAAVSPMQRHSTYSSVRPASRGVTQRLDLPDLPLSDILKGRTETLKPDPHLRKSPSLESLSRPPSLGFGDTRLLSASTRAWKPQSKLSVERKDPLAALAREYGGSKRNALLKWCQKKTQGYANIDITNFSSSWSDGLAFCALLHTYLPAHIPYQELNSQEKKRNLLLAFEAAESVGIKPSLELSEMLYTDRPDWQSVMQYVAQIYKYFET

SEQ ID NO: 65139 - protein, 703 aa, Homo sapiens
MGNHSGRPEDPEPGAFTTTKRTGIPAPREFSVTVSRERSVPRGPSNPRKSVSSPTSSNTPTPTKHLRTPSTKPKQENEGGEKAALESQVRELLAEAKAKDSEINRLRSELKKYKEKRTLNAEGTDALGPNVDGTSVSPGDTEPMIRALEEKNKNFQKELSDLEEENRVLKEKLIYLEHSPNSEGAASHTGDSSCPTSITQESSFGSPTGNQMSSDIDEYKKNIHGNALRTSGSSSSDVTKASLSPDASDFEHITAETPSRPLSSTSNPFKSSKCSTAGSSPNSVSELSLASLTEKIQKMEENHHSTAEELQATLQELSDQQQMVQELTAENEKLVDEKTILETSFHQHRERAEQLSQENEKLMNLLQERVKNEEPTTQEGKIIELEQKCTGILEQGRFEREKLLNIQQQLTCSLRKVEEENQGALEMIKRLKEENEKLNEFLELERHNNNMMAKTLEECRVTLEGLKMENGSLKSHLQGEKQKATEASAVEQTAESCEVQEMLKVARAEKDLLELSCNELRQELLKANGEIKHVSSLLAKVEKDYSYLKEICDHQAEQLSRTSLKLQEKASESDAEIKDMKETIFELEDQVEQHRAVKLHNNQLISELESSVIKLEEQKSDLERQLKTLTKQMKEETEEWRRFQADLQTAVVVANDIKCEAQQELRTVKRKLLEEEEKNARLQKELGDVQGHGRVVTSRAAPP

SEQ ID NO: 65140 - protein, 709 aa, Homo sapiens
MGNHSGRPEDPEPGAFTTTKRTGIPAPREFSVTVSRERSVPRGPSNPRKSVSSPTSSNTPTPTKHLRTPSTKPKQENEGGEKAALESQVRELLAEAKAKDSEINRLRSELKKYKEKRTLNAEGTDALGPNVDGTSVSPGDTEPMIRALEEKNKNFQKELSDLEEENRVLKEKLIYLEHSPNSEGAASHTGDSSCPTSITQESSFGSPTGNQMSSDIDEYKKNIHGNALRTSGSSSSDVTKASLSPDASDFEHITAETPSRPLSSTSNPFKSSKCSTAGSSPNSVSELSLASLTEKIQKMEENHHSTAEELQATLQELSDQQQMVQELTAENEKLVDEKTILETSFHQHRERAEQLSQENEKLMNLLQERVKNEEPTTQEGKIIELEQKCTGILEQGRFEREKLLNIQQQLTCSLRKVEEENQGALEMIKRLKEENEKLNEFLELERHNNNMMAKTLEECRVTLEGLKMENGSLKSHLQGEKQKATEASAVEQTAESCEVQEMLKVARAEKDLLELSCNELRQELLKANGEIKHVSSLLAKVEKDYSYLKEICDHQAEQLSRTSLKLQEKASESDAEIKDMKETIFELEDQVEQHRAVKLHNNQLISELESSVIKLEEQKSDLERQLKTLTKQMKEETEEWRRFQADLQTAVVVANDIKCEAQQELRTVKRKLLEEEEKNARLQKELGDVQGHGRVVTSRAAPPSLGSVS

SEQ ID NO: 65141 - protein, 987 aa, Homo sapiens
MGNHSGRPEDPEPGAFTTTKRTGIPAPREFSVTVSRERSVPRGPSNPRKSVSSPTSSNTPTPTKHLRTPSTKPKQENEGGEKAALESQVRELLAEAKAKDSEINRLRSELKKYKEKRTLNAEGTDALGPNVDGTSVSPGDTEPMIRALEEKNKNFQKELSDLEEENRVLKEKLIYLEHSPNSEGAASHTGDSSCPTSITQESSFGSPTGNQMSSDIDEYKKNIHGNALRTSGSSSSDVTKASLSPDASDFEHITAETPSRPLSSTSNPFKSSKCSTAGSSPNSVSELSLASLTEKIQKMEENHHSTAEELQATLQELSDQQQMVQELTAENEKLVDEKTILETSFHQHRERAEQLSQENEKLMNLLQERVKNEEPTTQEGKIIELEQKCTGILEQGRFEREKLLNIQQQLTCSLRKVEEENQGALEMIKRLKEENEKLNEFLELERHNNNMMAKTLEECRVTLEGLKMENGSLKSHLQGEKQKATEASAVEQTAESCEVQEMLKVARAEKDLLELSCNELRQELLKANGEIKHVSSLLAKVEKDYSYLKEICDHQAEQLSRTSLKLQEKASESDAEIKDMKETIFELEDQVEQHRAVKLHNNQLISELESSVIKLEEQKSDLERQLKTLTKQMKEETEEWRRFQADLQTAVVVANDIKCEAQQELRTVKRKLLEEEEKNARLQKELGDVQGHGRVVTSRAAPPPVDEEPESSEVDAAGRWPGVCVSRTSPTPPESATTVKSLIKSFDLGRPGGAGQNISVHKTPRSPLSGIPVRTAPAAAVSPMQRHSTYSSVRPASRGVTQRLDLPDLPLSDILKGRTETLKPDPHLRKSPSLESLSRPPSLGFGDTRLLSASTRAWKPQSKLSVERKDPLAALAREYGGSKRNALLKWCQKKTQGYANIDITNFSSSWSDGLAFCALLHTYLPAHIPYQELNSQEKKRNLLLAFEAAESVGIKPSLELSEMLYTDRPDWQSVMQYVAQIYKYFET

SEQ ID NO: 65142 - protein, 790 aa, Homo sapiens
MRSAAKPWNPAIRAGGHGPDRVRPLPAASSGMKSSKSSTSLAFESRLSRLKRASSEDTLNKPGSTAASGVVRLKKTATAGAISELTESRLRSGTGAFTTTKRTGIPAPREFSVTVSRERSVPRGPSNPRKSVSSPTSSNTPTPTKHLRTPSTKPKQENEGGEKAALESQVRELLAEAKAKDSEINRLRSELKKYKEKRTLNAEGTDALGPNVDGTSVSPGDTEPMIRALEEKNKNFQKELSDLEEENRVLKEKLIYLEHSPNSEGAASHTGDSSCPTSITQESSFGSPTGNQMSSDIDEYKKNIHGNALRTSGSSSSDVTKASLSPDASDFEHITAETPSRPLSSTSNPFKSSKCSTAGSSPNSVSELSLASLTEKIQKMEENHHSTAEELQATLQELSDQQQMVQELTAENEKLVDEKTILETSFHQHRERAEQLSQENEKLMNLLQERVKNEEPTTQEGKIIELEQKCTGILEQGRFEREKLLNIQQQLTCSLRKVEEENQGALEMIKRLKEENEKLNEFLELERHNNNMMAKTLEECRVTLEGLKMENGSLKSHLQGEKQKATEASAVEQTAESCEVQEMLKVARAEKDLLELSCNELRQELLKANGEIKHVSSLLAKVEKDYSYLKEICDHQAEQLSRTSLKLQEKASESDAEIKDMKETIFELEDQVEQHRAVKLHNNQLISELESSVIKLEEQKSDLERQLKTLTKQMKEETEEWRRFQADLQTAVVVANDIKCEAQQELRTVKRKLLEEEEKNARLQKELGDVQGHGRVVTSRAAPPSLGSVS

SEQ ID NO: 65143 - protein, 1029 aa, Homo sapiens
MRSAAKPWNPAIRAGGHGPDRVRPLPAASSGMKSSKSSTSLAFESRLSRLKRASSEDTLNKPGSTAASGVVRLKKTATAGAISELTESRLRSGTGAFTTTKRTGIPAPREFSVTVSRERSVPRGPSNPRKSVSSPTSSNTPTPTKHLRTPSTKPKQENEGGEKAALESQVRELLAEAKAKDSEINRLRSELKKYKEKRTLNAEGTDALGPNVDGTSVSPGDTEPMIRALEEKNKNFQKELSDLEEENRVLKEKLIYLEHSPNSEGAASHTGDSSCPTSITQESSFGSPTGNQMSSDIDEYKKNIHGNALRTSGSSSSDVTKASLSPDASDFEHITAETPSRPLSSTSNPFKSSKCSTAGSSPNSVSELSLASLTEKIQKMEENHHSTAEELQATLQELSDQQQMVQELTAENEKLVDEKTILETSFHQHRERAEQLSQENEKLMNLLQERVKNEEPTTQEGKIIELEQKCTGILEQGRFEREKLLNIQQQLTCSLRKVEEENQGALEMIKRLKEENEKLNEFLELERHNNNMMAKTLEECRVTLEGLKMENGSLKSHLQGEKQKATEASAVEQTAESCEVQEMLKVARAEKDLLELSCNELRQELLKANGEIKHVSSLLAKVEKDYSYLKEICDHQAEQLSRTSLKLQEKASESDAEIKDMKETIFELEDQVEQHRAVKLHNNQLISELESSVIKLEEQKSDLERQLKTLTKQMKEETEEWRRFQADLQTAVVVANDIKCEAQQELRTVKRKLLEEEEKNARLQKELGDVQGHGRVVTSRAAPPPVDEEPESSEVDAAGRWPGVCVSRTSPTPPESATTVKSLIKSFDLGRPGGAGQNISVHKTPRSPLSGIPVRTAPAAAVSPMQRHSTYSSVRPASRGVTQRLDLPDLPLSDILKGRTETLKPDPHLRKSPSLESLSRPPSLGFGDTRLLSASTRAWKPQSKLSVERKDPLAALAREYGGSKRNALLKWCQKKTQGYAKRNLLLAFEAAESVGIKPSLELSEMLYTDRPDWQSVMQYVAQIYKYFET

SEQ ID NO: 65144 - protein, 78 aa, Homo sapiens
MRSAAKPWNPAIRAGGHGPDRVRPLPAASSGMKSSKSSTSLAFESRLSRLKRASSEDTLNKPGSTAASGVVRLKKTAT

SEQ ID NO: 65145 - protein, 408 aa, Homo sapiens
MKETIFELEDQVEQHRAVKLHNNQLISELESSVIKLEEQKSDLERQLKTLTKQMKEETEEWRRFQADLQTAVVVANDIKCEAQQELRTVKRKLLEEEEKNARLQKELGDVQGHGRVVTSRAAPPPVDEEPESSEVDAAGRWPGVCVSRTSPTPPESATTVKSLIKSFDLGRPGGAGQNISVHKTPRSPLSGIPVRTAPAAAVSPMQRHSTYSSVRPASRGVTQRLDLPDLPLSDILKGRTETLKPDPHLRKSPSLESLSRPPSLGFGDTRLLSASTRAWKPQSKLSVERKDPLAALAREYGGSKRNALLKWCQKKTQGYANIDITNFSSSWSDGLAFCALLHTYLPAHIPYQELNSQEKKRNLLLAFEAAESVGIKPSLELSEMLYTDRPDWQSVMQYVAQIYKYFET

SEQ ID NO: 65146 - protein, 1117 aa, Homo sapiens
MKKASRSVGSVPKVSAISKTQTAEKIKPENSSSASTGGKLVKPGTAASLSKTKSSDDLLAGMAGGVTVTNGVKGKKSTCPSAAPSASAPAMTTVENKSKISTGTASSTKRSTSTGNKESSSTRERLRERTRLNQSKKLPSAGQGANDMALAKRSRSRTATECDVRMSKSKSDNQISDRAALEAKVKDLLTLAKTKDVEILHLRNELRDMRAQLGINEDHSEGDEKSEKETIMAHQPTDVESTLLQLQEQNTAIREELNQLKNENRMLKDRLNALGFSLEQRLDNSEKLFGYQSLSPEITPDNQSDGGGTLTSSVEGSAPGSVEDLLSQDENTLMDHQHSNSMDNLDSECSEVYQPLTSSDDALDAPSSSESEGIPSIERSRKGSSGNASEVSVACLTERIHQMEENQHSTSEELQATLQELADLQQITQELNSENERLGEEKVILMESLCQQSDKLEHFSRQIEYFRSLLDEHHISYVIDEDVKSGRYMELEQRYMDLAENARFEREQLLGVQQHLSNTLKMAEQDNKEAQEMIGALKERSHHMERIIESEQKGKAALAATLEEYKATVASDQIEMNRLKAQLENEKQKVAELYSIHNSGDKSDIQDLLESVRLDKEKAETLASSLQEDLAHTRNDANRLQDAIAKVEDEYRAFQEEAKKQIEDLNMTLEKLRSDLDEKETERSDMKETIFELEDEVEQHRAVKLHDNLIISDLENTVKKLQDQKHDMEREIKTLHRRLREESAEWRQFQADLQTAVVIANDIKSEAQEEIGDLKRRLHEAQEKNEKLTKELEEIKSRKQEEERGRVYNYMNAVERDLAALRQGMGLSRRSSTSSEPTPTVKTLIKSFDSASQVPNPAAAAIPRTPLSPSPMKTPPAAAVSPMQRHSISGPISTSKPLTALSDKRPNYGEIPVQEHLLRTSSASRPASLPRVPAMESAKTLSVSRRSSEEVKRDISAQEGASPASLMAMGTTSPQLSLSSSPTASVTPTTRSRIREERKDPLSALAREYGGSKRNALLKWCQKKTEGYQNIDITNFSSSWNDGLAFCALLHTYLPAHIPYQELNSQDKRRNFMLAFQAAESVGIKSTLDINEMVRTERPDWQNVMLYVTAIYKYFET

SEQ ID NO: 65147 - protein, 939 aa, Homo sapiens
VPEAVRWGYFIPEQSQFACKCITKRQPRMKKASRSVGSVPKVSAISKTQTAEKIKPENSSSASTGGKLVKPGTAASLSKTKSSDDLLAGMAGGVTVTNGVKGKKSTCPSAAPSASAPAMTTVENKSKISTGTASSTKRSTSTGNKESSSTRERLRERTRLNQSKKLPSAGQGANDMALAKRSRSRTATECDVRMSKSKSDNQISDRAALEAKVKDLLTLAKTKDVEILHLRNELRDMRAQLGINEDHSEGDEKSEKETIMAHQPTDVESTLLQLQEQNTAIREELNQLKNENRMLKDRLNALGFSLEQRLDNSEKLFGYQSLSPEITPDNQSDGGGTLTSSVEGSAPGSVEDLLSQDENTLMDHQHSNSMDNLDSECSEVYQPLTSSDDALDAPSSSESEGIPSIERSRKGSSGNASEVSVACLTERIHQMEENQHSTSEELQATLQELADLQQITQELNSENERLGEEKVILMESLCQQSDKLEHFSRQIEYFRSLLDEHHISYVIDEDVKSGRYMELEQRYMDLAENARFEREQLLGVQQHLSNTLKMAEQDNKEAQEMIGALKERSHHMERIIESEQKGKAALAATLEEYKATVASDQIEMNRLKAQLENEKQKVAELYSIHNSGDKSDIQDLLESVRLDKEKAETLASSLQEDLAHTRNDANRLQDAIAKVEDEYRAFQEEAKKQIEDLNMTLEKLRSDLDEKETERSDMKETIFELEDEVEQHRAVKLHDNLIISDLENTVKKLQDQKHDMEREIKTLHRRLREESAEWRQFQADLQTAVVIANDIKSEAQEEIGDLKRRLHEAQEKNEKLTKELEEIKSRKQEEERGRVYNYMNAVERDLAALRQGMGLSRRSSTSSEPTPTVKTLIKSFDSASQVPNPAAAAIPRTPLSPSPMKTPPAAAVSPMQMESSSVAHAGMQWRDLGSLQPLPPGFK

SEQ ID NO: 65148 - protein, 789 aa, Homo sapiens
MKKASRSVGSVPKVSAISKTQTAEKIKPENSSSASTGGKLVKPGTAASLSKTKSSDDLLAGMAGGVTVTNGVKGKKSTCPSAAPSASAPAMTTVENKSKISTGTASSTKRSTSTGNKESSSTRERLRERTRLNQSKKLPSAGQGANDMALAKRSRSRTATECDVRMSKSKSDNQISDRAALEAKVKDLLTLAKTKDVEILHLRNELRDMRAQLGINEDHSEGDEKSEKETIMAHQPTDVESTLLQLQEQNTAIREELNQLKNENRMLKDRLNALGFSLEQRLDNSEKLFGYQSLSPEITPDNQSDGGGTLTSSVEGSAPGSVEDLLSQDENTLMDHQHSNSMDNLDSECSEVYQPLTSSDDALDAPSSSESEGIPSIERSRKGSSGNASEVSVACLTERIHQMEENQHSTSEELQATLQELADLQQITQELNSENERLGEEKVILMESLCQQSDKLEHFSRQIEYFRSLLDEHHISYVIDEDVKSGRYMELEQRYMDLAENARFEREQLLGVQQHLSNTLKMAEQDNKEAQEMIGALKERSHHMERIIESEQKGKAALAATLEEYKATVASDQIEMNRLKAQLENEKQKVAELYSIHNSGDKSDIQDLLESVRLDKEKAETLASSLQEDLAHTRNDANRLQDAIAKVEDEYRAFQEEAKKQIEDLNMTLEKLRSDLDEKETERSDMKETIFELEDEVEQHRAVKLHDNLIISDLENTVKKLQDQKHDMEREIKTLHRRLREESAEWRQFQADLQTAVVIANDIKSEAQEEIGDLKRRLHEAQEKNEKLT

SEQ ID NO: 65149 - protein, 1117 aa, Homo sapiens; identical to SEQ ID NO: 65146

SEQ ID NO: 65150 - protein, 1078 aa, Homo sapiens
MKKASRSVGSVPKVSAISKTQTAEKIKPENSSSASTGGKLVKPGTAASLSKTKSSDDLLAGMAGGVTVTNGVKGKKSTCPSAAPSASAPAMTTVENKSKISTGTASSTKRSTSTGNKESSSTRERLRERTRLNQSKKLPSAGQGANDMALAKRSRSRTATECDVRMSKSKSDNQISDRAALEAKVKDLLTLAKTKDVEILHLRNELRDMRAQLGINEDHSEGDEKSEKETIMAHQPTDVESTLLQLQEQNTAIREELNQLKNENRMLKDRLNALGFSLEQRLDNSEKLFGYQSLSPEITPDNQSDGGGTLTSSVEGSAPGSVEDLLSQDENTLMDHQHSNSMDNLDSECSEVYQPLTSSDDALDAPSSSESEGIPSIERSRKGSSGNASEVSVACLTERIHQMEENQHSTSEELQATLQELADLQQITQELNSENERLGEEKVILMESLCQQSDKLEHFSRQIEYFRSLLDEHHISYVIDEDVKSGRYMELEQRYMDLAENARFEREQLLGVQQHLSNTLKMAEQDNKEAQEMIGALKERSHHMERIIESEQKGKAALAATLEEYKATVASDQIEMNRLKAQLENEKQKVAELYSIHNSGDKSDIQDLLESVRLDKEKAETLASSLQEDLAHTRNDANRLQDAIAKVEDEYRAFQEEAKKQIEDLNMTLEKLRSDLDEKETERSDMKETIFELEDEVEQHRAVKLHDNLIISDLENTVKKLQDQKHDMEREIKTLHRRLREESAEWRQFQADLQTAVVIANDIKSEAQEEIGDLKRRLHEAQEKNEKLTKELEEIKSRKQEEERGRVYNYMNAVERDLAALRQGMGLSRRSSTSSEPTPTVKTLIKSFDSASQVPNPAAAAIPRTPLSPSPMKTPPAAAVSPMQRHSISGPISTSKPLTALSDKRPNYGEIPVQEHLLRTSSASRPASLPRVPAMESAKTLSVSRRSSEEVKRDISAQEGASPASLMAMGTTSPQLSLSSSPTASVTPTTRSRIREERKDPLSALAREYGGSKRNALLKWCQKKTEGYQRRNFMLAFQAAESVGIKSTLDINEMVRTERPDWQNVMLYVTAIYKYFET

SEQ ID NO: 65151 - protein, 926 aa, Homo sapiens
MTTKDYPSLWGFGTTKTFKIPIEHLDFKYIEKCSDVKHLEKILCVLRSGEEGYYPELTEFCEKHLQALAPESRALRKDKPAATAASFTAEEWEKIDGDIKSWVSEIKKEEDKMHFHETETFPAMKDNLPPVRGSNSCLHVGKEKYSKRPTKKKTPRDYAEWDKFDVEKECLKIDEDYKEKTVIDKSHLSKIETRIDTAGLTEKEKDFLATREKEKGNEAFNSGDYEEAVMYYTRSISALPTVVAYNNRAQAEIKLQNWNSAFQDCEKVLELEPGNVKALLRRATTYKHQNKLREATEDLSKVLDVEPDNDLAKKTLSEVERDLKNSEAASETQTKGKRMVIQEIENSEDEEGKSGRKHEDGGGDKKPAEPAGAARAAQPCVMGNIQKKLTGKAEGGKRPARGAPQRGQTPEAGADKRSPRRASAAAAAGGGATGHPGGGQGAENPAGLKSQGNELFRSGQFAEAAGKYSAAIALLEPAGSEIADDLSILYSNRAACYLKEGNCSGCIQDCNRALELHPFSMKPLLRRAMAYETLEQYGKAYVDYKTVLQIDCGLQLANDSVNRLSRILMELDGPNWREKLSPIPAVPASVPLQAWHPAKEMISKQAGDSSSHRQQGITDEKTFKALKEEGNQCVNDKNYKDALSKYSECLKINNKECAIYTNRALCYLKLCQFEEAKQDCDQALQLADGNVKAFYRRALAHKGLKNYQKSLIDLNKVILLDPSIIEAKMELEEVTRLLNLKDKTAPFNKEKERRKIEIQEVNEGKEEPGRPAGEVSMGCLASEKGGKSSRSPEDPEKLPIAKPNNAYEFGQIINALSTRKDKEACAHLLAITAPKDLPMFLSNKLEGDTFLLLIQSLKNNLIEKDPSLVYQHLLYLSKAERFKMMLTLISKGQKELIEQLFEDLSDTPNNHFTLEDIQALKRQYEL

SEQ ID NO: 65152 - protein, 926 aa, Homo sapiens; identical to SEQ ID NO: 65151

SEQ ID NO: 65153 - protein, 347 aa, Homo sapiens
MAAQRGMPSSAVRVLEEALGMGLTAAGDARDTADAVAAEGAYYLEQVTITEASEDDYEYEEIPDDNFSIPEGEEDLAKAIQMAQEQATDTEILERKTVLPSKHAVPEVIEDFLCNFLIKMGMTRTLDCFQSEWYELIQKGVTELRTVGNVPDVYTQIMLLENENKNLKKDLKHYKQAADKAREDLLKIQKERDFHRMHHKRIVQEKNKLINDLKGLKLHYASYEPTIRVLHEKHHTLLKEKMLTSLERDKVVGQISGLQETLKKLQRGHSYHGPQIKVDHSREKENAPEGPTQKGLREAREQNKCKTKMKGNTKQWTGNSQTWNKTVPLQDTIGRRQENNSAHQHID

SEQ ID NO: 65154 - protein, 631 aa, Homo sapiens
MAAQRGMPSSAVRVLEEALGMGLTAAGDARDTADAVAAEGAYYLEQVTITEASEDDYEYEEIPDDNFSIPEGEEDLAKAIQMAQEQATDTEILERKTVLPSKHAVPEVIEDFLCNFLIKMGMTRTLDCFQSEWYELIQKGVTELRTVGNVPDVYTQIMLLENENKNLKKDLKHYKQAADKAREDLLKIQKERDFHRMHHKRIVQEKNKLINDLKGLKLHYASYEPTIRVLHEKHHTLLKEKMLTSLERDKVVGQISGLQETLKKLQRGHSYHGPQIKVDHSREKENAPEGPTQKGLREAREQNKCKTKMKGNTKDSEFPIDMQPNPNLNVSKESLSPAKFDYKLKNIFRLHELPVSCVSMQPHKDILVSCGEDRLWKVLGLPKCNVLLTGFGHTDWLSDCCFHPSGDKLATSSGDTTVKLWDLCKGDCILTFEGHSRAVWSCTWHSCGNFVASSSLDKTSKIWDVNSERCRCTLYGHTDSVNSIEFFPFSNTLLTSSADKTLSIWDARTGICEQSLYGHMHSINDAIFDPRGHMIASCDACGVTKLWDFRKLLPIVSIDIGPSPGNEVNFDSSGRVLAQASGNGVIHLLDLKSGEIHKLMGHENEAHTVVFSHDGEILFSGGSDGTVRTWS

SEQ ID NO: 65155 - protein, 537 aa, Homo sapiens
MTMNMKRYQMTILASQKVKKIWQKQFRWPKNRLQILKFWYELIQKGVTELRTVGNVPDVYTQIMLLENENKNLKKDLKHYKQAADKAREDLLKIQKERDFHRMHHKRIVQEKNKLINDLKGLKLHYASYEPTIRVLHEKHHTLLKEKMLTSLERDKVVGQISGLQETLKKLQRGHSYHGPQIKVDHSREKENAPEGPTQKGLREAREQNKCKTKMKGNTKDSEFPIDMQPNPNLNVSKESLSPAKFDYKLKNIFRLHELPVSCVSMQPHKDILVSCGEDRLWKVLGLPKCNVLLTGFGHTDWLSDCCFHPSGDKLATSSGDTTVKLWDLCKGDCILTFEGHSRAVWSCTWHSCGNFVASSSLDKTSKIWDVNSERCRCTLYGHTDSVNSIEFFPFSNTLLTSSADKTLSIWDARTGICEQSLYGHMHSINDAIFDPRGHMIASCDACGVTKLWDFRKLLPIVSIDIGPSPGNEVNFDSSGRVLAQASGNGVIHLLDLKSGEIHKLMGHENEAHTVVFSHDGEILFSGGSDGTVRTWS

SEQ ID NO: 65156 - protein, 251 aa, Homo sapiens
MGVGTKARASHWRRLLSLGATPEEPLLDFKIPDDNFSIPEGEEDLAKAIQMAQEQATDTEILERKTVLPSKHAVPEVIEDFLCNFLIKMGMTRTLDCFQSEWYELIQKGVTELRTVGNVPDVYTQIMLLENENKNLKKDLKHYKQAADKAREDLLKIQKERDFHRMHHKRIVQEKNKLINDLKGLKLHYASYEPTIRVLHEKHHTLLKEKMLTSLERDKVVGQISGLQETLKKLQRGHSYHGPQIKGKCKM

SEQ ID NO: 65157 - protein, 183 aa, Homo sapiens
MAAQRGMPSSAVRVLEEALGMGLTAAGDARDTADAVAAEGAYYLEQVTITEASEDDYEYEEIPDDNFSIPEGEEDLAKAIQMAQEQATDTEILERKTVLPSKHAVPEVIEDFLCNFLIKMGMTRTLDCFQSEWYELIQKGVTELRTVGNVPDVYTQIMLLENENKNLKKDLKHYKQAAEYVIF

SEQ ID NO: 65158 - protein, 255 aa, Homo sapiens
DSEFPIDMQPNPNLNVSKESLSPAKFDYKLKNIFRLHELPVSCVSMQPHKDILVSCGEDRLWKVLGLPKCNVLLTGFGHTDWLSDCCFHPSERCRCTLYGHTDSVNSIEFFPFSNTLLTSSADKTLSIWDARTGICEQSLYGHMHSINDAIFDPRGHMIASCDACGVTKLWDFRKLLPIVSIDIGPSPGNEVNFDSSGRVLAQASGNGVIHLLDLKSGEIHKLMGHENEAHTVVFSHDGEILFSGGSDGTVRTWS

SEQ ID NO: 65159 - protein, 437 aa, Homo sapiens
MRRSSRPGSASSSRKHTPNFFSENSSMSITSEDSKGLRSAEPGPGEPEGRRARGPSCGEPALSAGVPGGTTWAGSSQQKPAPRSHNWQTACGAATVRGGASEPTGSPVVSEEPLDLLPTLDLRQEMPPPRVFKSFLSLLFQGLSVLLSLAGDVLVSMYREVCSIRFLFTAVSLLSLFLSAFWLGLLYLVSPLENEPKEMLTLSEYHERVRSQGQQLQQLQAELDKLHKEVSTVRAANSERVAKLVFQRLNEDFVRKPDYALSSVGASIDLQKTSHDYADRNTAYFWNRFSFWNYARPPTVILEPHVFPGNCWAFEGDQGQVVIQLPGRVQLSDITLQHPPPSVEHTGGANSAPRDFAVFGLQVYDETEVSLGKFTFDVEKSEIQTFHLQNDPPAAFPKVKIQILSNWGHPRFTCLYRVRAHGVRTSEGAEGSAQGPH

SEQ ID NO: 65160 - protein, 458 aa, Homo sapiens
MSQRQVLQVFEQYQKARTQFVQMVAELATRPQNIETLQNAGVMSLLRTLLLDVVPTIQQTAALALGRLANYNDDLAEAVVKCDILPQLVYSLAEQNRFYKKAAAFVLRAVGKHSPQLAQAIVDCGALDTLVICLEDFDPGVKEAAAWALRYIARHNAELSQAVVDAGAVPLLVLCIQEPEIALKRIAASALSDIAKHSPELAQTVVDAGAVAHLAQMILNPDAKLKHQILSALSQVSKHSVDLAEMVVEAEIFPVVLTCLKDKDEYVKKNASTLIREIAKHTPELSQLVVNAGGVAAVIDCIGSCKGNTRLPGIMMLGYVAAHSENLAMAVIISKGVPQLSVCLSEEPEDHIKAAAAWALGQIGRHTPEHARAVAVTNTLPVLLSLYMSTESSEDLQVKSKKAIKNILQKCTYLPALEPFLYDAPPNILKHVVGQFSKVLFPWIFRYTSAEGGQLSTT

SEQ ID NO: 65161 - protein, 270 aa, Homo sapiens
MSQRQVLQVFEQYQKARTQFVQMVAELATRPQNIETLQNAGVMSLLRTLLLDVVPTIQQTAALALGRLANYNDDLAEAVVKCDILPQLVYSLAEQNGVPQLSVCLSEEPEDHIKAAAAWALGQIGRHTPEHARAVAVTNTLPVLLSLYMSTESSEDLQVKSKKAIKNILQKCTYLPALEPFLYDAPPNILKHVVGQFSKVLPHDSKARRLFVTSGGLKKVQEIKAEPGSLLQEYINSINSCYPEEIVRYYSPGYSDTLLQRVDSYQPLNN

SEQ ID NO: 65162 - protein, 585 aa, Homo sapiens
MSQRQVLQVFEQYQKARTQFVQMVAELATRPQNIETLQNAGEPGARTPVAPRALSPRRLRPAALPVELLGSRSVGTGVRKSIHSFQRVFGGQAERVKLPDGCGRCALSLFPSSLHTGVMSLLRTLLLDVVPTIQQTAALALGRLANYNDDLAEAVVKCDILPQLVYSLAEQNRFYKKAAAFVLRAVGKHSPQLAQAIVDCGALDTLVICLEDFDPGVKEAAAWALRYIARHNAELSQAVVDAGAVPLLVLCIQEPEIALKRIAASALSDIAKHSPELAQTVVDAGAVAHLAQMILNPDAKLKHQILSALSQVSKHSVDLAEMVVEAEIFPVVLTCLKDKDEYVKKNASTLIREIAKHTPELSQLVVNAGGVAAVIDCIGSCKGNTRLPGIMMLGYVAAHSENLAMAVIISKGVPQLSVCLSEEPEDHIKAAAAWALGQIGRHTPEHARAVAVTNTLPVLLSLYMSTESSEDLQVKSKKAIKNILQKCTYLPALEPFLYDAPPNILKHVVGQFSKVLPHDSKARRLFVTSGGLKKVQEIKAEPGSLLQEYINSINSCYPEEIVRYYSPGYSDTLLQRVDSYQPLNN

SEQ ID NO: 65163 - protein, 509 aa, Homo sapiens
MSQRQVLQVFEQYQKARTQFVQMVAELATRPQNIETLQNAGVMSLLRTLLLDVVPTIQQTAALALGRLANYNDDLAEAVVKCDILPQLVYSLAEQNRFYKKAAAFVLRAVGKHSPQLAQAIVDCGALDTLVICLEDFDPGVKEAAAWALRYIARHNAELSQAVVDAGAVPLLVLCIQEPEIALKRIAASALSDIAKHSPELAQTVVDAGAVAHLAQMILNPDAKLKHQILSALSQVSKHSVDLAEMVVEAEIFPVVLTCLKDKDEYVKKNASTLIREIAKHTPELSQLVVNAGGVAAVIDCIGSCKGNTRLPGIMMLGYVAAHSENLAMAVIISKGVPQLSVCLSEEPEDHIKAAAAWALGQIGRHTPEHARAVAVTNTLPVLLSLYMSTESSEDLQVKSKKAIKNILQKCTYLPALEPFLYDAPPNILKHVVGQFSKVLPHDSKARRLFVTSGGLKKVQEIKAEPGSLLQEYINSINSCYPEEIVRYYSPGYSDTLLQRVDSYQPLNN

SEQ ID NO: 65164 - protein, 246 aa, Homo sapiens
MSQRQVLQVFEQYQKARTQFVQMVAELATRPQNIETLQNAGEPGARTPVAPRALSPRRLRPAALPVELLGSRSVGTGVRKSIHSFQRVFGGQAERVKLPDGCGRCALSLFPSSLHTGVMSLLRTLLLDVVPTIQQTAALALGRLANYNDDLAEAVVKCDILPQLVYSLAEQNRFYKKAAAFVLRAVGKHSPQLAQAIVDCGALDTLVICLEDFDPGVKEAAAWALRYIARHNAELSQAVVDAGAVP

SEQ ID NO: 65165 - protein, 191 aa, Homo sapiens
MSQRQVLQVFEQYQKARTQFVQMVAELATRPQNIETLQNAGVMSLLRTLLLDVVPTIQQTAALALGRLANYNDDLAEAVVKCDILPQLVYSLAEQNGVPQLSVCLSEEPEDHIKAAAAWALGQIGRHTPEHARAVAVTNTLPVLLSLYMSTESSEDLQVKSKKAIKNILQKCTYLPALEPFLYDAPPNILK

SEQ ID NO: 65166 - protein, 484 aa, Homo sapiens
MHSLTMDLWIPNGQAGVMSLLRTLLLDVVPTIQQTAALALGRLANYNDDLAEAVVKCDILPQLVYSLAEQNRFYKKAAAFVLRAVGKHSPQLAQAIVDCGALDTLVICLEDFDPGVKEAAAWALRYIARHNAELSQAVVDAGAVPLLVLCIQEPEIALKRIAASALSDIAKHSPELAQTVVDAGAVAHLAQMILNPDAKLKHQILSALSQVSKHSVDLAEMVVEAEIFPVVLTCLKDKDEYVKKNASTLIREIAKHTPELSQLVVNAGGVAAVIDCIGSCKGNTRLPGIMMLGYVAAHSENLAMAVIISKGVPQLSVCLSEEPEDHIKAAAAWALGQIGRHTPEHARAVAVTNTLPVLLSLYMSTESSEDLQVKSKKAIKNILQKCTYLPALEPFLYDAPPNILKHVVGQFSKVLPHDSKARRLFVTSGGLKKVQEIKAEPGSLLQEYINSINSCYPEEIVRYYSPGYSDTLLQRVDSYQPLNN

SEQ ID NO: 65167 - protein, 501 aa, Homo sapiens
METNESTEGSRSRSRSLDIQPSSEGLGPTSEPFPSSDDSPRSALAAATAAAAAAASAAAATAAFTTAKAAALSTKTPAPCSEFMEPSSDPSLLGEPCAGPGFTHNIAHGSLGFEPVYVSCIAQDTCTTTDHSSNPGPVPGSSSGPVLGSSSGAGHGSGSGSGPGCGSVPGSGSGPGPGSGPGSGPGHGSGSHPGPASGPGPDTGPDSELSPCIPPGFRNLVADRVPNYTSWSQHCPWEPQKQPPWEFLQVLEPGARGLWKPPDIKGKLMVCYETLPRGQCLLYNWEEERATNHLDQVPSMQDGSESFFFRHGHRGLLTMQLKSPMPSSTTQKDSYQPPGNVYWPLRGKREAMLEMLLQHQICKEVQAEQEPTRKLFEVESVTHHDYRMELAQAGTPAPTKPHDYRQEQPETFWIQRAPQLPTWWPLPTQVPAAEDYLTWKEWGFTGVQEVLSALLRATPGEYSVNICGMNEHPVCSRTWTNRLCHQEMGSKKTVTQEDRGW

SEQ ID NO: 65168 - protein, 485 aa, Homo sapiens
METNESTEGSRSRSRSLDIQPSSEGLGPTSEPFPSSDDSPRSALAAATAAAAAAASAAAATAAFTTAKAAALSTKTPAPCSEFMEPSSDPSLLGEPCAGPGFTHNIAHGSLGFEPVYVSCIAQDTCTTTDHSSNPGPVPGSSSGPVLGSSSGAGHGSGSGSGPGCGSVPGSGSGPGPGSGPGSGPGHGSGSHPGPASGPGPDTGPDSELSPCIPPGFRNLVADRVPNYTSWSQHCPWEPQKQPPWEFLQVLEPGARGLWKPPDIKGKLMVCYETLPRGQCLLYNWEEERATNHLDQVPSMQDGSESFFFRHGHRGLLTMQLKSPMPSSTTQKDSYQPPGNVYWPLRGKREAMLEMLLQHQICKEVQAEQEPTRKLFEVESVTHHDYRMELAQAGTPAPTKPHDYRQEQPETFWIQRAPQLPGVSNIRTLDTPFRKNCSFSTPVPLSLGKLLPYEPENYPYQLGEISSLPCPGGRLGGGGGRMTPF

SEQ ID NO: 65169 - protein, 426 aa, Homo sapiens
METNESTEGSRSRSRSLDIQPSSEGLGPTSEPFPSSDDSPRSALAAATAAAAAAASAAAATAAFTTAKAAALSTKTPAPCSEFMEPSSDPSLLGEPCAGPGFTHNIAHGSLGFEPVYVSCIAQDTCTTTDHSSNPGPVPGSSSGPVLGSSSGAGHGSGSGSGPGCGSVPGSGSGPGPGSGPGSGPGHGSGSHPGPASGPGPDTGPDSELSPCIPPGFRNLVADRVPNYTSWSQHCPWEPQKQPPWEFLQVLEPGARGLWKPPDIKGKLMVCYETLPRGQCLLYNWEEERATNHLDQVPSMQDGSESFFFRHGHRGLLTMQLKSPMPSSTTQKDSYQPPGNVYWPLRGKREAMLEMLLQHQICKEVQAEQEPTRKLFEVESVTHHDYRMELAQAGTPAPTKPHDYRQEQPETFWIQRAPQLPVCEGD

SEQ ID NO: 65170 - protein, 1321 aa, Homo sapiens
MELEDGVVYQEEPGGSGAVMSERVSGLAGSIYREFERLIGRYDEEVVKELMPLVVAVLENLDSVFAQDQEHQVELELLRDDNEQLITQYEREKALRKHAEEKFIEFEDSQEQEKKDLQTRVESLESQTRQLELKAKNYADQISRLEEREAELKKEYNALHQRHTEMIHNYMEHLERTKLHQLSGSDQLESTAHSRIRKERPISLGIFPLPAGDGLLTPDAQKGGETPGSEQWKFQELSQPRSHTSLKVSNSPEPQKAVEQEDELSDVSQGGSKATTPASTANSDVATIPTDTPLKEENEGFVKVTDAPNKSEISKHIEVQVAQETRNVSTGSAENEEKSEVQAIIESTPELDMDKDLSGYKGSSTPTKGIENKAFDRNTESLFEELSSAGSGLIGDVDEGADLLGMGREVENLILENTQLLETKNALNIVKNDLIAKVDELTCEKDVLQGELEAVKQAKLKLEEKNRELEEELRKARAEAEDARQKAKDDDDSDIPTAQRKRFTRVEMARVLMERNQYKERLMELQEAVRWTEMIRASRENPAMQEKKRSSIWQFFSRLFSSSSNTTKKPEPPVNLKYNAPTSHVTPSVKKRSSTLSQLPGDKSKAFDFLSEETEASLASRREQKREQYRQVKAHVQKEDGRVQAFGWSLPQKYKQVTNGQGENKMKNLPVPVYLRPLDEKDTSMKLWCAVGVNLSGGKTRDGGSVVGASVFYKDVAGLDTEGSKQRSASQSSLDKLDQELKEQQKELKNQEELSSLVWICTSTHSATKVLIIDAVQPGNILDSFTVCNSHVLCIASVPGARETDYPAGEDLSESGQVDKASLCGSMTSNSSAETDSLLGGITVVGCSAEGVTGAATSPSTNGASPVMDKPPEMEAENSEVDENVPTAEEATEATEGNAGSAEDTVDISQTGVYTEHVFTDPLGVQIPEDLSPVYQSSNDSDAYKDQISVLPNEQDLVREEAQKMSSLLPTMWLGAQNGCLYVHSSVAQWRKCLHSIKLKDSILSIVHVKGIVLVALADGTLAIFHRGVDGQWDLSNYHLLDLGRPHHSIRCMTVVHDKVWCGYRNKIYVVQPKAMKIEKSFDAHPRKESQVRQLAWVGDGVWVSIRLDSTLRLYHAHTYQHLQDVDIEPYVSKMLGTGKLGFSFVRITALMVSCNRLWVGTGNGVIISIPLTETNKTSGVPGNRPGSVIRVYGDENSDKVTPGTFIPYCSMAHAQLCFHGHRDAVKFFVAVPGQVISPQSSSSGTDLTGDKAGPSAQEPGSQTPLKSMLVISGGEGYIDFRMGDEGGESELLGEDLPLEPSVTKAERSHLIVWQVMYGNE

SEQ ID NO: 65171 - protein, 1307 aa, Homo sapiens
MELEDGVVYQEEPGGSGAVMSERVSGLAGSIYREFERLIGRYDEEVVKELMPLVVAVLENLDSVFAQDQEHQVELELLRDDNEQLITQYEREKALRKHAEEKFIEFEDSQEQEKKDLQTRVESLESQTRQLELKAKNYADQISRLEEREAELKKEYNALHQRHTEMIHNYMEHLERTKLHQLSGSDQLESTAHSRIRKERPISLGIFPLPAGDGLLTPDAQKGGETPGSEQWKFQELSQPRSHTSLKDELSDVSQGGSKATTPASTANSDVATIPTDTPLKEENEGFVKVTDAPNKSEISKHIEVQVAQETRNVSTGSAENEEKSEVQAIIESTPELDMDKDLSGYKGSSTPTKGIENKAFDRNTESLFEELSSAGSGLIGDVDEGADLLGMGREVENLILENTQLLETKNALNIVKNDLIAKVDELTCEKDVLQGELEAVKQAKLKLEEKNRELEEELRKARAEAEDARQKAKDDDDSDIPTAQRKRFTRVEMARVLMERNQYKERLMELQEAVRWTEMIRASRENPAMQEKKRSSIWQFFSRLFSSSSNTTKKPEPPVNLKYNAPTSHVTPSVKKRSSTLSQLPGDKSKAFDFLSEETEASLASRREQKREQYRQVKAHVQKEDGRVQAFGWSLPQKYKQVTNGQGENKMKNLPVPVYLRPLDEKDTSMKLWCAVGVNLSGGKTRDGGSVVGASVFYKDVAGLDTEGSKQRSASQSSLDKLDQELKEQQKELKNQEELSSLVWICTSTHSATKVLIIDAVQPGNILDSFTVCNSHVLCIASVPGARETDYPAGEDLSESGQVDKASLCGSMTSNSSAETDSLLGGITVVGCSAEGVTGAATSPSTNGASPVMDKPPEMEAENSEVDENVPTAEEATEATEGNAGSAEDTVDISQTGVYTEHVFTDPLGVQIPEDLSPVYQSSNDSDAYKDQISVLPNEQDLVREEAQKMSSLLPTMWLGAQNGCLYVHSSVAQWRKCLHSIKLKDSILSIVHVKGIVLVALADGTLAIFHRGVDGQWDLSNYHLLDLGRPHHSIRCMTVVHDKVWCGYRNKIYVVQPKAMKIEKSFDAHPRKESQVRQLAWVGDGVWVSIRLDSTLRLYHAHTYQHLQDVDIEPYVSKMLGTGKLGFSFVRITALMVSCNRLWVGTGNGVIISIPLTETNKTSGVPGNRPGSVIRVYGDENSDKVTPGTFIPYCSMAHAQLCFHGHRDAVKFFVAVPGQVISPQSSSSGTDLTGDKAGPSAQEPGSQTPLKSMLVISGGEGYIDFRMGDEGGESELLGEDLPLEPSVTKAERSHLIVWQVMYGNE

SEQ ID NO: 65172 - protein, 635 aa, Homo sapiens
SLKDELSDVSQGGSKATTPASTANSDVATIPTDTPLKEENEGFVKVTDAPNKSEISKHIEVQVAQETRNVSTGSAENEEKSEVQAIIESTPELDMDKDLSGYKGSSTPTKGIENKAFDRNTESLFEKRSSTLSQLPGDKSKAFDFLSEETEASLASRREQKREQYRQVKAHVQKEDGRVQAFGWSLPQKYKQVTNGQGENKMKNLPVPVYLRPLDEKDTSMKKLWCAVGVNLSGGKTRDGGSVVGASVFYKDVAGLDTEGSKQRSASQSSLDKLDQELKEQQKELKNQEELSSLVWICTSTHSATKVLIIDAVQPGNILDSFTVCNSHVLCIASVPGARETDYPAGEDLSESGQVDKASLCGSMTSNSSAETDSLLGGITVVGCSAEGVTGAATSPSTNGASPVMDKPPEMEAENSEVDENVPTAEEATEATEGNAGSAEDTVDISQTGVYTEHVFTDPLGVQIPEDLSPVYQSSNDSDAYKDQISVLPNEQDLVREEAQKMSSLLPTMWLGAQNGCLYVHSSVAQWRKCLHSIKLKDSILSIVHVKGIVLVALADGTLAIFHRGVDGQWDLSNYHLLDLGRPHHSIRCMTVVHDKVWCGYRNKIYVLHSSLGDGARPCLKTDKQAKNRLKSGFH

SEQ ID NO: 65173 - protein, 1068 aa, Homo sapiens
SLKDELSDVSQGGSKATTPASTANSDVATIPTDTPLKEENEGFVKVTDAPNKSEISKHIEVQVAQETRNVSTGSAENEEKSEVQAIIESTPELDMDKDLSGYKGSSTPTKGIENKAFDRNTESLFEELSSAGSGLIGDVDEGADLLGMGREVENLILENTQLLETKNALNIVKNDLIAKVDELTCEKDVLQGELEAVKQAKLKLEEKNRELEEELRKARAEAEDARQKAKDDDDSDIPTAQRKRFTRVEMARVLMERNQYKERLMELQEAVRWTEMIRASRENPAMQEKKRSSIWQFVPTRFSRLFSSSSNTTKKPEPPVNLKYNAPTSHVTPSVKKRSSTLSQLPGDKSKAFDFLSEETEASLASRREQKREQYRQVKAHVQKEDGRVQAFGWSLPQKYKQVTNGQGENKMKNLPVPVYLRPLDEKDTSMKKLWCAVGVNLSGGKTRDGGSVVGASVFYKDVAGLDTEGSKQRSASQSSLDKLDQELKEQQKELKNQEELSSLVWICTSTHSATKVLIIDAVQPGNILDSFTVCNSHVLCIASVPGARETDYPAGEDLSESGQVDKASLCGSMTSNSSAETDSLLGGITVVGCSAEGVTGAATSPSTNGASPVMDKPPEMEAENSEVDENVPTAEEATEATEGNAGSAEDTVDISQTGVYTEHVFTDPLGVQIPEDLSPVYQSSNDSDAYKDQISVLPNEQDLVREEAQKMSSLLPTMWLGAQNGCLYVHSSVAQWRKCLHSIKLKDSILSIVHVKGIVLVALADGTLAIFHRGVDGQWDLSNYHLLDLGRPHHSIRCMTVVHDKVWCGYRNKIYVVQPKAMKIEKSFDAHPRKESQVRQLAWVGDGVWVSIRLDSTLRLYHAHTYQHLQDVDIEPYVSKMLGTGKLGFSFVRITALMVSCNRLWVGTGNGVIISIPLTETNKTSGVPGNRPGSVIRVYGDENSDKVTPGTFIPYCSMAHAQLCFHGHRDAVKFFVAVPGQVISPQSSSSGTDLTGDKAGPSAQEPGSQTPLKSMLVISGGEGYIDFRMGDEGGESELLGEDLPLEPSVTKAERSHLIVWQVMYGNE

SEQ ID NO: 65174 - protein, 1078 aa, Homo sapiens
SVKVSNSPEPQKAVEQEDELSDVSQGGSKATTPASTANSDVATIPTDTPLKEENEGFVKVTDAPNKSEISKHIEVQVAQETRNVSTGSAENEEKSEVQAIIESTPELDMDKDLSGYKGSSTPTKGIENKAFDRNTESLFEELSSAGSGLIGDVDEGADLLGMGREVENLILENTQLLETKNALNIVKNDLIAKVDELTCEKDVLQGELEAVKQAKLKLEEKNRELEEELRKARAEAEDARQKAKDDDDSDIPTAQRKRFTRVEMARVLMERNQYKERLMELQEAVRWTEMIRASRENPAMQEKKRSSIWQFFSRLFSSSSNTTKKPEPPVNLKYNAPTSHVTPSVKKRSSTLSQLPGDKSKAFDFLSEETEASLASRREQKREQYRQVKAHVQKEDGRVQAFGWSLPQKYKQVTNGQGENKMKNLPVPVYLRPLDEKDTSMKKLWCAVGVNLSGGKTRDGGSVVGASVFYKDVAGLDTEGSKQRSASQSSLDKLDQELKEQQKELKNQEELSSLVWICTSTHSATKVLIIDAVQPGNILDSFTVCNSHVLCIASVPGARETDYPAGEDLSESGQVDKASLCGSMTSNSSAETDSLLGGITVVGCSAEGVTGAATSPSTNGASPVMDKPPEMEAENSEVDENVPTAEEATEATEGNAGSAEDTVDISQTGVYTEHVFTDPLGVQIPEDLSPVYQSSNDSDAYKDQISVLPNEQDLVREEAQKMSSLLPTMWLGAQNGCLYVHSSVAQWRKCLHSIKLKDSILSIVHVKGIVLVALADGTLAIFHRGVDGQWDLSNYHLLDLGRPHHSIRCMTVVHDKVWCGYRNKIYVVQPKAMKIEKSFDAHPRKESQVRQLAWVGDGVWVSIRLDSTLRLYHAHTYQHLQDVDIEPYVSKMLGTGKLGFSFVRITALMVSCNRLWVGTGNGVIISIPLTETNKTSGVPGNRPGSVIRVYGDENSDKVTPGTFIPYCSMAHAQLCFHGHRDAVKFFVAVPGQVISPQSSSSGTDLTGDKAGPSAQEPGSQTPLKSMLVISGGEGYIDFRMGDEGGESELLGEDLPLEPSVTKAERSHLIVWQVMYGNE

SEQ ID NO: 65175 - protein, 1311 aa, Homo sapiens
MELEDGVVYQEEPGGSGAVMSERVSGLAGSIYREFERLIGRYDEEVVKELMPLVVAVLENLDSVFAQDQEHQVELELLRDDNEQLITQYEREKALRKHAEEKFIEFEDSQEQEKKDLQTRVESLESQTRQLELKAKNYADQISRLEEREAELKKEYNALHQRHTEMIHNYMEHLERTKLHQLSGSDQLESTAHSRIRKERPISLGIFPLPAGDGLLTPDAQKGGETPGSEQWKFQELSQPRSHTSLKDELSDVSQGGSKATTPASTANSDVATIPTDTPLKEENEGFVKVTDAPNKSEISKHIEVQVAQETRNVSTGSAENEEKSEVQAIIESTPELDMDKDLSGYKGSSTPTKGIENKAFDRNTESLFEELSSAGSGLIGDVDEGADLLGMGREVENLILENTQLLETKNALNIVKNDLIAKVDELTCEKDVLQGELEAVKQAKLKLEEKNRELEEELRKARAEAEDARQKAKDDDDSDIPTAQRKRFTRVEMARVLMERNQYKERLMELQEAVRWTEMIRASRENPAMQEKKRSSIWQFVPTRFSRLFSSSSNTTKKPEPPVNLKYNAPTSHVTPSVKKRSSTLSQLPGDKSKAFDFLSEETEASLASRREQKREQYRQVKAHVQKEDGRVQAFGWSLPQKYKQVTNGQGENKMKNLPVPVYLRPLDEKDTSMKLWCAVGVNLSGGKTRDGGSVVGASVFYKDVAGLDTEGSKQRSASQSSLDKLDQELKEQQKELKNQEELSSLVWICTSTHSATKVLIIDAVQPGNILDSFTVCNSHVLCIASVPGARETDYPAGEDLSESGQVDKASLCGSMTSNSSAETDSLLGGITVVGCSAEGVTGAATSPSTNGASPVMDKPPEMEAENSEVDENVPTAEEATEATEGNAGSAEDTVDISQTGVYTEHVFTDPLGVQIPEDLSPVYQSSNDSDAYKDQISVLPNEQDLVREEAQKMSSLLPTMWLGAQNGCLYVHSSVAQWRKCLHSIKLKDSILSIVHVKGIVLVALADGTLAIFHRGVDGQWDLSNYHLLDLGRPHHSIRCMTVVHDKVWCGYRNKIYVVQPKAMKIEKSFDAHPRKESQVRQLAWVGDGVWVSIRLDSTLRLYHAHTYQHLQDVDIEPYVSKMLGTGKLGFSFVRITALMVSCNRLWVGTGNGVIISIPLTETNKTSGVPGNRPGSVIRVYGDENSDKVTPGTFIPYCSMAHAQLCFHGHRDAVKFFVAVPGQVISPQSSSSGTDLTGDKAGPSAQEPGSQTPLKSMLVISGGEGYIDFRMGDEGGESELLGEDLPLEPSVTKAERSHLIVWQVMYGNE

SEQ ID NO: 65176 - protein, 1177 aa, Homo sapiens
MSPGCMLLFVFGFVGGAVVINSAILVSLSVLLLVHFSISTGVPALTQNLPRILRKERPISLGIFPLPAGDGLLTPDAQKGGETPGSEQWKFQELSQPRSHTSLKDELSDVSQGGSKATTPASTANSDVATIPTDTPLKEENEGFVKVTDAPNKSEISKHIEVQVAQETRNVSTGSAENEEKSEVQAIIESTPELDMDKDLSGYKGSSTPTKGIENKAFDRNTESLFEELSSAGSGLIGDVDEGADLLGMGREVENLILENTQLLETKNALNIVKNDLIAKVDELTCEKDVLQGELEAVKQAKLKLEEKNRELEEELRKARAEAEDARQKAKDDDDSDIPTAQRKRFTRVEMARVLMERNQYKERLMELQEAVRWTEMIRASRENPAMQEKKRSSIWQFFSRLFSSSSNTTKKPEPPVNLKYNAPTSHVTPSVKKRSSTLSQLPGDKSKAFDFLSEETEASLASRREQKREQYRQVKAHVQKEDGRVQAFGWSLPQKYKQVTNGQGENKMKNLPVPVYLRPLDEKDTSMKLWCAVGVNLSGGKTRDGGSVVGASVFYKDVAGLDTEGSKQRSASQSSLDKLDQELKEQQKELKNQEELSSLVWICTSTHSATKVLIIDAVQPGNILDSFTVCNSHVLCIASVPGARETDYPAGEDLSESGQVDKASLCGSMTSNSSAETDSLLGGITVVGCSAEGVTGAATSPSTNGASPVMDKPPEMEAENSEVDENVPTAEEATEATEGNAGSAEDTVDISQTGVYTEHVFTDPLGVQIPEDLSPVYQSSNDSDAYKDQISVLPNEQDLVREEAQKMSSLLPTMWLGAQNGCLYVHSSVAQWRKCLHSIKLKDSILSIVHVKGIVLVALADGTLAIFHRGVDGQWDLSNYHLLDLGRPHHSIRCMTVVHDKVWCGYRNKIYVVQPKAMKIEKSFDAHPRKESQVRQLAWVGDGVWVSIRLDSTLRLYHAHTYQHLQDVDIEPYVSKMLGTGKLGFSFVRITALMVSCNRLWVGTGNGVIISIPLTETVILHQGRLLGLRANKTSGVPGNRPGSVIRVYGDENSDKVTPGTFIPYCSMAHAQLCFHGHRDAVKFFVAVPGQVISPQSSSSGTDLTGDKAGPSAQEPGSQTPLKSMLVISGGEGYIDFRMGDEGGESELLGEDLPLEPSVTKAERSHLIVWQVMYGNE

SEQ ID NO: 65177 - protein, 919 aa, Homo sapiens
MVMRWGERNDVIAWELLQDGVENALNIVKNDLIAKVDELTCEKDVLQGELEAVKQAKLKLEEKNRELEEELRKARAEAEDARQKAKDDDDSDIPTAQRKRFTRVEMARVLMERNQYKERLMELQEAVRWTEMIRASRENPAMQEKKRSSIWQFFSRLFSSSSNTTKKPEPPVNLKYNAPTSHVTPSVKKRSSTLSQLPGDKSKAFDFLSEETEASLASRREQKREQYRQVKAHVQKEDGRVQAFGWSLPQKYKQVTNGQGENKMKNLPVPVYLRPLDEKDTSMKLWCAVGVNLSGGKTRDGGSVVGASVFYKDVAGLDTEGSKQRSASQSSLDKLDQELKEQQKELKNQEELSSLVWICTSTHSATKVLIIDAVQPGNILDSFTVCNSHVLCIASVPGARETDYPAGEDLSESGQVDKASLCGSMTSNSSAETDSLLGGITVVGCSAEGVTGAATSPSTNGASPVMDKPPEMEAENSEVDENVPTAEEATEATEGNAGSAEDTVDISQTGVYTEHVFTDPLGVQIPEDLSPVYQSSNDSDAYKDQISVLPNEQDLVREEAQKMSSLLPTMWLGAQNGCLYVHSSVAQWRKCLHSIKLKDSILSIVHVKGIVLVALADGTLAIFHRGVDGQWDLSNYHLLDLGRPHHSIRCMTVVHDKVWCGYRNKIYVVQPKAMKIEKSFDAHPRKESQVRQLAWVGDGVWVSIRLDSTLRLYHAHTYQHLQDVDIEPYVSKMLGTGKLGFSFVRITALMVSCNRLWVGTGNGVIISIPLTETNKTSGVPGNRPGSVIRVYGDENSDKVTPGTFIPYCSMAHAQLCFHGHRDAVKFFVAVPGQVISPQSSSSGTDLTGDKAGPSAQEPGSQTPLKSMLVISGGEGYIDFRMGDEGGESELLGEDLPLEPSVTKAERSHLIVWQVMYGNE

SEQ ID NO: 65178 - protein, 274 aa, Homo sapiens
MELEDGVVYQEEPGGSGAVMSERVSGLAGSIYREFERLIGRYDEEVVKELMPLVVAVLENLDSVFAQDQEHQVELELLRDDNEQLITQYEREKALRKHAEEKFIEFEDSQEQEKKDLQTRVESLESQTRQLELKAKNYADQSAMSPGCMLLFVFGFVGGAVVINSAILVSLSVLLLVHFSISTGVPALTQNLPRILRKERPISLGIFPLPAGDGLLTPDAQKGGETPGSEQWKFQELSQPRSHTSLKVSNSPEPQKAVEQEVRMVLLNILQKVY

SEQ ID NO: 65179 - protein, 350 aa, Homo sapiens
MKPLVLLVALLLWPSSVPAYPSITVTPDEEQNLNHYIQVLENLVRSVPSGEPGREKKSNSPKHVYSIASKGSKFKELVTHGDASTENDVLTNPISEETTTFPTGGFTPEIGKKKHTESTPFWSIKPNNVSIVLHAEEPYIENEEPEPEPEPAAKQTEAPRMLPVVTESSTSPYVTSYKSPVTTLDKSTGIGISTESEDVPQLSGETAIEKPEEFGKHPESWNNDDILKKILDINSQVQQALLSDTSNPAYREDIEASKDHLKRSLALAAAAEHKLKTMYKSQLLPVGRTSNKIDDIETVINMLCNSRSKLYEYLDIKCVPPEMREKAATVFNTLKNMCRSRRVTALLKVY

SEQ ID NO: 65180 - protein, 236 aa, Homo sapiens
MASSVDEEALHQLYLWVDNIPLSRPKRNLSRDFSDGVLVAEVIKFYFPKMVEMHNYVPANSLQQKLSNWGHLNRKVLKRLNFSVPDDVMRKIAQCAPGVVELVLIPLRQRLEERQRRRKQGAGSLQELAPQDGSGYMDVGVSQKARGEGVPDPQGGGQLSWDRPPAPRPPAYNRALQGDPSFVLQIAEKEQELLASQETVQVLQMKVRRLEHLLQLKNVRIEDLSRRLQQAERKQR

SEQ ID NO: 65181 - protein, 116 aa, Homo sapiens
MCDQTKHSKCCPAKGNQCCPPQQNQCCQSKGNQCCPPKQNQCCQPKGSQCCPPKHNHCCQPKPPCCIQARCCGLETKPEVSPLNMESEPNSPQTQDKGCQTQQQPHSPQNESRPSK

SEQ ID NO: 65182 - protein, 97 aa, Homo sapiens; identical to SEQ ID NO: 65024

SEQ ID NO: 65183 - protein, 672 aa, Homo sapiens
MRSIRSFANDDRHVMVKHSTIYPSPEELEAVQNMVSTVECALKHVSDWLDETNKGTKTEGETEVKKDEAGENYSKDQGGRTLCGVMRIGLVAKGLLIKDDMDLELVLMCKDKPTETLLNTVKDNLPIQIQKLTEEKYQVEQCVNEASIIIRNTKEPTLTLKVILTSPLIRDELEKKDGENVSMKDPPDLLDRQKCLNALASLRHAKWFQARANGLKSCVIVLRILRDLCNRVPTWAPLKGWPLELICEKSIGTCNRPLGAGEALRRVMECLASGILLPGGPGLHDPCERDPTDALSYMTIQQKEDITHSAQHALRLSAFGQIYKVLEMDPLPSSKPFQKYSWSVTDKEGAGSSALKRPFEDGLGDDKDPNKKMKRNLRKILDSKAIDLMNALMRLNQIRPGLQYKLLSQSGPVHAPVFTMSVDVDGTTYEASGPSKKTAKLHVAVKVLQAMGYPTGFDADIECMSSDEKSDNESKNETVSSNSSNNTGNSTTETSSTLEVRTQGPILTASGKNPVMELNEKRRGLKYELISETGGSHDKRFVMEVEVDGQKFRGAGPNKKVAKASAALAALEKLFSGPNAANNKKKKIIPQAKGVVNTAVSAAVQAVRGRGRGTLTRGAFVGATAAPGYIAPGYGTPYGYSTAAPAYGLPKRMVLLPVMKFPTYPVPHYSFF

SEQ ID NO: 65184 - protein, 658 aa, Homo sapiens
MVKHSTIYPSPEELEAVQNMVSTVECALKHVSDWLDETNKGTKTEGETEVKKDEAGENYSKDQGGRTLCGVMRIGLVAKGLLIKDDMDLELVLMCKDKPTETLLNTVKDNLPIQIQKLTEEKYQVEQCVNEASIIIRNTKEPTLTLKVILTSPLIRDELEKKDGENVSMKDPPDLLDRQKCLNALASLRHAKWFQARANGLKSCVIVLRILRDLCNRVPTWAPLKGWPLELICEKSIGTCNRPLGAGEALRRVMECLASGILLPGGPGLHDPCERDPTDALSYMTIQQKEDITHSAQHALRLSAFGQIYKVLEMDPLPSSKPFQKYSWSVTDKEGAGSSALKRPFEDGLGDDKDPNKKMKRNLRKILDSKAIDLMNALMRLNQIRPGLQYKLLSQSGPVHAPVFTMSVDVDGTTYEASGPSKKTAKLHVAVKVLQAMGYPTGFDADIECMSSDEKSDNESKNETVSSNSSNNTGNSTTETSSTLEVRTQGPILTASGKNPVMELNEKRRGLKYELISETGGSHDKRFVMEVEVDGQKFRGAGPNKKVAKASAALAALEKLFSGPNAANNKKKKIIPQAKGVVNTAVSAAVQAVRGRGRGTLTRGAFVGATAAPGYIAPGYGTPYGYSTAAPAYGLPKRMVLLPVMKFPTYPVPHYSFF

SEQ ID NO: 65185 - protein, 94 aa, Homo sapiens
MRSIRSFANDDRHVMVKHSTIYPSPEELEAVQNMVSTVECALKHVSDWLDETNKGTKTEGETEVKKDEAGENYSKWSDIVWCNEDWPGCKRLAD

SEQ ID NO: 65186 - protein, 672 aa, Homo sapiens; identical to SEQ ID NO: 65183

SEQ ID NO: 65187 - protein, 74 aa, Homo sapiens
MRSIRSFANDDRHVMVKHSTIYPSPEELEAVQNMVSTVECALKHVSDWLDETNKGTKTEGETEVKKDEAGENYS

SEQ ID NO: 65188 - protein, 591 aa, Homo sapiens
MSLLTNYEGLRHQIERLVRENEELKKLVRLIRENHELKSAIKTQAGGLGISGFTSGLGEATAGLSSRQNNGVFLPPSPAVANERVLEEVGIMALAPLAEMLTSLQPSATPGSLMSPLTGTLSTLLSGPAPTSQSSPLTSFLTSPIAGPLTGTLASSLGLPSTGTLTPSSLVAGPVAMSQSSPLIAPVMGTVAVSLSSPLLSSTATPPGVSQNLLANPMSNLVLPEAPRLRLAEPLRGGPTGPQSPACVVPTATTKVPLSTEPPQSTQDPEPLSMAFAGAPLQTSTPIGAMGTPAPKTAFSFNTSDTQAQPSAAQEQVVPASVPTSPTTSPTVTVLASAPALAPQVATSYTPSSTTHIAQGAPHPPSRMHNSPTQNLPVPHCPPHNAHSPPRTSSSPASVNDSRGPRTTEPSTKSMMEVERKLAHRKTSKFPENPRESKQLAWERLVGEIAFQLDRRILSSIFPERVRLYGFTVSNIPEKIIQASLNPSDHKLDEKLCQRLTQRYVSVMNRLQSLGYNGRVHPALTEQLVNAYGILRERPELAASEGGPYTVDFLQRVVVETVHPGMLADALLLLSCLSQLAHDDGKPMFIW

SEQ ID NO: 65189 - protein, 441 aa, Homo sapiens
MSLLTNYEGLRHQIERLVRENEELKKLVRLIRENHELKSAIKTQAGGLGISGFTSGLGEATAGLSSRQNNGVFLPPSPAVANERVLEEVGIMALAPLAEMLTSLQPSATPGSLMSPLTGTLSTLLSGPAPTSQSSPLTSFLTSPIAGPLTGTLASSLGLPSTGTLTPSSLVAGPVAMSQSSPLIAPVMGTVAVSLSSPLLSSTATPPGVSQNLLANPMSNLVLPEAPRLRLAEPLRGGPTGPQSPACVVPTATTKVPLSTEPPQSTQDPEPLSMAFAGAPLQTSTPIGAMGTPAPKTAFSFNTSDTQAQPSAAQEQVVPASVPTSPTTSPTVTVLASAPALAPQVATSYTPSSTTHIAQGAPHPPSRMHNSPTQNLPVPHCPPHNAHSPPRTSSSPASVNDSRGPRTTEPSTKSMMEVERKLAHRKTSKFPENPRGFPEPQ

SEQ ID NO: 65190 - protein, 190 aa, Homo sapiens
MSSSALTCGSTLEKSGDTWEMKALDSSRLVPWPPRGLGSSTQHPNKPHCALASCQGPGVLPGAASALPELTFQGDVCQSETCQRYLQAAISLDIAVSQINLLGRPSSPPALLIQQGSCEQVIHNSTPQFLGMEDGDNERTTGWLWRLCEDIDAEPSSTGCSRSNQLTFTEGCFVRSLSTVYSNTHIHTHL

SEQ ID NO: 65191 - protein, 596 aa, Homo sapiens
MGFIIHIQQVKKQRKKLDQGLILKKEKYRKEKKCASLSFEVSSDGGTEPSALVDDNGSEEDFSYEDLCQASPRYLQPGGEQLAINELISDGNVVCAEALWDHVTMDDQELGFKAGDVIQVLEASNKDWWWGRSEDKEAWFPASFVRLRVNQEELSENSSSTPSEEQDEEASQSRHRHCENKQQMRTNVIREIMDTERVYIKHLRDICEGYIRQCRKHTGMFTVAQLATIFGNIEDIYKFQRKFLKDLEKQYNKEEPHLSEIGSCFLQNQEGFAIYSEYCNNHPGACLELANLMKQGKYRHFFEACRLLQQMIDIAIDGFLLTPVQKICKYPLQLAELLKYTTQEHGDYSNIKAAYEAMKNVACLINERKRKLESIDKIARWQVSIVGWEGLDILDRSSELIHSGELTKITKQGKSQQRTFFLFDHQLVSCKKDLLRRDMLYYKGRLDMDEMELVDLGDGRDKDCNLSVKNAFKLVSRTTDEVYLFCAKKQEDKARWLQACADERRRVQEDKEMGMEISENQKKLAMLNAQKAGHGKSKGYNRCPVAPPHQGLHPIHQRHITMPTSVPQQQVFGLAEPKRKSSLFWHTFNRLTPFRK

SEQ ID NO: 65192 - protein, 652 aa, Homo sapiens
MTSASPEDQNAPVGCPKGARRRRPISVIGGVSLYGTNQTEELDNLLTQPASRPPMPAHQVPPYKAVSARFRPFTFSQSTPIGLDRVGRRRQMRASNVSSDGGTEPSALVDDNGSEEDFSYEDLCQASPRYLQPGGEQLAINELISDGNVVCAEALWDHVTMDDQELGFKAGDVIQVLEASNKDWWWGRSEDKEAWFPASFVRLRVNQEELSENSSSTPSEEQDEEASQSRHRHCENKQQMRTNVIREIMDTERVYIKHLRDICEGYIRQCRKHTGMFTVAQLATIFGNIEDIYKFQRKFLKDLEKQYNKEEPHLSEIGSCFLQNQEGFAIYSEYCNNHPGACLELANLMKQGKYRHFFEACRLLQQMIDIAIDGFLLTPVQKICKYPLQLAELLKYTTQEHGDYSNIKAAYEAMKNVACLINERKRKLESIDKIARWQVSIVGWEGLDILDRSSELIHSGELTKITKQGKSQQRTFFLFDHQLVSCKKDLLRRDMLYYKGRLDMDEMELVDLGDGRDKDCNLSVKNAFKLVSRTTDEVYLFCAKKQEDKARWLQACADERRRVQEDKEMGMEISENQKKLAMLNAQKAGHGKSKGYNRCPVAPPHQGLHPIHQRHITMPTSVPQQQVFGLAEPKRKSSLFWHTFNRLTPFRK

SEQ ID NO: 65193 - protein, 1277 aa, Homo sapiens
MTQAAVRPWAPCLENMTTAPNGLGPGPAAPCAGSDLKDAKMVTSLACGNGVCGCSPGGDTDTQEAKLSPAKLVRLFSTSRKRTGAHPERPHSMVLVGNSSTWNTLASFRKMGSFKKLKSSVLKGIQSREGSNACSKGEASEHGLGKSIPNGAVPGAQASRGSPLAPGPACGALRPAEWGTLDGSDLEDTDDAFQRSTHRSRSLRRAYGLGRICLLDAPQNHATPTIATGQVPAVCEILVRDPENNSMGYRRSKSTDNLAFLKKSSFKRKSTSNLADLRTAHDARVPQRTLSSSSTDSQKLGSGRTKRWRSPIRAKDFDRVFKLVSNVTEAAWRRESPRSGAPSPGEASLRLQAHSRLHDDYSRRVSRSTEQDSRRGGAVMHGTTATCTVAPGFGSATSKGPHLDADTAVFPLETKSSWAVESDSSCTCSSLPSPIVQDVLSKDSCDPNAGSQLTFDPEQPPTPLRPTTPKPQSPQSPQSPGAGSASCHSNHSALSANSEESEGRAEEPAQREPGPVSLQDPLEATHGDEGSKDLLVNIGVAAGPEEKEKEEVVPDGPWRRSSSQDEERTEAQRTPKRRWGSGRRPRPRPFSDYGQLASRSLSIPEDSVAADPQKEDRVDEDPQASMTSASPEDQNAPVGCPKGARRRRPISVIGGVSLYGTNQTEELDNLLTQPASRPPMPAHQVPPYKAVSARFRPFTFSQSTPIGLDRVGRRRQMRASNVSSDGGTEPSALVDDNGSEEDFSYEDLCQASPRYLQPGGEQLAINELISDGNVVCAEALWDHVTMDDQELGFKAGDVIQVLEASNKDWWWGRSEDKEAWFPASFVRLRVNQEELSENSSSTPSEEQDEEASQSRHRHCENKQQMRTNVIREIMDTERVYIKHLRDICEGYIRQCRKHTGMFTVAQLATIFGNIEDIYKFQRKFLKDLEKQYNKEEPHLSEIGSCFLQNQEGFAIYSEYCNNHPGACLELANLMKQGKYRHFFEACRLLQQMIDIAIDGFLLTPVQKICKYPLQLAELLKYTTQEHGDYSNIKAAYEAMKNVACLINERKRKLESIDKIARWQVSIVGWEGLDILDRSSELIHSGELTKITKQGKSQQRTFFLFDHQLVSCKKDLLRRDMLYYKGRLDMDEMELVDLGDGRDKDCNLSVKNAFKLVSRTTDEVYLFCAKKQEDKARWLQACADERRRVQEDKEMGMEISENQKKLAMLNAQKAGHGKSKGYNRCPVAPPHQGLHPIHQRHITMPTSVPQQQVFGLAEPKRKSSLFWHTFNRLTPFRK

SEQ ID NO: 65194 - protein, 1315 aa, Homo sapiens
  VARIANT 1: note = MOD_RES - Any amino acid
XPVATQEPDVQGRCECQDGIPGDEGLELRSADSAVPVAMTQAAVRPWAPCLENMTTAPNGLGPGPAAPCAGSDLKDAKMVTSLACGNGVCGCSPGGDTDTQEAKLSPAKLVRLFSTSRKRTGAHPERPHSMVLVGNSSTWNTLASFRKMGSFKKLKSSVLKGIQSREGSNACSKGEASEHGLGKSIPNGAVPGAQASRGSPLAPGPACGALRPAEWGTLDGSDLEDTDDAFQRSTHRSRSLRRAYGLGRICLLDAPQNHATPTIATGQVPAVCEILVRDPENNSMGYRRSKSTDNLAFLKKSSFKRKSTSNLADLRTAHDARVPQRTLSSSSTDSQKLGSGRTKRWRSPIRAKDFDRVFKLVSNVTEAAWRRESPRSGAPSPGEASLRLQAHSRLHDDYSRRVSRSTEQDSRRGGAVMHGTTATCTVAPGFGSATSKGPHLDADTAVFPLETKSSWAVESDSSCTCSSLPSPIVQDVLSKDSCDPNAGSQLTFDPEQPPTPLRPTTPKPQSPQSPQSPGAGSASCHSNHSALSANSEESEGRAEEPAQREPGPVSLQDPLEATHGDEGSKDLLVNIGVAAGPEEKEKEEVVPDGPWRRSSSQDEERTEAQRTPKRRWGSGRRPRPRPFSDYGQLASRSLSIPEDSVAADPQKEDRVDEDPQASMTSASPEDQNAPVGCPKGARRRRPISVIGGVSLYGTNQTEELDNLLTQPASRPPMPAHQVPPYKAVSARFRPFTFSQSTPIGLDRVGRRRQMRASNVSSDGGTEPSALVDDNGSEEDFSYEDLCQASPRYLQPGGEQLAINELISDGNVVCAEALWDHVTMDDQELGFKAGDVIQVLEASNKDWWWGRSEDKEAWFPASFVRLRVNQEELSENSSSTPSEEQDEEASQSRHRHCENKQQMRTNVIREIMDTERVYIKHLRDICEGYIRQCRKHTGMFTVAQLATIFGNIEDIYKFQRKFLKDLEKQYNKEEPHLSEIGSCFLQNQEGFAIYSEYCNNHPGACLELANLMKQGKYRHFFEACRLLQQMIDIAIDGFLLTPVQKICKYPLQLAELLKYTTQEHGDYSNIKAAYEAMKNVACLINERKRKLESIDKIARWQVSIVGWEGLDILDRSSELIHSGELTKITKQGKSQQRTFFLFDHQLVSCKKDLLRRDMLYYKGRLDMDEMELVDLGDGRDKDCNLSVKNAFKLVSRTTDEVYLFCAKKQEDKARWLQACADERRRVQEDKEMGMEISENQKKLAMLNAQKAGHGKSKGYNRCPVAPPHQGLHPIHQRHITMPTSVPQQQVFGLAEPKRKSSLFWHTFNRLTPFRK

SEQ ID NO: 65195 - protein, 616 aa, Homo sapiens
MPAHQVPPYKAVSARFRPFTFSQSTPIGLDRVGRRRQMRASNVSSDGGTEPSALVDDNGSEEDFSYEDLCQASPRYLQPGGEQLAINELISDGNVVCAEALWDHVTMDDQELGFKAGDVIQVLEASNKDWWWGRSEDKEAWFPASFVRLRVNQEELSENSSSTPSEEQDEEASQSRHRHCENKQQMRTNVIREIMDTERVYIKHLRDICEGYIRQCRKHTGMFTVAQLATIFGNIEDIYKFQRKFLKDLEKQYNKEEPHLSEIGSCFLQNQEGFAIYSEYCNNHPGACLELANLMKQGKYRHFFEACRLLQQMIDIAIDGFLLTPVQKICKYPLQLAELLKYTTQEHGDYSNIKAAYEAMKNVACLINERKRKLESIDKIARWQVSIVGWEGLDILDRSSELIHSGELTKITKQGKSQQRTFFLFDHQLVSCKKDLLRRDMLYYKGRLDMDEMELVDLGDGRDKDCNLSVKNAFKLVSRTTDEVYLFCAKKQEDKARWLQACADERRRVQEDKEMGMEISENQKKLAMLNAQKAGHGKSKVRLQQVPCGPTAPGPAPHPPAPHHYAHKRPPAAGLWPGGTQEEVLALLAHLQQAHPLPEMKTGGCASMELGVKRRN

SEQ ID NO: 65196 - protein, 569 aa, Homo sapiens
MDAGSSRSLENAVNRIYHDQLVPKINTSKKMSTLAHPPNILEMSQEIKKNCGGKQVEITLERTKMTKGIKEKQSNDLEKAAFKRKAEGEEKPTRKKQAKITELDNQLITMPLPHIPLKNIMDVEMKLVYIDEMGVRYEFVESFMSTGSQPTCQAAEIVDPLSVHNFSFLPQIDKWLQVALKDASSCYRQKKYALAAGQFRTALELCSKGAVLGEPFDAPAEDIASVASFIETKLVTCYLRMRKPDLALNHAHRSIVLNPAYFRNHLRQATVFRCLERYSEAARSAMIADYMFWLGGGREESISKLIKLYWQAMIEEAITRAESFSVMYTPFATKIRADKIEKVKDAFTKTHPAYAEYMYTDLQALHMLPQTVDWSSFPPQQYLLTLGFKNKDDGKFLEKISSRKLPIFTEHKTPFGLTREDTVRQMETMGKRILPILDFIRSTQLNGSFPASSGVMEKLQYASLLSQLQRVKEQSQVINQAMAELATIPYLQDISQQEAELLQSLMADAMDTLEGRRNNNERVWNMIQKVGQIEDFLYQLEDSFLKTKKLRTARRQKTKMKRLQTVQQR

SEQ ID NO: 65197 - protein, 361 aa, Homo sapiens
MATLARLQARSSTVGNQYYFRNSVVDPFRKKENDAAVKIQSWFRGCQVRAYIRHLNRIVTIIQKWWRSFLGRKQYQLTVQVAYYTMMMNLYNAMAVRIQRRWRGYRVRKYLFNYYYLKEYLKVVSETNDAIRKALEEFAEMKEREEKKANLEREEKKRDYQARKMHYLLSTKQIPGIYNSPFRKEPDPWELQLQKAKPLTHRRPKVKQKDSTSLTDWLACTSARSFPRSEILPPINRKQCQGPFRDITEVLEQRYRPLEPTLRVAEPIDELKLAREELRREEWLQNVNDNMFLPFSSYHKNEKYIPSMHLSSKYGPISYKEQFRSENPKKWICDKDFQTVLPSFELFSKYGKLYSKAGQIV

SEQ ID NO: 65198 - protein, 538 aa, Homo sapiens
MAENLKRLVSNETLRTLQEKLDFWLKEYNTNTCDQNLNHCLELIEQVAKVQGQLFGILTAAAQEGGRNDGVETIKSRLLPWLEASFTAASLGKSVDSKVPSLQDTFDRERHKDPSPRDRDMQQLDSNLNSTRSQCNQVQDDLVETEKNLEESKNRSAISLLAAEEEINQLKKQLKSLQAQEDARHRNTDQRSSENRRSEPWSLEERKREQWNSLKQNADQQDTEAMSDYKKQLRNLKEEIAVLSAEKSALQGRSSRSRSPSPAPRSRSCSRSRSASPSTAVKVRRPSPNRSKLSNVARKAALLSRFSDSYSQARLDAQCLLRRCIDKAETVQRIIYIATVEAFHVAKMAFRHFKIHVRKSLTPSYVGSNDFENAVLDYVICHLDLYDSQSSVNDVIRAMNVNPKISFPPVVDFCLLSDFIQEICCIAFAMQALEPPLDIAYGADGEVFNDCKYRRSYDSDFTAPLVLYHVWPALMENDCVIMKGEAVTRRGAFWNSVRSVSRCRSRSLSPICPRSQIGLNTMSRSRSPSPIRCGLPRF

SEQ ID NO: 65199 - protein, 167 aa, Homo sapiens
MIITTWIVYILARKGVGLPFLPITSSDIDVVESEAVSVLHHWLKKTEEEASRGIKEKLSINHPSQGVREKMSTDSPPTHGQDIHVTRDVVKHHLSKSDLLANQSQEVLEERTRIQFIRWSHTRIFQVPSEMTEDIMRDRIEQVRRSISRLTDVSAQDFSMRPSSSDC

SEQ ID NO: 65200 - protein, 167 aa, Homo sapiens; identical to SEQ ID NO: 65199

SEQ ID NO: 65201 - protein, 520 aa, Homo sapiens
MGKPSSMDTKFKDDLFRKYVQFHESKVDTTTSRQRPGSDECLRVAASTLLSLHKVDPFYRFRLIQFYEVVESSLRSLSSSSLRALHGAFSMLETVGINLFLYPWKKEFRSIKTYTGPFVYYVKSTLLEEDIRAILSCMGYTPELGTAYKLRELVETLQVKMVSFELFLAKVECEQMLEIHSQVKDKGYSELDIVSERKSSAEDVRGCSDALRRRAEGREHLTASMSRVALQKSASERAAKDYYKPRVTKPSRSVDAYDSYWESRKPPLKASLSLRKEPVATDVGDDLKDEIIRPSPSLLTMASSPHGSPDVLPPASPSNGPALLRGTYFSTQDDVDLYTDSEPRATYRRQDALRPDVWLLRNDAHSLYHKRSPPAKESALSKCQSCGLSCSSSLCQRCDSLLTCPPASKPSAFPSKASTHDSLAHGASLREKYPGQTQGLDRLPHLHSKSKPSTTPTSRCGFCNRPGATNTCTQCSKVSCDACLSAYHYDPCYKKSELHKFMPNNQLNYKSTQLSHLVYR

SEQ ID NO: 65202 - protein, 520 aa, Homo sapiens; identical to SEQ ID NO: 65201

SEQ ID NO: 65203 - protein, 383 aa, Homo sapiens [sequence omitted]

SEQ ID NO: 65204 - protein, 802 aa, Homo sapiens
MLGARAWLGRVLLLPRAGAGLAASRRCPGVWPRTWPHRSPSRGSSSRDKDRSATVSSSVPMPAGGKGSHPSSTPQRVPNRLIHEKSPYLLQHAYNPVDWYPWGQEAFDKARKENKPIFLSVGYSTCHWCHMMEEESFQNEEIGRLLSEDFVSVKVDREERPDVDKVYMTFVQATSSGGGWPMNVWLTPNLQPFVGGTYFPPEDGLTRVGFRTVLLRIREQWKQNKNTLLENSQRVTTALLARSEISVGDRQLPPSAATVNNRCFQQLDEGYDEEYGGFAEAPKFPTPVILSFLFSYWLSHRLTQDGSRAQQMALHTLKMMANGGIRDHVGQGFHRYSTDRQWHVPHFEKMLYDQAQLAVAYSQAFQLSGDEFYSDVAKGILQYVARSLSHRSGGFYSAEDADSPPERGQRPKEGAYYVWTVKEVQQLLPEPVLGATEPLTSGQLLMKHYGLTEAGNISPSQDPKGELQGQNVLTVRYSLELTAARFGLDVEAVRTLLNSGLEKLFQARKHRPKPHLDSKMLAAWNGLMVSGYAVTGAVLGQDRLINYATNGAKFLKRHMFDVASGRLMRTCYTGPGGTVEHSNPPCWGFLEDYAFVVRGLLDLYEASQESAWLEWALRLQDTQDKLFWDSQGGGYFCSEAELGAGLPLRLKDDQDGAEPSANSVSAHNLLRLHGFTGHKDWMDKCVCLLTAFSERMRRVPVALPEMVRALSAQQQTLKQIVICGDRQAKDTKALVQCVHSVYIPNKVLILADGDPSSFLSRQLPFLSTLRRLEDQATAYVCENQACSVPITDPCELRKLLHP

SEQ ID NO: 65205 - protein, 786 aa, Homo sapiens
MLGARAWLGRVLLLPRAGAGLAASRRGSSSRDKDRSATVSSSVPMPAGGKGSHPSSTPQRVPNRLIHEKSPYLLQHAYNPVDWYPWGQEAFDKARKENKPIFLSVGYSTCHWCHMMEEESFQNEEIGRLLSEDFVSVKVDREERPDVDKVYMTFVQATSSGGGWPMNVWLTPNLQPFVGGTYFPPEDGLTRVGFRTVLLRIREQWKQNKNTLLENSQRVTTALLARSEISVGDRQLPPSAATVNNRCFQQLDEGYDEEYGGFAEAPKFPTPVILSFLFSYWLSHRLTQDGSRAQQMALHTLKMMANGGIRDHVGQGFHRYSTDRQWHVPHFEKMLYDQAQLAVAYSQAFQLSGDEFYSDVAKGILQYVARSLSHRSGGFYSAEDADSPPERGQRPKEGAYYVWTVKEVQQLLPEPVLGATEPLTSGQLLMKHYGLTEAGNISPSQDPKGELQGQNVLTVRYSLELTAARFGLDVEAVRTLLNSGLEKLFQARKHRPKPHLDSKMLAAWNGLMVSGYAVTGAVLGQDRLINYATNGAKFLKRHMFDVASGRLMRTCYTGPGGTVEHSNPPCWGFLEDYAFVVRGLLDLYEASQESAWLEWALRLQDTQDKLFWDSQGGGYFCSEAELGAGLPLRLKDDQDGAEPSANSVSAHNLLRLHGFTGHKDWMDKCVCLLTAFSERMRRVPVALPEMVRALSAQQQTLKQIVICGDRQAKDTKALVQCVHSVYIPNKVLILADGDPSSFLSRQLPFLSTLRRLEDQATAYVCENQACSVPITDPCELRKLLHP

SEQ ID NO: 65206 - protein, 742 aa, Homo sapiens
MPAGGKGSHPSSTPQRVPNRLIHEKSPYLLQHAYNPVDWYPWGQEAFDKARKENKPIFLSVGYSTCHWCHMMEEESFQNEEIGRLLSEDFVSVKVDREERPDVDKVYMTFVQATSSGGGWPMNVWLTPNLQPFVGGTYFPPEDGLTRVGFRTVLLRIREQWKQNKNTLLENSQRVTTALLARSEISVGDRQLPPSAATVNNRCFQQLDEGYDEEYGGFAEAPKFPTPVILSFLFSYWLSHRLTQDGSRAQQMALHTLKMMANGGIRDHVGQGFHRYSTDRQWHVPHFEKMLYDQAQLAVAYSQAFQLSGDEFYSDVAKGILQYVARSLSHRSGGFYSAEDADSPPERGQRPKEGAYYVWTVKEVQQLLPEPVLGATEPLTSGQLLMKHYGLTEAGNISPSQDPKGELQGQNVLTVRYSLELTAARFGLDVEAVRTLLNSGLEKLFQARKHRPKPHLDSKMLAAWNGLMVSGYAVTGAVLGQDRLINYATNGAKFLKRHMFDVASGRLMRTCYTGPGGTVEHSNPPCWGFLEDYAFVVRGLLDLYEASQESAWLEWALRLQDTQDKLFWDSQGGGYFCSEAELGAGLPLRLKDDQDGAEPSANSVSAHNLLRLHGFTGHKDWMDKCVCLLTAFSERMRRVPVALPEMVRALSAQQQTLKQIVICGDRQAKDTKALVQCVHSVYIPNKVLILADGDPSSFLSRQLPFLSTLRRLEDQATAYVCENQACSVPITDPCELRKLLHP

SEQ ID NO: 65207 - protein, 75 aa, Homo sapiens
GQGHQGPGQCVHSVYIPNKVLILADGDPSSFLSRQLPFLSTLRRLEDQATAYVCENQACSVPITDPCELRKLLHP

SEQ ID NO: 65208 - protein, 43 aa, Homo sapiens
MLGARAWLGRVLLLPRAGAGLAASRRSACSPTSRLNSLRSLIP

SEQ ID NO: 65209 - protein, 305 aa, Homo sapiens
MAAAGQEKGYLTQTAAALDKSPSLSPQLAAPIRGRPKKCLVYPHAPKSSRLSRSVLRWLQGLDLSFFPRNINRDFSNGFLIAEIFCIYYPWELELSSFENGTSLKVKLDNWAQLEKFLARKKFKLPKELIHGTIHCKAGVPEILIEEVYTLLTHREIKSIQDDFVNFTDYSYQMRLPLVSRSTVSKSIKDNIRLSELLSNPNMLTNELKAEFLILLHMLQRKLGRKLNPEWFDVKPTVGEVTLNHLPAQASGRRYNLKVKRGRVVPVLPNIGSGGSSHREIHVKQAGQHSYYSAMKPIRNMDKKP

SEQ ID NO: 65210 - protein, 893 aa, Homo sapiens
MSSKKNRKRLNQSAENGSSLPSAASSCAEARAPSAGSDFAATSGTLTVTNLLEKVDDKIPKTFQNSLIHLGLNTMKSANICIGRPVLLTSLNGKQEVYTAWPMAGFPGGKVGLSEMAQKNVGVRPGDAIQVQPLVGAVLQAEEMDVALSDKDMEINEEELTGCILRKLDGKIVLPGNFLYCTFYGRPYKLQVLRVKGADGMILGGPQSDSDTDAQRMAFEQSSMETSSLELSLQLSQLDLEDTQIPTSRSTPYKPIDDRITNKASDVLLDVTQSPGDGSGLMLEEVTGLKCNFESAREGNEQLTEEERLLKFSIGAKCNTDTFYFISSTTRVNFTEIDKNSKEQDNQFKVTYDMIGGLSSQLKAIREIIELPLKQPELFKSYGIPAPRGVLLYGPPGTGKTMIARAVANEVGAYVSVINGPEIISKFYGETEAKLRQIFAEATLRHPSIIFIDELDALCPKREGAQNEVEKRVVASLLTLMDGIGSEVSEGQVLVLGATNRPHALDAALRRPGRFDKEIEIGVPNAQDRLDILQKLLRRVPHLLTEAELLQLANSAHGYVGADLKVLCNEAGLCALRRILKKQPNLPDVKVAGLVKITLKDFLQAMNDIRPSAMREIAIDVPNVSWSDIGGLESIKLKLEQAVEWPLKHPESFIRMGIQPPKGVLLYGPPGCSKTMIAKALANESGLNFLAIKGPELMNKYVGESERAVRETFRKARAVAPSIIFFDELDALAVERGSSLGAGNVADRVLAQLLTEMDGIEQLKDVTILAATNRPDRIDKALMRPGRIDRIIYVPLPDAATRREIFKLQFHSMPVSNEVDLDELILQTDAYSGAEIVAVCREAALLALEEDIQANLIMKRHFTQALSTVTPRIPESLRRFYEDYQEKSGLHTL

SEQ ID NO: 65211 - protein, 249 aa, Homo sapiens
MQLDKFIYHLAPVEKSHGRLQNRTSRSQKKKSKSPERSKYCINAKNYEQPTISSKSHSPSPYTKRRMCELSEDTRRRLAHLNLGPYEFKKETDKPPFVIRHVDPPSPRADTLLGSSGRDCERDGWSRVHNDHSHLGCCRPKDYKVIRTPHGRDFDDSLEKCEEYLSPRSCSKPRHSARTLLVHSAPSTMPKHSPSPVLNRASLRERFHSDWCSPSNCDEIHDRDERDLEKDDELELKRSLLCRDSAYDS

SEQ ID NO: 65212 - protein, 472 aa, Homo sapiens
MPKVKALQCALALEISSVTCPGVVLKDKEDIYLSICVFGQYKKTQCVPATFPLVFNARMVFEKVFPDAVDPGDVVTQLEYDTAVFELIQLVPPVGETLSTYDENTRDFMFPGPNQMSGHHDSNRQVTMRRISGLRGNAPRLEFSTTSVITECLISSRKCHTQDKFIYHLAPVEKSHGRLQNRTSRSQKKKSKSPERSKYCINAKNYEQPTISSKSHSPSPYTKRRMCELSEDTRRRLAHLNLGPYEFKKETDKPPFVIRHVDPPSPRADTLLGSSGRDCERDGWSRVHNDHSHLGCCRPKDYKVIRTPHGRDFDDSLEKCEEYLSPRSCSKPRHSARTLLVHSAPSTMPKHSPSPVLNRASLRERFHSDWCSPSNCDEIHDRDERDLEKDDELELKRSLLCRDSAYDSDPEYSSCQQPRGTFHLDDGEYWSNRAASYKGKSHRPIFENSMDKMYRNLYKKACSSASHTQESF

SEQ ID NO: 65213 - protein, 488 aa, Homo sapiens
MPKVKALQCALALEISSVTCPGVVLKDKEDIYLSICVFGQYKKTQCVPATFPLVFNARMVFEKVFPDAVDPGDVVTQLEYDTAVFELIQLVPPVGETLSTYDENTRDFMFPGPNQMSGHHDSNRQVTMRRISGLRGNAPRLEFSTTSVITECLISSRKCHTQDKFIYHLAPVEKSHGRLQNRTSRSQKKKSKSPERSKYCINAKNYEQPTISSKSHSPSPYTKRRMCELSEDTRRRLAHLNLGPYEFKKETDKPPFVIRHVDPPSPRADTLLGSSGRDCERDGWSRVHNDHSHLGCCRPKDYKVIRTPHGRDFDDSLEKCEEYLSPRSCSKPRHSARTLLVHSAPSTMPKHSPSPVLNRASLRERFHSDWCSPSNCDEIHDRVKNVLKSHQAHQRHLYDERDLEKDDELELKRSLLCRDSAYDSDPEYSSCQQPRGTFHLDDGEYWSNRAASYKGKSHRPIFENSMDKMYRNLYKKACSSASHTQESF

SEQ ID NO: 65214 - protein, 416 aa, Homo sapiens
MVFEKVFPDAVDPGDVVTQLELGETLSTYDENTRDFMFPGPNQMSGHHDSNRQVTMRRISGLRGNAPRLEFSTTSVITECLISSRKCHTQDKFIYHLAPVEKSHGRLQNRTSRSQKKKSKSPERSKYCINAKNYEQPTISSKSHSPSPYTKRRMCELSEDTRRRLAHLNLGPYEFKKETDKPPFVIRHVDPPSPRADTLLGSSGRDCERDGWSRVHNDHSHLGCCRPKDYKVIRTPHGRDFDDSLEKCEEYLSPRSCSKPRHSARTLLVHSAPSTMPKHSPSPVLNRASLRERFHSDWCSPSNCDEIHDRVKNVLKSHQAHQRHLYDERDLEKDDELELKRSLLCRDSAYDSDPEYSSCQQPRGTFHLDDGEYWSNRAASYKGKSHRPIFENSMDKMYRNLYKKACSSASHTQESF

SEQ ID NO: 65215 - protein, 458 aa, Homo sapiens
MDGSRRVRATSVLPRYGPPCLFKGHLSTKSNAFCTDSSSLRLSTLQLVKNHMAVHYNKILSAKAAVDCSVPVSVSTSIKYADQQRREKLKKELAQCEKEFKLTKTAMRANYKNNSKSLFNTLQKPSGEPQIEDDMLKEEMNGFSSFARSLVPSSERLHLSLHKSSKVITNGPEKNSSSSPSSVDYAASGPRKLSSGALYGRRPRSTFPNSHRFQLVISKAPSGDLLDKHSELFSNKQLPFTPRTLKTEAKSFLSQYRYYTPAKRKKDFTDQRIEAETQTELSFKSELGTAETKNMTDSEMNIKQASNCVTYDAKEKIAPLPLEGHDSTWDEIKDDALQHSSPRAMCQYSLKPPSTRKIYSDEEELLYLSFIEDVTDEILKLGLFSNRFLERLFERHIKQNKHLEEEKMRHLLHVLKVDLGCTSEENSFSSVKGDNNHDMELSTLKIMEMSIEDCPLDV

SEQ ID NO: 65216 - protein, 567 aa, Homo sapiens
MDGSRRVRATSVLPRYGPPCLFKGHLSTKSNAAVDCSVPVSVSTSIKYADQQRREKLKKELAQCEKEFKLTKTAMRANYKNNSKSLFNTLQKPSGEPQIEDDMLKEEMNGFSSFARSLVPSSERLHLSLHKSSKVITNGPEKNSSSSPSSVDYAASGPRKLSSGALYGRRPRSTFPNSHRFQLVISKAPSGDLLDKHSELFSNKQLPFTPRTLKTEAKSFLSQYRYYTPAKRKKDFTDQRIEAETQTELSFKSELGTAETKNMTDSEMNIKQASNCVTYDAKEKIAPLPLEGHDSTWDEIKDDALQHSSPRAMCQYSLKPPSTRKIYSDEEELLYLSFIEDVTDEILKLGLFSNRFLERLFERHIKQNKHLEEEKMRHLLHVLKVDLGCTSEENSVKQNDVDMLNVFDFEKAGNSEPNELKNESEVTIQQERQQYQKALDMLLSAPKDENEIFPSPTEFFMPIYKSKHSEGVIIQQVNDETNLETSTLDENHPSISDSLTDRETSVNVIEGDSDPEKVEISNGLCGLNTSPSQSVQFSSVKGDNNHDMELSTLKIMEMSIEDCPLDV

SEQ ID NO: 65217 - protein, 599 aa, Homo sapiens
MDGSRRVRATSVLPRYGPPCLFKGHLSTKSNAFCTDSSSLRLSTLQLVKNHMAVHYNKILSAKAAVDCSVPVSVSTSIKYADQQRREKLKKELAQCEKEFKLTKTAMRANYKNNSKSLFNTLQKPSGEPQIEDDMLKEEMNGFSSFARSLVPSSERLHLSLHKSSKVITNGPEKNSSSSPSSVDYAASGPRKLSSGALYGRRPRSTFPNSHRFQLVISKAPSGDLLDKHSELFSNKQLPFTPRTLKTEAKSFLSQYRYYTPAKRKKDFTDQRIEAETQTELSFKSELGTAETKNMTDSEMNIKQASNCVTYDAKEKIAPLPLEGHDSTWDEIKDDALQHSSPRAMCQYSLKPPSTRKIYSDEEELLYLSFIEDVTDEILKLGLFSNRFLERLFERHIKQNKHLEEEKMRHLLHVLKVDLGCTSEENSVKQNDVDMLNVFDFEKAGNSEPNELKNESEVTIQQERQQYQKALDMLLSAPKDENEIFPSPTEFFMPIYKSKHSEGVIIQQVNDETNLETSTLDENHPSISDSLTDRETSVNVIEGDSDPEKVEISNGLCGLNTSPSQSVQFSSVKGDNNHDMELSTLKIMEMSIEDCPLDV

SEQ ID NO: 65218 - protein, 567 aa, Homo sapiens; identical to SEQ ID NO: 65216

SEQ ID NO: 65219 - protein, 105 aa, Homo sapiens
MAPAGMSGAQDNSCLYQEIAPSFQRLPCPRTSSRHFSEAMTCPCGWRPFKGGPGGLKGPVWPAKEENSCSHGRIQRVQRRRVPSASPLIQKINRRSVLFHPYCWS

SEQ ID NO: 65220 - protein, 545 aa, Homo sapiens
MSRKQNQKDSSGFIFDLQSNTVLAQGGAFENMKEKINAVRAIVPNKSNNEIILVLQHFDNCVDKTVQAFMEGSASEVLKEWTVTGKKKNKKKKNKPKPAAEPSNGIPDSSKSVSIQEEQSAPSSEKGGMNGYHVNGAINDTESVDSLSEGLETLSIDARELEDPESAMLDTLDRTGSMLQNGVSDFETKSLTMHSIHNSQQPRNAAKSLSRPTTETQFSNMGMEDVPLATSKKLSSNIEKSVKDLQRCTVSLARYRVVVKEEMDASIKKMKQAFAELESCLMDREVALLAEMDKVKAEAMEILLSRQKKAELLKKMTHVAVQMSEQQLVELRADIKHFVSERKYDEDLGRVARFTCDVETLKKSIDSFGQVSHPKNSYSTRSRCSSVTSVSLSSPSDASAASSSTCASPPSLTSANKKNFAPGETPAAIANSSGQPYQPLREVLPGNRRGGQGYRPQGQKSNDPMNQGRHDSMGRYRNSSWYSSGSRYQSAPSQAPGNTIERGQTHSAGTNGTGVSMEPSPPTPSFKKGLPQRKPRTSQTEAVNS

SEQ ID NO: 65221 - protein, 545 aa, Homo sapiens
VSKKKKKKDSSGFIFDLQSNTVLAQGGAFENMKEKINAVRAIVPNKSNNEIILVLQHFDNCVDKTVQAFMEGSASEVLKEWTVTGKKKNKKKKNKPKPAAEPSNGIPDSSKSVSIQEEQSAPSSEKGGMNGYHVNGAINDTESVDSLSEGLETLSIDARELEDPESAMLDTLDRTGSMLQNGVSDFETKSLTMHSIHNSQQPRNAAKSLSRPTTETQFSNMGMEDVPLATSKKLSSNIEKSVKDLQRCTVSLARYRVVVKEEMDASIKKMKQAFAELESCLMDREVALLAEMDKVKAEAMEILLSRQKKAELLKKMTHVAVQMSEQQLVELRADIKHFVSERKYDEDLGRVARFTCDVETLKKSIDSFGQVSHPKNSYSTRSRCSSVTSVSLSSPSDASAASSSTCASPPSLTSANKKNFAPGETPAAIANSSGQPYQPLREVLPGNRRGGQGYRPQGQKSNDPMNQGRHDSMGRYRNSSWYSSGSRYQSAPSQAPGNTIERGQTHSAGTNGTGVSMEPSPPTPSFKKGLPQRKPRTSQTEAVNS

SEQ ID NO: 65222 - protein, 8 aa, Homo sapiens
MSRKQNQK

SEQ ID NO: 65223 - protein, 8 aa, Homo sapiens
MSRKQNQK

SEQ ID NO: 65224 - protein, 67 aa, Homo sapiens
MSRKQNQKDSSGFIFDLQSNTVLAQGGAFENMKEKINAVRAIVPNKSNNEIILVLQHFDNCVDKTVQ

SEQ ID NO: 65225 - protein, 33 aa, Homo sapiens
MSRKQNQKDSSGFIFDLQSNTVLAQGGAFENMK

SEQ ID NO: 65226 - protein, 5 aa, Homo sapiens
MSRKQ

SEQ ID NO: 65227 - protein, 36 aa, Homo sapiens
MSRKQNQKDSSGFIFDLQSNTVLAQGGAFENMKEKV

SEQ ID NO: 65228 - protein, 66 aa, Homo sapiens
MSRKQNQKDSSGFIFDLQSNTVLAQGGAFENMKEKINAVRAIVPNKSNNEIILVLQHFDNCVDKTV

SEQ ID NO: 65229 - protein, 34 aa, Homo sapiens
MSRKQNQKDSSGFIFDLQSNTVLAQGGAFENMKE

SEQ ID NO: 65230 - protein, 98 aa, Homo sapiens
MSRKQNQKDSSGFIFDLQSNTVLAQGGAFENMKEKINAVRAIVPNKSNNEIILVLQHFDNCVDKTVQAFMEGSASEVLKEWTVTGKKKNKKKKNKPKP

SEQ ID NO: 65231 - protein, 74 aa, Homo sapiens
MSRKQNQKDSSGFIFDLQSNTVLAQGGAFENMKEKINAVRAIVPNKSNNEIILVLQHFDNCVDKTVQAFMEGSA

SEQ ID NO: 65232 - protein, 10 aa, Homo sapiens
MSRKQNQKDS

SEQ ID NO: 65233 - protein, 545 aa, Homo sapiens; identical to SEQ ID NO: 65220

SEQ ID NO: 65234 - protein, 545 aa, Homo sapiens; identical to SEQ ID NO: 65220

SEQ ID NO: 65235 - protein, 558 aa, Homo sapiens
MAELNTHVNVKEKIYAVRSVVPNKSNNEIVLVLQQFDFNVDKAVQAFVDGSAIQVLKEWNMTGKKKNNKRKRSKSKQHQGNKDAKDKVERPEAGPLQPQPPQIQNGPMNGCEKDSSSTDSANEKPALIPREKKISILEEPSKALRGVTEGNRLLQQKLSLDGNPKPIHGTTERSDGLQWSAEQPCNPSKPKAKTSPVKSNTPAAHLEIKPDELAKKRGPNIEKSVKDLQRCTVSLTRYRVMIKEEVDSSVKKIKAAFAELHNCIIDKEVSLMAEMDKVKEEAMEILTARQKKAEELKRLTDLASQMAEMQLAELRAEIKHFVSERKYDEELGKAARFSCDIEQLKAQIMLCGEITHPKNNYSSRTPCSSLLPLLNAHAATSGKQSNFSRKSSTHNKPSEGKAANPKMVSSLPSTADPSHQTMPANKQNGSSNQRRRFNPQYHNNRLNGPAKSQGSGNEAEPLGKGNSRHEHRRQPHNGFRPKNKGGAKNQEASLGMKTPEAPAHSEKPRRRQHAADTSEARPFRGSVGRVSQCNLCPTRIEVSTDAAVLSVPAVTLVA

SEQ ID NO: 65236 - protein, 489 aa, Homo sapiens
MAELNTHVNVKEKIYAVRSVVPNKSNNEIVLVLQQFDFNVDKAVQAFVDGSAIQVLKEWNMTGKKKNNKRKRSKSKQHQGNKDAKDKVERPEAGPLQPQPPQIQNGPMNGCEKDSSSTDSANEKPALIPREKKISILEEPSKALRGVTGPNIEKSVKDLQRCTVSLTRYRVMIKEEVDSSVKKIKAAFAELHNCIIDKEVSLMAEMDKVKEEAMEILTARQKKAEELKRLTDLASQMAEMQLAELRAEIKHFVSERKYDEELGKAARFSCDIEQLKAQIMLCGEITHPKNNYSSRTPCSSLLPLLNAHAATSGKQSNFSRKSSTHNKPSEGKAANPKMVSSLPSTADPSHQTMPANKQNGSSNQRRRFNPQYHNNRLNGPAKSQGSGNEAEPLGKGNSRHEHRRQPHNGFRPKNKGGAKNQEASLGMKTPEAPAHSEKPRRRQHAADTSEARPFRGSVGRVSQCNLCPTRIEVSTDAAVLSVPAVTLVA

SEQ ID NO: 65237 - protein, 558 aa, Homo sapiens; identical to SEQ ID NO: 65235

SEQ ID NO: 65238 - protein, 566 aa, Homo sapiens
MAYSTRSKMAELNTHVNVKEKIYAVRSVVPNKSNNEIVLVLQQFDFNVDKAVQAFVDGSAIQVLKEWNMTGKKKNNKRKRSKSKQHQGNKDAKDKVERPEAGPLQPQPPQIQNGPMNGCEKDSSSTDSANEKPALIPREKKISILEEPSKALRGVTEGNRLLQQKLSLDGNPKPIHGTTERSDGLQWSAEQPCNPSKPKAKTSPVKSNTPAAHLEIKPDELAKKRGPNIEKSVKDLQRCTVSLTRYRVMIKEEVDSSVKKIKAAFAELHNCIIDKEVSLMAEMDKVKEEAMEILTARQKKAEELKRLTDLASQMAEMQLAELRAEIKHFVSERKYDEELGKAARFSCDIEQLKAQIMLCGEITHPKNNYSSRTPCSSLLPLLNAHAATSGKQSNFSRKSSTHNKPSEGKAANPKMVSSLPSTADPSHQTMPANKQNGSSNQRRRFNPQYHNNRLNGPAKSQGSGNEAEPLGKGNSRHEHRRQPHNGFRPKNKGGAKNQEASLGMKTPEAPAHSEKPRRRQHAADTSEARPFRGSVGRVSQCNLCPTRIEVSTDAAVLSVPAVTLVA

SEQ ID NO: 65239 - protein, 266 aa, Homo sapiens
MAELNTHVNVKEKIYAVRSVVPNKSNNEIVLVLQQFDFNVDKAVQAFVDGSAIQVLKEWNMTGKKKNNKRKRSKSKQHQGNKDAKDKVERPEAGPLQPQPPQIQNGPMNGCEKDSSSTDSANEKPALIPREKKISILEEPSKALRGVTGPNIEKSVKDLQRCTVSLTRYRVMIKEEVDSSVKKIKAAFAELHNCIIDKEVSLMAEMDKVKEEAMEILTARQKKAEELKRLTDLASQMAEMQLAELRAEIKHFVSERKYDEELGKAA

SEQ ID NO: 65240 - protein, 558 aa, Homo sapiens; identical to SEQ ID NO: 65235

SEQ ID NO: 65241 - protein, 588 aa, Homo sapiens
MDPFCHSSSETRLLSGTLLWIPRAYSTRSKMAELNTHVNVKEKIYAVRSVVPNKSNNEIVLVLQQFDFNVDKAVQAFVDGSAIQVLKEWNMTGKKKNNKRKRSKSKQHQGNKDAKDKVERPEAGPLQPQPPQIQNGPMNGCEKDSSSTDSANEKPALIPREKKISILEEPSKALRGVTEGNRLLQQKLSLDGNPKPIHGTTERSDGLQWSAEQPCNPSKPKAKTSPVKSNTPAAHLEIKPDELAKKRGPNIEKSVKDLQRCTVSLTRYRVMIKEEVDSSVKKIKAAFAELHNCIIDKEVSLMAEMDKVKEEAMEILTARQKKAEELKRLTDLASQMAEMQLAELRAEIKHFVSERKYDEELGKAARFSCDIEQLKAQIMLCGEITHPKNNYSSRTPCSSLLPLLNAHAATSGKQSNFSRKSSTHNKPSEGKAANPKMVSSLPSTADPSHQTMPANKQNGSSNQRRRFNPQYHNNRLNGPAKSQGSGNEAEPLGKGNSRHEHRRQPHNGFRPKNKGGAKNQEASLGMKTPEAPAHSEKPRRRQHAADTSEARPFRGSVGRVSQCNLCPTRIEVSTDAAVLSVPAVTLVA

SEQ ID NO: 65242 - protein, 558 aa, Homo sapiens; identical to SEQ ID NO: 65235

SEQ ID NO: 65243 - protein, 154 aa, Homo sapiens
MAELNTHVNVKEKIYAVRSVVPNKSNNEIVLVLQQFDFNVDKAVQAFVDGSAIQVLKEWNMTGKKKNNKRKRSKSKQHQGNKDAKDKVERPEAGPLQPQPPQIQNGPMNGCEKDSSSTDSANEKPALIPREKKISILEEPSKALRGVTEGNRLL

SEQ ID NO: 65244 - protein, 140 aa, Homo sapiens
MAELNTHVNVKEKIYAVRSVVPNKSNNEIVLVLQQFDFNVDKAVQAFVDGSAIQVLKEWNMTGKKKNNKRKRSKSKQHQGNKDAKDKVERPEAGPLQPQPPQIQNGPMNGCEKDSSSTDSANEKPALIPREKKISILEEP

SEQ ID NO: 65245 - protein, 13 aa, Homo sapiens
MAELNTHVNVKEK

SEQ ID NO: 65246 - protein, 94 aa, Homo sapiens
MAELNTHVNVKEKIYAVRSVVPNKSNNEIVLVLQQFDFNVDKAVQAFVDGSAIQVLKEWNMTGKKKNNKRKRSKSKQHQGNKDAKDKVERPEAG

SEQ ID NO: 65247 - protein, 115 aa, Homo sapiens
MAELNTHVNVKEKIYAVRSVVPNKSNNEIVLVLQQFDFNVDKAVQAFVDGSAIQVLKEWNMTGKKKNNKRKRSKSKQHQGNKDAKDKVERPEAGPLQPQPPQIQNGPMNGCEKDS

SEQ ID NO: 65248 - protein, 23 aa, Homo sapiens
MAELNTHVNVKEKIYAVRSVVPN

SEQ ID NO: 65249 - protein, 173 aa, Homo sapiens
MAELNTHVNVKEKIYAVRSVVPNKSNNEIVLVLQQFDFNVDKAVQAFVDGSAIQVLKEWNMTGKKKNNKRKRSKSKQHQGNKDAKDKVERPEAGPLQPQPPQIQNGPMNGCEKDSSSTDSANEKPALIPREKKISILEEPSKALRGVTGPNIEKSVKDLQRCTVSLTRYRVMI

SEQ ID NO: 65250 - protein, 558 aa, Homo sapiens; identical to SEQ ID NO: 65235

SEQ ID NO: 65251 - protein, 188 aa, Homo sapiens
MAELNTHVNVKEKIYAVRSVVPNKSNNEIVLVLQQFDFNVDKAVQAFVDGSAIQVLKEWNMTGKKKNNKRKRSKSKQHQGNKDAKDKVERPEAGPLQPQPPQIQNGPMNGCEKDSSSTDSANEKPALIPREKKISILEEPSKALRGVTEGNRLLQQKLSLDGNPKPIHGTTERSDGLQWSAEQPCNPS

SEQ ID NO: 65252 - protein, 302 aa, Homo sapiens
MEPGPDGPAASGPAAIREGWFRETCSLWPGQALSLQVEQLLHHRRSRYQDILVFRSKTYGNVLVLDGVIQCTERDEFSYQEMIANLPLCSHPNPRKVLIIGGGDGGVLREVVKHPSVESVVQCEIDEDVIQVSKKFLPGMAIGYSSSKLTLHVGDGFEFMKQNQDAFDVIITDSSDPMGPAESLFKESYYQLMKTALKEDGVLCCQGECQWLHLDLIKEMRQFCQSLFPVVAYAYCTIPTYPSGQIGFMLCSKNPSTNFQEPVQPLTQQQVAQMQLKYYNSDVHRAAFVLPEFARKALNDVS

SEQ ID NO: 65253 - protein, 199 aa, Homo sapiens
EEPPPPTVQVQGPGPQREEKQKTKMAKFVIRPATAADCSDILRLIKELAKYEYMEEQVILTEKDLLEDGFGEHPFYHCLVAEVPKEHWTPEGNPSPFPEARETKCYYFTYDPWIGKLLYLEDFFVMSDYRGLWHRIRNSEESKPGCNEVSLAACTSWAEWNEPSINFYKRRGASDLSSEEGWRLFKIDKEYLLKMATEE

SEQ ID NO: 65254 - protein, 150 aa, Homo sapiens
MAKFVIRPATAADCSDILRLIKELAKYEYMEEQVILTEKGNSTVAGRGTSVRCLSPSPRPLPPLLPLLADLLEDGFGEHPFYHCLVAEVPKEHWTPEGNPSPFPEARETKCYVRSSVGCVEPLTTQAEVTENLDRKNSQQVFKLLRKKKN

SEQ ID NO: 65255 - protein, 120 aa, Homo sapiens
MAKFVIRPATAADCSDILRLIKELAKYEYMEEQVILTEKDLLEDGFGEHPFYHCLVAEVPKEHWTPEGNPSPFPEARETKCYVRSSVGCVEPLTTQAEVTENLDRKNSQQVFKLLRKKKN

SEQ ID NO: 65256 - protein, 143 aa, Homo sapiens
MAKFVIRPATAADCSDILRLIKELAKYEYMEEQVILTEKGHSIVGFAMYYFTYDPWIGKLLYLEDFFVMSDYRGFGIGSEILKNLSQVAMRCRCSSMHFLVAEWNEPSINFYKRRGASDLSSEEGWRLFKIDKEYLLKMATEE

SEQ ID NO: 65257 - protein, 171 aa, Homo sapiens
MAKFVIRPATAADCSDILRLIKELAKYEYMEEQVILTEKDLLEDGFGEHPFYHCLVAEVPKEHWTPEGHSIVGFAMYYFTYDPWIGKLLYLEDFFVMSDYRGFGIGSEILKNLSQVAMRCRCSSMHFLVAEWNEPSINFYKRRGASDLSSEEGWRLFKIDKEYLLKMATEE

SEQ ID NO: 65258 - protein, 170 aa, Homo sapiens
MASVRIREAKEGDCGDILRLIRELAEFEKLSDQVKISEEALRADGFGDNPFYHCLVAEILPAPGKLLGPCVVGYGIYYFIYSTWKGRTIYLEDIYVMPEYRGQGIGSKIIKKVAEVALDKGCSQFRLAVLDWNQRAMDLYKALGAQDLTEAEGWHFFCFQGEATRKLAGK

SEQ ID NO: 65259 - protein, 249 aa, Homo sapiens
MPGQRIASLAYSLLPYGAGIPAPLTRPRLPRRPPRLPPPRSLRLFRIQVRRPFKGSSCRLRGPGTLVPDSGDPDGFRADPRGQGGRLWRYPEADSGEDCRPELAEFEKLSDQVKISEEALRADGFGDNPFYHCLVAEILPAPGKLLGPCVVGYGIYYFIYSTWKGRTIYLEDIYVMPEYRGQGIGSKIIKKVAEVALDKGCSQFRLAVLDWNQRAMDLYKALGAQDLTEAEGWHFFCFQGEATRKLAGK

SEQ ID NO: 65260 - protein, 313 aa, Homo sapiens
MAAARHSTLDFMLGAKADGETILKGLQSIFQEQGMAESVHTWQDHGYLATYTNKNGRLPPIVRGGAIDRYWPTADGRLVEYDIDEVVYDEDSPYQNIKILHSKQFGNILILSGDVNLAESDLAYTRAIMGSGKEDYTGKDVLILGGGDGGILCEIVKLKPKMVTMVEIDQMVIDGCKKYMRKTCGDVLDNLKGDCYQVLIEDCIPVLKRYAKEGREFDYVINDLTAVPISTSPEEDSTWEFLRLILDLSMKVLKQDGKYFTQGNCVNLTEALSLYEEQLGRLYCPVEFSKEIVCVPSYLELWVFYTVWKKAKP

SEQ ID NO: 65261 - protein, 366 aa, Homo sapiens
MAAARHSTLDFMLGAKADGETILKGLQSIFQEQGMAESVHTWQDHGYLATYTNKNGSFANLRIYPHGLVLLDLQSYDGDAQGKEEIDSILNKVEERMKELSQDSTGRVKRLPPIVRGGAIDRYWPTADGRLVEYDIDEVVYDEDSPYQNIKILHSKQFGNILILSGDVNLAESDLAYTRAIMGSGKEDYTGKDVLILGGGDGGILCEIVKLKPKMVTMVEIDQMVIDGCKKYMRKTCGDVLDNLKGDCYQVLIEDCIPVLKRYAKEGREFDYVINDLTAVPISTSPEEDSTWEFLRLILDLSMKVLKQDGKYFTQGNCVNLTEALSLYEEQLGRLYCPVEFSKEIVCVPSYLELWVFYTVWKKAKP

SEQ ID NO: 65262 - protein, 275 aa, Homo sapiens
MKELSQDSTGRVKRLPPIVRGGAIDRYWPTADGRLVEYDIDEVVYDEDSPYQNIKILHSKQFGNILILSGDVNLAESDLAYTRAIMGSGKEDYTGKDVLILGGGDGGILCEIVKLKPKMVTMVEIDQMVIDGCKKYMRKTCGDVLDNLKGDCYQVLIEDCIPVLKRYAKEGREFDYVINDLTAVPISTSPEEDSTWEFLRLILDLSMKVLKQDGKYFTQGNCVNLTEALSLYEEQLGRLYCPVEFSKEIVCVPSYLELFLLQFWRVRSSKCALEG

SEQ ID NO: 65263 - protein, 311 aa, Homo sapiens
  VARIANT 1: note = MOD_RES - Any amino acid
XGGRAEAALLLAPRSVPAAARGLQGQSRVPAGRAALPGPGRPPALPRGLAAFALPLGESPGCRARADPPWDEGCRDCGGARRDPRGEPGLGACAERGCPRDLFLFLQAADGETILKGLQSIFQEQGMAESVHTWQDHGYLATYTNKNGSFANLRIYPHGLVLLDLQSYDGDAQGKEEIDSILNKVEERMKELSQDSTGRVKRLPPIVRGGAIDRYWPTADGRLVEYDIDEVVYDEDSPYQNIKILHSKQFGNILILSGDVNLAESDLAYTRAIMGSGKEDYTGKDVLILGGGDGGILCEIVKLKPKMVTMV

SEQ ID NO: 65264 - protein, 1266 aa, Homo sapiens
REATPPLRGLPAPPRHAPFPAGRFEPPRTKQGGRGSHTPWVYVINDLGIEENLKNDGKPKCQTGGKSKRTIQGTHKTTKQQSTAVDCKITSSTTGDKHFDKSPTKTRHPRKIDLRARYWAFLFDNLRRAVDEIYVTCESDQSVVECKEVLMMLDNYVRDFKALIDWIQLQEKLEKTDAQSRPTSLAWEVKKMSPGRHVIPSPSTDRINVTSNARRSLNFGGSTGTVPAPRLAPTGVSWADKVKAHHTGSTASSEITPAQSCPPMTVQKASRKNERKDAEGWETVQRGRPIRSRSTAVMPKVSLATEATRSKDDSDKENVCLLPDESIQKGQFVGDGTSNTIESHPKDSLHSCDHPLAEKTQFTVSTLDDVKNSGSIRDNYVRTSEISAVHIDTECVSVMLQAGTPPLQVNEEKFPAEKARIENEMDPSDISNVSAANLSMAEVLAKKEELADRLEKANEEAIASAIAEEEQLTREIEAEENNDINIETDNDSDFSASMGSGSVSFCGMSMDWNDVLADYEARESWRQNTSWGDIVEEEPARPPGHGIHMHEKLSSPSRKRTIAESKKKHEEKQMKAQQLREKLREEKTLKLQKLLEREKDVRKWKEELLDQRRRMMEEKLLHAEFKREVQLQAIVKKAQEEEAKVNEIAFINTLEAQNKRHDVLSKLKEYEQRLNELQEERQRRQEEKQARDEAVQERKRALEAERQARVEELLMKRKEQEARIEQQRQEKEKAREDAARERARDREERLAALTAAQQEAMEELQKKIQLKHDESIRRHMEQIEQRKEKAAELSSGRHANTDYAPKLTPYERKKQCSLCNVLISSEVYLFSHVKGRKHQQAVRENTSIQGRELSDEEVEHLSLKKYIIDIVVESTAPAEALKDGEERQKNKKKAKKIKARMNFRAKEYESLMETKNSGSDSPYKAKLQRLAKDLLKQVQVQDSGSWANNKVSALDRTLGEITRILEKENVADQIAFQAAGGLTALEHILQAVVPATNVNTVLRIPPKSLCNAINVYNLTCNNCSENCSDVLFSNKITFLMDLLIHQLTVYVPDENNTILGRNTNKQVFEGLTTGLLKVSAVVLGCLIANRPDGNCQPATPKIPTQEMKNKPSQGDPFNNRVQDLISYVVNMGLIDKLCACFLSVQGPVDENPKMAIFLQHAAGLLHAMCTLCFAVTGRSYSIFDNNRQDPTGLTAALQATDLAGVLHMLYCVLFHGTILDPSTASPKENYTQNTIQVAIQSLRFFNSFAALHLPAFQVPSIGLYRC

SEQ ID NO: 65265 - protein, 1400 aa, Homo sapiens
MMASFQRSNSHDKVRRIVAEEGRTARNLIAWSVPLESKDDDGKPKCQTGGKSKRTIQGTHKTTKQSTAVDCKITSSTTGDKHFDKSPTKTRHPRKIDLRARYWAFLFDNLRRAVDEIYVTCESDQSVVECKEVLMMLDNYVRDFKALIDWIQLQEKLEKTDAQSRPTSLAWEVKKMSPGRHVIPSPSTDRINVTSNARRSLNFGGSTGTVPAPRLAPTGVSWADKVKAHHTGSTASSEITPAQSCPPMTVQKASRKNERKDAEGWETVQRGRPIRSRSTAVMPKVSLATEATRSKDDSDKENVCLLPDESIQKGQFVGDGTSNTIESHPKDSLHSCDHPLAEKTQFTVSTLDDVKNSGSIRDNYVRTSEISAVHIDTECVSVMLQAGTPPLQVNEEKFPAEKARIENEMDPSDISNSMAEVLAKKEELADRLEKANEEAIASAIAEEEQLTREIEAEENNDINIETDNDSDFSASMGSGSVSFCGMSMDWNDVLADYEARESWRQNTSWGDIVEEEPARPPGHGIHMHEKLSSPSRKRTIAESKKKHEEKQMKAQQLREKLREEKTLKLQKLLEREKDVRKWKEELLDQRRRMMEEKLLHAEFKREVQLQAIVKKAQEEEAKVNEIAFINTLEAQNKRHDVLSKLKEYEQRLNELQEERQRRQEEKQARDEAVQERKRALEAERQARVEELLMKRKEQEARIEQQRQEKEKAREDAARERARDREERLAALTAAQQEAMEELQKKIQLKHDESIRRHMEQIEQRKEKAAELSSGRHANTDYAPKLTPYERKKQCSLCNVLISSEVYLFSHVKGRKHQQAVRENTSIQGRELSDEEVEHLSLKKYIIDIVVESTAPAEALKDGEERQKNKKKAKKIKARMNFRAKEYESLMETKNSGSDSPYKAKLQRLAKDLLKQVQVQDSGSWANNKVSALDRTLGEITRILEKENVADQIAFQAAGGLTALEHILQAVVPATNVNTVLRIPPKSLCNAINVYNLTCNNCSENCSDVLFSNKITFLMDLLIHQLTVYVPDENNTILGRNTNKQVFEGLTTGLLKVSAVVLGCLIANRPDGNCQPATPKIPTQEMKNKPSQGDPFNNRVQDLISYVVNMGLIDKLCACFLSVQGPVDENPKMAIFLQHAAGLLHAMCTLCFAVTGRSYSIFDNNRQDPTGLTAALQATDLAGVLHMLYCVLFHGTILDPSTASPKENYTQNTIQVAIQSLRFFNSFAALHLPAFQSIVGAEGLSLAFRHMASSLLGHCSQVSCESLLHEVIVCVGYFTVNHPDNQVIVQSGRHPTVLQKLCQLPFQYFSDPRLIKVLFPSLIAACYNNHQNKIILEQEMSCVLLATFIQDLAQTPGQAENQPYQPKGKCLGSQDYLELANRFPQQAWEEARQFFLKKEKK

SEQ ID NO: 65266 - protein, 1154 aa, Homo sapiens
MKTKYIFCNITERKDAEGWETVQRGRPIRSRSTAVMPKVSLATEATRSKDDSDKENVCLLPDESIQKGQFVGDGTSNTIESHPKDSLHSCDHPLAEKTQFTVSTLDDVKNSGSIRDNYVRTSEISAVHIDTECVSVMLQAGTPPLQVNEEKFPAEKARIENEMDPSDISNSMAEVLAKKEELADRLEKANEEAIASAIAEEEQLTREIEAEENNDINIETDNDSDFSASMGSGSVSFCGMSMDWNDVLADYEARESWRQNTSWGDIVEEEPARPPGHGIHMHEKLSSPSRKRTIAESKKKHEEKQMKAQQLREKLREEKTLKLQKLLEREKDVRKWKEELLDQRRRMMEEKLLHAEFKREVQLQAIVKKAQEEEAKVNEIAFINTLEAQNKRHDVLSKLKEYEQRLNELQEERQRRQEEKQARDEAVQERKRALEAERQARVEELLMKRKEQEARIEQQRQEKEKAREDAARERARDREERLAALTAAQQEAMEELQKKIQLKHDESIRRHMEQIEQRKEKAAELSSGRHANTDYAPKLTPYERKKQCSLCNVLISSEVYLFSHVKGRKHQQAVRENTSIQGRELSDEEVEHLSLKKYIIDIVVESTAPAEALKDGEERQKNKKKAKKIKARMNFRAKEYESLMETKNSGSDSPYKAKLQRLAKDLLKQVQVQDSGSWANNKVSALDRTLGEITRILEKENVADQIAFQAAGGLTALEHILQAVVPATNVNTVLRIPPKSLCNAINVYNLTCNNCSENCSDVLFSNKITFLMDLLIHQLTVYVPDENNTILGRNTNKQVFEGLTTGLLKVSAVVLGCLIANRPDGNCQPATPKIPTQEMKNKPSQGDPFNNRVQDLISYVVNMGLIDKLCACFLSVQGPVDENPKMAIFLQHAAGLLHAMCTLCFAVTGRSYSIFDNNRQDPTGLTAALQATDLAGVLHMLYCVLFHGTILDPSTASPKENYTQNTIQVAIQSLRFFNSFAALHLPAFQSIVGAEGLSLAFRHMASSLLGHCSQVSCESLLHEVIVCVGYFTVNHPDNQVIVQSGRHPTVLQKLCQLPFQYFSDPRLIKVLFPSLIAACYNNHQNKIILEQEMSCVLLATFIQDLAQTPGQAENQPYQPKGKCLGSQDYLELANRFPQQAWEEARQFFLKKEKK

SEQ ID NO: 65267 - protein, 1400 aa, Homo sapiens; identical to SEQ ID NO: 65265

SEQ ID NO: 65268 - protein, 410 aa, Homo sapiens
MHRKHLQEIPDLSSNVATSFTWGWDSSKTSELLSGMGVSALEKEEPDSENIPQELLSNLGHPESPPRKRLKSKGSDKDFVIVRRPKLNRENFPGVSWDSLPDELLLGIFSCLCLPELLKVSGVCKRWYRLASDESLWQTLDLTGKNLHPDVTGRLLSQGVIAFRCPRSFMDQPLAEHFSPFRVQHMDLSNSVIEVSTLHGILSQCSKLQNLSLEGLRLSDPIVNTLAKNSNLVRLNLSGCSGFSEFALQTLLSSCSRLDELNLSWCFDFTEKHVQVAVAHVSETITQLNLSGYRKNLQKSDLSTLVRRCPNLVHLDLSDSVMLKNDCFQEFFQLNYLQHLSLSRCYDIIPETLLLVTRAGVRIRLDSDIGCPQTYRTSKLKSSHKLFCQHVRVICIFVCDFYFYRLVLKQ

SEQ ID NO: 65269 - protein, 424 aa, Homo sapiens
MHRKHLQEIPDLSSNVATSFTWGWDSSKTSELLSGMGVSALEKEEPDSENIPQELLSNLGHPESPPRKRLKSKGSDKDFVIVRRPKLNRENFPGVSWDSLPDELLLGIFSCLCLPELLKVSGVCKRWYRLASDESLWQTLDLTGKNLHPDVTGRLLSQGVIAFRCPRSFMDQPLAEHFSPFRVQHMDLSNSVIEVSTLHGILSQCSKLQNLSLEGLRLSDPIVNTLAKNSNLVRLNLSGCSGFSEFALQTLLSSCSRLDELNLSWCFDFTEKHVQVAVAHVSETITQLNLSGYRKNLQKSDLSTLVRRCPNLVHLDLSDSVMLKNDCFQEFFQLNYLQHLSLSRCYDIIPETLLELGEIPTLKTLQVFGIVPDGTLQLLKEALPHLQINCSHFTTIARPTIGNKKNQEIWGIKCRLTLQKPSCL

SEQ ID NO: 65270 - protein, 390 aa, Homo sapiens
MHRKHLQEKEEPDSENIPQELLSNLGHPESPPRKRLKSKGSDKDFVIVRRPKLNRENFPGVSWDSLPDELLLGIFSCLCLPELLKVSGVCKRWYRLASDESLWQTLDLTGKNLHPDVTGRLLSQGVIAFRCPRSFMDQPLAEHFSPFRVQHMDLSNSVIEVSTLHGILSQCSKLQNLSLEGLRLSDPIVNTLAKNSNLVRLNLSGCSGFSEFALQTLLSSCSRLDELNLSWCFDFTEKHVQVAVAHVSETITQLNLSGYRKNLQKSDLSTLVRRCPNLVHLDLSDSVMLKNDCFQEFFQLNYLQHLSLSRCYDIIPETLLELGEIPTLKTLQVFGIVPDGTLQLLKEALPHLQINCSHFTTIARPTIGNKKNQEIWGIKCRLTLQKPSCL

SEQ ID NO: 65271 - protein, 210 aa, Homo sapiens
MDQPLAEHFSTLAKNSNLVRLNLSGCSGFSEFALQTLLSSCSRLDELNLSWCFDFTEKHVQVAVAHVSETITQLNLSGYRKNLQKSDLSTLVRRCPNLVHLDLSDSVMLKNDCFQEFFQLNYLQHLSLSRCYDIIPETLLELGEIPTLKTLQVFGIVPDGTLQLLKEALPHLQINCSHFTTIARPTIGNKKNQEIWGIKCRLTLQKPSCL

SEQ ID NO: 65272 - protein, 453 aa, Homo sapiens
MALVRALVCCLLTAWHCRSGLGLPVAPAGGRNPPPAIGQFWHVTDLHLDPTYHITDDHTKVCASSKGANASNPGPFGDVLCDSPYQLILSAFDFIKNSGQEASFMIWTGDSPPHVPVPELSTDTVINVITNMTTTIQSLFPNLQVFPALGNHDYWPQDQLPVVTSKVYNAVANLWKPWLDEEAISTLRKGGFYSQKVTTNPNLRIISLNTNLYYGPNIMTLNKTDPANQFEWLESTLNNSQQNKEKVYIIAHVPVGYLPSSQNITAMREYYNEKLIDIFQKYSDVIAGQFYGHTHRDSIMVLSDKKGSPVNSLFVAPAVTPVKSVLEKQTNNPGIRLFQYDPRDYKLLDMLQYYLNLTEANLKGESIWKLEYILTQTYDIEDLQPESLYGLAKQFTILDSKQFIKYYNYFFVSYDSSVTCDKTCKAFQICAIMNLDNISYADCLKQLYIKHNY

SEQ ID NO: 65273 - protein, 322 aa, Homo sapiens
MTTTIQSLFPNLQVFPALGNHDYWPQDQLPVVTSKVYNAVANLWKPWLDEEAISTLRKGGFYSQKVTTNPNLRIISLNTNLYYGPNIMTLNKTDPANQFEWLESTLNNSQQNKEKVYIIAHVPVGYLPSSQNITAMREYYNEKLIDIFQKYSDVIAGQFYGHTHRDSIMVLSDKKGSPVNSLFVAPAVTPVKSVLEKQTNNPGIRLFQYDPRDYKLLDMLQYYLNLTEANLKGESIWKLEYILTQTYDIEDLQPESLYGLAKQFTILDSKQFIKYYNYFFVSYDSSVTCDKTCKAFQICAIMNLDNISYADCLKQLYIKHNY

SEQ ID NO: 65274 - protein, 241 aa, Homo sapiens
MKEVVYWSPKKVADWLLENAMPEYCEPLEHFTGQDLINLTQEDFKKPPLCRVSSDNGQRLLDMIETLKMEHHLEAHKNGHANGHLNIGVDIPTPDGSFSIKIKPNGMPNGYRKEMIKIPMPELERSQYPMEWGKTFLAFLYALSCFVLTTVMISVVHERVPPKEVQPPLPDTFFDHFNRVQWAFSICEINGMILVGLWLIQWLLLKYKDVGNESRVVMIFLSIVHPVLLLGSIAGFLSLSL

SEQ ID NO: 65275 - protein, 413 aa, Homo sapiens
MKEVVYWSPKKVADWLLENAMPEYCEPLEHFTGQDLINLTQEDFKKPPLCRVSSDNGQRLLDMIETLKMEHHLEAHKNGHANGHLNIGVDIPTPDGSFSIKIKPNGMPNGYRKEMIKIPMPELERSQYPMEWGKTFLAFLYALSCFVLTTVMISVVHERVPPKEVQPPLPDTFFDHFNRVQWAFSICEINGMILVGLWLIQWLLLKYKSIISRRFFCIVGTLYLYRCITMYVTTLPVPGMHFNCSPKLFGDWEAQLRRIMKLIAGGGLSITGSHNMCGDYLYSGHTVMLTLTYLFIKEYSPRRLWWYHWICWLLSVVGIFCILLAHDHYTVDVVVAYYITTRLFWWYHTMANQQVLKEASQMNLLARVWWYRPFQYFEKNVQGIVPRSYHWPFPWPVVHLSRQVKYSRLVNDT

SEQ ID NO: 65276 - protein, 213 aa, Homo sapiens
TYMYISNKSIISRRFFCIVGTLYLYRCITMYVTTLPVPGMHFNCSPKLFGDWEAQLRRIMKLIAGGGLSITGSHNMCGDYLYSGHTVMLTLTYLFIKEYSPRRLWWYHWICWLLSVVGIFCILLAHDHYTVDVVVAYYITTRLFWWYHTMANQQVLKEASQMNLLARVWWYRPFQYFEKNVQGIVPRSYHWPFPWPVVHLSRQVKYSRLVNDT

SEQ ID NO: 65277 - protein, 244 aa, Homo sapiens
MGGRGGGGRSRQLPGRFRAPAARWPGGRWLPGAPRTVTWSIISRRFFCIVGTLYLYRCITMYVTTLPVPGMHFNCSPKLFGDWEAQLRRIMKLIAGGGLSITGSHNMCGDYLYSGHTVMLTLTYLFIKEYSPRRLWWYHWICWLLSVVGIFCILLAHDHYTVDVVVAYYITTRLFWWYHTMANQQVLKEASQMNLLARVWWYRPFQYFEKNVQGIVPRSYHWPFPWPVVHLSRQVKYSRLVNDT

SEQ ID NO: 65278 - protein, 365 aa, Homo sapiens
MDIIETAKLEEHLENQPSDPTNTYARPAEPVEEENKNGNGKPKSLSSGLRKGTKKYPDYIQIAMPTESRNKFPLEWWKTGIAFIYAVFNLVLTTVMITVVHERVPPKELSPPLPDKFFDYIDRVKWAFSVSEINGIILVGLWITQWLFLRYKSIVGRRFCFIIGTLYLYRCITMYVTTLPVPGMHFQCAPKLNGDSQAKVQRILRLISGGGLSITGSHILCGDFLFSGHTVTLTLTYLFIKEYSPRHFWWYHLICWLLSAAGIICILVAHEHYTIDVIIAYYITTRLFWWYHSMANEKNLKVSSQTNFLSRAWWFPIFYFFEKNVQGSIPCCFSWPLSWPPGCFKSSCKKYSRVQKIGEDNEKST

SEQ ID NO: 65279 - protein, 365 aa, Homo sapiens; identical to SEQ ID NO: 65278

SEQ ID NO: 65280 - protein, 365 aa, Homo sapiens; identical to SEQ ID NO: 65278

SEQ ID NO: 65281 - protein, 44 aa, Homo sapiens
MDIIETAKLEEHLENQPSDPTNTYARPAEPVEEENKNGNGKPKS

SEQ ID NO: 65282 - protein, 34 aa, Homo sapiens
MDIIETAKLEEHLENQPSDPTNTYARPAEPVEEE

SEQ ID NO: 65283 - protein, 441 aa, Homo sapiens
MSLRQRLAQLVGRLQDPQKVARFQRLCGVEAPPRRSADRREDEKAEAPLAGDPRLRGRQPGAPGGPQPPGSDRNQCPAKPDGGGAPNGVRNGLAAELGPASPRRAGALRRNSLTGEEGQLARVSNWPLYCLFCFGTELGNELFYILFFPFWIWNLDPLVGRRLVVIWVLVMYLGQCTKDIIRWPRPASPPVVKLEVFYNSEYSMPSTHAMSGTAIPISMVLLTYGRWQYPLIYGLILIPCWCSLVCLSRIYMGMHSILDIIAGFLYTILILAVFYPFVDLIDNFNQTHKYAPFIIIGLHLALGIFSFTLDTWSTSRGDTAEILGSGAGIACGSHVTYNMGLVLDPSLDTLPLAGPPITVTLFGKAILRILIGMVFVLIIRDVMKKITIPLACKIFNIPCDDIRKARQHMEVELPYRYITYGMVGFSITFFVPYIFFFIGIS

SEQ ID NO: 65284 - protein, 399 aa, Homo sapiens
MAELLRSLQDSQLVARFQRRCGLFPAPDEGPRENGADPTERAARVPGVEHLPAANGKGGEAPANGLRRAAAPEAYVQKYVVKNYFYYYLFQFSAALGQEVFYITFLPFTHWNIDPYLSRRLIIIWVLVMYIGQVAKDVLKWPRPSSPPVVKLEKRLIAEYGMPSTHAMAATAIAFTLLISTMDRYQYPFVLGLVMAVVFSTLVCLSRLYTGMHTVLDVLGGVLITALLIVLTYPAWTFIDCLDSASPLFPVCVIVVPFFLCYNYPVSDYYSPTRADTTTILAAGAGVTIGFWINHFFQLVSKPAESLPVIQNIPPLTTYMLVLGLTKFAVGIVLILLVRQLVQNLSLQVLYSWFKVVTRNKEARRRLEIEVPYKFVTYTSVGICATTFVPMLHRFLGLP

SEQ ID NO: 65285 - protein, 353 aa, Homo sapiens
MGSLYSEYLNPNKVQEHYNYTKETLETQETTSRQVASAFIVILCCAIVVENLLVLIAVARNSKFHSAMYLFLGNLAASDLLAGVAFVANTLLSGSVTLRLTPVQWFAREGSAFITLSASVFSLLAIAIERHVAIAKVKLYGSDKSCRMLLLIGASWLISLVLGGLPILGWNCLGHLEACSTVLPLYAKHYVLCVVTIFSIILLAIVALYVRIYCVVRSSHADMAAPQTLALLKTVTIVLGVFIVCWLPAFSILLLDYACPVHSCPILYKAHYFFAVSTLNSLLNPVIYTWRSRDLRREVLRPLQCWRPGVGVQGRRRGGTPGHHLLPLRSSSSLERGMHMPTSPTFLEGNTVV

SEQ ID NO: 65286 - protein, 378 aa, Homo sapiens
MATALPPRLQPVRGNETLREHYQYVGKLAGRLKEASEGSTLTTVLFLVICSFIVLENLMVLIAIWKNNKFHNRMYFFIGNLALCDLLAGIAYKVNILMSGKKTFSLSPTVWFLREGSMFVALGASTCSLLAIAIERHLTMIKMRPYDANKRHRVFLLIGMCWLIAFTLGALPILGWNCLHNLPDCSTILPLYSKKYIAFCISIFTAILVTIVILYARIYFLVKSSSRKVANHNNSERSMALLRTVVIVVSVFIACWSPLFILFLIDVACRVQACPILFKAQWFIVLAVLNSAMNPVIYTLASKEMRRAFFRLVCNCLVRGRGARASPIQPALDPSRSKSSSSNNSSHSPKVKEDLPHTAPSSCIMDKNAALQNGIFCN

SEQ ID NO: 65287 - protein, 378 aa, Homo sapiens; identical to SEQ ID NO: 65286

SEQ ID NO: 65288 - protein, 384 aa, Homo sapiens
MNATGTPVAPESCQQLAAGGHSRLIVLHYNHSGRLAGRGGPEDGGLGALRGLSVAASCLVVLENLLVLAAITSHMRSRRWVYYCLVNITLSDLLTGAAYLANVLLSGARTFRLAPAQWFLREGLLFTALAASTFSLLFTAGERFATMVRPVAESGATKTSRVYGFIGLCWLLAALLGMLPLLGWNCLCAFDRCSSLLPLYSKRYILFCLVIFAGVLATIMGLYGAIFRLVQASGQKAPRPAARRKARRLLKTVLMILLAFLVCWGPLFGLLLADVFGSNLWAQEYLRGMDWILALAVLNSAVNPIIYSFRSREVCRAVLSFLCCGCLRLGMRGPGDCLARAVEAHSGASTTDSSLRPRDSFRGSRSLSFRMREPLSSISSVRSI

SEQ ID NO: 65289 - protein, 398 aa, Homo sapiens
MESGLLRPAPVSEVIVLHYNYTGKLRGARYQPGAGLRADAVVCLAVCAFIVLENLAVLLVLGRHPRFHAPMFLLLGSLTLSDLLAGAAYAANILLSGPLTLKLSPALWFAREGGVFVALTASVLSLLAIALERSLTMARRGPAPVSSRGRTLAMAAAAWGVSLLLGLLPALGWNCLGRLDACSTVLPLYAKAYVLFCVLAFVGILAAICALYARIYCQVRANARRLPARPGTAGTTSTRARRKPRSLALLRTLSVVLLAFVACWGPLFLLLLLDVACPARTCPVLLQADPFLGLAMANSLLNPIIYTLTNRDLRHALLRLVCCGRHSCGRDPSGSQQSASAAEASGGLRRCLPPGLDGSFSGSERSSPQRDGLDTSGSTGSPGAPTAARTLVSEPAAD

SEQ ID NO: 65290 - protein, 310 aa, Homo sapiens
MESGLLRPAPVSEVIVLHYNYTGKLRGARYQPGAGLRADAVVCLAVCAFIVLENLAVLLVLGRHPRFHAPMFLLLGSLTLSDLLAGAAYAANILLSGPLTLKLSPALWFAREGGVFVALTASVLSLLAIALERSLTMARRGPAPVSSRGRTLAMAAAAWGVSLLLGLLPALGWNCLGRLDACSTVLPLYAKAYVLFCVLAFVGILAAICALYALAGLAAHAQRGAPGLCGMLGPPLPAAVARRGVPGAHLSCTPAGRSLPGTGHGQLTSEPHHLHAHQPRPAPRAPAPGLLRTPLLRQRPEWLPAVGERG

SEQ ID NO: 65291 - protein, 398 aa, Homo sapiens; identical to SEQ ID NO: 65289

SEQ ID NO: 65292 - protein, 1671 aa, Homo sapiens
MDGNSLLSVPSNLESSRMYDVLEPQQGRGCGSSGSGPGNSITACKKVLRSNSLLESTDYWLQNQRMPCQIGFVEDKSENCASVCFVNLDVNKDECSTEHLQQKLVNVSPDLPKLISSMNVQQPKENEIVVLSGLASGNLQADFEVSQCPWLPDICLVQCARGNRPNSTNCIIFEINKFLIGLELVQERQLHLETNILKLEDDTNCSLSSIEEDFLTASEHLEEESEVDESRNDYENINVSANVLESKQLKGATQVEWNCNKEKWLYALEDKYINKYPTPLIKTERSPENLTKNTALQSLDPSAKPSQWKREAVGNGRQATHYYHSEAFKGQMEKSQALYIPKDAYFSMMDKDVPSACAVAEQRSNLNPGDHEDTRNALPPRQDGEVTTGKYATNLAESVLQDAFIRLSQSQSTLPQESAVSVSVGSSLLPSCYSTKDTVVSRSWNELPKIVVVQSPDGSDAAPQPGISSWPEMEVSVETSSILSGENSSRQPQSALEVALACAATVIGTISSPQATERLKMEQVVSNFPPGSSGALQTQAPQGLKEPSINEYSFPSALCGMTQVASAVAVCGLGEREEVTCSVAPSGSLPPAAEASEAMPPLCGLASMELGKEAIAKGLLKEAALVLTRPNTYSSIGDFLDSMNRRIMETASKSQTLCSENVVRNELAHTLSNVILRHSIDEVHHKNMIIDPNDNRHSSEILDTLMESTNQLLLDVICFTFKKMSHIVRLGECPAVLSKETIRRRETEPSCQPSDPGASQAWTKATESSSSSPLSNSHNTSLVINNLVDGMYSKQDKGGVRPGLFKNPTLQSQLSRSHRVPDSSTATTSSKEIYLKGIAGEDTKSPHHSENECRASSEGQRSPTVSQSRSGSQEAEESIHPNTQEKYNCATSRINEVQVNLSLLGDDLLLPAQSTLQTKHPDIYCITDFAEELADTVVSMATEIAAICLDNSSGKQPWFCAWKRGSEFLMTPNVPCRSLKRKKESQGSGTAVRKHKPPRLSEIKRKTDEHPELKEKLMNRVVDESMNLEDVPDSVNLFANEVAAKIMNLTEFSMVDGMWQAQGYPRNRLLSGDRWSRLKASSCESIPEEDSEARAYVNSLGLMSTLSQPVSRASSVSKQSSCESITDEFSRFMVNQMENEGRGFELLLDYYAGKNASSILNSAMQQACRKSDHLSVRPSCPSKQSSTESITEEFYRYMLRDIERDSRESASSRRSSQDWTAGLLSPSLRSPVCHRQSSMPDSRSPCSRLTVNVPIKANSLDGFAQNCPQDFLSVQPVSSASSSGLCKSDSCLYRRGGTDHITNMLIHETWASSIEALMRKNKIIVDDAEEADTEPVSGGSPSQAEKCANRLAASRMCSGPTLLVQESLDCPRKDSVTECKQPPVSSLSKTASLTNHSPLDSKKETSSCQDPVPINHKRRSLCSREVPLIQIETDQREACAGEPEPFLSKSSLLEEAEGHSNDKNIPDVVRGGDTAVSACQIHSDSLDTRDVPEAEASTEARAPDEAPNPPSSSEESTGSWTQLANEEDNPDDTSSFLQLSERSMSELVEEKKILKGQSESTEAPASGPPTGTASPQRSLLVINFDLEPECPDAELRATLQWIAASELGIPTIYFKKSQENRIEKFLDVVQLVHRKSWKVGDIFHAVVQYCKMHEEQKDGRLSLFDWLLELG

SEQ ID NO: 65293 - protein, 1700 aa, Homo sapiens
MDGNSLLSVPSNLESSRMYDVLEPQQGRGCGSSGSGPGNSITACKKVLRSNSLLESTDYWLQNQRMPCQIGFVEDKSENCASVCFVNLDVNKDECSTEHLQQKLVNVSPDLPKLISSMNVQQPKENEIVVLSGLASGNLQADFEVSQCPWLPDICLVQCARGNRPNSTNCIIFEINKFLIGLELVQERQLHLETNILKLEDDTNCSLSSIEEDFLTASEHLEEESEVDESRNDYENINVSANVLESKQLKGATQVEWNCNKEKWLYALEDKYINKYPTPLIKTERSPENLTKNTALQSLDPSAKPSQWKREAVGNGRQATHYYHSEAFKGQMEKSQALYIPKDAYFSMMDKDVPSACAVAEQRSNLNPGDHEDTRNALPPRQDGEVTTGKYATNLAESVLQDAFIRLSQSQSTLPQESAVSVSVGSSLLPSCYSTKDTVVSRSWNELPKIVVVQSPDGSDAAPQPGISSWPEMEVSVETSSILSGENSSRQPQSALEVALACAATVIGTISSPQATERLKMEQVVSNFPPGSSGALQTQAPQGLKEPSINEYSFPSALCGMTQVASAVAVCGLGEREEVTCSVAPSGSLPPAAEASEAMPPLCGLASMELGKEAIAKGLLKEAALVLTRPNTYSSIGDFLDSMNRRIMETASKSQTLCSENVVRNELAHTLSNVILRHSIDEVHHKNMIIDPNDNRHSSEILDTLMESTNQLLLDVICFTFKKMSHIVRLGECPAVLSKETIRRRETEPSCQPSDPGASQAWTKATESSSSSPLSNSHNTSLVINNLVDGMYSKQDKGGVRPGLFKNPTLQSQLSRSHRVPDSSTATTSSKEIYLKGIAGEDTKSPHHSENECRASSEGQRSPTVSQSRSGSQEAEESIHPNTQEKYNCATSRINEVQVNLSLLGDDLLLPAQSTLQTKHPDIYCITDFAEELADTVVSMATEIAAICLDNSSGKQPWFCAWKRGSEFLMTPNVPCRSLKRKKESQGSGTAVRKHKPPRLSEIKRKTDEHPELKEKLMNRVVDESMNLEDVPDSVNLFANEVAAKIMNLTEFSMVDGMWQAQGYPRNRLLSGDRWSRLKASSCESIPEEDSEARAYVNSLGLMSTLSQPVSRASSVSKQSSCESITDEFSRFMVNQMENEGRGFELLLDYYAGKNASSILNSAMQQACRKSDHLSVRPSCPSKQSSTESITEEFYRYMLRDIERDSRESASSRRSSQDWTAGLLSPSLRSPVCHRQSSMPDSRSPCSRLTVNVPIKANSLDGFAQNCPQDFLSVQPVSSASSSGLCKSDSCLYRRGGTDHITNMLIHETWASSIEALMRKNKIIVDDAEEADTEPVSGGSPSQAEKCANRLAASRMCSGPTLLVQESLDCPRKDSVTECKQPPVSSLSKTASLTNHSPLDSKKETSSCQDPVPINHKRRSLCSREVPLIQIETDQREACAGEPEPFLSKSSLLEEAEGHSNDKNIPDVVRGGDTAVSACQIHSDSLDTRDVPEAEASTEARAPDEAPNPPSSSEESTGSWTQLANEEDNPDDTSSFLQLSERSMSNGNSSATSSLGIMDLDIYQESMPSSPMINELVEEKKILKGQSESTEAPASGPPTGTASPQRSLLVINFDLEPECPDAELRATLQWIAASELGIPTIYFKKSQENRIEKFLDVVQLVHRKSWKVGDIFHAVVQYCKMHEEQKDGRLSLFDWLLELG

SEQ ID NO: 65294 - protein, 262 aa, Homo sapiens
MLALEAAQLDGPHFSCLYPDGVFYDLDSCKHSSYPDSEGAPDSLWDWTVAPPVPATPYEAFDPAAAAFSHPQAAQLCYEPPTYSPAGNLELAPSLEAPGPGLPAYPTENFASQTLVPPAYAPYPSPVLSEEEDLPLDSPALEVSDSESDEALVAGPEGKGSEAGTRKKLRLYQFLLGLLTRGDMRECVWWVEPGAGVFQFSSKHKELLARRWGQQKGNRKRMTYQKLARALRNYAKTGEIRKVKRKLTYQFDSALLPAVRRA

SEQ ID NO: 65295 - protein, 171 aa, Homo sapiens
MASSMTWTAASIPATLIQRGLLTLVPPAYAPYPSPVLSEEEDLPLDSPALEVSDSESDEALVAGPEGKGSEAGTRKKLRLYQFLLGLLTRGDMRECVWWVEPGAGVFQFSSKHKELLARRWGQQKGNRKRMTYQKLARALRNYAKTGEIRKVKRKLTYQFDSALLPAVRRA

SEQ ID NO: 65296 - protein, 248 aa, Homo sapiens
MTCVEQDKLGQAFEDAFEVLRQHSTGDLQYSPDYRNYLALINHRPHVKGNSSCYGVLPTEEPVYNWRTVINSAADFYFEGNIHQSLQNITENQLVQPTLLQQKGGKGRKKLRLFEYLHESLYNPEMASCIQWVDKTKGIFQFVSKNKEKLAELWGKRKGNRKTMTYQKMARALRNYGRSGEITKIRRKLTYQFSEAILQRLSPSYFLGKEIFYSQCVQPDQEYLSLNNWNANYNYTYANYHELNHHDC

SEQ ID NO: 65297 - protein, 248 aa, Homo sapiens; identical to SEQ ID NO: 65296

SEQ ID NO: 65298 - protein, 855 aa, Homo sapiens
MSFVRVNRCGPRVGVRKTPKVKKKKTSVKQEWDNTVTDLTVHRATPEDLVRRHEIHKSKNRALVHWELQEKALKRKWRKQKPETLNLEKRRLSIMKEILSDQYQMQDVLEKSDHLIAAAKELFPRRRTGFPNVTVAPDSSQGPIVVNQDPITQSIFNESVIEPQALNDVDGEEEGTVNSQSGESENENELDNSLNSQSNTNTDRFLQQLTEENFELISKLWTDIQQKIATQSQITPPGTPSSALSSGEQRAALNATNAVKRLQTRLQPEESTETLDSSYVVGHVLNSRKQKQLLNKVKRKPNLHALSKPKKNISSGSTTSADLPNRTNSNLDVLKHMIHEVEHEMEEYERWTGREVKGLQSSQGLTGFTLSLVSSLCRLVRYLKESEIQLRKEVETRQQLEQVLGDHRELIDALTAEILRLREENAATQARLQQYMVTTDEQLISLTHAIKNCPVINNRQEIQASESGATGRRVMDSPERPVVNANVSVPLMFREEVAEFPQEELPVKLSQVPDPPDNMNLAKNFPAHIFEPAVLLTPPRQKSNLKFSPLQDVLRRTVQTRPAPRLPPTVEIIEKEQNWEEKTLPIDTDIQNSSEENRLFTQRWRVSHMGEDLENKTQAPFVNLSQPLCNSHSNTQQSRSPTFSEELPVLGDGQQLRTNESLIQRKDIMTRIADLTLQNSAIKAHMNNIIEPRGEQGDGLRELNKQESASDMTSTFPVAQSLTPGSMEERIAELNRQSMEARGKLLQLIEQQKLVGLNLSPPMSPVQLPLRAWTEGAKRTIEVSIPGAEAPESSKCSTVSPVSGINTRRSSGATGNSCSPLNATSGSGRFTPLNPRAKIEKQNEEGWFALSTHVS

SEQ ID NO: 65299 - protein, 160 aa, Homo sapiens
MSFVRVNRCGPRVGVRKTPKVKKKKTSVKQEWDNTVTDLTVHRATPEDLVRRHEIHKSKNRALVHWELQEKALKRKWRKQKPETLNLEKRRLSIMKEILSDQYQMQDVLEKSDHLIAAAKELFPRRRTGFPNVTVAPDSSQGPIVVNQDPITQSIFNESV

SEQ ID NO: 65300 - protein, 173 aa, Homo sapiens
MSFVRVNRCGPRVGVRKTPKVKKKKTSVKQEWDNTVTDLTVHRATPEDLVRRHEIHKSKNRALVHWELQEKALKRKWRKQKPETLNLEKRRLSIMKEILSDQYQMQDVLEKSDHLIAAAKELFPRRRTGFPNVTVAPDSSQGPIVVNQDPITQSIFNESVIEPQALNDVDGEE

SEQ ID NO: 65301 - protein, 19 aa, Homo sapiens
MSFVRVNRCGPRVGVRKTP

SEQ ID NO: 65302 - protein, 262 aa, Homo sapiens
MKTPFGKTPGQRSRADAGHAGVSANMMKKRTSHKKHRSSVGPSKPVSQPRRNIVGCRIQHGWKEGNGPVTQWKGTVLDQVPVNPSLYLIKYDGFDCVYGLELNKDERVSALEVLPDRVATSRISDAHLADTMIGKAVEHMFETEDGSKDEWRGMVLARAPVMNTWFYITYEKDPVLYMYQLLDDYKEGDLRIMPDSNDSPPAEREPGEVVDSLVGKQVEYAKEDGSKRTGMVIHQVEAKPSVYFIKFDDDFHIYVYDLVKTS

SEQ ID NO: 65303 - protein, 262 aa, Homo sapiens; identical to SEQ ID NO: 65302

SEQ ID NO: 65304 - protein, 528 aa, Homo sapiens
MAGSDTAPFLSQADDPDDGPVPGTPGLPGSTGNPKSEEPEVPDQEGLQRITGLSPGRSALIVAVLCYINLLNYMDRFTVAGVLPDIEQFFNIGDSSSGLIQTVFISSYMVLAPVFGYLGDRYNRKYLMCGGIAFWSLVTLGSSFIPGEHFWLLLLTRGLVGVGEASYSTIAPTLIADLFVADQRSRMLSIFYFAIPVGSGLGYIAGSKVKDMAGDWHWALRVTPGLGVVAVLLLFLVVREPPRGAVERHSDLPPLNPTSWWADLRALARNPSFVLSSLGFTAVAFVTGSLALWAPAFLLRSRVVLGETPPCLPGDSCSSSDSLIFGLITCLTGVLGVGLGVEISRRLRHSNPRADPLVCATGLLGSAPFLFLSLACARGSIVATYIFIFIGETLLSMNWAIVADILLYVVIPTRRSTAEAFQIVLSHLLGDAGSPYLIGLISDRLRRNWPPSFLSEFRALQFSLMLCAFVGALGGAAFLGTAIFIEADRRRAQLHVQGLLHEAGSTDDRIVVPQRGRSTRVPVASVLI

SEQ ID NO: 65305 - protein, 455 aa, Homo sapiens
MDRFTVAGVLPDIEQFFNIGDSSSGLIQTVFISSYMVLAPVFGYLGDRYNRKYLMCGGIAFWSLVTLGSSFIPGEHFWLLLLTRGLVGVGEASYSTIAPTLIADLFVADQRSRMLSIFYFAIPVGSGLGYIAGSKVKDMAGDWHWALRVTPGLGVVAVLLLFLVVREPPRGAVERHSDLPPLNPTSWWADLRALARNPSFVLSSLGFTAVAFVTGSLALWAPAFLLRSRVVLGETPPCLPGDSCSSSDSLIFGLITCLTGVLGVGLGVEISRRLRHSNPRADPLVCATGLLGSAPFLFLSLACARGSIVATYIFIFIGETLLSMNWAIVADILLYVVIPTRRSTAEAFQIVLSHLLGDAGSPYLIGLISDRLRRNWPPSFLSEFRALQFSLMLCAFVGALGGAAFLGTAIFIEADRRRAQLHVQGLLHEAGSTDDRIVVPQRGRSTRVPVASVLI

SEQ ID NO: 65306 - protein, 476 aa, Homo sapiens
MAGSDTAPFLSQADDPDDGPVPGTPGLPGSTGNPKSEEPEVPDQEGLQRITGLSPGRSALIVAVLCYINLLNYMDRFTVAGVLPDIEQFFNIGDSSSGLIQTVFISSYMVLAPVFGYLGDRYNRKYLMCGGIAFWSLVTLGSSFIPGEHFWLLLLTRGLVGVGEASYSTIAPTLIADLFVADQRSRMLSIFYFAIPVGSGLGYIAGSKVKDMAGDWHWALRVTPGLGVVAVLLLFLVVREPPRGAVERHSDLPPLNPTSWWADLRALARNLIFGLITCLTGVLGVGLGVEISRRLRHSNPRADPLVCATGLLGSAPFLFLSLACARGSIVATYIFIFIGETLLSMNWAIVADILLYVVIPTRRSTAEAFQIVLSHLLGDAGSPYLIGLISDRLRRNWPPSFLSEFRALQFSLMLCAFVGALGGAAFLGTAIFIEADRRRAQLHVQGLLHEAGSTDDRIVVPQRGRSTRVPVASVLI

SEQ ID NO: 65307 - protein, 454 aa, Homo sapiens
MAGSDTAPFLSQADDPDDGPVPGTPGLPGSTGNPKSEEPEVPDQEGLQRITGLSPGRSALIVAVLCYINLLNYMDRFTVAVFISSYMVLAPVFGYLGDRYNRKYLMCGGIAFWSLVTLGSSFIPGEHFWLLLLTRGLVGVGEASYSTIAPTLIADLFVADQRSRMLSIFYFAIPVGSGLGYIAGSKVKDMAGDWHWALRVTPGLGVVAVLLLFLVVREPPRGAVERHSDLPPLNPTSWWADLRALARNLIFGLITCLTGVLGVGLGVEISRRLRHSNPRADPLVCATGLLGSAPFLFLSLACARGSIVATYIFIFIGETLLSMNWAIVADILLYVVIPTRRSTAEAFQIVLSHLLGDAGSPYLIGLISDRLRRNWPPSFLSEFRALQFSLMLCAFVGALGGAAFLGTAIFIEADRRRAQLHVQGLLHEAGSTDDRIVVPQRGRSTRVPVASVLI

SEQ ID NO: 65308 - protein, 549 aa, Homo sapiens
MMCLECASAAAGGAEEEEADAERRRRRRGAQRGAGGSGCCGARGAGGAGVSAAGDEVQTLSGSVRRAPTGPPGTPGTPGCAATAKGPGAQQPKPASLGRGRGAAAAILSLGNVLNYLDRYTVAGVLLDIQQHFGVKDRGAGLLQSVFICSFMVAAPIFGYLGDRFNRKVILSCGIFFWSAVTFSSSFIPQQYFWLLVLSRGLVGIGEASYSTIAPTIIGDLFTKNTRTLMLSVFYFAIPLGSGLGYITGSSVKQAAGDWHWALRVSPVLGMITGTLILILVPATKRGHADQLGDQLKARTSWLRDMKALIRNRSYVFSSLATSAVSFATGALGMWIPLYLHRAQVVQKTAETCNSPPCGAKDSLIFGAITCFTGFLGVVTGAGATRWCRLKTQRADPLVCAVGMLGSAIFICLIFVAAKSSIVGAYICIFVGETLLFSNWAITADILMYVVIPTRRATAVALQSFTSHLLGDAGSPYLIGFISDLIRQSTKDSPLWEFLSLGYALMLCPFVVVLGGMFFLATALFFVSDRARAEQQVNQLAMPPASVKV

SEQ ID NO: 65309 - protein, 385 aa, Homo sapiens
MLVCFRLYSWLFFLSRGIVGTGSASYSTIAPTVLGDLFVRDQRTRVLAVFYIFIPVGSGLGYVLGSAVTMLTGNWRWALRVMPCLEAVALILLILLVPDPPRGAAETQGEGAVGGFRSSWCEDVRYLGKNWSFVWSTLGVTAMAFVTGALGFWAPKFLLEARVVHGLQPPCFQEPCSNPDSLIFGALTIMTGVIGVILGAEAARRYKKVIPGAEPLICASSLLATAPCLYLALVLAPTTLLASYVFLGLGELLLSCNWAVVADILLSVVVPRCRGTAEALQITVGHILGDAGSPYLTGLISSVLRARRPDSYLQRFRSLQQSFLCCAFVIALGGGCFLLTALYLERDETRAWQPVTGTPDSNDVDSNDLERQGLLSGAGASTEEP

SEQ ID NO: 65310 - protein, 512 aa, Homo sapiens
MAGGMSAECPEPGPGGLQGQSPGPGRQCPPPITPTSWSLPPWRAYVAAAVLCYINLLNYMNWFIIAGVLLDIQEVFQISDNHAGLLQTVFVSCLLLSAPVFGYLGDRHSRKATMSFGILLWSGAGLSSSFISPRYSWLFFLSRGIVGTGSASYSTIAPTVLGDLFVRDQRTRVLAVFYIFIPVGSGLGYVLGSAVTMLTGNWRWALRVMPCLEAVALILLILLVPDPPRGAAETQGEGAVGGFRSSWCEDVRYLGKNWSFVWSTLGVTAMAFVTGALGFWAPKFLLEARVVHGLQPPCFQEPCSNPDSLIFGALTIMTGVIGVILGAEAARRYKKVIPGAEPLICASSLLATAPCLYLALVLAPTTLLASYVFLGLGELLLSCNWAVVADILLSVVVPRCRGTAEALQITVGHILGDAGSPYLTGLISSVLRARRPDSYLQRFRSLQQSFLCCAFVIALGGGCFLLTALYLERDETRAWQPVTGTPDSNDVDSNDLERQGLLSGAGASTEEP

SEQ ID NO: 65311 - protein, 82 aa, Homo sapiens
MGQTALAGGSSSTPTPQALYPDLSCPEGLEELLSAPPPDLGAQRRHGWNPKDCSENIEVKEGGLYFERRPVAQSTDGARGKR

SEQ ID NO: 65312 - protein, 263 aa, Homo sapiens
MGQTALAGGSSSTPTPQALYPDLSCPEGLEELLSAPPPDLGAQRRHGWNPKDCSENIEVKEGGLYFERRPVAQSTDGARGKRGYSRGLHAWEISWPLEQRGTHAVVGVATALAPLQTDHYAALLGSNSESWGWDIGRGKLYHQSKGPGAPQYPAGTQGEQLEVPERLLVVLDMEEGTLGYAIGGTYLGPAFRGLKGRTLYPAVSAVWGQCQVRIRYLGERRAEPHSLLHLSRLCVRHNLGDTRLGQVSALPLPPAMKRYLLYQ

SEQ ID NO: 65313 - protein, 263 aa, Homo sapiens; identical to SEQ ID NO: 65312

SEQ ID NO: 65314 - protein, 355 aa, Homo sapiens
MARRPRNSRAWHFVLSAARRDADARAVALAGSTNWGYDSDGQHSDSDSDPEYSTLPPSIPSAVPVTGESFCDCAGQSEASFCSSLHSAHRGRDCRCGEEDEYFDWVWDDLNKSSATLLSCDNRKVSFHMEYSCGTAAIRGTKELGEGQHFWEIKMTSPVYGTDMMVGIGTSDVDLDKYRHTFCSLLGRDEDSWGLSYTGLLHHKGDKTSFSSRFGQGSIIGVHLDTWHGTLTFFKNRKCIGVAATKLQNKRFYPMVCSTAARSSMKVTRSCASATSLQYLCCHRLRQLRPDSGDTLEGLPLPPGLKQVLHNKLGWVLSMSCSRRKAPVSDPQAATSAHPSSREPRPCQRKRCRRT

SEQ ID NO: 65315 - protein, 159 aa, Homo sapiens
MEYSCGTAAIRGTKELGEGQHFWEIKMTSPVYGTLTFFKNRKCIGVAATKLQNKRFYPMVCSTAARSSMKVTRSCASATSLQYLCCHRLRQLRPDSGDTLEGLPLPPGLKQVLHNKLGWVLSMSCSRRKAPVSDPQAATSAHPSSREPRPCQRKRCRRT

SEQ ID NO: 65316 - protein, 355 aa, Homo sapiens; identical to SEQ ID NO: 65314

SEQ ID NO: 65317 - protein, 273 aa, Homo sapiens
MGQKLSGSLKSVEVREPALRPAKRELRGAEPGRPARLDQLLDMPAAGLAVQLRHAWNPEDRSLNVFVKDDDRLTFHRHPVAQSTDGIRGKVGHARGLHAWQINWPARQRGTHAVVGVATARAPLHSVGYTALVGSDAESWGWDLGRSRLYHDGKNQPGVAYPAFLGPDEAFALPDSLLVVLDMDEGTLSFIVDGQYLGVAFRGLKGKKLYPVVSAVWGHCEVTMRYINGLDPEPLPLMDLCRRSIRSALGRQRLQDISSLPLPQSLKNYLQYQ

SEQ ID NO: 65318 - protein, 635 aa, Homo sapiens
MASSGMADSANHLPFFFGNITREEAEDYLVQGGMSDGLYLLRQSRNYLGGFALSVAHGRKAHHYTIERELNGTYAIAGGRTHASPADLCHYHSQESDGLVCLLKKPFNRPQGVQPKTGPFEDLKENLIREYVKQTWNLQGQALEQAIISQKPQLEKLIATTAHEKMPWFHGKISREESEQIVLIGSKTNGKFLIRARDNNGSYALCLLHEGKVLHYRIDKDKTGKLSIPEGKKFDTLWQLVEHYSYKADGLLRVLTVPCQKIGTQGNVNFGGRPQLPGSHPATWSAGGIISRIKSYSFPKPGHRKSSPAQGNRQESTVSFNPYEPELAPWAADKGPQREALPMDTEVYESPYADPEEIRPKEVYLDRKLLTLEDKELGSGNFGTVKKGYYQMKKVVKTVAVKILKNEANDPALKDELLAEANVMQQLDNPYIVRMIGICEAESWMLVMEMAELGPLNKYLQQNRHVKDKNIIELVHQVSMGMKYLEESNFVHRDLAARNVLLVTQHYAKISDFGLSKALRADENYYKAQTHGKWPVKWYAPECINYYKFSSKSDVWSFGVLMWEAFSYGQKPYRGMKGSEVTAMLEKGERMGCPAGCPREMYDLMNLCWTYDVENRPGFAAVELRLRNYYYDVVN

SEQ ID NO: 65319 - protein, 612 aa, Homo sapiens
MASSGMADSANHLPFFFGNITREEAEDYLVQGGMSDGLYLLRQSRNYLGGFALSVAHGRKAHHYTIERELNGTYAIAGGRTHASPADLCHYHSQESDGLVCLLKKPFNRPQGVQPKTGPFEDLKENLIREYVKQTWNLQGQALEQAIISQKPQLEKLIATTAHEKMPWFHGKISREESEQIVLIGSKTNGKFLIRARDNNGSYALCLLHEGKVLHYRIDKDKTGKLSIPEGKKFDTLWQLVEHYSYKADGLLRVLTVPCQKIGTQGNVNFGGRPQLPGSHPASSPAQGNRQESTVSFNPYEPELAPWAADKGPQREALPMDTEVYESPYADPEEIRPKEVYLDRKLLTLEDKELGSGNFGTVKKGYYQMKKVVKTVAVKILKNEANDPALKDELLAEANVMQQLDNPYIVRMIGICEAESWMLVMEMAELGPLNKYLQQNRHVKDKNIIELVHQVSMGMKYLEESNFVHRDLAARNVLLVTQHYAKISDFGLSKALRADENYYKAQTHGKWPVKWYAPECINYYKFSSKSDVWSFGVLMWEAFSYGQKPYRGMKGSEVTAMLEKGERMGCPAGCPREMYDLMNLCWTYDVENRPGFAAVELRLRNYYYDVVN

SEQ ID NO: 65320 - protein, 612 aa, Homo sapiens; identical to SEQ ID NO: 65319

SEQ ID NO: 65321 - protein, 635 aa, Homo sapiens; identical to SEQ ID NO: 65318

SEQ ID NO: 65322 - protein, 548 aa, Homo sapiens
MATGANATPLDFPSKKRKRSRWNQDTMEQKTVIPGMPTVIPPGLTREQERAYIVQLQIEDLTRKLRTGDLGIPPNPEDRSPSPEPIYNSEGKRLNTREFRTRKKLEEERHNLITEMVALNPDFKPPADYKPPATRVSDKVMIPQDEYPEINFVGLLIGPRGNTLKNIEKECNAKIMIRGKGSVKEGKVGRKDGQMLPGEDEPLHALVTANTMENVKKAVEQIRNILKQGIETPEDQNDLRKMQLRELARLNGTLREDDNRILRPWQSSETRSITNTTVCTKCGGAGHIASDCKFQRPGDPQSAQDKARMDKEYLSLMAELGEAPVPASVGSTSGPATTPLASAPRPAAPANNPPPPSLMSTTQSRPPWMNSGPSESRPYHGMHGGGPGGPGGGPHSFPHPLPSLTGGHGGHPMQHNPNGPPPPWMQPPPPPMNQGPHPPGHHGPPPMDQYLGSTPVGSGVYRLHQGKGMMPPPPMGMMPPPPPPPSGQPPPPPSGPLPPWQQQQQQPPPPPPPSSSMASSTPLPWQQRSLPAAAMARAMRVRTFRAHW

SEQ ID NO: 65323 - protein, 638 aa, Homo sapiens
MATGANATPLDFPSKKRKRSRWNQDTMEQKTVIPGMPTVIPPGLTREQERAYIVQLQIEDLTRKLRTGDLGIPPNPEDRSPSPEPIYNSEGKRLNTREFRTRKKLEEERHNLITEMVALNPDFKPPADYKPPATRVSDKVMIPQDEYPEINFVGLLIGPRGNTLKNIEKECNAKIMIRGKGSVKEGKVGRKDGQMLPGEDEPLHALVTANTMENVKKAVEQIRNILKQGIETPEDQNDLRKMQLRELARLNGTLREDDNRILRPWQSSETRSITNTTVCTKCGGAGHIASDCKFQRPGDPQSAQDKARMDKEYLSLMAELGEAPVPASVGSTSGPATTPLASAPRPAAPANNPPPPSLMSTTQSRPPWMNSGPSESRPYHGMHGGGPGGPGGGPHSFPHPLPSLTGGHGGHPMQHNPNGPPPPWMQPPPPPMNQGPHPPGHHGPPPMDQYLGSTPVGSGVYRLHQGKGMMPPPPMGMMPPPPPPPSGQPPPPPSGPLPPWQQQQQQPPPPPPPSSSMASSTPLPWQQNTTTTTTSAGTGSIPPWQQQQAAAAASPGAPQMQGNPTMVPLPPGVQPPLPPGAPPPPPPPPPGSAGMMIPPRGGDGPSHESEDFPRPLVTLPGRQPQQRPWWTGWFGKAA

SEQ ID NO: 65324 - protein, 639 aa, Homo sapiens
MATGANATPLDFPSKKRKRSRWNQDTMEQKTVIPGMPTVIPPGLTREQERAYIVQLQIEDLTRKLRTGDLGIPPNPEDRSPSPEPIYNSEGKRLNTREFRTRKKLEEERHNLITEMVALNPDFKPPADYKPPATRVSDKVMIPQDEYPEINFVGLLIGPRGNTLKNIEKECNAKIMIRGKGSVKEGKVGRKDGQMLPGEDEPLHALVTANTMENVKKAVEQIRNILKQGIETPEDQNDLRKMQLRELARLNGTLREDDNRILRPWQSSETRSITNTTVCTKCGGAGHIASDCKFQRPGDPQSAQDKARMDKEYLSLMAELGEAPVPASVGSTSGPATTPLASAPRPAAPANNPPPPSLMSTTQSRPPWMNSGPSESRPYHGMHGGGPGGPGGGPHSFPHPLPSLTGGHGGHPMQHNPNGPPPPWMQPPPPPMNQGPHPPGHHGPPPMDQYLGSTPVGSGVYRLHQGKGMMPPPPMGMMPPPPPPPSGQPPPPPSGPLPPWQQQQQQPPPPPPPSSSMASSTPLPWQQNTTTTTTSAGTGSIPPWQQQQAAAAASPGAPQMQGNPTMVPLPPGVQPPLPPGAPPPPPPPPPGSAGMMYAPPPPPPPPMDPSNFVTMMGMGVAGMPPFGMPPAPPPPPPQN

SEQ ID NO: 65325 - protein, 571 aa, Homo sapiens
MATGANATPLDFPSKKRKRSRWNQDTMEQKTVIPGMPTVIPPGLTREQERAYIVQLQIEDLTRKLRTGDLGIPPNPEDRSPSPEPIYNSEGKRLNTREFRTRKKLEEERHNLITEMVALNPDFKPPADYKPPATRVSDKVMIPQDEYPEINFVGLLIGPRGNTLKNIEKECNAKIMIRGKGSVKEGKVGRKDGQMLPGEDEPLHALVTANTMENVKKAVEQIRNILKQGIETPEDQNDLRKMQLRELARLNGTLREDDNRILRPWQSSETRSITNTTVCTKCGGAGHIASDCKFQRPGDPQSAQDKARMDKEYLSLMAELGEAPVPASVGSTSGPATTPLASAPRPAAPANNPPPPSLMSTTQSRPPWMNSGPSESRPYHGMHGGGPGGPGGGPHSFPHPLPSLTGGHGGHPMQHNPNGPPPPWMQPPPPPMNQGPHPPGHHGPPPMGKSVPGKYACGLWGLSPASRKRYDAATTYGHDAAAAAASQWAAPTPSLWSSSPMATTAAAASATPSAQQQYGFQYPLAMAAKIPPRGGDGPSHESEDFPRPLVTLPGRQPQQRPWWTGWFGKAA

SEQ ID NO: 65326 - protein, 433 aa, Homo sapiens
MVALNPDFKPPADYKPPATRVSDKVMIPQDEYPEINFVGLLIGPRGNTLKNIEKECNAKIMIRGKGSVKEGKVGRKDGQMLPGEDEPLHALVTANTMENVKKAVEQIRNILKQGIETPEDQNDLRKMQLRELARLNGTLREDDNRILRPWQSSETRSITNTTVCTKCGGAGHIASDCKFQRPGDPQSAQDKARMDKEYLSLMAELGEAPVPASVGSTSGPATTPLASAPRPAAPANNPPPPSLMSTTQSRPPWMNSGPSESRPYHGMHGGGPGGPGGGPHSFPHPLPSLTGGHGGHPMQHNPNGPPPPWMQPPPPPMNQGPHPPGHHGPPPMDQYLGSTPVGSGVYRLHQGKGMMPPPPMGMMPPPPPPPSGQPPPPPSGPLPPWQQQQQQPPPPPPPSSSMASSTPLPWQQRSLPAAAMARAMRVRTFRAHW

SEQ ID NO: 65327 - protein, 673 aa, Homo sapiens
MATGANATPLGKLGPPGLPPLPGPKGGFEPGPPPAPGPGAGLLAPGPPPPPPVGSMGALTAAFPFAALPPPPPPPPPPPPQQPPPPPPPPSPGASYPPPQPPPPPPLYQRVSPPQPPPPQPPRKDQQPGPAGGGGDFPSKKRKRSRWNQDTMEQKTVIPGMPTVIPPGLTREQERAYIVQLQIEDLTRKLRTGDLGIPPNPEDRSPSPEPIYNSEGKRLNTREFRTRKKLEEERHNLITEMVALNPDFKPPADYKPPATRVSDKVMIPQDEYPEINFVGLLIGPRGNTLKNIEKECNAKIMIRGKGSVKEGKVGRKDGQMLPGEDEPLHALVTANTMENVKKAVEQIRNILKQGIETPEDQNDLRKMQLRELARLNGTLREDDNRILRPWQSSETRSITNTTVCTKCGGAGHIASDCKFQRPGDPQSAQDKARMDKEYLSLMAELGEAPVPASVGSTSGPATTPLASAPRPAAPANNPPPPSLMSTTQSRPPWMNSGPSESRPYHGMHGGGPGGPGGGPHSFPHPLPSLTGGHGGHPMQHNPNGPPPPWMQPPPPPMNQGPHPPGHHGPPPMDQYLGSTPVGSGVYRLHQGKGMMPPPPMGMMPPPPPPPSGQPPPPPSGPLPPWQQQQQQPPPPPPPSSSMASSTPLPWQQRSLPAAAMARAMRVRTFRAHW

SEQ ID NO: 65328 - protein, 613 aa, Homo sapiens
MEQKTVIPGMPTVIPPGLTREQERAYIVQLQIEDLTRKLRTGDLGIPPNPEDRSPSPEPIYNSEGKRLNTREFRTRKKLEEERHNLITEMVALNPDFKPPADYKPPATRVSDKVMIPQDEYPEINFVGLLIGPRGNTLKNIEKECNAKIMIRGKGSVKEGKVGRKDGQMLPGEDEPLHALVTANTMENVKKAVEQIRNILKQGIETPEDQNDLRKMQLRELARLNGTLREDDNRILRPWQSSETRSITNTTVCTKCGGAGHIASDCKFQRPGDPQSAQDKARMDKEYLSLMAELGEAPVPASVGSTSGPATTPLASAPRPAAPANNPPPPSLMSTTQSRPPWMNSGPSESRPYHGMHGGGPGGPGGGPHSFPHPLPSLTGGHGGHPMQHNPNGPPPPWMQPPPPPMNQGPHPPGHHGPPPMDQYLGSTPVGSGVYRLHQGKGMMPPPPMGMMPPPPPPPSGQPPPPPSGPLPPWQQQQQQPPPPPPPSSSMASSTPLPWQQNTTTTTTSAGTGSIPPWQQQQAAAAASPGAPQMQGNPTMVPLPPGVQPPLPPGAPPPPPPPPPGSAGMMYAPPPPPPPPMDPSNFVTMMGMGVAGMPPFGMPPAPPPPPPQN

SEQ ID NO: 65329 - protein, 793 aa, Homo sapiens
MPAGPVQAVPPPPPVPTEPKQPTEEEASSKEDSAPSKPVVGIIYPPPEVRNIVDKTASFVARNGPEFEARIRQNEINNPKFNFLNPNDPYHAYYRHKVSEFKEGKAQEPSAAIPKVMQQQQQTTQQQLPQKVQAQVIQETIVPKEPPPEFEFIADPPSISAFDLDVVKLTAQFVARNGRQFLTQLMQKEQRNYQFDFLRPQHSLFNYFTKLVEQYTKILIPPKGLFSKLKKEAENPREVLDQVCYRVEWAKFQERERKKEEEEKEKERVAYAQIDWHDFVVVETVDFQPNEQGNFPPPTTPEELGARILIQERYEKFGESEEVEMEVESDEEDDKQEKAEEPPSQLDQDTQVQDMDEGSDDEEEGQKVPPPPETPMPPPLPPTPDQVIVRKDYDPKASKPLPPAPAPDEYLVSPITGEKIPASKMQEHMRIGLLDPRWLEQRDRSIREKQSDDEVYAPGLDIESSLKQLAERRTDIFGVEETAIGKKIGEEEIQKPEEKVTWDGHSGSMARTQQAAQANITLQEQIEAIHKAKGLVPEDDTKEKIGPSKPNEIPQQPPPPSSATNIPSSAPPITSVPRPPTMPPPVRTTVVSAVPVMPRPPMASVVRLPPGSVIAPMPPIIHAPRINVVPMPPSAPPIMAPRPPPMIVPTAFVPAPPVAPVPAPAPMPPVHPPPPMEDEPTSKKLKTEDSLMPEEEFLRRNKGPVSIKVQVPNMQDKTEWKLNGQVLVFTLPLTDQVSVIKVKIHEATGMPAGKQKLQYEGIFIKDSNSLAYYNMANGAVIHLALKERGGRKK

SEQ ID NO: 65330 - protein, 728 aa, Homo sapiens
MPAGPVQAVPPPPPVPTEPKQPTEEEASSKEDSAPSKPVVGIIYPPPEVRNIVDKTASFVARNGPEFEARIRQNEINNPKFNFLNPNDPYHAYYRHKVSEFKEGKAQFVARNGRQFLTQLMQKEQRNYQFDFLRPQHSLFNYFTKLVEQYTKILIPPKGLFSKLKKEAENPREVLDQVCYRVEWAKFQERERKKEEEEKEKERVAYAQIDWHDFVVVETVDFQPNEQGNFPPPTTPEELGARILIQERYEKFGESEEVEMEVESDEEDDKQEKAEEPPSQLDQDTQVQDMDEGSDDEEEGQKVPPPPETPMPPPLPPTPDQVIVRKDYDPKASKPLPPAPAPDEYLVSPITGEKIPASKMQEHMRIGLLDPRWLEQRDRSIREKQSDDEVYAPGLDIESSLKQLAERRTDIFGVEETAIGKKIGEEEIQKPEEKVTWDGHSGSMARTQQAAQANITLQEQIEAIHKAKGLVPEDDTKEKIGPSKPNEIPQQPPPPSSATNIPSSAPPITSVPRPPTMPPPVRTTVVSAVPVMPRPPMASVVRLPPGSVIAPMPPIIHAPRINVVPMPPSAPPIMAPRPPPMIVPTAFVPAPPVAPVPAPAPMPPVHPPPPMEDEPTSKKLKTEDSLMPEEEFLRRNKGPVSIKVQVPNMQDKTEWKLNGQVLVFTLPLTDQVSVIKVKIHEATGMPAGKQKLQYEGIFIKDSNSLAYYNMANGAVIHLALKERGGRKK

SEQ ID NO: 65331 - protein, 690 aa, Homo sapiens
MTLTMPTTAIPKVMQQQQQTTQQQLPQKVQAQVIQETIVPKEPPPEFEFIADPPSISAFDLDVVKLTAQFVARNGRQFLTQLMQKEQRNYQFDFLRPQHSLFNYFTKLVEQYTKILIPPKGLFSKLKKEAENPREVLDQVCYRVEWAKFQERERKKEEEEKEKERVAYAQIDWHDFVVVETVDFQPNEQGNFPPPTTPEELGARILIQERYEKFGESEEVEMEVESDEEDDKQEKAEEPPSQLDQDTQVQDMDEGSDDEEEGQKVPPPPETPMPPPLPPTPDQVIVRKDYDPKASKPLPPAPAPDEYLVSPITGEKIPASKMQEHMRIGLLDPRWLEQRDRSIREKQSDDEVYAPGLDIESSLKQLAERRTDIFGVEETAIGKKIGEEEIQKPEEKVTWDGHSGSMARTQQAAQANITLQEQIEAIHKAKGLVPEDDTKEKIGPSKPNEIPQQPPPPSSATNIPSSAPPITSVPRPPTMPPPVRTTVVSAVPVMPRPPMASVVRLPPGSVIAPMPPIIHAPRINVVPMPPSAPPIMAPRPPPMIVPTAFVPAPPVAPVPAPAPMPPVHPPPPMEDEPTSKKLKTEDSLMPEEEFLRRNKGPVSIKVQVPNMQDKTEWKLNGQVLVFTLPLTDQVSVIKVKIHEATGMPAGKQKLQYEGIFIKDSNSLAYYNMANGAVIHLALKERGGRKK

SEQ ID NO: 65332 - protein, 464 aa, Homo sapiens
MDFQHRPGGKTGSGGVASSSESNRDRRERLRQLALETIDINKDPYFMKNHLGSYECKLCLTLHNNEGSYLAHTQGKKHQTNLARRAAKEAKEAPAQPAPEKVKVEVKKFVKIGRPGYKVTKQRDSEMGQQSLLFQIDYPEIAEGIMPRHRFMSAYEQRIEPPDRRWQYLLMAAEPYETIAFKVPSREIDKAEGKFWTHWNRETKQFFLQFHFKMEKPPAPPSLPAGPPGVKRPPPPLMNGLPPRPPLPESLPPPPPGGLPLPPMPPTGPAPSGPPGPPQLPPPAPGVHPPAPVVHPPASGVHPPAPGVHPPAPGVHPPAPGVHPPTSGVHPPAPGVHPPAPGVHPPAPGVHPPAPGVHPPAPGVHPPPSAGVHPQAPGVHPAAPAVHPQAPGVHPPAPGMHPQAPGVHPQPPGVHPSAPGVHPQPPGVHPSNPGVHPPTPMPPMLRPPLPSEGPGNIPPPPPTN

SEQ ID NO: 65333 - protein, 1304 aa, Homo sapiens
MAKIAKTHEDIEAQIREIQGKKAALDEAQGVGLDSTGYYDQEIYGGSDSRFAGYVTSIAATELEDDDDDYSSSTSLLGQKKPGYHAPVALLNDIPQSTEQYDPFAEHRPPKIADREDEYKKHRRTMIISPERLDPFADGGKTPDPKMNARTYMDVMREQHLTKEEREIRQQLAEKAKAGELKVVNGAAASQPPSKRKRRWDQTADQTPGATPKKLSSWDQAETPGHTPSLRWDETPGRAKGSETPGATPGSKIWDPTPSHTPAGAATPGRGDTPGHATPGHGGATSSARKNRWDETPKTERDTPGHGSGWAETPRTDRGGDSIGETPTPGASKRKSRWDETPASQMGGSTPVLTPGKTPIGTPAMNMATPTPGHIMSMTPEQLQAWRWEREIDERNRPLSDEELDAMFPEGYKVLPPPAGYVPIRTPARKLTATPTPLGGMTGFHMQTEDRTMKSVNDQPSGNLPFLKPDDIQYFDKLLVDVDESTLSPEEQKERKIMKLLLKIKNGTPPMRKAALRQITDKAREFGAGPLFNQILPLLMSPTLEDQERHLLVKVIDRILYKLDDLVRPYVHKILVVIEPLLIDEDYYARVEGREIISNLAKAAGLATMISTMRPDIDNMDEYVRNTTARAFAVVASALGIPSLLPFLKAVCKSKKSWQARHTGIKIVQQIAILMGCAILPHLRSLVEIIEHGLVDEQQKVRTISALAIAALAEAATPYGIESFDSVLKPLWKGIRQHRGKGLAAFLKAIGYLIPLMDAEYANYYTREVMLILIREFQSPDEEMKKIVLKVVKQCCGTDGVEANYIKTEILPPFFKHFWQHRMALDRRNYRQLVDTTVELANKVGAAEIISRIVDDLKDEAEQYRKMVMETIEKIMGNLGAADIDHKLEEQLIDGILYAFQEQTTEDSVMLNGFGTVVNALGKRVKPYLPQICGTVLWRLNNKSAKVRQQAADLISRTAVVMKTCQEEKLMGHLGVVLYEYLGEEYPEVLGSILGALKAIVNVIGMHKMTPPIKDLLPRLTPILKNRHEKVQENCIDLVGRIADRGAEYVSAREWMRICFELLELLKAHKKAIRRATVNTFGYIAKAIGPHDVLATLLNNLKVQERQNRVCTTVAIAIVAETCSPFTVLPALMNEYRVPELNVQNGVLKSLSFLFEYIGEMGKDYIYAVTPLLEDALMDRDLVHRQTASAVVQHMSLGVYGFGCEDSLNHLLNYVWPNVFETSPHVIQAVMGALEGLRVAIGPCRMLQYCLQGLFHPARKVRDVYWKIYNSIYIGSQDALIAHYPRIYNDDKNTYIRYELDYIL

SEQ ID NO: 65334 - protein, 144 aa, Homo sapiens
MAKIAKTHEDIEAQIREIQGKKAALDEAQGVGLDSTGYYDQEIYGGSDSRFAGYVTSIAATELEDDDDDYSSSTSLLGQKKPGYHAPVALLNDIPQSTEQYDPFAEHRPPKIADREDEYKKHRRTMIISPERLDPFADGFYSAA

SEQ ID NO: 65335 - protein, 144 aa, Homo sapiens; identical to SEQ ID NO: 65334

SEQ ID NO: 65336 - protein, 895 aa, Homo sapiens
MATEHPEPPKAELQLPPPPPPGHYGAWAAQELQAKLAEIGAPIQGNREELVERLQSYTRQTGIVLNRPVLRGEDGDKAAPPPMSAQLPGIPMPPPPLGLPPLQPPPPPPPPPPGLGLGFPMAHPPNLGPPPPLRVGEPVALSEEERLKLAQQQAALLMQQEERAKQQGDHSLKEHELLEQQKRAAVLLEQERQQEIAKMGTPVPRPPQDMGQIGVRTPLGPRVAAPVGPVGPTPTVLPMGAPVPRPRGPPPPPGDENREMDDPSVGPKIPQALEKILQLKESRQEEMNSQQEEEEMETDARSSLGQSASETEEDTVSVSKKEKNRKRRNRKKKKKPQRVRGVSSESSGDREKDSTRSRGSDSPAADVEIEYVTEEPEIYEPNFIFFKRIFEAFKLTDDVKKEKEKEPEKLDKLENSAAPKKKGFEEEHKDSDDDSSDDEQEKKPEAPKLSKKKLRRMNRFTVAELKQLVARPDVVEMHDVTAQDPKLLVHLKATRNSVPVPRHWCFKRKYLQGKRGIEKPPFELPDFIKRTGIQEMREALQEKEEQKTMKSKMREKVRPKMGKIDIDYQKLHDAFFKWQTKPKLTIHGDLYYEGKEFETRLKEKKPGDLSDELRISLGMPVGPNAHKVPPPWLIAMQRYGPPPSYPNLKIPGLNSPIPESCSFGYHAGGWGKPPVDETGKPLYGDVFGTNAAEFQTKTEEEEIDRTPWGELEPSDEESSEEEEEEESDEDKPDETGFITPADSGLITPGGFSSVPAGMETPELIELRKKKIEEAMDGSETPQLFTVLPEKRTATVGGAMMGSTHIYDMSTVMSRKGPAPELQGVEVALAPEELELDPMAMTQKYEEHVREQQAQVEKEDFSDMVAEHAAKQKQKKRKAQPQDSRGGSKKYKEFKF

SEQ ID NO: 65337 - protein, 799 aa, Homo sapiens
AKMATEHPEPPKAELQLPPPPPPGHYGAWAAQELQAKLAEIGAPIQGNREELVERLQSYTRQTGIVLNRPVLRGEDGDKAAPPPMSAQLPGIPMPPPPLGLPPLQPPPPPPPPPPGLGLGFPMAHPPNLGPPPPLRVGEPVALSEEERLKLAQQQAALLMQQEERAKQGDHSLKEHELLEQQKRAAVLLEQERQQEEEEMETDARSSLGQSASETEEDTVSVSKKEKNRKRRNRKKKKKPQRVRGVSSESSGDREKDSTRSRGSDSPAADVEIEYVTEEPEIYEPNFIFFKRIFEAFKLTDDVKKEKEKEPEKLDKLENSAAPKKKGFEEEHKDSDDDSSDDEQEKKPEAPKLSKKKLRRMNRFTVAELKQLVARPDVVEMHDVTAQDPKLLVHLKATRNSVPVPRHWCFKRKYLQGKRGIEKPPFELPDFIKRTGIQEMREALQEKEEQKTMKSKMREKVRPKMGKIDIDYQKLHDAFFKWQTKPKLTIHGDLYYEGKEFETRLKEKKPGDLSDELRISLGMPVGPNAHKVPPPWLIAMQRYGPPPSYPNLKIPGLNSPIPESCSFGYHAGGWGKPPVDETGKPLYGDVFGTNAAEFQTKTEEEEIDRTPWGELEPSDEESSEEEEEEESDEDKPDETGFITPADSGLITPGGFSSVPAGMETPELIELRKKKIEEAMDGSETPQLFTVLPEKRTATVGGAMMGSTHIYDMSTVMSRKGPAPELQGVEVALAPEELELDPMAMTQKYEEHVREQQAQVEKEDFSDMVAEHAAKQKQKKRKAQPQDSRGGSKKYKEFKF

SEQ ID NO: 65338 - protein, 1217 aa, Homo sapiens
MFLYNLTLQRATGISFAIHGNFSGTKQQEIVVSRGKILELLRPDPNTGKVHTLLTVEVFGVIRSLMAFRLTGGTKDYIVVGSDSGRIVILEYQPSKNMFEKIHQETFGKSGCRRIVPGQFLAVDPKGRAVMISAIEKQKLVYILNRDAAARLTISSPLEAHKANTLVYHVVGVDVGFENPMFACLEMDYEEADNDPTGEAAANTQQTLTFYELDLGLNHVVRKYSEPLEEHGNFLITVPGGSDGPSGVLICSENYITYKNFGDQPDIRCPIPRRRNDLDDPERGMIFVCSATHKTKSMFFFLAQTEQGDIFKITLETDEDMVTEIRLKYFDTVPVAAAMCVLKTGFLFVASEFGNHYLYQIAHLGDDDEEPEFSSAMPLEEGDTFFFQPRPLKNLVLVDELDSLSPILFCQIADLANEDTPQLYVACGRGPRSSLRVLRHGLEVSEMAVSELPGNPNAVWTVRRHIEDEFDAYIIVSFVNATLVLSIGETVEEVTDSGFLGTTPTLSCSLLGDDALVQVYPDGIRHIRADKRVNEWKTPGKKTIVKCAVNQRQVVIALTGGELVYFEMDPSGQLNEYTERKEMSADVVCMSLANVPPGEQRSRFLAVGLVDNTVRIISLDPSDCLQPLSMQALPAQPESLCIVEMGGTEKQDELGERGSIGFLYLNIGLQNGVLLRTVLDPVTGDLSDTRTRYLGSRPVKLFRVRMQGQEAVLAMSSRSWLSYSYQSRFHLTPLSYETLEFASGFASEQCPEGIVAISTNTLRILALEKLGAVFNQVAFPLQYTPRKFVIHPESNNLIIIETDHNAYTEATKAQRKQQMAEEMVEAAGEDERELAAEMAAAFLNENLPESIFGAPKAGNGQWASVIRVMNPIQGNTLDLVQLEQNEAAFSVAVCRFSNTGEDWYVLVGVAKDLILNPRSVAGGFVYTYKLVNNGEKLEFLHKTPVEEVPAAIAPFQGRVLIGVGKLLRVYDLGKKKLLRKCENKHIANYISGIQTIGHRVIVSDVQESFIWVRYKRNENQLIIFADDTYPRWVTTASLLDYDTVAGADKFGNICVVRLPPNTNDEVDEDPTGNKALWDRGLLNGASQKAEVIMNYHVGETVLSLQKTTLIPGGSESLVYTTLSGGIGILVPFTSHEDHDFFQHVEMHLRSEHPPLCGRDHLSFRSYYFPVKNVIDGDLCEQFNSMEPNKQKNVSEELDRTPPEVSKKLEDIRTRYAF

SEQ ID NO: 65339 - protein, 275 aa, Homo sapiens
MFLYNLTLQRATGISFAIHGNFSGTKQQEIVVSRGKILELLRPDPNTGKVHTLLTVEVFGVIRSLMAFRLTGGTKDYIVVGSDSGRIVILEYQPSKNMFEKIHQETFGKSGCRRIVPGQFLAVDPKGRAVMISAIEKQKLVYILNRDAAARLTISSPLEAHKANTLVYHVVGVDVGFENPMFACLEMDYEEADNDPTGEAAANTQQTLTFYELDLGLNHVVRKYSEPLEEHGNFLITVPGGSDGPSGVLNLSPPFPKAIPALICLDSPVYFCTHP

SEQ ID NO: 65340 - protein, 424 aa, Homo sapiens
MAAGPISERNQDATVYVGGLDEKVSEPLLWELFLQAGPVVNTHMPKDRVTGQHQGYGFVEFLSEEDADYAIKIMNMIKLYGKPIRVNKASAHNKNLDVGANIFIGNLDPEIDEKLLYDTFSAFGVILQTPKIMRDPDTGNSKGYAFINFASFDASDAAIEAMNGQYLCNRPITVSYAFKKDSKGERHGSAAERLLAAQNPLSQADRPHQLFADAPPPPSAPNPVVSSLGSGLPPPGMPPPGSFPPPVPPPGALPPGIPPAMPPPPMPPGAAGHGPPSAGTPGAGHPGHGHSHPHPFPPGGMPHPGMSQMQLAHHGPHGLGHPHAGPPGSGGQPPPRPPPGMPHPGPPPMGMPPRGPPFGSPMGHPGPMPPHGMRGPPPLMPPHGYTGPPRPPPYGYQRGPLPPPRPTPRPPVPPRGPLRGPLPQ

SEQ ID NO: 65341 - protein, 190 aa, Homo sapiens
MPKDRVTGQHQGYGFVEFLSEEDADYAIKIMNMIKLYGKPIRVNKASAHNKNLDVGANIFIGNLDPEIDEKLLYDTFSAFGVILQTPKIMRDPDTGNSKGYAFINFASFDASDAAIEAMNGQYLCNRPITVSYAFKKDSKGERHGSAAERLLAAQNPLSQADRPHQLFADAPPPPSAPNPVVSSLGSGLP

SEQ ID NO: 65342 - protein, 707 aa, Homo sapiens
MSRDRFRSRGGGGGGFHRRGGGGGRGGLHDFRSPPPGMGLNQNRGPMGPGPGQSGPKPPIPPPPPHQQQQQPPPQQPPPQQPPPHQPPPHPQPHQQQQPPPPPQDSSKPVVAQGPGPAPGVGSAPPASSSAPPATPPTSGAPPGSGPGPTPTPPPAVTSAPPGAPPPTPPSSGVPTTPPQAGGPPPPPAAVPGPGPGPKQGPGPGGPKGGKMPGGPKPGGGPGLSTPGGHPKPPHRGGGEPRGGRQHHPPYHQQHHQGPPPGGPGGRSEEKISDSEGFKANLSLLRRPGEKTYTQRCRLFVGNLPADITEDEFKRLFAKYGEPGEVFINKGKGFGFIKLESRALAEIAKAELDDTPMRGRQLRVRFATHAAALSVRNLSPYVSNELLEEAFSQFGPIERAVVIVDDRGRSTGKGIVEFASKPAARKAFERCSEGVFLLTTTPRPVIVEPLEQLDDEDGLPEKLAQKNPMYQKERETPPRFAQHGTFEYEYSQRWKSLDEMEKQQREQVEKNMKDAKDKLESEMEDAYHEHQANLLRQDLMRRQEELRRMEELHNQEMQKRKEMQLRQEEERRRREEEMMIRQREMEEQMRRQREESYSRMGYMDPRERDMRMGGGGAMNMGDPYGSGGQKFPPLGGGGGIGYEANPGVPPATMSGSMMGSDMRTERFGQGGAGPVGGQGPRGMGPGTPAGYGRGREEYEGPNKKPRF

SEQ ID NO: 65343 - protein, 624 aa, Homo sapiens
MNSGGGFGLGLGFGLTPTSVIQVTNLSSAVTSEQMRTLFSFLGEIEELRLYPPDNAPLAFSSKVCYVKFRDPSSVGVAQHLTNTVFIDRALIVVPCAEGKIPEESKALSLLAPAPTMTSLMPGAGLLPIPTPNPLTTLGVSLSSLGAIPAAALDPNIATLGEIPQPPLMGNVDPSKIDEIRRTVYVGNLNSQTTTADQLLEFFKQVGEVKFVRMAGDETQPTRFAFVEFADQNSVPRALAFNGVMFGDRPLKINHSNNAIVKPPEMTPQAAAKELEEVMKRVREAQSFISAAIEPESGKSNERKGGRSRSHTRSKSRSSSKSHSRRKRSQSKHRSRSHNRSRSRQKDRRRSKSPHKKRSKSRERRKSRSRSHSRDKRKDTREKIKEKERVKEKDREKEREREKEREKEKERGKNKDRDKEREKDREKDKEKDREREREKEHEKDRDKEKEKEQDKEKEREKDRSKEIDEKRKKDKKSRTPPRSYNASRRSRSSSRERRRRRSRSSSRSPRTSKTIKRKSSRSPSPRSRNKKDKKREKERDHISERRERERSTSMRKSSNDRDGKEKLEKNSTSLKEKEHNKEPDSSVSKEVDDKDAPRTEENKIQHNGNCQLNEENLSTKTEAV

SEQ ID NO: 65344 - protein, 508 aa, Homo sapiens
MTSLMPGAGLLPIPTPNPLTTLGVSLSSLGAIPAAALDPNIATLGEIPQPPLMGNVDPSKIDEIRRTVYVGNLNSQTTTADQLLEFFKQVGEVKFVRMAGDETQPTRFAFVEFADQNSVPRALAFNGVMFGDRPLKINHSNNAIVKPPEMTPQAAAKELEEVMKRVREAQSFISAAIEPESGKSNERKGGRSRSHTRSKSRSSSKSHSRRKRSQSKHRSRSHNRSRSRQKDRRRSKSPHKKRSKSRERRKSRSRSHSRDKRKDTREKIKEKERVKEKDREKEREREKEREKEKERGKNKDRDKEREKDREKDKEKDREREREKEHEKDRDKEKEKEQDKEKEREKDRSKEIDEKRKKDKKSRTPPRSYNASRRSRSSSRERRRRRSRSSSRSPRTSKTIKRKSSRSPSPRSRNKKDKKREKERDHISERRERERSTSMRKSSNDRDGKEKLEKNSTSLKEKEHNKEPDSSVSKEVDDKDAPRTEENKIQHNGNCQLNEENLSTKTEAV

SEQ ID NO: 65345 - protein, 76 aa, Homo sapiens
MTSLMPGAGLLPIPTPNPLTTLGVSLSSLGAIPAAALDPNIATLGEIPQPPLMGNVDPSKIDEIRRTVYVGNLNSQ

SEQ ID NO: 65346 - protein, 514 aa, Homo sapiens
MNSGGGFGLGLGFGLTPTSVIQVTNLSSAVTSEQMRTLFSFLGEIEELRLYPPDNAPLAFSSKVCYVKFRDPSSVGVAQHLTNTVFIDRALIVVPCAEGKIPEESKALSLLAPAPTMTSLMPGAGLLPIPTPNPLTTLGVSLSSLGAIPAAALDPNIATLGEIPQPPLMGNVDPSKIDEIRRTVYVGNLNSQTTTADQLLEFFKQVGEVKFVRMAGDETQPTRFAFVEFADQNSVPRALAFNGVMFGDRPLKINHSNNAIVKPPEMTPQAAAKELEEVMKRVREAQSFISAAIEPESGKSNERKGGRSRSHTRSKSRSSSKSHSRRKRSQSKHRSRSHNRSRSRQKDRRRSKSPHKKRSKSRERRKSRSRSHSRDKRKDTREKIKEKERVKEKDREKEREREKEREKEKERGKNKDRDKEREKDREKDKEKDREREREKEHEKDRDKEKEKEQDKEKEREKDRSKEIDEKRKKDKNPEHHPGVTMHREDLVVPAGKGVGGGAGVLPDRQEHQKP

SEQ ID NO: 65347 - protein, 70 aa, Homo sapiens
MSEKKQPVDLGLLEEDDEFEEFPAEDWAGLDEDEDAHVWEDNWDDDNVEDDFSNQLRAELEKHGYKMETS

SEQ ID NO: 65348 - protein, 358 aa, Homo sapiens
MAFAPMGPEASFFDVLDRHRESLLAALRRGGREPPTGGSRLASRFEDSVGLQMVSHCTTRKIKSDSPKSAQKFSLILKILSMIYKLVQSNTYATKRDIYYTDSQLFGNQTVVDNIINDISCMLKVSRRSLHILSTSKGLIAGNLRYIEEDGTKVNCTCGATAVAVPSNIQGIRNLVTDAKFVLIVEKDATFQRLLDDNFCNKLSPCIMITGKGVPDLNTRLLVKKLWDTFHVPVFTLVDADPHGIEIMCIYKYGSMSMSFEAHHLTVPAIRWLGLLPSDLKRLNVPKDSLIPLTKRDQMKLDSILRRPYVTCQPFWRKEMEIMADSKMKAEIQALTFLSSDYLSRVYLPNKLKFGGWI

SEQ ID NO: 65349 - protein, 354 aa, Homo sapiens
MAFAPMGPEASFFDVLDRHRESLLAALRRGGREPPTGGSRLASRFEDSVGLQMVSHCTTRKIKSDSPKSAQKFSLILKILSMIYKLVQSNTYATKRDIYYTDSQLFGNQTVVDNIINDISCMLKVSRRSLHILSTSKGLIAGNLRYIEEDGTKVNCTCGATAVAVPSNIQGIRNAKFVLIVEKDATFQRLLDDNFCNKLSPCIMITGKGVPDLNTRLLVKKLWDTFHVPVFTLVDADPHGIEIMCIYKYGSMSMSFEAHHLTVPAIRWLGLLPSDLKRLNVPKDSLIPLTKRDQMKLDSILRRPYVTCQPFWRKEMEIMADSKMKAEIQALTFLSSDYLSRVYLPNKLKFGGWI

SEQ ID NO: 65350 - protein, 396 aa, Homo sapiens
MAFAPMGPEASFFDVLDRHRESLLAALRRGGREPPTGGSRLASSSEVLASIENIIQDIITSLARNEAPAFTIDNRSSWENIKFEDSVGLQMVSHCTTRKIKSDSPKSAQKFSLILKILSMIYKLVQSNTYATKRDIYYTDSQLFGNQTVVDNIINDISCMLKVSRRSLHILSTSKGLIAGNLRYIEEDGTKVNCTCGATAVAVPSNIQGIRNLVTDAKFVLIVEKDATFQRLLDDNFCNKLSPCIMITGKGVPDLNTRLLVKKLWDTFHVPVFTLVDADPHGIEIMCIYKYGSMSMSFEAHHLTVPAIRWLGLLPSDLKRLNVPKDSLIPLTKRDQMKLDSILRRPYVTCQPFWRKEMEIMADSKMKAEIQALTFLSSDYLSRVYLPNKLKFGGWI

SEQ ID NO: 65351 - protein, 270 aa, Homo sapiens
LLAALRRGGREPPTGGSRLASSSEVLASIENIIQDIITSLARNEAPAFTIDNRSSWENIKFEDSVGLQMVSHCTTRKIKSDSPKSAQKFSLILKILSMIYKLVQSNTYATKRDIYYTDSQLFGNQTVVDNIINDISCMLKVSRRSLHILSTSKGLIAGNLRYIEEDGTKVNCTCGATAVAVPSNIQGIRITDAKFVLIVEKDATFQRLLDDNFCNKLSPCIMITGKGVPDLNTRLLVKKLWDTFHVPVFTLVDADPHGIEIMCIYKYGSM

SEQ ID NO: 65352 - protein, 331 aa, Homo sapiens
MENPSPAAALGKALCALLLATLGAAGQPLGGESICSARALAKYSITFTGKWSQTAFPKQYPLFRPPAQWSSLLGAAHSSDYSMWRKNQYVSNGLRDFAERGEAWALMKEIEAAGEALQSVHAVFSAPAVPSGTGQTSAELEVQRRHSLVSFVVRIVPSPDWFVGVDSLDLCDGDRWREQAALDLYPYDAGTDSGFTFSSPNFATIPQDTVTEITSSSPSHPANSFYYPRLKALPPIARVTLVRLRQSPRAFIPPAPVLPSRDNEIVDSASVPETPLDCEVSLWSSWGLCGGHCGRLGTKSRTRYVRVQPANNGSPCPELEEEAECVPDNCV

SEQ ID NO: 65353 - protein, 331 aa, Homo sapiens; identical to SEQ ID NO: 65352

SEQ ID NO: 65354 - protein, 61 aa, Homo sapiens
MENPSPAAALGKALCALLLATLGAAGQPLGGESICSARALAKYSITFTGKWSQTAFPKQYP

SEQ ID NO: 65355 - protein, 108 aa, Homo sapiens
MENPSPAAALGKALCALLLATLGAAGQPLGGESICSARALAKYSITFTGKWSQTAFPKQYPLFRPPAQWSSLLGAAHSSDYSMWRKNQYVSNGLRDFAERGEAWALMK

SEQ ID NO: 65356 - protein, 17 aa, Homo sapiens
MENPSPAAALGKALCAL

SEQ ID NO: 65357 - protein, 8 aa, Homo sapiens
MENPSPAA

SEQ ID NO: 65358 - protein, 16 aa, Homo sapiens
MENPSPAAALGKALCA

SEQ ID NO: 65359 - protein, 24 aa, Homo sapiens
MENPSPAAALGKALCALLLATLGA

SEQ ID NO: 65360 - protein, 64 aa, Homo sapiens
MENPSPAAALGKALCALLLATLGAAGQPLGGESICSARALAKYSITFTGKWSQTAFPKQYPLFR

SEQ ID NO: 65361 - protein, 319 aa, Homo sapiens
MDPQNQHGSGSSLVVIQQPSLDSRQRLDYEREIQPTAILSLDQIKAIRGSNEYTEGPSVVKRPAPRTAPRQEKHERTHEIIPINVNNNYEHRHTSHLGHAVLPSNARGPILSRSTSTGSAASSGSNSSASSEQGLLGRSPPTRPVPGHRSERAIRTQPKQLIVDDLKGSLKEDLTQHKFICEQCGKCKCGECTAPRTLPSCLACNRQCLCSAESMVEYGTCMCLVKGIFYHCSNDDEGDSYSDNPCSCSQSHCCSRYLCMGAMSLFLPCLLCYPPAKGCLKLCRRCYDWIHRPGCRCKNSNTVYCKLESCPSRGQGKPS

SEQ ID NO: 65362 - protein, 319 aa, Homo sapiens; identical to SEQ ID NO: 65361

SEQ ID NO: 65363 - protein, 67 aa, Homo sapiens
MDPQNQHGSGSSLVVIQQPSLDSRQRLDYEREIQPTAILSLDQIKAIRGSNEYTEGPSVVKRPAPRT

SEQ ID NO: 65364 - protein, 209 aa, Homo sapiens
MDPQNQHGSGSSLVVIQQPSLDSRQRLDYEREIQPTAILSLDQIKAIRGSNEYTEGPSVVKRPAPRTAPRQEKHERTHEIIPINVNNNYEHRHTSHLGHAVLPSNARGPILSRSTSTGSAASSGSNSSASSEQGLLGRSPPTRPVPGHRSERAIRTQPKQLIVDDLKGSLKEDLTQHKFICEQCGKCKCGECTAPRTLPSCLACNRQCL

SEQ ID NO: 65365 - protein, 35 aa, Homo sapiens
MDPQNQHGSGSSLVVIQQPSLDSRQRLDYEREIQP

SEQ ID NO: 65366 - protein, 315 aa, Homo sapiens
MEARAQSGNGSQPLLQTPRDGGRQRGEPDPRDALTQQVHVLSLDQIRAIRNTNEYTEGPTVVPRPGLKPAPRPSTQHKHERLHGLPEHRQPPRLQHSQVHSSARAPLSRSISTVSSGSRSSTRTSTSSSSSEQRLLGSSFSSGPVADGIIRVQPKSELKPGELKPLSKEDLGLHAYRCEDCGKCKCKECTYPRPLPSDWICDKQCLCSAQNVIDYGTCVCCVKGLFYHCSNDDEDNCADNPCSCSQSHCCTRWSAMGVMSLFLPCLWCYLPAKGCLKLCQGCYDRVNRPGCRCKNSNTVCCKVPTVPPRNFEKPT

SEQ ID NO: 65367 - protein, 315 aa, Homo sapiens; identical to SEQ ID NO: 65366

SEQ ID NO: 65368 - protein, 315 aa, Homo sapiens; identical to SEQ ID NO: 65366

SEQ ID NO: 65369 - protein, 353 aa, Homo sapiens
MEARAQSGNGSQPLLQTPRDGGRQRGEPDPRDALTQQVHVLSLDQIRAIRNTNEYTEGPTVVPRPGLKPAPRPSTQHKHERLHGLPEHRQPPRLQHSQVHSSARAPLSRSISTVSSGSRSSTRTSTSSSSSEQRLLGSSFSSGPVADGIIRVQPKSELKPGELKPLSKEDLGLHAYRCEDCGKCKCKECTYPRPLPSDWICDKQCLCSAQNVIDYGTCVCCVKGLFYHCSNDDEDNCADNPCSCSQSHCCTRWSAMGVMSLFLPCLWCYLPAKGCLKLCQGCYDRVNRPGCRCKNSNTVCCKVPTVPPRTLKNQHSIINQEYYSNEDFFFLFLIHICNQLNSYNLGTVNRKVG

SEQ ID NO: 65370 - protein, 288 aa, Homo sapiens
MDAAVTDDFQQILPIEQLRSTHASNDYVERPPAPCKQALSSPSLIVQTHKSDWSLATMPTSLPRSLSQCHQLQPLPQHLSQSSIASSMSHSTTASDQRLLASITPSPSGQSIIRTQPGAGVHPKADGALKGEAEQSAGHPSEHLFICEECGRCKCVPCTAARPLPSCWLCNQRCLCSAESLLDYGTCLCCVKGLFYHCSTDDEDNCADEPCSCGPSSCFVRWAAMSLISLFLPCLCCYLPTRGCLHLCQQGYDSLRRPGCRCKRHTNTVCRKISSGSAPFPKAQEKSV

SEQ ID NO: 65371 - protein, 125 aa, Homo sapiens
MDAAVTDDFQQILPIEQLRSTHASNDYVERPPAPCKQALSSPSLIVQTHKSDWSLATMPTSLPRSLSQCHQLQPLPQHLSQSSIASSMSHSTTASSTTAPLMMKTTVLMSPALVGLVLALSAGQP

SEQ ID NO: 65372 - protein, 322 aa, Homo sapiens
MLSPLPTGPLEACFSVQSRTSSPMEPPIPQSAPLTPNSVMVQPLLDSRMSHSRLQHPLTILPIDQVKTSHVENDYIDNPSLALTTGPKRTRGGAPELAPTPARCDQDVTHHWISFSGRPSSVSSSSSTSSDQRLLDHMAPPPVADQASPRAVRIQPKVVHCQPLDLKGPAVPPELDKHFLLCEACGKCKCKECASPRTLPSCWVCNQECLCSAQTLVNYGTCMCLVQGIFYHCTNEDDEGSCADHPCSCSRSNCCARWSFMGALSVVLPCLLCYLPATGCVKLAQRGYDRLRRPGCRCKHTNSVICKAASGDAKTSRPDKPF

SEQ ID NO: 65373 - protein, 106 aa, Homo sapiens
MEPPIPQSAPLTPNSVMVQPLLDSRMSHSRLQHPLTILPIDQVKTSHVENDYIDNPSLALTTGPKRTRGGAPELAPTPARCDQDVTHHWISFSGRPCSATCLPPAA

SEQ ID NO: 65374 - protein, 299 aa, Homo sapiens
MEPPIPQSAPLTPNSVMVQPLLDSRMSHSRLQHPLTILPIDQVKTSHVENDYIDNPSLALTTGPKRTRGGAPELAPTPARCDQDVTHHWISFSGRPSSVSSSSSTSSDQRLLDHMAPPPVADQASPRAVRIQPKVVHCQPLDLKGPAVPPELDKHFLLCEACGKCKCKECASPRTLPSCWVCNQECLCSAQTLVNYGTCMCLVQGIFYHCTNEDDEGSCADHPCSCSRSNCCARWSFMGALSVVLPCLLCYLPATGCVKLAQRGYDRLRRPGCRCKHTNSVICKAASGDAKTSRPDKPF

SEQ ID NO: 65375 - protein, 50 aa, Homo sapiens
MEPPIPQSAPLTPNSVMVQPLLDSRMSHSRLQHPLTILPIDQVKTSHVEN

SEQ ID NO: 65376 - protein, 444 aa, Homo sapiens
MSEETATSDNDNSYARVRAVVMTRDDSSGGWLPLGGSGLSSVTVFKVPHQEENGCADFFIRGERLRDKMVVLECMLKKDLIYNKVTPTFHHWKIDDKKFGLTFQSPADARAFDRGIRRAIEDISQGCPESKNEAEGADDLQANEEDSSSSLVKDHLFQQETVVTSEPYRSSNIRPSPFEDLNARRVYMQSQANQITFGQPGLDIQSRSMEYVQRQISKECGSLKSQNRVPLKSIRHVSFQDEDEIVRINPRDILIRRYADYRHPDMWKNDLERDDADSSIQFSKPDSKKSDYLYSCGDETKLSSPKDSVVFKTQPSSLKIKKSKRRKEDGERSRCVYCQERFNHEENVRGKCQDAPDPIKRCIYQVSCMLCAESMLYHCMSDSEGDFSDPCSCDTSDDKFCLRWLALVALSFIVPCMCCYVPLRMCHRCGEACGCCGGKHKAAG

SEQ ID NO: 65377 - protein, 418 aa, Homo sapiens
MTEETHPDDDSYIVRVKAVVMTRDDSSGGWFPQEGGGISRVGVCKVMHPEGNGRSGFLIHGERQKDKLVVLECYVRKDLVYTKANPTFHHWKVDNRKFGLTFQSPADARAFDRGVRKAIEDLIEGSTTSSSTIHNEAELGDDDVFTTATDSSSNSSQKREQPTRTISSPTSCEHRRIYTLGHLHDSYPTDHYHLDQPMPRPYRQVSFPDDDEEIVRINPREKIWMTGYEDYRHAPVRGKYPDPSEDADSSYVRFAKGEVPKHDYNYPYVDSSDFGLGEDPKGRGGSVIKTQPSRGKSRRRKEDGERSRCVYCRDMFNHEENRRGHCQDAPDSVRTCIRRVSCMWCADSMLYHCMSDPEGDYTDPCSCDTSDEKFCLRWMALIALSFLAPCMCCYLPLRACYHCGVMCRCCGGKHKAAA

SEQ ID NO: 65378 - protein, 116 aa, Homo sapiens
MTEETHPDDDSYIVRVKAVVMTRDDSSGGWFPQEGGGISRVGVCKVMHPEGNGRSGFLIHGERQKDKLVVLECYVRKDLVYTKANPTFHHWKVDNRKFGLTFQSPADARAFDRGVR

SEQ ID NO: 65379 - protein, 415 aa, Homo sapiens
MASPGSDSYIVRVKAVVMTRDDSSGGWFPQEGGGISRVGVCKVMHPEGNGRSGFLIHGERQKDKLVVLECYVRKDLVYTKANPTFHHWKVDNRKFGLTFQSPADARAFDRGVRKAIEDLIEGSTTSSSTIHNEAELGDDDVFTTATDSSSNSSQKREQPTRTISSPTSCEHRRIYTLGHLHDSYPTDHYHLDQPMPRPYRQVSFPDDDEEIVRINPREKIWMTGYEDYRHAPVRGKYPDPSEDADSSYVRFAKGEVPKHDYNYPYVDSSDFGLGEDPKGRGGSVIKTQPSRGKSRRRKEDGERSRCVYCRDMFNHEENRRGHCQDAPDSVRTCIRRVSCMWCADSMLYHCMSDPEGDYTDPCSCDTSDEKFCLRWMALIALSFLAPCMCCYLPLRACYHCGVMCRCCGGKHKAAA

SEQ ID NO: 65380 - protein, 410 aa, Homo sapiens
MVRVRAVVMARDDSSGGWLPVGGGGLSQVSVCRVRGARPEGGARQGHYVIHGERLRDQKTTLECTLKPGLVYNKVNPIFHHWSLGDCKFGLTFQSPAEADEFQKSLLAALAALGRGSLTPSSSSSSSSPSQDTAETPCPLTSHVDSDSSSSHSRQETPPSAAAAPIITMESASGFGPTTPPQRRRSSAQSYPPLLPFTGIPEPSEPLAGAGGLGWGGRGYEDYRRSGPPAPLALSTCVVRFAKTGALRGAALGPPAALPAPLTEAAPPAPPARPPPGPGPSSAPAKASPEAEEAARCVHCRALFRRRADGRGGRCAEAPDPGRLLVRRLSCLWCAESLLYHCLSDAEGDFSDPCACEPGHPRPAARWAALAALSLAVPCLCCYAPLRACHWVAARCGCAGCGGRHEEAAR

SEQ ID NO: 65381 - protein, 152 aa, Homo sapiens
MVRVRAVVMARDDSSGGWLPVGGGGLSQVSVCRVRGARPEGGARQGHYVIHGERLRDQKTTLECTLKPGLVYNKVNPIFHHWSLGDCKFGLTFQSPAEADEFQKSLLAALAALGRGSLTPSSSSSSSSPSQDTAETPCPLTLSQYFRHMLCP

SEQ ID NO: 65382 - protein, 574 aa, Homo sapiens
MWTFLGIATFTYFYKKFGDFITLANREVLLCVLVFLSLGLVLSYRCRHRNGGLLGRQQSGSQFALFSDILSGLPFIGFFWAKSPPESENKEQLEARRRRKGTNISETSLIGTAACTSTSSQNDPEVIIVGAGVLGSALAAVLSRDGRKVTVIERDLKEPDRIVGEFLQPGGYHVLKDLGLGDTVEGLDAQVVNGYMIHDQESKSEVQIPYPLSENNQVQSGRAFHHGRFIMSLRKAAMAEPNAKFIEGVVLQLLEEDDVVMGVQYKDKETGDIKELHAPLTVVADGLFSKFRKSLVSNKVSVSSHFVGFLMKNAPQFKANHAELILANPSPVLIYQISSSETRVLVDIRGEMPRNLREYMVEKIYPQIPDHLKEPFLEATDNSHLRSMPASFLPPSSVKKRGVLLLGDAYNMRHPLTGGGMTVAFKDIKLWRKLLKGIPDLYDDAAIFEAKKSFYWARKTSHSFVVNILAQALYELFSATDDSLHQLRKACFLYFKLGGECVAGPVGLLSVLSPNPLVLIGHFFAVAIYAVYFCFKSEPWITKPRALLSSGAVLYKACSVIFPLIYSEMKYMVH

SEQ ID NO: 65383 - protein, 479 aa, Homo sapiens
MLRRKGTNISETSLIGTAACTSTSSQNDPEVIIVGAGVLGSALAAVLSRDGRKVTVIERDLKEPDRIVGEFLQPGGYHVLKDLGLGDTVEGLDAQVVNGYMIHDQESKSEVQIPYPLSENNQVQSGRAFHHGRFIMSLRKAAMAEPNAKFIEGVVLQLLEEDDVVMGVQYKDKETGDIKELHAPLTVVADGLFSKFRKSLVSNKVSVSSHFVGFLMKNAPQFKANHAELILANPSPVLIYQISSSETRVLVDIRGEMPRNLREYMVEKIYPQIPDHLKEPFLEATDNSHLRSMPASFLPPSSVKKRGVLLLGDAYNMRHPLTGGGMTVAFKDIKLWRKLLKGIPDLYDDAAIFEAKKSFYWARKTSHSFVVNILAQALYELFSATDDSLHQLRKACFLYFKLGGECVAGPVGLLSVLSPNPLVLIGHFFAVAIYAVYFCFKSEPWITKPRALLSSGAVLYKACSVIFPLIYSEMKYMVH

SEQ ID NO: 65384 - protein, 379 aa, Homo sapiens
MIHDQESKSEVQIPYPLSENNQVQSGRAFHHGRFIMSLRKAAMAEPNAKFIEGVVLQLLEEDDVVMGVQYKDKETGDIKELHAPLTVVADGLFSKFRKSLVSNKVSVSSHFVGFLMKNAPQFKANHAELILANPSPVLIYQISSSETRVLVDIRGEMPRNLREYMVEKIYPQIPDHLKEPFLEATDNSHLRSMPASFLPPSSVKKRGVLLLGDAYNMRHPLTGGGMTVAFKDIKLWRKLLKGIPDLYDDAAIFEAKKSFYWARKTSHSFVVNILAQALYELFSATDDSLHQLRKACFLYFKLGGECVAGPVGLLSVLSPNPLVLIGHFFAVAIYAVYFCFKSEPWITKPRALLSSGAVLYKACSVIFPLIYSEMKYMVH

SEQ ID NO: 65385 - protein, 963 aa, Homo sapiens
MATAAETSASEPEAESKAGPKADGEEDEVKAARTRRKVLSRAVAAATYKTMGPAWDQQEEGVSESDGDEYAMASSAESSPGEYEWEYDEEEEKNQLEIERLEEQLSINVYDYNCHVDLIRLLRLEGELTKVRMARQKMSEIFPLTEELWLEWLHDEISMAQDGLDREHVYDLFEKAVKDYICPNIWLEYGQYSVGGIGQKGGLEKVRSVFERALSSVGLHMTKGLALWEAYREFESAIVEAARLEKVHSLFRRQLAIPLYDMEATFAEYEEWSEDPIPESVIQNYNKALQQLEKYKPYEEALLQAEAPRLAEYQAYIDFEMKIGDPARIQLIFERALVENCLVPDLWIRYSQYLDRQLKVKDLVLSVHNRAIRNCPWTVALWSRYLLAMERHGVDHQVISVTFEKALNAGFIQATDYVEIWQAYLDYLRRRVDFKQDSSKELEELRAAFTRALEYLKQEVEERFNESGDPSCVIMQNWARIEARLCNNMQKARELWDSIMTRGNAKYANMWLEYYNLERAHGDTQHCRKALHRAVQCTSDYPEHVCEVLLTMERTEGSLEDWDIAVQKTETRLARVNEQRMKAAEKEAALVQQEEEKAEQRKRARAEKKALKKKKKIRGPEKRGADEDDEKEWGDDEEEQPSKRRRVENSIPAAGETQNVEVAAGPAGKCAAVDVEPPSKQKEKAASLKRDMPKVLHDSSKDSITVFVSNLPYSMQEPDTKLRPLFEACGEVVQIRPIFSNRGDFRGYCYVEFKEEKSALQALEMDRKSVEGRPMFVSPCVDKSKNPDFKVFRYSTSLEKHKLFISGLPFSCTKEELEEICKAHGTVKDLRLVTNRAGKPKGLAYVEYENESQASQAVMKMDGMTIKENIIKVAISNPPQRKVPEKPETRKAPGGPMLLPQTYGARGKGRTQLSLLPRALQRPSAAAPQAENGPAAAPAVAAPAATEAPKMSNADFAKLFLRK

SEQ ID NO: 65386 - protein, 699 aa, Homo sapiens
MRLRRLGQGGRCYRGLWPLRHTRPWSSPGEYEWEYDEEEEKNQLEIERLEEQLSINVYDYNCHVDLIRLLRLEGELTKVRMARQKMSEIFPLTEELWLEWLHDEISMAQDGLDREHVYDLFEKAVKDYICPNIWLEYGQYSVGGIGQKGGLEKVRSVFERALSSVGLHMTKGLALWEAYREFESAIVEAARLEKVHSLFRRQLAIPLYDMEATFAEYEEWSEDPIPESVIQNYNKALQQLEKYKPYEEALLQAEAPRLAEYQAYIDFEMKIGDPARIQLIFERALVENCLVPDLWIRYSQYLDRQLKVKDLVLSVHNRAIRNCPWTVALWSRYLLAMERHGVDHQVISVTFEKALNAGFIQATDYVEIWQAYLDYLRRRVDFKQDSSKELEELRAAFTRALEYLKQEVEERFNESGDPSCVIMQNWARIEARLCNNMQKARELWDSIMTRGNAKYANMWLEYYNLERAHGDTQHCRKALHRAVQCTSDYPEHVCEVLLTMERTEGSLEDWDIAVQKTETRLARVNEQRMKAAEKEAALVQQEEEKAEQRKRARAEKKALKKKKKIRGPEKRGADEDDEKEWGDDEEAFQTQKGREQHPCSWRNTKCRSSSRARWEMCCRRCGAPFEAEGEGSLPEEGHAQGAARQQQGQHHRLCQQPALQHAGAGHEAQATLRGLWGGGPDPTHLQQPWGFPRLLLRGV

SEQ ID NO: 65387 - protein, 927 aa, Homo sapiens
MATAAETSASEPEAESKAGPKADGEEDEVKAARTRRKVLSRAVAAATYKTMGPAWDQQEEGVSESDGDEYAMASSAESSPGEYEWEYDEEEEKNQLEIERLEEQLSINVYDYNCHVDLIRLLRLEGELTKVRMARQKMSEIFPLTEELWLEWLHDEISMAQDGLDREHVYDLFEKAVKDYICPNIWLEYGQYSVGGIGQKGGLEKVRSVFERALSSVGLHMTKGLALWEAYREFESAIVEAARLEKVHSLFRRQLAIPLYDMEATFAEYEEWSEDPIPESVIQNYNKALQQLEKYKPYEEALLQAEAPRLAEYQAYIDFEMKIGDPARIQLIFERALVENCLVPDLWIRYSQYLDRQLKVKDLVLSVHNRAIRNCPWTVALWSRYLLAMERHGVDHQVISDSSKELEELRAAFTRALEYLKQEVEERFNESGDPSCVIMQNWARIEARLCNNMQKARELWDSIMTRGNAKYANMWLEYYNLERAHGDTQHCRKALHRAVQCTSDYPEHVCEVLLTMERTEGSLEDWDIAVQKTETRLARVNEQRMKAAEKEAALVQQEEEKAEQRKRARAEKKALKKKKKIRGPEKRGADEDDEKEWGDDEEEQPSKRRRVENSIPAAGETQNVEVAAGPAGKCAAVDVEPPSKQKEKAASLKRDMPKVLHDSSKDSITVFVSNLPYSMQEPDTKLRPLFEACGEVVQIRPIFSNRGDFRGYCYVEFKEEKSALQALEMDRKSVEGRPMFVSPCVDKSKNPDFKVFRYSTSLEKHKLFISGLPFSCTKEELEEICKAHGTVKDLRLVTNRAGKPKGLAYVEYENESQASQAVMKMDGMTIKENIIKVAISNPPQRKVPEKPETRKAPGGPMLLPQTYGARGKGRTQLSLLPRALQRPSAAAPQAENGPAAAPAVAAPAATEAPKMSNADFAKLFLRK

SEQ ID NO: 65388 - protein, 528 aa, Homo sapiens
MERHGVDHQVISDSSKELEELRAAFTRALEYLKQEVEERFNESGDPSCVIMQNWARIEARLCNNMQKARELWDSIMTRGNAKYANMWLEYYNLERAHGDTQHCRKALHRAVQCTSDYPEHVCEVLLTMERTEGSLEDWDIAVQKTETRLARVNEQRMKAAEKEAALVQQEEEKAEQRKRARAEKKALKKKKKIRGPEKRGADEDDEKEWGDDEEEQPSKRRRVENSIPAAGETQNVEVAAGPAGKCAAVDVEPPSKQKEKAASLKRDMPKVLHDSSKDSMQEPDTKLRPLFEACGEVVQIRPIFSNRGDFRGYCYVEFKEEKSALQALEMDRKSVEGRPMFVSPCVDKSKNPDFKVFRYSTSLEKHKLFISGLPFSCTKEELEEICKAHGTVKDLRLVTNRAGKPKGLAYVEYENESQASQAVMKMDGMTIKENIIKVAISNPPQRKVPEKPETRKAPGGPMLLPQTYGARGKGRTQLSLLPRALQRPSAAAPQAENGPAAAPAVAAPAATEAPKMSNADFAKLFLRK

SEQ ID NO: 65389 - protein, 129 aa, Homo sapiens
MATAAETSASEPEAESKAGPKADGEEDEVKAARTRRKVLSRAVAAATYKTMGPAWDQQEEGVSESDGDEYAMASSAESSPGEYEWEYDEEEEKNQLEIERLEEQVGPGVGSGHLPVFQVLGSPCPGPPP

SEQ ID NO: 65390 - protein, 109 aa, Homo sapiens
MAASAARGAAALRRSINQPVAFVRRIPWTAASSQLKEHFAQFGHVRRCILPFDKETGFHRGLGWVQFSSEEGLRNALQQENHIIDGVKVQVHTRRPKLPQTSDDEKKDF

SEQ ID NO: 65391 - protein, 297 aa, Homo sapiens
MAKWLNKYFSLGNSKTKSPPQPPRPDYREQRRRGERPSQPPQAVPQASSAASASCGPATASCFSASSGSLPDDSGSTSDLIRAYRAQKERDFEDPYNGPGSSLRKLRAMCRLDYCGGSGEPGGVQRAFSASSASGAAGCCCASSGAGAAASSSSSSGSPHLYRSSSERRPATPAEVRYISPKHRLIKVESAAGGGAGDPLGGACAGGRTWSPTACGGKKLLNKCAASAAEESGAGKKDKVTIADDYSDPFDAKNDLKSKAGKGESAGYMEPYEAQRIMTGLQEAWRHSPSGCFPVGP

SEQ ID NO: 65392 - protein, 509 aa, Homo sapiens
MAKWLNKYFSLGNSKTKSPPQPPRPDYREQRRRGERPSQPPQAVPQASSAASASCGPATASCFSASSGSLPDDSGSTSDLIRAYRAQKERDFEDPYNGPGSSLRKLRAMCRLDYCGGSGEPGGVQRAFSASSASGAAGCCCASSGAGAAASSSSSSGSPHLYRSSSERRPATPAEVRYISPKHRLIKVESAAGGGAGDPLGGACAGGRTWSPTACGGKKLLNKCAASAAEESGAGKKDKVTIADDYSDPFDAKNDLKSKAGKGESAGYMEPYEAQRIMTEFQRQESVRSQHKGIQLYDTPYEPEGQSVDSDSESTVSPRLRESKLPQDDDRPADEYDQPWEWNRVTIPALAAQFNGNEKRQSSPSPSRDRRRQLRAPGGGFKPIKHGSPEFCGILGERVDPAVPLEKQIWYHGAISRGDAENLLRLCKECSYLVRNSQTSKHDYSLSLRSNQGFMHMKLAKTKEKYVLGQNSPPFDSVPEVIHYYTTRKLPIKGAEHLSLLYPVAVRTL

SEQ ID NO: 65393 - protein, 359 aa, Homo sapiens
MQAAALPEEIRWLLEDAEEFLAEGLRNENLSAVARDHRDHILRGFQQIKARYYWDFQPQGGDIGQDSSDDNHSGTLGLSLTSDAPFLSDYQDEGMEDIVKGAQELDNVIKQGYLEKKSKDHSFFGSEWQKRWCVVSRGLFYYYANEKSKQPKGTFLIKGYGVRMAPHLRRDSKKESCFELTSQDRRSYEFTATSPAEARDWVDQISFLLKDLSSLTIPYEEDEEEEEKEETYDDIDGFDSPSCGSQCRPTILPGSVGIKEPTEEKEEEDIYEVLPDEEHDLEEDESGTRRKGVDYASYYQGLWDCHGDQPDELSFQRGDLIRILSKEYNMYGWWVGELNSLVGIVPKEYLTTAFEVEER

SEQ ID NO: 65394 - protein, 276 aa, Homo sapiens
MGNSMKSTPAPAERPLPNPEGLDSDFLAVLSDYPSPDISPPIFRRGEKLRVISDEGGWWKAISLSTGRESYIPGICVARVYHGWLFEGLGRDKAEELLQLPDTKVGSFMIRESETKKGFYSLSVRHRQVKHYRIFRLPNNWYYISPRLTFQCLEDLVNHYSEVADGLCCVLTTPCLTQSTAAPAVRASSSPVTLRQKTVDWRRVSRLQEDPEGTENPLGVDESLFSYGLRESIASYLSLTSEDNTSFDRKKKSISLMYGGSKRKSSFFSSPPYFED

SEQ ID NO: 65395 - protein, 293 aa, Homo sapiens
MLHRLWASPAAPGKKKEMGNSMKSTPAPAERPLPNPEGLDSDFLAVLSDYPSPDISPPIFRRGEKLRVISDEGGWWKAISLSTGRESYIPGICVARVYHGWLFEGLGRDKAEELLQLPDTKVGSFMIRESETKKGFYSLSVRHRQVKHYRIFRLPNNWYYISPRLTFQCLEDLVNHYSEVADGLCCVLTTPCLTQSTAAPAVRASSSPVTLRQKTVDWRRVSRLQEDPEGTENPLGVDESLFSYGLRESIASYLSLTSEDNTSFDRKKKSISLMYGGSKRKSSFFSSPPYFED

SEQ ID NO: 65396 - protein, 316 aa, Homo sapiens
MLSKLGHSPLGGLRARLTFPVCLLYHRLWASPAAPGKKKEMGNSMKSTPAPAERPLPNPEGLDSDFLAVLSDYPSPDISPPIFRRGEKLRVISDEGGWWKAISLSTGRESYIPGICVARVYHGWLFEGLGRDKAEELLQLPDTKVGSFMIRESETKKGFYSLSVRHRQVKHYRIFRLPNNWYYISPRLTFQCLEDLVNHYSEVADGLCCVLTTPCLTQSTAAPAVRASSSPVTLRQKTVDWRRVSRLQEDPEGTENPLGVDESLFSYGLRESIASYLSLTSEDNTSFDRKKKSISLMYGGSKRKSSFFSSPPYFED

SEQ ID NO: 65397 - protein, 91 aa, Homo sapiens
MGNSMKSTPAPAERPLPNPEGLDSDFLAVLSDYPSPDISPPIFRRGEKLRVISDEGGWWKAISLSTGRESYIPGICVARVYHGWLFEGLGR

SEQ ID NO: 65398 - protein, 14 aa, Homo sapiens
MGNSMKSTPAPAER

SEQ ID NO: 65399 - protein, 49 aa, Homo sapiens
MGNSMKSTPAPAERPLPNPEGLDSDFLAVLSDYPSPDISPPIFRRGEKL

SEQ ID NO: 65400 - protein, 158 aa, Homo sapiens
MGNSMKSTPAPAERPLPNPEGLDSDFLAVLSDYPSPDISPPIFRRGEKLRVISDEGGWWKAISLSTGRESYIPGICVARVYHGWLFEGLGRDKAEELLQLPDTKVGSFMIRESETKKGFYSLSVRHRQVKHYRIFRLPNNWYYISPRLTFQCLEDLVN

SEQ ID NO: 65401 - protein, 40 aa, Homo sapiens
MGNSMKSTPAPAERPLPNPEGLDSDFLAVLSDYPSPDISP

SEQ ID NO: 65402 - protein, 261 aa, Homo sapiens
MGSLPSRRKSLPSPSLSSSVQGQGPVTMEAERSKATAVALGSFPAGGPAELSLRLGEPLTIVSEDGDWWTVLSEVSGREYNIPSVHVAKVSHGWLYEGLSREKAEELLLLPGNPGGAFLIRESQTRRGSYSLSVRLSRPASWDRIRHYRIHCLDNGWLYISPRLTFPSLQALVDHYSELADDICCLLKEPCVLQRAGPLPGKDIPLPVTVQRTPLNWKELDSSLLFSEAATGEESLLSEGLRESLSFYISLNDEAVSLDDA

SEQ ID NO: 65403 - protein, 210 aa, Homo sapiens
MGSLPSRRKSLPSPSLSSSVQGQGPVTMEAERSKATAVALGSFPAGGPAELSLRLGEPLTIVSEDGDWWTVLSEVSGREYNIPSVHVAKVSHGWLYEGLSREKAEELLLLPGNPGGAFLIRESQTRRGSYSLSVRLSRPASWDRIRHYRIHCLDNGWLYISPRLTFPSLQALVDHYSEGWPAPWQGYTPTCDCAEDTTQLERAGQLPPVF

SEQ ID NO: 65404 - protein, 1279 aa, Homo sapiens
MTLTERLREKISRAFYNHGLLCASYPIPIILFTGFCILACCYPLLKLPLPGTGPVEFTTPVKDYSPPPVDSDRKQGEPTEQPEWYVGAPVAYVQQIFVKSSVFPWHKNLLAVDVFRSPLSRAFQLVEEIRNHVLRDSSGIRSLEELCLQVTDLLPGLRKLRNLLPEHGCLLLSPGNFWQNDWERFHADPDIIGTIHQHEPKTLQTSATLKDLLFGVPGKYSGVSLYTRKRMVSYTITLVFQHYHAKFLGSLRARLMLLHPSPNCSLRAESLVHVHFKEEIGVAELIPLVTTYIILFAYIYFSTRKIDMVKSKWGLALAAVVTVLSSLLMSVGLCTLFGLTPTLNGGEIFPYLVVVIGLENVLVLTKSVVSTPVDLEVKLRIAQGLSSESWSIMKNMATELGIILIGYFTLVPAIQEFCLFAVVGLVSDFFLQMLFFTTVLSIDIRRMELADLNKRLPPEACLPSAKPVGQPTRYERQLAVRPSTPHTITLQPSSFRNLRLPKRLRVVYFLARTRLAQRLIMAGTVVWIGILVYTDPAGLRNYLAAQVTEQSPLGEGALAPMPVPSGMLPPSHPDPAFSIFPPDAPKLPENQTSPGESPERGGPAEVVHDSPVPEVTWGPEDEELWRKLSFRHWPTLFSYYNITLAKRYISLLPVIPVTLRLNPREALEGRHPQDGRSAWPPPGPIPAGHWEAGPKGPGGVQAHGDVTLYKVAALGLATGIVLVLLLLCLYRVLCPRNYGQLGGGPGRRRRGELPCDDYGYAPPETEIVPLVLRGHLMDIECLASDGMLLVSCCLAGHVCVWDAQTGDCLTRIPRPGRQRRDSGVGSGLEAQESWERLSDGGKAGPEEPGDSPPLRHRPRGPPPPSLFGDQPDLTCLIDTNFSAQPRSSQPTQPEPRHRAVCGRSRDSPGYDFSCLVQRVYQEEGLAAVCTPALRPPSPGPVLSQAPEDEGGSPEKGSPSLAWAPSAEGSIWSLELQGNLIVVGRSSGRLEVWDAIEGVLCCSSEEVSSGITALVFLDKRIVAARLNGSLDFFSLETHTALSPLQFRGTPGRGSSPASPVYSSSDTVACHLTHTVPCAHQKPITALKAAAGRLVTGSQDHTLRVFRLEDSCCLFTLQGHSGAITTVYIDQTMVLASGGQDGAICLWDVLTGSRVSHVFAHRGDVTSLTCTTSCVISSGLDDLISIWDRSTGIKFYSIQQDLGCGASLGVISDNLLVTGGQGCVSFWDLNYGDLLQTVYLGKNSEAQPARQILVLDNAAIVCNFGSELSLVYVPSVLEKLD

SEQ ID NO: 65405 - protein, 771 aa, Homo sapiens
MTLTERLREKISRAFYNHGLLCASYPIPIILFTGFCILACCYPLLKLPLPGTGPVEFTTPVKDYSPPPVDSDRKQGEPTEQPEWYVGAPVAYVQQIFVKSSVFPWHKNLLAVDVFRSPLSRAFQLVEEIRNHVLRDSSGIRSLEELCLQVTDLLPGLRKLRNLLPEHGCLLLSPGNFWQNDWERFHADPDIIGTIHQHEPKTLQTSATLKDLLFGVPGKYSGVSLYTRKRMVSYTITLVFQHYHAKFLGSLRARLMLLHPSPNCSLRAESLVHVHFKEEIGVAELIPLVTTYIILFAYIYFSTRKIDMVKSKWGLALAAVVTVLSSLLMSVGLCTLFGLTPTLNGGEIFPYLVVVIGLENVLVLTKSVVSTPVDLEVKLRIAQGLSSESWSIMKNMATELGIILIGYFTLVPAIQEFCLFAVVGLVSDFFLQMLFFTTVLSIDIRRMELADLNKRLPPEACLPSAKPVGQPTRYERSSGRLEVWDAIEGVLCCSSEEVSSGITALVFLDKRIVAARLNGSLDFFSLETHTALSPLQFRGTPGRGSSPASPVYSSSDTVACHLTHTVPCAHQKPITALKAAAGRLVTGSQDHTLRVFRLEDSCCLFTLQGHSGAITTVYIDQTMVLASGGQDGAICLWDVLTGSRVSHVFAHRGDVTSLTCTTSCVISSGLDDLISIWDRSTGIKFYSIQQDLGCGASLGVISDNLLVTGGQGCVSFWDLNYGDLLQTVYLGKNSEAQPARQILVLDNAAIVCNFGSELSLVYVPSVLEKLD

SEQ ID NO: 65406 - protein, 905 aa, Homo sapiens
MTLTERLREKISRAFYNHGLLCASYPIPIILIGYFTLVPAIQEFCLFAVVGLVSDFFLQMLFFTTVLSIDIRRMELADLNKRLPPEACLPSAKPVGQPTRYERQLAVRPSTPHTITLQPSSFRNLRLPKRLRVVYFLARTRLAQRLIMAGTVVWIGILVYTDPAGLRNYLAAQVTEQSPLGEGALAPMPVPSGMLPPSHPDPAFSIFPPDAPKLPENQTSPGESPERGGPAEVVHDSPVPEVTWGPEDEELWRKLSFRHWPTLFSYYNITLAKRYISLLPVIPVTLRLNPREALEGRHPQDGRSAWPPPGPIPAGHWEAGPKGPGGVQAHGDVTLYKVAALGLATGIVLVLLLLCLYRVLCPRNYGQLGGGPGRRRRGELPCDDYGYAPPETEIVPLVLRGHLMDIECLASDGMLLVSCCLAGHVCVWDAQTGDCLTRIPRPGQRRDSGVGSGLEAQESWERLSDGGKAGPEEPGDSPPLRHRPRGPPPPSLFGDQPDLTCLIDTNFSAQPRSSQPTQPEPRHRAVCGRSRDSPGYDFSCLVQRVYQEEGLAAVCTPALRPPSPGPVLSQAPEDEGGSPEKGSPSLAWAPSAEGSIWSLELQGNLIVVGRSSGRLEVWDAIEGVLCCSSEEVSSGITALVFLDKRIVAARLNGSLDFFSLETHTALSPLQFRGTPGRGSSPASPVYSSSDTVACHLTHTVPCAHQKPITALKAAAGRLVTGSQDHTLRVFRLEDSCCLFTLQGHSGAITTVYIDQTMVLASGGQDGAICLWDVLTGSRVSHVFAHRGDVTSLTCTTSCVISSGLDDLISIWDRSTGIKFYSIQQDLGCGASLGVISDNLLVTGGQGCVSFWDLNYGDLLQTVYLGKNSEAQPARQILVLDNAAIVCNFGSELSLVYVPSVLEKLD

SEQ ID NO: 65407 - protein, 352 aa, Homo sapiens
MVKSKWGLALAAVVTVLSSLLMSVGLCTLFGLTPTLNGGEIFPYLVVVIGLENVLVLTKSVVSTPVDLEVKLRIAQGLSSESWSIMKNMATELGIILIGYFTLVPAIQEFCLFAVVGLVSDFFLQMLFFTTVLSIDIRRMELADLNKRLPPEACLPSAKPVGQPTRYERQLAVRPSTPHTITLQPSSFRNLRLPKRLRVVYFLAPTGAHTCWALGSRTQGPRWGAGPWRRHAVQGGGAGPGHRHRLGAAAALPLPRAMPAQLRAAGWWARAAEARGAALRRLRLCATRDGDRAACAARPPHGHRVPGQRRHAAGELLPGRPRLRVGRADRGLPNAHSAPRQAAPGQWRGQRA

SEQ ID NO: 65408 - protein, 136 aa, Homo sapiens
MTLTERLREKISRAFYNHGLLCASYPIPIILFTGFCILACCYPLLKLPLPGTGPVEFTTPVKDYSPPPVDSDRKQGEPTEQPEWYVGAPVAYVQQIFVKSSVFPWHKNLLAVDVFRSPLSRAFQLVEEIRNHVLRD

SEQ ID NO: 65409 - protein, 1023 aa, Homo sapiens
MLLHPSPNCSLRAESLVHVHFKEEIGVAELIPLVTTYIILFAYIYFSTRKIDMVKSKWGLALAAVVTVLSSLLMSVGLCTLFGLTPTLNGGEIFPYLVVVIGLENVLVLTKSVVSTPVDLEVKLRIAQGLSSESWSIMKNMATELGIILIGYFTLVPAIQEFCLFAVVGLVSDFFLQMLFFTTVLSIDIRRMELADLNKRLPPEACLPSAKPVGQPTRYERQLAVRPSTPHTITLQPSSFRNLRLPKRLRVVYFLARTRLAQRLIMAGTVVWIGILVYTDPAGLRNYLAAQVTEQSPLGEGALAPMPVPSGMLPPSHPDPAFSIFPPDAPKLPENQTSPGESPERGGPAEVVHDSPVPEVTWGPEDEELWRKLSFRHWPTLFSYYNITLAKRYISLLPVIPVTLRLNPREALEGRHPQDGRSAWPPPGPIPAGHWEAGPKGPGGVQAHGDVTLYKVAALGLATGIVLVLLLLCLYRVLCPRNYGQLGGGPGRRRRGELPCDDYGYAPPETEIVPLVLRGHLMDIECLASDGMLLVSCCLAGHVCVWDAQTGDCLTRIPRPGQRRDSGVGSGLEAQESWERLSDGGKAGPEEPGDSPPLRHRPRGPPPPSLFGDQPDLTCLIDTNFSAQPRSSQPTQPEPRHRAVCGRSRDSPGYDFSCLVQRVYQEEGLAAVCTPALRPPSPGPVLSQAPEDEGGSPEKGSPSLAWAPSAEGSIWSLELQGNLIVVGRSSGRLEVWDAIEGVLCCSSEEVSSGITALVFLDKRIVAARLNGSLDFFSLETHTALSPLQFRGTPGRGSSPASPVYSSSDTVACHLTHTVPCAHQKPITALKAAAGRLVTGSQDHTLRVFRLEDSCCLFTLQGHSGAITTVYIDQTMVLASGGQDGAICLWDVLTGSRVSHVFAHRGDVTSLTCTTSCVISSGLDDLISIWDRSTGIKFYSIQQDLGCGASLGVISDNLLVTGGQGCVSFWDLNYGDLLQTVYLGKNSEAQPARQILVLDNAAIVCNFGSELSLVYVPSVLEKLD

SEQ ID NO: 65410 - protein, 88 aa, Homo sapiens
MTLTERLREKISRAFYNHGLLCASYPIPIILFTGFCILACCYPLLKLPLPGTGPVEFTTPVKDYSPPPVDSDRKQGEPTEQPEWVGTR

SEQ ID NO: 65411 - protein, 132 aa, Homo sapiens
MTLTERLREKISRAFYNHGLLCASYPIPIILFTGFCILACCYPLLKLPLPGTGPVEFTTPVKDYSPPPVDSDRKQGEPTEQPEWYVGAPVAYVQQIFVKSSVFPWHKNLLAVDVFRSPLSRAFQLVEEIRNH

SEQ ID NO: 65412 - protein, 886 aa, Homo sapiens
MKNMATELGIILIGYFTLVPAIQEFCLFAVVGLVSDFFLQMLFFTTVLSIDIRRMELADLNKRLPPEACLPSAKPVGQPTRYERQLAVRPSTPHTITLQPSSFRNLRLPKRLRVVYFLARTRLAQRLIMAGTVVWIGILVYTDPAGLRNYLAAQVTEQSPLGEGALAPMPVPSGMLPPSHPDPAFSIFPPDAPKLPENQTSPGESPERGGPAEVVHDSPVPEVTWGPEDEELWRKLSFRHWPTLFSYYNITLAKRYISLLPVIPVTLRLNPREALEGRHPQDGRSAWPPPGPIPAGHWEAGPKGPGGVQAHGDVTLYKVAALGLATGIVLVLLLLCLYRVLCPRNYGQLGGGPGRRRRGELPCDDYGYAPPETEIVPLVLRGHLMDIECLASDGMLLVSCCLAGHVCVWDAQTGDCLTRIPRPGQRRDSGVGSGLEAQESWERLSDGGKAGPEEPGDSPPLRHRPRGPPPPSLFGDQPDLTCLIDTNFSAQPRSSQPTQPEPRHRAVCGRSRDSPGYDFSCLVQRVYQEEGLAAVCTPALRPPSPGPVLSQAPEDEGGSPEKGSPSLAWAPSAEGSIWSLELQGNLIVVGRSSGRLEVWDAIEGVLCCSSEEVSSGITALVFLDKRIVAARLNGSLDFFSLETHTALSPLQFRGTPGRGSSPASPVYSSSDTVACHLTHTVPCAHQKPITALKAAAGRLVTGSQDHTLRVFRLEDSCCLFTLQGHSGAITTVYIDQTMVLASGGQDGAICLWDVLTGSRVSHVFAHRGDVTSLTCTTSCVISSGLDDLISIWDRSTGIKFYSIQQDLGCGASLGVISDNLLVTGGQGCVSFWDLNYGDLLQTVYLGKNSEAQPARQILVLDNAAIVCNFGSELSLVYVPSVLEKLD

SEQ ID NO: 65413 - protein, 339 aa, Homo sapiens
MAAAAAAALESWQAAAPRKRRSAARRPRRREAAPRGREAAPRGREAAPRGPEAEFESDSGVVLRRIWEAEKDLFISDFWSSALETINRCLTKHLEQLKAPVGTLSDIFGNLHLDSLPEESDVATDSIPREILVTGTCHLKCVCYGIGNFATCIVARNQLTFLLLLLEKCQIPRSHCWVYDPLFSQLEIEVLNTLGVTVLSENEEGKRSIRGEPTIFYMLHCGTALYNNLLWSNWSVDALSKMVIIGNSFKGLEERLLARILQKNYPYIAKILKGLEELEFPQTSQYMDIFNDTSVHWFPVQKLEQLSIDIWEFREEPDYQDCEDLEIIRNKREDPSATD

SEQ ID NO: 65414 - protein, 391 aa, Homo sapiens
MYSMMMETDLHSPGGAQAPTNLSGPAGAGGGGGGGGGGGGGGGAKANQDRVKRPMNAFMVWSRGQRRKMAQENPKMHNSEISKRLGAEWKVMSEAEKRPFIDEAKRLRALHMKEHPDYKYRPRRKTKTLLKKDKYSLAGGLLAAGAGGGGAAVAMGVGVGVGAAAVGQRLESPGGAAGGGYAHVNGWANGAYPGSVAAAAAAAAMMQEAQLAYGQHPGAGGAHPHAHPAHPHPHHPHAHPHNPQPMHRYDMGALQYSPISNSQGYMSASPSGYGGLPYGAAAAAAAAAGGAHQNSAVAAAAAAAAASSGALGALGSLVKSEPSGSPPAPAHSRAPCPGDLREMISMYLPAGEGGDPAAAAAAAAQSRLHSLPQHYQGAGAGVNGTVPLTHI

SEQ ID NO: 65415 - protein, 441 aa, Homo sapiens
MVQQAESLEAESNLPREALDTEEGEFMACSPVALDESDPDWCKTASGHIKRPMNAFMVWSKIERRKIMEQSPDMHNAEISKRLGKRWKMLKDSEKIPFIREAERLRLKHMADYPDYKYRPRKKPKMDPSAKPSASQSPEKSAAGGGGGSAGGGAGGAKTSKGSSKKCGKLKAPAAAGAKAGAGKAAQSGDYGGAGDDYVLGSLRVSGSGGGGAGKTVKCVFLDEDDDDDDDDDELQLQIKQEPDEEDEEPPHQQLLQPPGQQPSQLLRRYNVAKVPASPTLSSSAESPEGASLYDEVRAGATSGAGGGSRLYYSFKNITKQHPPPLAQPALSPASSRSVSTSSSSSSGSSSGSSGEDADDLMFDLSLNFSQSAHSASEQQLGGGAAAGNLSLSLVDKDLDSFSEGSLGSHFEFPDYCTPELSEMIAGDWLEANFSDLVFTY

SEQ ID NO: 65416 - protein, 315 aa, Homo sapiens
MVQQRGARAKRDGGPPPPGPGPAEEGAREPGWCKTPSGHIKRPMNAFMVWSQHERRKIMDQWPDMHNAEISKRLGRRWQLLQDSEKIPFVREAERLRLKHMADYPDYKYRPRKKSKGAPAKARPRPPGGSGGGSRLKPGPQLPGRGGRRAAGGPLGGGAAAPEDDDEDDDEELLEVRLVETPGRELWRMVPAGRAARGQAERAQGPSGEGAAAAAAASPTPSEDEEPEEEEEEAAAAEEGEEETVASGEESLGFLSRLPPGPAGLDCSALDRDPDLQPPSGTSHFEFPDYCTPEVTEMIAGDWRPSSIADLVFTY

SEQ ID NO: 65417 - protein, 315 aa, Homo sapiens; identical to SEQ ID NO: 65416

SEQ ID NO: 65418 - protein, 622 aa, Homo sapiens
MSMRSPISAQLALDGVGTMVNCTIKSEEKKEPCHEAPQGSATAAEPQPGDPARASQDSADPQAPAQGNFRGSWDCSSPEGNGSPEPKRPGVSEAASGSQEKLDFNRNLKEVVPAIEKLLSSDWKERFLGRNSMEAKDVKGTQESLAEKELQLLVMIHQLSTLRDQLLTAHSEQKNMAAMLFEKQQQQMELARQQQEQIAKQQQQLIQQQHKINLLQQQIQQVNMPYVMIPAFPPSHQPLPVTPDSQLALPIQPIPCKPVEYPLQLLHSPPAPVVKRPGAMATHHPLQEPSQPLNLTAKPKAPELPNTSSSPSLKMSSCVPRPPSHGGPTRDLQSSPPSLPLGFLGEGDAVTKAIQDARQLLHSHSGALDGSPNTPFRKDLISLDSSPAKERLEDGCVHPLEEAMLSCDMDGSRHFPESRNSSHIKRPMNAFMVWAKDERRKILQAFPDMHNSSISKILGSRWKSMTNQEKQPYYEEQARLSRQHLEKYPDYKYKPRPKRTCIVEGKRLRVGEYKALMRTRRQDARQSYVIPPQAGQVQMSSSDVLYPRAAGMPLAQPLVEHYVPRSLDPNMPVIVNTCSLREEGEGTDDRHSVADGEMYRYSEDEDSEGEEKSDGELVVLTD

SEQ ID NO: 65419 - protein, 57 aa, Homo sapiens
MSMRSPISAQLALDGVGTMVNCTIKSEEKKEPCHEAPQGSATAAEPQPGDPARASQD

SEQ ID NO: 65420 - protein, 180 aa, Homo sapiens
MSMRSPISAQLALDGVGTMVNCTIKSEEKKEPCHEAPQGSATAAEPQPGDPARASQDSADPQAPAQGNFRGSWDCSSPEGNGSPEPKRPGVSEAASGSQEKLDFNRNLKEVVPAIEKLLSSDWKERFLGRNSMEAKDVKGTQESLAEKELQLLVMIHQLSTLRDQLLTAHSEQKNMAAML

SEQ ID NO: 65421 - protein, 240 aa, Homo sapiens
MSKPSDHIKRPMNAFMVWSRGQRRKMAQENPKMHNSEISKRLGAEWKLLSEAEKRPYIDEAKRLRAQHMKEHPDYKYRPRRKPKNLLKKDRYVFPLPYLGDTDPLKAAGLPVGASDGLLSAPEKARAFLPPASAPYSLLDPAQFSSSAIQKMGEVPHTLATGALPYASTLGYQNGAFGSLSCPSQHTHTHPSPTNPGYVVPCNCTAWSASTLQPPVAYILFPGMTKTGIDPYSSAHATAM

SEQ ID NO: 65422 - protein, 233 aa, Homo sapiens [sequence omitted]

SEQ ID NO: 65423 - protein, 233 aa, Homo sapiens [sequence omitted]

SEQ ID NO: 65424 - protein, 414 aa, Homo sapiens [sequence omitted]

SEQ ID NO: 65425 - protein, 384 aa, Homo sapiens [sequence omitted]

SEQ ID NO: 65426 - protein, 276 aa, Homo sapiens
MSKPVDHVKRPMNAFMVWSRAQRRKMAQENPKMHNSEISKRLGAEWKLLTESEKRPFIDEAKRLRAMHMKEHPDYKYRPRRKPKTLLKKDKFAFPVPYGLGGVADAEHPALKAGAGLHAGAGGGLVPESLLANPEKAAAAAAAAAARVFFPQSAAAAAAAAAAAAAGSPYSLLDLGSKMAEISSSSSGLPYASSLGYPTAGAGAFHGAAAAAAAAAAAAGGHTHSHPSPGNPGYMIPCNCSAWPSPGLQPPLAYILLPGMGKPQLDPYPAAYAAAL

SEQ ID NO: 65427 - protein, 446 aa, Homo sapiens
MRPVRENSSGARSPRVPADLARSILISLPFPPDSLAHRPPSSAPTESQGLFTVAAPAPGAPSPPATLAHLLPAPAMYSLLETELKNPVGTPTQAAGTGGPAAPGGAGKSSANAAGGANSGGGSSGGASGGGGGTDQDRVKRPMNAFMVWSRGQRRKMALENPKMHNSEISKRLGADWKLLTDAEKRPFIDEAKRLRAVHMKEYPDYKYRPRRKTKTLLKKDKYSLPSGLLPPGAAAAAAAAAAAAAAASSPVGVGQRLDTYTHVNGWANGAYSLVQEQLGYAQPPSMSSPPPPPALPPMHRYDMAGLQYSPMMPPGAQSYMNVAAAAAAASGYGGMAPSATAAAAAAYGQQPATAAAAAAAAAAMSLGPMGSVVKSEPSSPPPAIASHSQRACLGDLRDMISMYLPPGGDAADAASPLPGGRLHGVHQHYQGAGTAVNGTVPLTHI

SEQ ID NO: 65428 - protein, 750 aa, Homo sapiens
MSSKRPASPYGEADGEVAMVTSRQKVEEEESDGLPAFHLPLHVSFPNKPHSEEFQPVSLLTQETCGHRTPTSQHNTMEVDGNKVMSSFAPHNSSTSPQKAEEGGRQSGESLSSTALGTPERRKGSLADVVDTLKQRKMEELIKNEPEETPSIEKLLSKDWKDKLLAMGSGNFGEIKGTPESLAEKERQLMGMINQLTSLREQLLAAHDEQKKLAASQIEKQRQQMELAKQQQEQIARQQQQLLQQQHKINLLQQQIQVQGQLPPLMIPVFPPDQRTLAAAAQQGFLLPPGFSYKAGCSDPYPVQLIPTTMAAAAAATPGLGPLQLQQLYAAQLAAMQVSPGGKLPGIPQGNLGAAVSPTSIHTDKSTNSPPPKSKDEVAQPLNLSAKPKTSDGKSPTSPTSPHMPALRINSGAGPLKASVPAALASPSARVSTIGYLNDHDAVTKAIQEARQMKEQLRREQQVLDGKVAVVNSLGLNNCRTEKEKTTLESLTQQLAVKQNEEGKFSHAMMDFNLSGDSDGSAGVSESRIYRESRGRGSNEPHIKRPMNAFMVWAKDERRKILQAFPDMHNSNISKILGSRWKAMTNLEKQPYYEEQARLSKQHLEKYPDYKYKPRPKRTCLVDGKKLRIGEYKAIMRNRRQEMRQYFNVGQQAQIPIATAGVVYPGAIAMAGMPSPHLPSEHSSVSSSPEPGMPVIQSTYGVKGEEPHIKEEIQAEDINGEIYDEYDEEEDDPDVDYGSDSENHIAGQAN

SEQ ID NO: 65429 - protein, 642 aa, Homo sapiens
MSSKRPASPYGEADGEVAMVTSRQKVEEEESDGLPAFHLPLHVSFPNKPHSEEFQPVSLLTQETCGHRTPTSQHNTMEVDGNKVMSSFAPHNSSTSPQKAEEGGRQSGESLSSTALGTPERRKGSLADVVDTLKQRKMEELIKNEPEETPSIEKLLSKDWKDKLLAMGSGNFGEIKGTPESLAEKERQLMGMINQLTSLREQLLAAHDEQKKLAASQIEKQRQQMELAKQQQEQIARQQQQLLQQQHKINLLQQQIQVQGQLPPLMIPVFPPDQRTLAAAAQQGFLLPPGFSYKAGCSDPYPVQLIPTTMAAAAAATPGLGPLQLQQLYAAQLAAMQVSPGGKLPGIPQGNLGAAVSPTSIHTDKSTNSPPPKSKEKTTLESLTQQLAVKQNEEGKFSHAMMDFNLSGDSDGSAGVSESRIYRESRGRGSNEPHIKRPMNAFMVWAKDERRKILQAFPDMHNSNISKILGSRWKAMTNLEKQPYYEEQARLSKQHLEKYPDYKYKPRPKRTCLVDGKKLRIGEYKAIMRNRRQEMRQYFNVGQQAQIPIATAGVVYPGAIAMAGMPSPHLPSEHSSVSSSPEPGMPVIQSTYGVKGEEPHIKEEIQAEDINGEIYDEYDEEEDDPDVDYGSDSENHIAGQAN

SEQ ID NO: 65430 - protein, 377 aa, Homo sapiens
MHDEVAQPLNLSAKPKTSDGKSPTSPTSPHMPALRINSGAGPLKASVPAALASPSARVSTIGYLNDHDAVTKAIQEARQMKEQLRREQQVLDGKVAVVNSLGLNNCRTEKEKTTLESLTQQLAVKQNEEGKFSHAMMDFNLSGDSDGSAGVSESRIYRESRGRGSNEPHIKRPMNAFMVWAKDERRKILQAFPDMHNSNISKILGSRWKAMTNLEKQPYYEEQARLSKQHLEKYPDYKYKPRPKRTCLVDGKKLRIGEYKAIMRNRRQEMRQYFNVGQQAQIPIATAGVVYPGAIAMAGMPSPHLPSEHSSVSSSPEPGMPVIQSTYGVKGEEPHIKEEIQAEDINGEIYDEYDEEEDDPDVDYGSDSENHIAGQAN

SEQ ID NO: 65431 - protein, 587 aa, Homo sapiens
MSSKRPASPYGEADGEVAMVTSRQKVEEEESDGLPAFHLPLHEVDGNKVMSSFAPHNSSTSPQKAEEGGRQSGESLSSTALGTPERRKGSLADVVDTLKQRKMEELIKNEPEETPSIEKLLSKDWKDKLLAMGSGNFGEIKGTPESLAEKERQLMGMINQLTSLREQLLAAHDEQKKLAASQIEKQRQQMELAKQQQEQIARQQQQLLQQQHKINLLQQQIQVQGQLPPLMIPVFPPDQRTLAAAAQQGFLLPPGFSYKAGCSDPYPVQLIPTTMAAAAAATPGLGPLQLQQLYAAQLAAMQVSPGGKLPGIPQGNLGAAVSPTSIHTDKSTNSPPPKSKDEVAQPLNLSAKPKTSDGKSPTSPTSPHMPALRINSGAGPLKASVPAALASPSARVSTIGYLNDHDAVTKAIQEARQMKEQLRREQQVLDGKVAVVNSLGLNNCRTEKEKTTLESLTQQLAVKQNEEGKFSHAMMDFNLSGDSDGSAGVSESRIYRESRGRGSNEPHIKRPMNAFMVWAKDERRKILQAFPDLGFLCVCMYVIMVLIIGITLDHCELNPHLGMKSHILPSDWSRNNLDLDFALQMTT

SEQ ID NO: 65432 - protein, 763 aa, Homo sapiens [sequence omitted]

SEQ ID NO: 65433 - protein, 642 aa, Homo sapiens; identical to SEQ ID NO: 65429

SEQ ID NO: 65434 - protein, 750 aa, Homo sapiens; identical to SEQ ID NO: 65428

SEQ ID NO: 65435 - protein, 808 aa, Homo sapiens
MSSKQATSPFACAADGEDAMTQDLTSREKEEGSDQHVASHLPLHPIMHNKPHSEELPTLVSTIQQDADWDSVLSSQQRMESENNKLCSLYSFRNTSTSPHKPDEGSRDREIMTSVTFGTPERRKGSLADVVDTLKQKKLEEMTRTEQEDSSCMEKLLSKDWKEKMERLNTSELLGEIKGTPESLAEKERQLSTMITQLISLREQLLAAHDEQKKLAASQIEKQRQQMDLARQQQEQIARQQQQLLQQQHKINLLQQQIQVQGHMPPLMIPIFPHDQRTLAAAAAAQQGFLFPPGITYKPGDNYPVQFIPSTMAAAAASGLSPLQLQKGHVSHPQINQRLKGLSDRFGRNLDTFEHGGGHSYNHKQIEQLYAAQLASMQVSPGAKMPSTPQPPNTAGTVSPTGIKNEKRGTSPVTQVKDEAAAQPLNLSSRPKTAEPVKSPTSPTQNLFPASKTSPVNLPNKSSIPSPIGGSLGRGSSLDILSSLNSPALFGDQDTVMKAIQEARKMREQIQREQQQQQPHGVDGKLSSINNMGLNSCRNEKERTRFENLGPQLTGKSNEDGKLGPGVIDLTRPEDAEGGATVAEARVYRDARGRASSEPHIKRPMNAFMVWAKDERRKILQAFPDMHNSNISKILGSRWKSMSNQEKQPYYEEQARLSKIHLEKYPNYKYKPRPKRTCIVDGKKLRIGEYKQLMRSRRQEMRQFFTVGQQPQIPITTGTGVVYPGAITMATTTPSPQMTSDCSSTSASPEPSLPVIQSTYGMKTDGGSLAGNEMINGEDEMEMYDDYEDDPKSDYSSENEAPEAVSAN

SEQ ID NO: 65436 - protein, 828 aa, Homo sapiens
MSSKQATSPFACAADGEDAMTQDLTSREKEEGSDQHVASHLPLHPIMHNKPHSEELPTLVSTIQQDADWDSVLSSQQRMESENNKLCSLYSFRNTSTSPHKPDEGSRDREIMTSVTFGTPERRKGSLADVVDTLKQKKLEEMTRTEQEDSSCMEKLLSKDWKEKMERLNTSELLGEIKGTPESLAEKERQLSTMITQLISLREQLLAAHDEQKKLAASQIEKQRQQMDLARQQQEQIARQQQQLLQQQHKINLLQQQIQVQGHMPPLMIPIFPHDQRTLAAAAAAQQGFLFPPGITYKPGDNYPVQFIPSTMAAAAASGLSPLQLQKGHVSHPQINQRLKGLSDRFGRNLDTFEHGGGHSYNHKQIEQLYAAQLASMQVSPGAKMPSTPQPPNTAGTVSPTGIKNEKRGTSPVTQVKDEAAAQPLNLSSRPKTAEPVKSPTSPTQNLFPASKTSPVNLPNKSSIPSPIGGSLGRGSSLDILSSLNSPALFGDQDTVMKAIQEARKMREQIQREQQQQQPHGVDGKLSSINNMGLNSCRNEKERTRFENLGPQLTGKSNEDGKLGPGVIDLTRPEDAEGSKAMNGSAAKLQQYYCWPTGGATVAEARVYRDARGRASSEPHIKRPMNAFMVWAKDERRKILQAFPDMHNSNISKILGSRWKSMSNQEKQPYYEEQARLSKIHLEKYPNYKYKPRPKRTCIVDGKKLRIGEYKQLMRSRRQEMRQFFTVGQQPQIPITTGTGVVYPGAITMATTTPSPQMTSDCSSTSASPEPSLPVIQSTYGMKTDGGSLAGNEMINGEDEMEMYDDYEDDPKSDYSSENEAPEAVSAN

SEQ ID NO: 65437 - protein, 808 aa, Homo sapiens; identical to SEQ ID NO: 65435

SEQ ID NO: 65438 - protein, 139 aa, Homo sapiens
MSSKQATSPFACAADGEDAMTQDLTSREKEEGSDQHVASHLPLHPIMHNKPHSEELPTLVSTIQQDADWDSVLSSQQRMESENNKLCSLYSFRNTSTSPHKPDEGSRDREIMTSVTFGTPERRKGSLADVVDTLKQKKL

SEQ ID NO: 65439 - protein, 801 aa, Homo sapiens
MSSKQATSPFACAADGEDAMTQDLTSREKEEGSDQHVASHLPLHPIMHNKPHSEELPTLVSTIQQDADWDSVLSSQQRMESENNKLCSLYSFRNTSTSPHKPDEGSRDREIMTSVTFGTPERRKGSLADVVDTLKQKKLEEMTRTEQEDSSCMEKLLSKDWKEKMERLNTSELLGEIKGTPESLAEKERQLSTMITQLISLREQLLAAHDEQKKLAASQIEKQRQQMDLARQQQEQIARQQQQLLQQQHKINLLQQQIQVQGHMPPLMIPIFPHDQRTLAAAAAAQQGFLFPPGITYKPGDNYPVQFIPSTMAAAAASGLSPLQLQQLYAAQLASMQVSPGAKMPSTPQPPNTAGTVSPTGIKNEKRGTSPVTQVKDEAAAQPLNLSSRPKTAEPVKSPTSPTQNLFPASKTSPVNLPNKSSIPSPIGGSLGRGSSLGKWKSQHQEETYELDILSSLNSPALFGDQDTVMKAIQEARKMREQIQREQQQQQPHGVDGKLSSINNMGLNSCRNEKERTRFENLGPQLTGKSNEDGKLGPGVIDLTRPEDAEGSKAMNGSAAKLQQYYCWPTGGATVAEARVYRDARGRASSEPHIKRPMNAFMVWAKDERRKILQAFPDMHNSNISKILGSRWKSMSNQEKQPYYEEQARLSKIHLEKYPNYKYKPRPKRTCIVDGKKLRIGEYKQLMRSRRQEMRQFFTVGQQPQIPITTGTGVVYPGAITMATTTPSPQMTSDCSSTSASPEPSLPVIQSTYGMKTDGGSLAGNEMINGEDEMEMYDDYEDDPKSDYSSENEAPEAVSAN

SEQ ID NO: 65440 - protein, 828 aa, Homo sapiens; identical to SEQ ID NO: 65436

SEQ ID NO: 65441 - protein, 79 aa, Homo sapiens
MSSKQATSPFACAADGEDAMTQDLTSREKEEGSDQHVASHLPLHPIMHNKPHSEELPTLVSTIQQDADWDSVLSSQQRM

SEQ ID NO: 65442 - protein, 159 aa, Homo sapiens
MSSKQATSPFACAADGEDAMTQDLTSREKEEGSDQHVASHLPLHPIMHNKPHSEELPTLVSTIQQDADWDSVLSSQQRMESENNKLCSLYSFRNTSTSPHKPDEGSRDREIMTSVTFGTPERRKGSLADVVDTLKQKKLEEMTRTEQEDSSCMEKLLSK

SEQ ID NO: 65443 - protein, 804 aa, Homo sapiens
MGRMSSKQATSPFACAADGEDAMTQDLTSREKEEGSDQHVASHLPLHPIMHNKPHSEELPTLVSTIQQDADWDSVLSSQQRMESENNKLCSLYSFRNTSTSPHKPDEGSRDREIMTSVTFGTPERRKGSLADVVDTLKQKKLEEMTRTEQEDSSCMEKLLSKDWKEKMERLNTSELLGEIKGTPESLAEKERQLSTMITQLISLREQLLAAHDEQKKLAASQIEKQRQQMDLARQQQEQIARQQQQLLQQQHKINLLQQQIQVQGHMPPLMIPIFPHDQRTLAAAAAAQQGFLFPPGITYKPGDNYPVQFIPSTMAAAAASGLSPLQLQQLYAAQLASMQVSPGAKMPSTPQPPNTAGTVSPTGIKNEKRGTSPVTQVKDEAAAQPLNLSSRPKTAEPVKSPTSPTQNLFPASKTSPVNLPNKSSIPSPIGGSLGRGSSLGKWKSQHQEETYELDILSSLNSPALFGDQDTVMKAIQEARKMREQIQREQQQQQPHGVDGKLSSINNMGLNSCRNEKERTRFENLGPQLTGKSNEDGKLGPGVIDLTRPEDAEGSKAMNGSAAKLQQYYCWPTGGATVAEARVYRDARGRASSEPHIKRPMNAFMVWAKDERRKILQAFPDMHNSNISKILGSRWKSMSNQEKQPYYEEQARLSKIHLEKYPNYKYKPRPKRTCIVDGKKLRIGEYKQLMRSRRQEMRQFFTVGQQPQIPITTGTGVVYPGAITMATTTPSPQMTSDCSSTSASPEPSLPVIQSTYGMKTDGGSLAGNEMINGEDEMEMYDDYEDDPKSDYSSENEAPEAVSAN

SEQ ID NO: 65444 - protein, 388 aa, Homo sapiens [sequence omitted]

SEQ ID NO: 65445 - protein, 440 aa, Homo sapiens
MSMLAERRRKQKWAVDPQNTAWSNDDSKFGQRMLEKMGWSKGKGLGAQEQGATDHIKVQVKNNHLGLGATINNEDNWIAHQDDFNQLLAELNTCHGQETTDSSDKKEKKSFSLEEKSKISKNRVHYMKFTKGKSWKALTLSQKRPYVDEAERLRLQHMQDYPNYKYRPRRKKQAKRLCKRVDPGFLLSSLSRDQNALPEKRSGSRGALGEKEDRGEYSPGTALPSLRGCYHEGPAGGGGGGTPSSVDTYPYGLPTPPEMSPLDVLEPEQTFFSSPCQEEHGHPRRIPHLPGHPYSPEYAPSPLHCSHPLGSLALGQSPGVSMMSPVPGCPPSPAYYSPATYHPLHSNLQAHLGQLSPPPEHPGFDALDQLSQVELLGDMDRNEFDQYLNTPGHPDSATGAMALSGHVPVSQVTPTGPTETSLISVLADATATYYNSYSVS

SEQ ID NO: 65446 - protein, 446 aa, Homo sapiens [sequence omitted]

SEQ ID NO: 65447 - protein, 509 aa, Homo sapiens
MNLLDPFMKMTDEQEKGLSGAPSPTMSEDSAGSPCPSGSGSDTENTRPQENTFPKGEPDLKKESEEDKFPVCIREAVSQVLKGYDWTLVPMPVRVNGSSKNKPHVKRPMNAFMVWAQAARRKLADQYPHLHNAELSKTLGKLWRLLNESEKRPFVEEAERLRVQHKKDHPDYKYQPRRRKSVKNGQAEAEEATEQTHISPNAIFKALQADSPHSSSGMSEVHSPGEHSGQSQGPPTPPTTPKTDVQPGKADLKREGRPLPEGGRQPPIDFRDVDIGELSSDVISNIETFDVNEFDQYLPPNGHPGVPATHGQVTYTGSYGISSTAATPASAGHVWMSKQQAPPPPPQQPPQAPPAPQAPPQPQAAPPQQPAAPPQQPQAHTLTTLSSEPGQSQRTHIKTEQLSPSHYSEQQQHSPQQIAYSPFNLPHYSPSYPPITRSQYDYTDHQNSSSYYSHAAGQGTGLYSTFTYMNPAQRPMYTPIADTSGVPSIPQTHSPQHWEQPVYTQLTRP

SEQ ID NO: 65448 - protein, 445 aa, Homo sapiens
MNLLDPFMKMTDEQEKGLSGAPSPTMSEDSAGSPCPSGSGSDTENTRPQENTFPKGEPDLKKESEEDKFPVCIREAVSQVLKGYDWTLVPMPVRVNGSSKNKPHVKRPMNAFMVWAQAARRKLADQYPHLHNAELSKTLGKLWRLLNESEKRPFVEEAERLRVQHKKDHPDYKYQPRRRKSVKNGQAEAEEATEQTHISPNAIFKALQADSPHSSSGMSEVHSPGEHSGQSQGPPTPPTTPKTDVQPGKADLKREGRPLPEGGRQPPIDFRDVDIGELSSDVISNIETFDVNEFDQYLPPNGHPGVPATHGQVTYTGSYGISSTAATPASAGHVWMSKQQAPPPPPQQHSPQQIAYSPFNLPHYSPSYPPITRSQYDYTDHQNSSSYYSHAAGQGTGLYSTFTYMNPAQRPMYTPIADTSGVPSIPQTHSPQHWEQPVYTQLTRP

SEQ ID NO: 65449 - protein, 90 aa, Homo sapiens
MRGYLVAIFLSAVFLYYVLHCILWGTNVYWVAPVEMKRRNKIQPCLSKPAFASLLSQSSAYILRKGIEELNQTSILFTQVSSVSPFSVCG

SEQ ID NO: 65450 - protein, 90 aa, Homo sapiens; identical to SEQ ID NO: 65449

SEQ ID NO: 65451 - protein, 444 aa, Homo sapiens
MGLLVFVRNLLLALCLFLVLGFLYYSAWKLHLLQWEEDSSKYSHSSSPQEKPVADSVVLSFDSAGQTLGSEYDRLGFLLNLDSKLSPRTLCTVVFGLDCILESPGEPKKLLMPASHPLEILKSLSEDTAFALGFLKLPRPAELATKYANFSEGACKPGYASALMTAIFPRFSKPAPMFLDDSFRKWARIREFVPPFGIKGQDNLIKAILSVTKEYRLTPALDSLRCRRCIIVGNGGVLANKSLGSRIDDYDIVVRLNSAPVKGFEKDVGSKTTLRITYPEGAMQRPEQYERDSLFVLAGFKWQDFKWLKYIVYKERVSASDGFWKSVATRVPKEPPEIRILNPYFIQEAAFTLIGLPFNNGLMGRGNIPTLGSVAVTMALHGCDEVAVAGFGYDMSTPNAPLHYYETVRMAAIKESWTHNIQREKEFLRKLVKARVITDLSSGI

SEQ ID NO: 65452 - protein, 155 aa, Homo sapiens
MGLLVFVRNLLLALCLFLVLGFLYYSAWKLHLLQWEEDSNSVVLSFDSAGQTLGSEYDRLGFLLNLDSKLPAELATKYANFSEGACKPGYASALMTAIFPRFSKPAPMFLDDSFRKWARIREFVPPFGIKGQVLDAQYPARERVSAEAGESSRHH

SEQ ID NO: 65453 - protein, 344 aa, Homo sapiens
MGLLVFVRNLLLALCLFLVLGFLYYSAWKLHLLQWEEDSNSVVLSFDSAGQTLGSEYDRLGFLLNLDSKLFSKPAPMFLDDSFRKWARIREFVPPFGIKGQDNLIKAILSVTKEYRLTPALDSLRCRRCIIVGNGGVLANKSLGSRIDDYDIVVRLNSAPVKGFEKDVGSKTTLRITYPEGAMQRPEQYERDSLFVLAGFKWQDFKWLKYIVYKERVSASDGFWKSVATRVPKEPPEIRILNPYFIQEAAFTLIGLPFNNGLMGRGNIPTLGSVAVTMALHGCDEVAVAGFGYDMSTPNAPLHYYETVRMAAIKESWTHNIQREKEFLRKLVKARVITDLSSGI

SEQ ID NO: 65454 - protein, 228 aa, Homo sapiens
MGLLVFVRNLLLALCLFLVLGFLYYSAWKLHLLQWEEDSKYDRLGFLLNLDSKLPAELATKYANFSEGACKPGYASALMTAIFPRFSKPAPMFLDDSFRKWARIREFVPPFGIKGQDNLIKAILSVTKEYRLTPALDSLRCRRCIIVGNGGVLANKSLGSRIDDYDIVVRVHRMASGNLWPLECPRSPLRFESSTHISSRRPPSPSLACPSTMASWAGGTSLPLAVWQ

SEQ ID NO: 65455 - protein, 390 aa, Homo sapiens
MGLLVFVRNLLLALCLFLVLGFLYYSAWKLHLLQWEEDSSKYSHSSSPQEKPVADSVVLSFDSAGQTLGSEYDRLGFLLNLDSKLPAELATKYANFSEGACKPGYASALMTAIFPRFSKPAPMFLDDSFRKWARIREFVPPFGIKGQDNLIKAILSVTKEYRLTPALDSLRCRRCIIVGNGGVLANKSLGSRIDDYDIVVRLNSAPVKGFEKDVGSKTTLRITYPEGAMQRPEQYERDSLFVLAGFKWQDFKWLKYIVYKERVSASDGFWKSVATRVPKEPPEIRILNPYFIQEAAFTLIGLPFNNGLMGRGNIPTLGSVAVTMALHGCDEVAVAGFGYDMSTPNAPLHYYETVRMAAIKESWTHNIQREKEFLRKLVKARVITDLSSGI

SEQ ID NO: 65456 - protein, 413 aa, Homo sapiens
MGLLVFVRNLLLALCLFLVLGFLYYSAWKLHLLQWEEDSKYDRLGFLLNLDSKLSPRTLCTVVFGLDCILESPGEPKKLLMPASHPLEILKSLSEDTAFALGFLKLPRPAELATKYANFSEGACKPGYASALMTAIFPRFSKPAPMFLDDSFRKWARIREFVPPFGIKGQDNLIKAILSVTKEYRLTPALDSLRCRRCIIVGNGGVLANKSLGSRIDDYDIVVRLNSAPVKGFEKDVGSKTTLRITYPEGAMQRPEQYERDSLFVLAGFKWQDFKWLKYIVYKERVSASDGFWKSVATRVPKEPPEIRILNPYFIQEAAFTLIGLPFNNGLMGRGNIPTLGSVAVTMALHGCDEVAVAGFGYDMSTPNAPLHYYETVRMAAIKESWTHNIQREKEFLRKLVKARVITDLSSGI

SEQ ID NO: 65457 - protein, 277 aa, Homo sapiens
MGLLVFVRNLLLALCLFLVLGFLYYSAWKLHLLQWEEDSNSVVLSFDSAGQTLGSEYDRLGFLLNLDSKLPAELATKYANFSEGACKPGYASALMTAIFPRFSKPAPMFLDDSFRKWARIREFVPPFGIKGQDNLIKAILSVTKEYRLTPALDSLRCRRCIIVGNGGVLANKSLGSRIDDYDIVVRLNSAPVKGFEKDVGSKTTLRITYPEGAMQRPEQYERDSLFVLAGFKWQDFKWLKYIVYKERVSWTHNIQREKEFLRKLVKARVITDLSSGI

SEQ ID NO: 65458 - protein, 375 aa, Homo sapiens
MGLLVFVRNLLLALCLFLVLGFLYYSAWKLHLLQWEEDSNSVVLSFDSAGQTLGSEYDRLGFLLNLDSKLPAELATKYANFSEGACKPGYASALMTAIFPRFSKPAPMFLDDSFRKWARIREFVPPFGIKGQDNLIKAILSVTKEYRLTPALDSLRCRRCIIVGNGGVLANKSLGSRIDDYDIVVRLNSAPVKGFEKDVGSKTTLRITYPEGAMQRPEQYERDSLFVLAGFKWQDFKWLKYIVYKERVSASDGFWKSVATRVPKEPPEIRILNPYFIQEAAFTLIGLPFNNGLMGRGNIPTLGSVAVTMALHGCDEVAVAGFGYDMSTPNAPLHYYETVRMAAIKESWTHNIQREKEFLRKLVKARVITDLSSGI

SEQ ID NO: 65459 - protein, 359 aa, Homo sapiens
MGLLVFVRNLLLALCLFLVLGFLYYSAWKLHLLQWEEDSKYDRLGFLLNLDSKLPAELATKYANFSEGACKPGYASALMTAIFPRFSKPAPMFLDDSFRKWARIREFVPPFGIKGQDNLIKAILSVTKEYRLTPALDSLRCRRCIIVGNGGVLANKSLGSRIDDYDIVVRLNSAPVKGFEKDVGSKTTLRITYPEGAMQRPEQYERDSLFVLAGFKWQDFKWLKYIVYKERVSASDGFWKSVATRVPKEPPEIRILNPYFIQEAAFTLIGLPFNNGLMGRGNIPTLGSVAVTMALHGCDEVAVAGFGYDMSTPNAPLHYYETVRMAAIKESWTHNIQREKEFLRKLVKARVITDLSSGI

SEQ ID NO: 65460 - protein, 444 aa, Homo sapiens; identical to SEQ ID NO: 65451

SEQ ID NO: 65461 - protein, 170 aa, Homo sapiens
MGLLVFVRNLLLALCLFLVLGFLYYSAWKLHLLQWEEDSSKYSHSSSPQEKPVADSVVLSFDSAGQTLGSEYDRLGFLLNLDSKLPAELATKYANFSEGACKPGYASALMTAIFPRFSKPAPMFLDDSFRKWARIREFVPPFGIKGQVLDAQYPARERVSAEAGESSRHH

SEQ ID NO: 65462 - protein, 155 aa, Homo sapiens; identical to SEQ ID NO: 65452

SEQ ID NO: 65463 - protein, 186 aa, Homo sapiens
MGLLVFVRNLLLALCLFLVLGFLYYSAWKLHLLQWEEDSNSVVLSFDSAGQTLGSEYDRLGFLLNLDSKLPAELATKYANFSEGACKPGYASALMTAIFPRFSKPAPMFLDDSFRKWARIREFVPPFGIKGQDNLIKAILSVTKEYRLTPALDSLRCRRCIIVGNGGVLANKSLGSRIDDYDIVVR

SEQ ID NO: 65464 - protein, 185 aa, Homo sapiens
MGLLVFVRNLLLALCLFLVLGFLYYSAWKLHLLQWEEDSSKYSHSSSPQEKPVAEYDRLGFLLNLDSKLPAELATKYANFSEGACKPGYASALMTAIFPRFSKPAPMFLDDSFRKWARIREFVPPFGIKGQDNLIKAILSVTKEYRLTPALDSLRCRRCIIVGNGGVLANKSLGSRIDDYDIVVR

SEQ ID NO: 65465 - protein, 201 aa, Homo sapiens
MGLLVFVRNLLLALCLFLVLGFLYYSAWKLHLLQWEEDSSKYSHSSSPQEKPVAEYDRLGFLLNLDSKLPAELATKYANFSEGACKPGYASALMTAIFPRFSKPAPMFLDDSFRKWARIREFVPPFGIKGQDNLIKAILSVTKEYRLTPALDSLRCRRCIIVGNGGVLANKSLGSRIDDYDIVVSPGRTISSERKSFCGSW

SEQ ID NO: 65466 - protein, 429 aa, Homo sapiens
MGLLVFVRNLLLALCLFLVLGFLYYSAWKLHLLQWEEDSNSVVLSFDSAGQTLGSEYDRLGFLLNLDSKLSPRTLCTVVFGLDCILESPGEPKKLLMPASHPLEILKSLSEDTAFALGFLKLPRPAELATKYANFSEGACKPGYASALMTAIFPRFSKPAPMFLDDSFRKWARIREFVPPFGIKGQDNLIKAILSVTKEYRLTPALDSLRCRRCIIVGNGGVLANKSLGSRIDDYDIVVRLNSAPVKGFEKDVGSKTTLRITYPEGAMQRPEQYERDSLFVLAGFKWQDFKWLKYIVYKERVSASDGFWKSVATRVPKEPPEIRILNPYFIQEAAFTLIGLPFNNGLMGRGNIPTLGSVAVTMALHGCDEVAVAGFGYDMSTPNAPLHYYETVRMAAIKESWTHNIQREKEFLRKLVKARVITDLSSGI

SEQ ID NO: 65467 - protein, 345 aa, Homo sapiens
MGLLVFVRNLLLALCLFLVLGFLYYSAWKLHLLQWEEDSNSVVLSFDSAGQTLGSEYDRLGFLLNLDSKLPAELATKYANFSEGACKPGYASALMTAIFPRFSKPAPMFLDDSFRKWARIREFVPPFGIKGQDNLIKAILSVTKEYRLTPALDSLRCRRCIIVGNGGVLANKSLGSRIDDYDIVVRLNSAPVKGFEKDVGSKTTLRITYPEGAMQRPEQYERDSLFVLAGFKWQDFKWLKYIVYKERVEAAFTLIGLPFNNGLMGRGNIPTLGSVAVTMALHGCDEVAVAGFGYDMSTPNAPLHYYETVRMAAIKESWTHNIQREKEFLRKLVKARVITDLSSGI

SEQ ID NO: 65468 - protein, 413 aa, Homo sapiens; identical to SEQ ID NO: 65456

SEQ ID NO: 65469 - protein, 344 aa, Homo sapiens; identical to SEQ ID NO: 65453

SEQ ID NO: 65470 - protein, 429 aa, Homo sapiens; identical to SEQ ID NO: 65466

SEQ ID NO: 65471 - protein, 151 aa, Homo sapiens
MGLLVFVRNLLLALCLFLVLGFLYYSAWKLHLLQWEEDSNSVVLSFDSAGQTLGSEYDRLGFLLNLDSKLPAELATKYANFSEGACKPGYASALMTAIFPRFSKPAPMFLDDSFRKWARIREFVPPFGIKGQECIGWLLEICGHSSAQGAP

SEQ ID NO: 65472 - protein, 186 aa, Homo sapiens
MGLLVFVRNLLLALCLFLVLGFLYYSAWKLHLLQWEEDSKYDRLGFLLNLDSKLPAELATKYANFSEGACKPGYASALMTAIFPRFSKPAPMFLDDSFRKWARIREFVPPFGIKGQDNLIKAILSVTKEYRLTPALDSLRCRRCIIVGNGGVLANKSLGSRIDDYDIVVSPGRTISSERKSFCGSW

SEQ ID NO: 65473 - protein, 139 aa, Homo sapiens
MGLLVFVRNLLLALCLFLVLGFLYYSAWKLHLLQWEEDSKYDRLGFLLNLDSKLPAELATKYANFSEGACKPGYASALMTAIFPRFSKPAPMFLDDSFRKWARIREFVPPFGIKGQVLDAQYPARERVSAEAGESSRHH

SEQ ID NO: 65474 - protein, 101 aa, Homo sapiens
MGLLVFVRNLLLALCLFLVLGFLYYSAWKLHLLQWEEDSKYDRLGFLLNLDSKLPAELATKYANFSEGACKPGYASALMTAIFPRPGRTISSERKSFCGSW

SEQ ID NO: 65475 - protein, 261 aa, Homo sapiens
MGLLVFVRNLLLALCLFLVLGFLYYSAWKLHLLQWEEDSKYDRLGFLLNLDSKLPAELATKYANFSEGACKPGYASALMTAIFPRFSKPAPMFLDDSFRKWARIREFVPPFGIKGQDNLIKAILSVTKEYRLTPALDSLRCRRCIIVGNGGVLANKSLGSRIDDYDIVVRLNSAPVKGFEKDVGSKTTLRITYPEGAMQRPEQYERDSLFVLAGFKWQDFKWLKYIVYKERVSWTHNIQREKEFLRKLVKARVITDLSSGI

SEQ ID NO: 65476 - protein, 277 aa, Homo sapiens; identical to SEQ ID NO: 65457

SEQ ID NO: 65477 - protein, 170 aa, Homo sapiens; identical to SEQ ID NO: 65461

SEQ ID NO: 65478 - protein, 213 aa, Homo sapiens
MRTSAEYFRLALSKLQSCDLFDEFDKMNNGPVLGHEEEVGRRTTFRLFYPESVFSDPIHNDPNTTVILTAFKPHDLRWLLELLMGDKINTNGFWKKPALNLIYKPYQIRILDPFIIRTAAYELLHFPKVFPKNQKPKHPTTGIIAITLAFYICHEVHLAGFKYNFSDLKSPLHYYGNATMSLMNKNAYHNVTAEQLFLKDIIEKNLVINLTQD

SEQ ID NO: 65479 - protein, 331 aa, Homo sapiens
MRGYLVAIFLSAVFLYYVLHCILWGTNVYWVAPVEMKRRNKIQPCLSKPAFASLLRFHQFHPFLCAADFRKIASLYGSDKFDLPYGMRTSAEYFRLALSKLQSCDLFDEFDNIPCKKCVVVGNGGVLKNKTLGEKIDSYDVIIRMNNGPVLGHEEEVGRRTTFRLFYPESVFSDPIHNDPNTTVILTAFKPHDLRWLLELLMGDKINTNGFWKKPALNLIYKPYQIRILDPFIIRTAAYELLHFPKVFPKNQKPKHPTTGIIAITLAFYICHEVHLAGFKYNFSDLKSPLHYYGNATMSLMNKNAYHNVTAEQLFLKDIIEKNLVINLTQD

SEQ ID NO: 65480 - protein, 331 aa, Homo sapiens; identical to SEQ ID NO: 65479

SEQ ID NO: 65481 - protein, 231 aa, Homo sapiens
MRGYLVAIFLSAVFLYYVLHCILWGTNVYWVAPVEMKRRNKIQPCLSKPAFASLLRFHQFHPFLCAADFRKIASLYGSDKFDLPYGMRTSAEYFRLALSKLQSCDLFDEFDNIPCKKCVVVGNGGVLKNKTLGEKIDSYDVIIRMNNGPVLGHEEEVGRRTTFRLFYPESVFSDPIHNDPNTTVILTAFKPHDLRWLLELLMGDKINTNGFWKKPALNLIYKPYQIRILDP

SEQ ID NO: 65482 - protein, 246 aa, Homo sapiens
MHCRDCALVTSSGHLLHSRQGSQIDQTECVIRMNDAPTRGYGRDVGNRTSLRVIAHSSIQRILRNRHDLLNVSQGTVFIFWGPSSYMRRDGKGQVYNNLHLLSQVLPRLKAFMITRHKMLQFDELFKQETGKDRKISNTWLSTGWFTMTIALELCDRINVYGMVPPDFCRDPNHPSVPYHYYEPFGPDECTMYLSHERGRKGSHHRFITEKRVFKNWARTFNIHFFQPDWKPESLAINHPENKPVF

SEQ ID NO: 65483 - protein, 336 aa, Homo sapiens
MKTLMRHGLAVCLALTTMCTSLLLVYSSLGGQKERPPQQQQQQQQQQQQASATGSSQPAAESSTQQRPGVPAGPRPLDGYLGVADHKPLKMHCRDCALVTSSGHLLHSRQGSQIDQTECVIRMNDAPTRGYGRDVGNRTSLRVIAHSSIQRILRNRHDLLNVSQGTVFIFWGPSSYMRRDGKGQVYNNLHLLSQVLPRLKAFMITRHKMLQFDELFKQETGKDRKISNTWLSTGWFTMTIALELCDRINVYGMVPPDFCRDPNHPSVPYHYYEPFGPDECTMYLSHERGRKGSHHRFITEKRVFKNWARTFNIHFFQPDWKPESLAINHPENKPVF

SEQ ID NO: 65484 - protein, 424 aa, Homo sapiens
MSDHGDVSLPPEDRVRALSQLGSAVEVNEDIPPRRYFRSGVEIIRMASIYSEEGNIEHAFILYNKYITLFIEKLPKHRDYKSAVIPEKKDTVKKLKEIAFPKAEELKAELLKRYTKEYTEYNEEKKKEAEELARNMAIQQELEKEKQRVAQQKQQQLEQEQFHAFEEMIRNQELEKERLKIVQEFGKVDPGLGGPLVPDLEKPSLDVFPTLTVSSIQPSDCHTTVRPAKPPVVDRSLKPGALSNSESIPTIDGLRHVVVPGRLCPQFLQLASANTARGVETCGILCGKLMRNEFTITHVLIPKQSAGSDYCNTENEEELFLIQDQQGLITLGWIHTHPTQTAFLSSVDLHTHCSYQMMLPESVAIVCSPKFQETGFFKLTDHGLEEISSCRQKGFHPHSKDPPLFCSCSHVTVVDRAVTITDLR

SEQ ID NO: 65485 - protein, 424 aa, Homo sapiens; identical to SEQ ID NO: 65484

SEQ ID NO: 65486 - protein, 424 aa, Homo sapiens; identical to SEQ ID NO: 65484

SEQ ID NO: 65487 - protein, 424 aa, Homo sapiens; identical to SEQ ID NO: 65484

SEQ ID NO: 65488 - protein, 163 aa, Homo sapiens
MSDHGDVSLPPEDRVRALSQLGSAVEVNEDIPPRRYFRSGVEIIRMASIYSEEGNIEHAFILYNKYITLFIEKLPKHRDYKSAVIPEKKDTVKKLKEIAFPKAEELKAELLKRYTKEYTEYNEEKKKEAEELARNMAIQQELEKEKQRVAQQKQQQLEQEQFH

SEQ ID NO: 65489 - protein, 318 aa, Homo sapiens
MSDHGDVSLPPEDRVRALSQLGSAVEVNEDIPPRRYFRSGVEIIRMASIYSEEGNIEHAFILYNKYITLFIEKLPKHRDYKSAVIPEKKDTVKKLKEIAFPKAEELKAELLKRYTKEYTEYNEEKKKEAEELARNMAIQQELEKEKQRVAQQKQQQLEQEQFHAFEEMIRNQELEKERLKIVQEFGKVDPGLGGPLVPDLEKPSLDVFPTLTVSSIQPSDCHTTVRPAKPPVVDRSLKPGALSNSESIPTIDGLRHVVVPGRLCPQFLQLASANTARGVETCGILCGKLMRNEFTITHVLIPKQSAGSDYCNTENEEE

SEQ ID NO: 65490 - protein, 137 aa, Homo sapiens
MSDHGDVSLPPEDRVRALSQLGSAVEVNEDIPPRRYFRSGVEIIRMASIYSEEGNIEHAFILYNKYITLFIEKLPKHRDYKSAVIPEKKDTVKKLKEIAFPKAEELKAELLKRYTKEYTEYNEEKKKEAEELARNMA

SEQ ID NO: 65491 - protein, 348 aa, Homo sapiens
MSDHGDVSLPPEDRVRALSQLGSAVEVNEDIPPRRYFRSGVEIIRMASIYSEEGNIEHAFILYNKYITLFIEKLPKHRDYKSAVIPEKKDTVKKLKEIAFPKAEELKAELLKRYTKEYTEYNEEKKKEAEELARNMAIQQELEKEKQRVAQQKQQQLEQEQFHAFEEMIRNQELEKERLKIVQEFGKVDPGLGGPLVPDLEKPSLDVFPTLTVSSIQPSDCHTTVRPAKPPVVDRSLKPGALSNSESIPTIDGLRHVVVPGRLCPQFLQLASANTARGVETCGILCGKLMRNEFTITHVLIPKQSAGSDYCNTENEEELFLIQDQQGLITLGWIHVETLWSLKSLHAP

SEQ ID NO: 65492 - protein, 270 aa, Homo sapiens
MRQQQLESEQFLFFEDQLKKQELARGQMRSQQTSGLSEQIDGSALSCFSTHQNNSLLNVFADQPNKSDATNYASHSPPVNRALTPAATLSAVQNLVVEGLRCVVLPEDLCHKFLQLAESNTVRGIETCGILCGKLTHNEFTITHVIVPKQSAGPDYCDMENVEELFNVQDQHDLLTLGWIHTHPTQTAFLSSVDLHTHCSYQLMLPEAIAIVCSPKHKDTGIFRLTNAGMLEVSACKKKGFHPHTKEPRLFSICKHVLVKDIKIIVLDLR

SEQ ID NO: 65493 - protein, 436 aa, Homo sapiens
MDQPFTVNSLKKLAAMPDHTDVSLSPEERVRALSKLGCNITISEDITPRRYFRSGVEMERMASVYLEEGNLENAFVLYNKFITLFVEKLPNHRDYQQCAVPEKQDIMKKLKEIAFPRTDELKNDLLKKYNVEYQEYLQSKNKYKAEILKKLEHQRLIEAERKRIAQMRQQQLESEQFLFFEDQLKKQELARGQMRSQQTSGLSEQIDGSALSCFSTHQNNSLLNVFADQPNKSDATNYASHSPPVNRALTPAATLSAVQNLVVEGLRCVVLPEDLCHKFLQLAESNTVRGIETCGILCGKLTHNEFTITHVIVPKQSAGPDYCDMENVEELFNVQDQHDLLTLGWIHTHPTQTAFLSSVDLHTHCSYQLMLPEAIAIVCSPKHKDTGIFRLTNAGMLEVSACKKKGFHPHTKEPRLFSICKHVLVKDIKIIVLDLR

SEQ ID NO: 65494 - protein, 436 aa, Homo sapiens; identical to SEQ ID NO: 65493

SEQ ID NO: 65495 - protein, 461 aa, Homo sapiens
MDQPFTVNSLKKLAAMPDHTDVSLSPEERVRALSKLGCNITISEDITPRRYFRSGVEMERMASVYLEEGNLENAFVLYNKFITLFVEKLPNHRDYQQCAVPEKQDIMKKLKEIAFPRTDELKNDLLKKYNVEYQEYLQSKNKYKAEILKKLEHQRLIEAERKRIAQMRQQQLESEQFLFFEDQLKKQELARGQMRSQQTSGLSEQIDGSALSCFSTHQNNSLLNVFADQPNKSDATNYASHSPPVNRALTPAATLSAVQNLVVEGLRCVVLPEDLCHKFLQLAESNTVRGIETCGILCGKLTHNEFTITHVIVPKQSAGPDYCDMENVEELFNVQDQHDLLTLGWIHTHPTQTAFLSSVDLHTHCSYQLMLPEAIAIVCSPKHKDTGIFRLTNAGMLEVSACKKKGFHPHTKEPRLFSIQKFLSGIISGTALEMEPLKIGYGPNGFPLLGISRSSSPSEQL

SEQ ID NO: 65496 - protein, 88 aa, Homo sapiens
MSIMDHSPTTGVVTVIVILIAIAALGALILGCWCYLRLQRISQSEDEESIVGDGETKEPFLLVQYSAKGPCVERKAKLMTPNGPEVHG

SEQ ID NO: 65497 - protein, 247 aa, Homo sapiens
MLQNSAVLLVLVISASATHEAEQNDSVSPRKSRVAAQNSAEVVRCLNSALQVGCGAFACLENSTCDTDGMYDICKSFLYSAAKFDTQGKAFVKESLKCIANGVTSKVFLAIRRCSTFQRMIAEVQEECYSKLNVCSIAKRNPEAITEVVQLPNHFSNRYYNRLVRSLLECDEDTVSTIRDSLMEKIGPNMASLFHILQTDHCAQTHPRADFNRRRTNEPQKLKVLLRNLRGEEDSPSHIKRTSHESA

SEQ ID NO: 65498 - protein, 178 aa, Homo sapiens
MYDICKSFLYSAAKFDTQGKAFVKESLKCIANGVTSKVFLAIRRCSTFQRMIAEVQEECYSKLNVCSIAKRNPEAITEVVQLPNHFSNRYYNRLVRSLLECDEDTVSTIRDSLMEKIGPNMASLFHILQTDHCAQTHPRADFNRRRTNEPQKLKVLLRNLRGEEDSPSHIKRTSHESA

SEQ ID NO: 65499 - protein, 178 aa, Homo sapiens; identical to SEQ ID NO: 65498

SEQ ID NO: 65500 - protein, 910 aa, Homo sapiens
MASSAQSGGSSGGPAVPTVQRGIIKMVLSGCAIIVRGQPRGGPPPERQINLSNIRAGNLARRAAATQPDAKDTPDEPWAFPAREFLRKKLIGKEVCFTIENKTPQGREYGMIYLGKDTNGENIAESLVAEGLATRREGMRANNPEQNRLSECEEQAKAAKKGMWSEGNGSHTIRDLKYTIENPRHFVDSHHQKPVNAIIEHVRDGSVVRALLLPDYYLVTVMLSGIKCPTFRREADGSETPEPFAAEAKFFTESRLLQRDVQIILESCHNQNILGTILHPNGNITELLLKEGFARCVDWSIAVYTRGAEKLRAAERFAKERRLRIWRDYVAPTANLDQKDKQFVAKVMQVLNADAIVVKLNSGDYKTIHLSSIRPPRLEGENTQDKNKKLRPLYDIPYMFEAREFLRKKLIGKKVNVTVDYIRPASPATETVPAFSERTCATVTIGGINIAEALVSKGLATVIRYRQDDDQRSSHYDELLAAEARAIKNGKGLHSKKEVPIHRVADISGDTQKAKQFLPFLQRAGRSEAVVEYVFSGSRLKLYLPKETCLITFLLAGIECPRGARNLPGLVQEGEPFSEEATLFTKELVLQREVEVEVESMDKAGNFIGWLHIDGANLSVLLVEHALSKVHFTAERSSYYKSLLSAEEAAKQKKEKVWAHYEEQPVEEVMPVLEEKERSASYKPVFVTEITDDLHFYVQDVETGTQLEKLMENMRNDIASHPPVEGSYAPRRGEFCIAKFVDGEWYRARVEKVESPAKIHVFYIDYGNREVLPSTRLGTLSPAFSTRVLPAQATEYAFAFIQVPQDDDARTDAVDSVVRDIQNTQCLLNVEHLSAGCPHVTLQFADSKGDVGLGLVKEGLVMVEVRKEKQFQKVITEYLNAQESAKSARLNLWRYGDFRADDADEFGYSR

SEQ ID NO: 65501 - protein, 900 aa, Homo sapiens
MASSAVPTVQRGIIKMVLSGCAIIVRGQPRGGPPPERQINLSNIRAGNLARRAAATQPDAKDTPDEPWAFPAREFLRKKLIGKEVCFTIENKTPQGREYGMIYLGKDTNGENIAESLVAEGLATRREGMRANNPEQNRLSECEEQAKAAKKGMWSEGNGSHTIRDLKYTIENPRHFVDSHHQKPVNAIIEHVRDGSVVRALLLPDYYLVTVMLSGIKCPTFRREADGSETPEPFAAEAKFFTESRLLQRDVQIILESCHNQNILGTILHPNGNITELLLKEGFARCVDWSIAVYTRGAEKLRAAERFAKERRLRIWRDYVAPTANLDQKDKQFVAKVMQVLNADAIVVKLNSGDYKTIHLSSIRPPRLEGENTQDKNKKLRPLYDIPYMFEAREFLRKKLIGKKVNVTVDYIRPASPATETVPAFSERTCATVTIGGINIAEALVSKGLATVIRYRQDDDQRSSHYDELLAAEARAIKNGKGLHSKKEVPIHRVADISGDTQKAKQFLPFLQRAGRSEAVVEYVFSGSRLKLYLPKETCLITFLLAGIECPRGARNLPGLVQEGEPFSEEATLFTKELVLQREVEVEVESMDKAGNFIGWLHIDGANLSVLLVEHALSKVHFTAERSSYYKSLLSAEEAAKQKKEKVWAHYEEQPVEEVMPVLEEKERSASYKPVFVTEITDDLHFYVQDVETGTQLEKLMENMRNDIASHPPVEGSYAPRRGEFCIAKFVDGEWYRARVEKVESPAKIHVFYIDYGNREVLPSTRLGTLSPAFSTRVLPAQATEYAFAFIQVPQDDDARTDAVDSVVRDIQNTQCLLNVEHLSAGCPHVTLQFADSKGDVGLGLVKEGLVMVEVRKEKQFQKVITEYLNAQESAKSARLNLWRYGDFRADDADEFGYSR

SEQ ID NO: 65502 - protein, 234 aa, Homo sapiens
MNHLPEDMENALTGSQSSHASLRNIHSINPTQLMARIESYEGREKKGISDVRRTFCLFVTFDLLFVTLLWIIELNVNGGIENTLEKEVMQYDYYSSYFDIFLLAVFRFKVLILAYAVCRLRHWWAIALTTAVTSAFLLAKVILSKLFSQGAFGYVLPIISFILAWIETWFLDFKVLPQEAEEENRLLIVQDASERAALIPGGLSDGQFYSPPESEAGSEEAEEKQDSEKPLLEL

SEQ ID NO: 65503 - protein, 234 aa, Homo sapiens; identical to SEQ ID NO: 65502

SEQ ID NO: 65504 - protein, 206 aa, Homo sapiens
MNHLPEDMENALTGSQSSHASLRNIHSINPTQLMARIESYEGREKKGISDVRRTFCLFVTFDLLFVTLLWIIELNVNGGIENTLEKEVMQYDYYSSYFDIFLLAVFRFKVLILAYAVCRLRHWWAIALTTAVTSAFLLAKVILSKLFSQGAFGYVLPIISFILAWIETWFLDFKVLPQEAEEENRLLIVQDASERAALIPGGLSDG

SEQ ID NO: 65505 - protein, 184 aa, Homo sapiens
MNHLPEDMENALTGSQSSHASLRNIHSINPTQLMARIESYEGREKKGISDVRRTFCLFVTFDLLFVTLLWIIELNVNGGIENTLEKEVMQYDYYSSYFDIFLLAVFRFKVLILAYAVCRLRHWWAIALTTAVTSAFLLAKVILSKLFSQGAFGYVLPIISFILAWIETWFLDFKVLPQEAEEEN

SEQ ID NO: 65506 - protein, 172 aa, Homo sapiens
MNHLPEDMENALTGSQSSHASLRNIHSINPTQLMARIESYEGREKKGISDVRRTFCLFVTFDLLFVTLLWIIELNVNGGIENTLEKEVMQYDYYSSYFDIFLLAVFRFKVLILAYAVCRLRHWWAIALTTAVTSAFLLAKVILSKLFSQGAFGYVLPIISFILAWIETWFLD

SEQ ID NO: 65507 - protein, 227 aa, Homo sapiens
MENALTGSQSSHASLRNIHSINPTQLMARIESYEGREKKGISDVRRTFCLFVTFDLLFVTLLWIIELNVNGGIENTLEKEVMQYDYYSSYFDIFLLAVFRFKVLILAYAVCRLRHWWAIALTTAVTSAFLLAKVILSKLFSQGAFGYVLPIISFILAWIETWFLDFKVLPQEAEEENRLLIVQDASERAALIPGGLSDGQFYSPPESEAGSEEAEEKQDSEKPLLEL

SEQ ID NO: 65508 - protein, 445 aa, Homo sapiens
MSKLPRELTRDLERSLPAVASLGSSLSHSQSLSSHLLPPPEKRRAISDVRRTFCLFVTFDLLFISLLWIIELNTNTGIRKNLEQEIIQYNFKTSFFDIFVLAFFRFSGLLLGYAVLRLRHWWVIAVTTLVSSAFLIVKVILSELLSKGAFGYLLPIVSFVLAWLETWFLDFKVLPQEAEEERWYLAAQVAVARGPLLFSGALSEGQFYSPPESFAGSDNESDEEVAGKKSFSAQEREYIRQGKEATAVVDQILAQEENWKFEKNNEYGDTVYTIEVPFHGKTFILKTFLPCPAELVYQEVILQPERMVLWNKTVTACQILQRVEDNTLISYDVSAGAAGGVVSPRDFVNVRRIERRRDRYLSSGIATSHSAKPPTHKYVRGENGPGGFIVLKSASNPRVCTFVWILNTDLKGRLPRYLIHQSLAATMFEFAFHLRQRISELGARA

SEQ ID NO: 65509 - protein, 427 aa, Homo sapiens
MSKLPRELTRDLERSLPAVASLGSSLSHSQSLSSHLLPPPEKRRAISDVRRTFCLFVTFDLLFISLLWIIELNTNTGIRKNLEQEIIQYNFKTSFFDIFVLAFFRFSGLLLGYAVLRLRHWWVIALLSKGAFGYLLPIVSFVLAWLETWFLDFKVLPQEAEEERWYLAAQVAVARGPLLFSGALSEGQFYSPPESFAGSDNESDEEVAGKKSFSAQEREYIRQGKEATAVVDQILAQEENWKFEKNNEYGDTVYTIEVPFHGKTFILKTFLPCPAELVYQEVILQPERMVLWNKTVTACQILQRVEDNTLISYDVSAGAAGGVVSPRDFVNVRRIERRRDRYLSSGIATSHSAKPPTHKYVRGENGPGGFIVLKSASNPRVCTFVWILNTDLKGRLPRYLIHQSLAATMFEFAFHLRQRISELGARA

SEQ ID NO: 65510 - protein, 196 aa, Homo sapiens
MSKLPRELTRDLERSLPAVASLGSSLSHSQSLSSHLLPPPEKRRAISDVRRTFCLFVTFDLLFISLLWIIELNTNTGIRKNLEQEIIQYNFKTSFFDIFVLAFFRFSGLLLGYAVLRLRHWWVIAVTTLVSSAFLIVKVILSELLSKGAFGYLLPIVSFVLAWLETWFLDFKVLPQEAEEERWYLAAQVAVARGPL

SEQ ID NO: 65511 - protein, 445 aa, Homo sapiens
MSKLPRELTRDLERSLPAVASLGSSLSHSQSLSSHLLPPPEKRRAISDVRRTFCLFVTFDLLFISLLWIIELNTNTGIRKNLEQEIIQYNFKTSFFDIFVLAFFRFSGLLLGYAVLRLRHWSRRWCPVHSSLSRSSSLSCSAKGHLATCSPSSLLSSPGWRPGSLTSKSYPRKLKRSDSAPPGYLAAQVAVARGPLLFSGALSEGQFYSPPESFAGSDNESDEEVAGKKSFSAQEREYIRQGKEATAVVDQILAQEENWKFEKNNEYGDTVYTIEVPFHGKTFILKTFLPCPAELVYQEVILQPERMVLWNKTVTACQILQRVEDNTLISYDVSAGAAGGVVSPRDFVNVRRIERRRDRYLSSGIATSHSAKPPTHKYVRGENGPGGFIVLKSASNPRVCTFVWILNTDLKGRLPRYLIHQSLAATMFEFAFHLRQRISELGARA

SEQ ID NO: 65512 - protein, 205 aa, Homo sapiens
MEGLSDVASFATKLKNTLIQYHSIEEDKWRVAKKTKDVTVWRKPSEEFNGYLYKAQGVIDDLVYSIIDHIRPGPCRLDWDSLMTSLDILENFEENCCVMRYTTAGQLWNIISPREFVDFSYTVGYKEGLLSCGISLDWDEKRPEFVRGYNHPCGWFCVPLKDNPNQSLLTGYIQTDLRGMIPQSAVDTAMASTLTNFYGDLRKAL

SEQ ID NO: 65513 - protein, 191 aa, Homo sapiens
MEGLSDVASFATKLKNTLIQYHSIEEDKWRVAKKTKDVTVWRKPSEEFNGYLYKAQGVIDDLVYSIIDHIRPGPCRLDWDSLMTSLDILENFEENCCVMRYTTAGQLWNIISPREFVDFSYTVGYKEGLLSCGISLDWDEKRPEFVRGYNHPCGWFCVPLKDNPNQSLLTGYIQTDLRGMIPQSAVDTAMA

SEQ ID NO: 65514 - protein, 213 aa, Homo sapiens
MDPALAAQMSEAVAEKMLQYRRDTAGWKICREGNGVSVSWRPSVEFPGNLYRGEGIVYGTLEEVWDCVKPAVGGLRVKWDENVTGFEIIQSITDTLCVSRTSTPSAAMKLISPRDFVDLVLVKRYEDGTISSNATHVEHPLCPPKPGFVRGFNHPCGCFCEPLPGEPTKTNLVTFFHTDLSGYLPQNVVDSFFPRSMTRFYANLQKAVKQFHE

SEQ ID NO: 65515 - protein, 220 aa, Homo sapiens
MDFKAIAQQTAQEVLGYNRDTSGWKVVKTSKKITVSSKASRKFHGNLYRVEGIIPESPAKLSDFLYQTGDRITWDKSLQVYNMVHRIDSDTFICHTITQSFAVGSISPRDFIDLVYIKRYEGNMNIISSKSVDFPEYPPSSNYIRGYNHPCGFVCSPMEENPAYSKLVMFVQTEMRGKLSPSIIEKTMPSNLVNFILNAKDGIKAHRTPSRRGFHHNSHS

SEQ ID NO: 65516 - protein, 1023 aa, Homo sapiens
MTLNNCASMKLEVHFQSKQNEDSEEEEQCTISSHWAFQQESKCWSPMGSSDLLAPPSPGLPATSSCESVLTELSATSLPVITVSLPPEPADLPLPGRAPSSSDRPLLSPTQGQEGPQDKAKKRHRNRSFLKHLESLRRKEKSGSQQAEPKHSPATSEKVSKASSFRSCRGFLSAGFYRAKNWAATSAGGSGANTRKAWEAWPVASFRHPQWTHRGDCLVHVPGDHKPGTFPRSLSIESLCPEDGHRLADWQPGRRWGCEGRRGSCGSTGSHASTYDNLPELYPAEPVMVGAEAEDEDDEESGGSYAHLDDILQHVWGLQQRVELWSRAMYPDLGPGDEEEEEATSSVEIATVEVKCQAEALSQMEVPAHGESPAWAQAEVQPAVLAPAQAPAEAEPVAQEEAEAPAPAPAPAPAQDSEQEAHSGGEPTFASSLSVEEGHSISDTVASSSELDSSGNSMNEAEAAGPLAGLQASMPRERRDSGVGASLTRPCRKLRWHSFQNSHRPSLNSESLEINRQFAGQINLLHKGSLLRLTAFMEKYTVPHKQGWVWSMPKFMRRNKTPDYRGQHVFGVPPLIHVQRTGQPLPQSIQQAMRYLRSQCLDQVGIFRKSGVKSRIQNLRQMNETSPDNVCYEGQSAYDVADLLKQYFRDLPEPIFTSKLTTTFLQIYQLLPKDQWLAAAQAATLLLPDENREVLQTLLYFLSDIASAEENQMTAGNLAVCLAPSIFHLNVSKKDSPSPRIKSKRSLIGRPGPRDLSDNMAATQGLSHMISDCKKLFQVPQDMVLQLCSSYSAAELSPPGPALAELRQAQAAGVSLSLYMEENIQDLLRDAAERFKGWMSVPGPQHTELACRKAPDGHPLRLWKASTEVAAPPAVVLHRVLRERALWDEDLLRAQVLEALMPGVELYHYVTDSMAPHPCRDFVVLRMWRSDLPRGGCLLVSQSLDPEQPVPESGVRALMLTSQYLMEPCGLGRSRLTHICRADLRGRSPDWYNKVFGHLCAMEVAKIRDSFPTLQAAGPETKL

SEQ ID NO: 65517 - protein, 1023 aa, Homo sapiens; identical to SEQ ID NO: 65516

SEQ ID NO: 65518 - protein, 1103 aa, Homo sapiens
MPLLDVFWSCFRKVKCFPLLQVKKNAEAEAKRACEWLQATGFPQYVQLFEEGSFPLDIGSVKKNHGFLDEDSLGALCRRLMTLNNCASMKLEVHFQSKQNEDSEEEEQCTISSHWAFQQESKCWSPMGSSDLLAPPSPGLPATSSCESVLTELSATSLPVITVSLPPEPADLPLPGRAPSSSDRPLLSPTQGQEGPQDKAKKRHRNRSFLKHLESLRRKEKSGSQQAEPKHSPATSEKVSKASSFRSCRGFLSAGFYRAKNWAATSAGGSGANTRKAWEAWPVASFRHPQWTHRGDCLVHVPGDHKPGTFPRSLSIESLCPEDGHRLADWQPGRRWGCEGRRGSCGSTGSHASTYDNLPELYPAEPVMVGAEAEDEDDEESGGSYAHLDDILQHVWGLQQRVELWSRAMYPDLGPGDEEEEEATSSVEIATVEVKCQAEALSQMEVPAHGESPAWAQAEVQPAVLAPAQAPAEAEPVAQEEAEAPAPAPAPAPAQDSEQEAHSGGEPTFASSLSVEEGHSISDTVASSSELDSSGNSMNEAEAAGPLAGLQASMPRERRDSGVGASLTRPCRKLRWHSFQNSHRPSLNSESLEINRQFAGQINLLHKGSLLRLTAFMEKYTVPHKQGWVWSMPKFMRRNKTPDYRGQHVFGVPPLIHVQRTGQPLPQSIQQAMRYLRSQCLDQVGIFRKSGVKSRIQNLRQMNETSPDNVCYEGQSAYDVADLLKQYFRDLPEPIFTSKLTTTFLQIYQLLPKDQWLAAAQAATLLLPDENREVLQTLLYFLSDIASAEENQMTAGNLAVCLAPSIFHLNVSKKDSPSPRIKSKRSLIGRPGPRDLSDNMAATQGLSHMISDCKKLFQVPQDMVLQLCSSYSAAELSPPGPALAELRQAQAAGVSLSLYMEENIQDLLRDAAERFKGWMSVPGPQHTELACRKAPDGHPLRLWKASTEVAAPPAVVLHRVLRERALWDEDLLRAQVLEALMPGVELYHYVTDSMAPHPCRDFVVLRMWRSDLPRGGCLLVSQSLDPEQPVPESGVRALMLTSQYLMEPCGLGRSRLTHICRADLRGRSPDWYNKVFGHLCAMEVAKIRDSFPTLQAAGPETKL

SEQ ID NO: 65519 - protein, 52 aa, Homo sapiens
MPLLDVFWSCFRKVKCFPLLQVKKNAEAEAKRACEWLQATGFPQYVQLFEGG

SEQ ID NO: 65520 - protein, 62 aa, Homo sapiens
MKFLVFAFILALMVSMIGADSSEEKFLRRIGRFGYGYGPYQPVPEQPLYPQPYQPQYQQYTF

SEQ ID NO: 65521 - protein, 52 aa, Homo sapiens
MKFLVFAFILALMVSMIGADSSEEYGYGPYQPVPEQPLYPQPYQPQYQQYTF

SEQ ID NO: 65522 - protein, 179 aa, Homo sapiens
MAKTAMAYKEKMKELSMLSLICSCFYPEPRNINIYTYDDMEVKQINKRASGQAFELILKPPSPISEAPRTLASPKKKDLSLEEIQKKLEAAEERRKSQEAQVLKQLAEKREHEREVLQKALEENNNFSKMAEEKLILKMEQIKENREANLAAIIERLQEKERHAAEVRRNKELQVELSG

SEQ ID NO: 65523 - protein, 168 aa, Homo sapiens
MAKTAMAYKEKMKELSMLSLICSCFYPEPRNINIYTYDDMEVKQINKRASGQAFELILKPPSPKKKDLSLEEIQKKLEAAEERRKSQEAQVLKQLAEKREHEREVLQKALEENNNFSKMAEEKLILKMEQIKENREANLAAIIERLQEKERHAAEVRRNKELQVELSG

SEQ ID NO: 65524 - protein, 187 aa, Homo sapiens
MAKTAMAYKEKMKELSMLSLICSCFYPEPRNINIYTYDDMEVKQINKRASGQAFELILKPPSPISEAPRTLASPKKKDLSLEEIQKKLEAAEERRKSQEAQVLKQLAEKREHEREVLQKALEENNNFSKMAEEKLILKMEQIKENREANLAAIIERLQEKLVKFISSELKESIESQFLELQREGEKQ

SEQ ID NO: 65525 - protein, 180 aa, Homo sapiens
MASTISAYKEKMKELSVLSLICSCFYTQPHPNTVYQYGDMEVKQLDKRASGQSFEVILKSPSDLSPESPMLSSPPKKKDTSLEELQKRLEAAEERRKTQEAQVLKQLAERREHEREVLHKALEENNNFSRQAEEKLNYKMELSKEIREAHLAALRERLREKELHAAEVRRNKEQREEMSG

SEQ ID NO: 65526 - protein, 169 aa, Homo sapiens
MKELSVLSLICSCFYTQPHPNTVYQYGDMEVKQLDKRASGQSFEVILKSPSDLSPESPMLSSPPKKKDTSLEELQKRLEAAEERRKTQEAQVLKQLAERREHEREVLHKALEENNNFSRQAEEKLNYKMELSKEIREAHLAALRERLREKELHAAEVRRNKEQREEMSG

SEQ ID NO: 65527 - protein, 473 aa, Homo sapiens
MFSVQLSLGEQTWESEGSSIKKAQQAVANKALTESTLPKPVQKPPKSNVNNNPGSITPTVELNGLAMKRGEPAIYRPLDPKPFPNYRANYNFRGMYNQRYHCPVPKIFYVQLTVGNNEFFGEGKTRQAARHNAAMKALQALQNEPIPERSPQNGESGKDVDDDKDANKSEISLVFEIALKRNMPVSFEVIKESGPPHMKSFVTRVSVGEFSAEGEGNSKKLSKKRAATTVLQELKKLPPLPVVEKPKLFFKKRPKTIVKAGPEYGQGMNPISRLAQIQQAKKEKEPDYVLLSERGMPRRREFVMQVKVGNEVATGTGPNKKIAKKNAAEAMLLQLGYKASTNLQDQLEKTGENKGWSGPKPGFPEPTNNTPKGILHLSPDVYQEMEASRHKVISGTTLGYLSPKDMNQPSSSFFSISPTSNSSATIARELLMNGTSSTAEAIGLKGSSPTPPCSPVQPSKQLEYLARIQGFQV

SEQ ID NO: 65528 - protein, 504 aa, Homo sapiens
MKRGEPAIYRPLDPKPFPNYRANYNFRGMYNQRYHCPVPKIFYVQLTVGNNEFFGEGKTRQAARHNAAMKALQALQNEPIPERSPQNGESGKDVDDDKDANKSEISLVFEIALKRNMPVSFEVIKESGPPHMKSFVTRVSVGEFSAEGEGNSKKLSKKRAATTVLQELKKLPPLPVVEKPKLFFKKRPKTIVKAGPEYGQGMNPISRLAQIQQAKKEKEPDYVLLSERGMPRRREFVMQVKVGNEVATGTGPNKKIAKKNAAEAMLLQLGYKASTNLQDQLEKTGENKGWSGPKPGFPEPTNNTPKGILHLSPDVYQEMEASRHKVISGTTLGYLSPKDMNQPSSSFFSISPTSNSSATIARELLMNGTSSTAEAIGLKGSSPTPPCSPVQPSKQLEYLARIQGFQVHYCDRQSGKECVTCLTLAPVQMTFHAIGSSIEASHDQAALSALKQFSEQGLDPIDGAMNIEKGSLEKQAKHLREKADNNQAPPGSIAQDCKKSNSAV

SEQ ID NO: 65529 - protein, 398 aa, Homo sapiens
MKALQALQNEPIPERSPQNGESGKDVDDDKDANKSEISLVFEIALKRNMPVSFEVIKESGPPHMKSFVTRVSVGEFSAEGEGNSKKLSKKRAATTVLQELKKLPPLPVVEKPKLFFKKRPKTIVKAGPEYGQGMNPISRLAQIQQAKKEKEPDYVLLSERGMPRRREFVMQVKVGNEVATGTGPNKKIAKKNAAEAMLLQLGYKASTNLQDQLEKTGENKGWSGPKPGFPEPTNNTPKGILHLSPDVYQEMEASRHKVISGTTLGYLSPKDMNQPSSSFFSISPTSNSSATIARELLMNGTSSTAEAIGLKGSSPTPPCSPVQPSKQLEYLARIQGFQAALSALKQFSEQGLDPIDGAMNIEKGSLEKQAKHLREKADNNQAPPGSIAQDCKKSNSAV

SEQ ID NO: 65530 - protein, 479 aa, Homo sapiens
MLQINQMFSVQLSLGEQTWESEGSSIKKAQQAVANKALTESTLPKPVQKPPKSNVNNNPGSITPTVELNGLAMKRGEPAIYRPLDPKPFPNYRANYNFRGMYNQRYHCPVPKIFYVQLTVGNNEFFGEGKTRQAARHNAAMKALQALQNEPIPERSPQNGESGKDVDDDKDANKSEISLVFEIALKRNMPVSFEVIKESGPPHMKSFVTRVSVGEFSAEGEGNSKKLSKKRAATTVLQELKKLPPLPVVEKPKLFFKKRPKTIVKAGPEYGQGMNPISRLAQIQQAKKEKEPDYVLLSERGMPRRREFVMQVKVGNEVATGTGPNKKIAKKNAAEAMLLQLGYKASTNLQDQLEKTGENKGWSGPKPGFPEPTNNTPKGILHLSPDVYQEMEASRHKVISGTTLGYLSPKDMNQPSSSFFSISPTSNSSATIARELLMNGTSSTAEAIGLKGSSPTPPCSPVQPSKQLEYLARIQGFQV

SEQ ID NO: 65531 - protein, 204 aa, Homo sapiens
MLQINQMFSVQLSLGEQTWESEGSSIKKAQQAVANKALTESTLPKPVQKPPKSNVNNNPGSITPTVELNGLAMKRGEPAIYRPLDPKPFPNYRANYNFRGMYNQRYHCPVPKIFYVQLTVGNNEFFGEGKTRQAARHNAAMKALQALQNEPIPERSPQNGESGKDVDDDKDANKSEISLVFEIALKRNMPVSFEVIKESGPPHM

SEQ ID NO: 65532 - protein, 64 aa, Homo sapiens
MLQINQMFSVQLSLGEQTWESEGSSIKKAQQAVANKALTESTLPKPVQKPPKSNVNNNPGSITP

SEQ ID NO: 65533 - protein, 479 aa, Homo sapiens; identical to SEQ ID NO: 65530

SEQ ID NO: 65534 - protein, 538 aa, Homo sapiens
MLQINQMFSVQLSLGEQTWESEGSSIKKAQQAVANKALTESTLPKPVQKPPKSNVNNNPGSITPTVELNGLAMKRGEPAIYRPLDPKPFPNYRANYNFRGMYNQRYHCPVPKIFYVQLTVGNNEFFGEGKTRQAARHNAAMKALQALQNEPIPERSPQNGESGKDVDDDKDANKSEISLVFEIALKRNMPVSFEVIKESGPPHMKSFVTRVSVGEFSAEGEGNSKKLSKKRAATTVLQELKKLPPLPVVEKPKLFFKKRPKTIVKAGPEYGQGMNPISRLAQIQQAKKEKEPDYVLLSERGMPRRREFVMQVKVGNEVATGTGPNKKIAKKNAAEAMLLQLGYKASTNLQDQLEKTGENKGWSGPKPGFPEPTNNTPKGILHLSPDVYQEMEASRHKVISGTTLGYLSPKDMNQPSSSFFSISPTSNSSATIARELLMNGTSSTAEAIGLKGSSPTPPCSPVQPSKQLEYLARIQGFQAALSALKQFSEQGLDPIDGAMNIEKGSLEKQAKHLREKADNNQAPPGSIAQDCKKSNSAV

SEQ ID NO: 65535 - protein, 105 aa, Homo sapiens
MLQINQMFSVQLSLGEQTWESEGSSIKKAQQAVANKALTESTLPKPVQKPPKSNVNNNPGSITPTVELNGLAMKRGEPAIYRPLDPKPFPNYRANYNFRGMYNQR

SEQ ID NO: 65536 - protein, 570 aa, Homo sapiens
MANPKEKTAMCLVNELARFNRVQPQYKLLNERGPAHSKMFSVQLSLGEQTWESEGSSIKKAQQAVANKALTESTLPKPVQKPPKSNVNNNPGSITPTVELNGLAMKRGEPAIYRPLDPKPFPNYRANYNFRGMYNQRYHCPVPKIFYVQLTVGNNEFFGEGKTRQAARHNAAMKALQALQNEPIPERSPQNGESGKDVDDDKDANKSEISLVFEIALKRNMPVSFEVIKESGPPHMKSFVTRVSVGEFSAEGEGNSKKLSKKRAATTVLQELKKLPPLPVVEKPKLFFKKRPKTIVKAGPEYGQGMNPISRLAQIQQAKKEKEPDYVLLSERGMPRRREFVMQVKVGNEVATGTGPNKKIAKKNAAEAMLLQLGYKASTNLQDQLEKTGENKGWSGPKPGFPEPTNNTPKGILHLSPDVYQEMEASRHKVISGTTLGYLSPKDMNQPSSSFFSISPTSNSSATIARELLMNGTSSTAEAIGLKGSSPTPPCSPVQPSKQLEYLARIQGFQAALSALKQFSEQGLDPIDGAMNIEKGSLEKQAKHLREKADNNQAPPGSIAQDCKKSNSAV

SEQ ID NO: 65537 - protein, 347 aa, Homo sapiens
SLLTNDASSESIASFSKQEVMSSFLPEGGCYELLTVIGKGFEDLMTVNLARYKPTGEYVTVRRINLEACSNEMVTFLQGELHVSKLFNHPNIVPYRATFIADNELWVVTSFMAYGSAKDLICTHFMDGMNELAIAYILQGVLKALDYIHHMGYVHRSVKASHILISVDGKVYLSGLRSNLSMISHGQRQRVVHDFPKYSVKVLPWLSPEVLQQNLQGYDAKSDIYSVGITACELANGHVPFKDMPATQMLLEKLNGTVPCLLDTSTIPAEELTMSPSRSVANSGLSDSLTTSTPRPSNGDSPSHPYHRTFSPHFHHFVEQCLQRNPDARYPCWPGPGLRESRGCSGG

SEQ ID NO: 65538 - protein, 431 aa, Homo sapiens
MSFLVSKPERIRRWVSEKFIVEGLRDLELFGEQPPGDTRRKTNDASSESIASFSKQEVMSSFLPEGGCYELLTVIGKGFEDLMTVNLARYKPTGEYVTVRRINLEACSNEMVTFLQGELHVSKLFNHPNIVPYRATFIADNELWVVTSFMAYGSAKDLICTHFMDGMNELAIAYILQGVLKALDYIHHMGYVHRSVKASHILISVDGKVYLSGLRSNLSMISHGQRQRVVHDFPKYSVKVLPWLSPEVLQQNLQGYDAKSDIYSVGITACELANGHVPFKDMPATQMLLEKLNGTVPCLLDTSTIPAEELTMSPSRSVANSGLSDSLTTSTPRPSNGDSPSHPYHRTFSPHFHHFVEQCLQRNPDARPSASTLLNHSFFKQIKRRASEALPELLRPVTPITNFEGSQSQDHSGIFGLVTNLEELEVDDWEF

SEQ ID NO: 65539 - protein, 373 aa, Homo sapiens
MSSFLPEGGCYELLTVIGKGFEDLMTVNLARYKPTGEYVTVRRINLEACSNEMVTFLQGELHVSKLFNHPNIVPYRATFIADNELWVVTSFMAYGSAKDLICTHFMDGMNELAIAYILQGVLKALDYIHHMGYVHRSVKASHILISVDGKVYLSGLRSNLSMISHGQRQRVVHDFPKYSVKVLPWLSPEVLQQNLQGYDAKSDIYSVGITACELANGHVPFKDMPATQMLLEKLNGTVPCLLDTSTIPAEELTMSPSRSVANSGLSDSLTTSTPRPSNGDSPSHPYHRTFSPHFHHFVEQCLQRNPDARPSASTLLNHSFFKQIKRRASEALPELLRPVTPITNFEGSQSQDHSGIFGLVTNLEELEVDDWEF

SEQ ID NO: 65540 - protein, 348 aa, Homo sapiens
MSFLTNDASSESIASFSKQEVMSSFLPEGGCYELLTVIGKGFEDLMTVNLARYKPTGEYVTVRRINLEACSNEMVTFLQGELHVSKLFNHPNIVPYRATFIADNELWVVTSFMAYGSAKDLICTHFMDGMNELAIAYILQGVLKALDYIHHMGYVHRSVKASHILISVDGKVYLSGLRSNLSMISHGQRQRVVHDFPKYSVKVLPWLSPEVLQQNLQGYDAKSDIYSVGITACELANGHVPFKDMPATQMLLEKLNGTVPCLLDTSTIPAEELTMSPSRSVANSGLSDSLTTSTPRPSNGDSPSHPYHRTFSPHFHHFVEQCLQRNPDARYPCWPGPGLRESRGCSGG

SEQ ID NO: 65541 - protein, 299 aa, Homo sapiens
MSFLVSKPERIRRWVSEKFIVEGLRDLELFGGKGFEDLMTVNLARYKPTGEYVTVRRINLEACSNEMVTFLQGELHVSKLFNHPNIVPYRATFIADNELWVVTSFMAYGSAKDLICTHFMDGMNELAIAYILQGVLKALDYIHHMGYVHRSVKASHILISVDGKVYLSGLRSNLSMISHGQRQRVVHDFPKYSVKVLPWLSPEVLQQNLQGYDAKSDIYSVGITACELANGHVPFKDMPATQMLLEKLNGTVPCLLDTSTIPAEELTMSPSRSVANSGLSDSLTTSTPRPSNGPVPAPS

SEQ ID NO: 65542 - protein, 418 aa, Homo sapiens
MSLLDCFCTSRTQVESLRPEKQSETSIHQYLVDEPTLSWSRPSTRASEVLCSTNVSHYELQVEIGRGFDNLTSVHLARHTPTGTLVTIKITNLENCNEERLKALQKAVILSHFFRHPNITTYWTVFTVGSWLWVISPFMAYGSASQLLRTYFPEGMSETLIRNILFGAVRGLNYLHQNGCIHRSIKASHILISGDGLVTLSGLSHLHSLVKHGQRHRAVYDFPQFSTSVQPWLSPELLRQDLHGYNVKSDIYSVGITACELASGQVPFQDMHRTQMLLQKLKGPPYSPLDISIFPQSESRMKNSQSGVDSGIGESVLVSSGTHTVNSDRLHTPSSKTFSPAFFSLVQLCLQQDPEKRPSASSLLSHVFFKQMKEESQDSILSLLPPAYNKPSISLPPVLPWTEPECDFPDEKDSYWEF

SEQ ID NO: 65543 - protein, 377 aa, Homo sapiens
MSLLDCFCTSRTQVESLRPEKQSETSIHQYLVDEPTLSWSRPSTRASEVLCSTNVSHYELQVEIGRGFDNLTSVHLARHTPTGTLVTIKITNLENCNEERLKALQKAVILSHFFRHPNITTYWTVFTVGSWLWVISPFMAYGSASQLLRTYFPEGMSETLIRNILFGAVRGLNYLHQNGCIHRSIKASHILISGDGLVTLSGLSHLHSLVKHGQRHRAVYDFPQFSTSVQPWLSPELLRQDLHGYNVKSDIYSVGITACELASGQVPFQDMHRTQMLLQKLKGPPYSPLDISIFPQSESRMKNSQSGVDSGIGESVLVSSGTHTVNSDRLHTPSSKTFSPAFFSLVQLCLQQDPEKRPSASSLLSHVFFKQPYFEFL

SEQ ID NO: 65544 - protein, 280 aa, Homo sapiens
LGYCSASQLLRTYFPEGMSETLIRNILFGAVRGLNYLHQNGCIHRSIKASHILISGDGLVTLSGLSHLHSLVKHGQRHRAVYDFPQFSTSVQPWLSPELLRQDLHGYNVKSDIYSVGITACELASGQVPFQDMHRTQMLLQKLKGPPYSPLDISIFPQSESRMKNSQSGVDSGIGESVLVSSGTHTVNSDRLHTPSSKTFSPAFFSLVQLCLQQDPEKRPSASSLLSHVFFKQMKEESQDSILSLLPPAYNKPSISLPPVLPWTEPECDFPDEKDSYWEF

SEQ ID NO: 65545 - protein, 418 aa, Homo sapiens; identical to SEQ ID NO: 65542

SEQ ID NO: 65546 - protein, 419 aa, Homo sapiens
MESISMMGSPKSLSETFLPNGINGIKDARKVTVGVIGSGDFAKSLTIRLIRCGYHVVIGSRNPKFASEFFPHVVDVTHHEDALTKTNIIFVAIHREHYTSLWDLRHLLVGKILIDVSNNMRINQYPESNAEYLASLFPDSLIVKGFNVVSAWALQLGPKDASRQVYICSNNIQARQQVIELARQLNFIPIDLGSLSSAREIENLPLRLFTLWRGPVVVAISLATFFFLYSFVRDVIHPYARNQQSDFYKIPIEIVNKTLPIVAITLLSLVYLAGLLAAAYQLYYGTKYRRFPPWLETWLQCRKQLGLLSFFFAMVHVAYSLCLPMRRSERYLFLNMAYQQVHANIENSWNEEEVWRIEMYISFGIMSLGLLSLLAVTSIPSVSNALNWREFSFIQIFCSFADTQTELELEFVFLLTLLL

SEQ ID NO: 65547 - protein, 490 aa, Homo sapiens
MESISMMGSPKSLSETFLPNGINGIKDARKVTVGVIGSGDFAKSLTIRLIRCGYHVVIGSRNPKFASEFFPHVVDVTHHEDALTKTNIIFVAIHREHYTSLWDLRHLLVGKILIDVSNNMRINQYPESNAEYLASLFPDSLIVKGFNVVSAWALQLGPKDASRQVYICSNNIQARQQVIELARQLNFIPIDLGSLSSAREIENLPLRLFTLWRGPVVVAISLATFFFLYSFVRDVIHPYARNQQSDFYKIPIEIVNKTLPIVAITLLSLVYLAGLLAAAYQLYYGTKYRRFPPWLETWLQCRKQLGLLSFFFAMVHVAYSLCLPMRRSERYLFLNMAYQQVHANIENSWNEEEVWRIEMYISFGIMSLGLLSLLAVTSIPSVSNALNWREFSFIQSTLGYVALLISTFHVLIYGWKRAFEEEYYRFYTPPNFVLALVLPSIVILGKIILFLPCISRKLKRIKKGWEKSQFLEEGMGGTIPHVSPERVTVM

SEQ ID NO: 65548 - protein, 490 aa, Homo sapiens; identical to SEQ ID NO: 65547

SEQ ID NO: 65549 - protein, 490 aa, Homo sapiens; identical to SEQ ID NO: 65547

SEQ ID NO: 65550 - protein, 454 aa, Homo sapiens
MESISMMGSPKSLSETFLPNGINGIKDARKVTVGVIGSGDFAKSLTIRLIRCGYHVVIGSRNPKFASEFFPHVVDVTHHEDALTKTNIIFVAIHREHYTSLWDLRHLLVGKILIDVSNNMRINQYPESNAEYLASLFPDSLIVKGFNVVSAWALQLGPKDASRQVYICSNNIQARQQVIELARQLNFIPIDLGSLSSAREIENLPLRLFTLWRGPVVVAISLATFFFLYSFVRDVIHPYARNQQSDFYKIPIEIVNKTLPIVAITLLSLVYLAGLLAAAYQLYYGTKYRRFPPWLETWLQCRKQLGLLSFFFAMVHVAYSLCLPMRRSERYLFLNMAYQQVHANIENSWNEEEVWRIEMYISFGIMSLGLLSLLAVTSIPSVSNALNWREFSFIQSTLGYVALLISTFHVLIYGWKRAFEEEYYRFYTPPNFVLALVLPSIVILDLLQLCRYPD

SEQ ID NO: 65551 - protein, 454 aa, Homo sapiens; identical to SEQ ID NO: 65550

SEQ ID NO: 65552 - protein, 454 aa, Homo sapiens; identical to SEQ ID NO: 65550

SEQ ID NO: 65553 - protein, 88 aa, Homo sapiens
MESISMMGSPKSLSETFLPNGINGIKDARKVTVGVIGSGDFAKSLTIRLIRCGYHVVIGSRNPKFASEFFPHVVDVTHHEDALTKTNI

SEQ ID NO: 65554 - protein, 182 aa, Homo sapiens
MESISMMGSPKSLSETFLPNGINGIKDARKVTVGVIGSGDFAKSLTIRLIRCGYHVVIGSRNPKFASEFFPHVVDVTHHEDALTKTNIIFVAIHREHYTSLWDLRHLLVGKILIDVSNNMRINQYPESNAEYLASLFPDSLIVKGFNVVSAWALQLGPKDASRQVYICSNNIQARQQVIELA

SEQ ID NO: 65555 - protein, 488 aa, Homo sapiens
MPEEMDKPLISLHLVDSDSSLAKVPDEAPKVGILGSGDFARSLATRLVGSGFKVVVGSRNPKRTARLFPSAAQVTFQEEAVSSPEVIFVAVFREHYSSLCSLSDQLAGKILVDVSNPTEQEHLQHRESNAEYLASLFPTCTVVKAFNVISAWTLQAGPRDGNRQVPICGDQPEAKRAVSEMALAMGFMPVDMGSLASAWEVEAMPLRLLPAWKVPTLLALGLFVCFYAYNFVRDVLQPYVQESQNKFFKLPVSVVNTTLPCVAYVLLSLVYLPGVLAAALQLRRGTKYQRFPDWLDHWLQHRKQIGLLSFFCAALHALYSFCLPLRRAHRYDLVNLAVKQVLANKSHLWVEEEVWRMEIYLSLGVLALGTLSLLAVTSLPSIANSLNWREFSFVQSSLGFVALVLSTLHTLTYGWTRAFEESRYKFYLPPTFTLTLLVPCVVILAKALFLLPCISRRLARIRRGWERESTIKFTLPTDHALAEKTSHV

SEQ ID NO: 65556 - protein, 488 aa, Homo sapiens; identical to SEQ ID NO: 65555

SEQ ID NO: 65557 - protein, 488 aa, Homo sapiens; identical to SEQ ID NO: 65555

SEQ ID NO: 65558 - protein, 488 aa, Homo sapiens; identical to SEQ ID NO: 65555

SEQ ID NO: 65559 - protein, 498 aa, Homo sapiens
MSHQPAVATKMPEEMDKPLISLHLVDSDSSLAKVPDEAPKVGILGSGDFARSLATRLVGSGFKVVVGSRNPKRTARLFPSAAQVTFQEEAVSSPEVIFVAVFREHYSSLCSLSDQLAGKILVDVSNPTEQEHLQHRESNAEYLASLFPTCTVVKAFNVISAWTLQAGPRDGNRQVPICGDQPEAKRAVSEMALAMGFMPVDMGSLASAWEVEAMPLRLLPAWKVPTLLALGLFVCFYAYNFVRDVLQPYVQESQNKFFKLPVSVVNTTLPCVAYVLLSLVYLPGVLAAALQLRRGTKYQRFPDWLDHWLQHRKQIGLLSFFCAALHALYSFCLPLRRAHRYDLVNLAVKQVLANKSHLWVEEEVWRMEIYLSLGVLALGTLSLLAVTSLPSIANSLNWREFSFVQSSLGFVALVLSTLHTLTYGWTRAFEESRYKFYLPPTFTLTLLVPCVVILAKALFLLPCISRRLARIRRGWERESTIKFTLPTDHALAEKTSHV

SEQ ID NO: 65560 - protein, 457 aa, Homo sapiens
MPEEMDKPLISLHLVDSDSSLAKVPDEAPKVGILGSGDFARSLATRLVGSGFKVVVGSRNPKRTARLFPSAAQVTFQEEAVSSPEVIFVAVFREHYSSLCSLSDQLAGKILVDVSNPTEQEHLQHRESNAEYLASLFPTCTVVKAFNVISAWTLQAGPRDGNRQVPICGDQPEAKRAVSEMALAMGFMPVDMGSLASAWEVEAMPLRLLPAWKVPTLLALGLFVCFYAYNFVRDVLQPYVQESQNKFFKLPVSVVNTTLPCVAYVLLSLVYLPGVLAAALQLRRGTKYQRFPDWLDHWLQHRKQIGLLSFFCAALHALYSFCLPLRRAHRYDLVNLAVKQVLANKSHLWVEEEVWRMEIYLSLGVLALGTLSLLAVTSLPSIANSLNWREFSFVQCVATSSAGNTGSGTRRPESQSQDPHLPAPHHQTSFLGPRSFCCSLVPVSTPYGHQEDLSWTR

SEQ ID NO: 65561 - protein, 488 aa, Homo sapiens; identical to SEQ ID NO: 65555

SEQ ID NO: 65562 - protein, 457 aa, Homo sapiens; identical to SEQ ID NO: 65560

SEQ ID NO: 65563 - protein, 143 aa, Homo sapiens
MEIYLSLGVLALGTLSLLAVTSLPSIANSLNWREFSFVQSSLGFVALVLSTLHTLTYGWTRAFEESRYKFYLPPTFTLTLLVPCVVILAKALFLLPCISRRLARIRRGWERESTIKFTLPTDHALSPLGFLFLVVQSGITVCK

SEQ ID NO: 65564 - protein, 283 aa, Homo sapiens
MEKTCIDALPLTMNSSEKQETVCIFGTGDFGRSLGLKMLQCGYSVVFGSRNPQKTTLLPSGAEVLSYSEAAKKSGIIIIAIHREHYDFLTELTEVLNGKILVDISNNLKINQYPESNAEYLAHLVPGAHVVKAFNTISAWALQSGALDASRQAILKKENPFSTSSAWLSDSYVALGILGFFLFVLLGITSLPSVSNAVNWREFRFVQSKLGYLTLILCTAHTLVYGGKRFLSPSNLRWYLPAAYVLGLIIPCTVLVIKFVLIMPCVDNTLTRIRQGWERNSKH

SEQ ID NO: 65565 - protein, 459 aa, Homo sapiens
MEKTCIDALPLTMNSSEKQETVCIFGTGDFGRSLGLKMLQCGYSVVFGSRNPQKTTLLPSGAEVLSYSEAAKKSGIIIIAIHREHYDFLTELTEVLNGKILVDISNNLKINQYPESNAEYLAHLVPGAHVVKAFNTISAWALQSGALDASRQVFVCGNDSKAKQRVMDIVRNLGLTPMDQGSLMAAKEIEKYPLQLFPMWRFPFYLSAVLCVFLFFYCVIRDVIYPYVYEKKDNTFRMAISIPNRIFPITALTLLALVYLPGVIAAILQLYRGTKYRRFPDWLDHWMLCRKQLGLVALGFAFLHVLYTLVIPIRYYVRWRLGNLTVTQAILKKENPFSTSSAWLSDSYVALGILGFFLFVLLGITSLPSVSNAVNWREFRFVQSKLGYLTLILCTAHTLVYGGKRFLSPSNLRWYLPAAYVLGLIIPCTVLVIKFVLIMPCVDNTLTRIRQGWERNSKH

SEQ ID NO: 65566 - protein, 359 aa, Homo sapiens
MPAHLLQDDISSSYTTTTTITAPPSRVLQNGGDKLETMPLYLEDDIRPDIKDDIYDPTYKDKEGPSPKVEYVWRNIILMSLLHLGALYGITLIPTCKFYTWLWGVFYYFVSALGITAGAHRLWSHRSYKARLPLRLFLIIANTMAFQNDVYEWARDHRAHHKFSETHADPHNSRRGFFFSHVGWLLVRKHPAVKEKGSTLDLSDLEAEKLVMFQRRYYKPGLLMMCFILPTLVPWYFWGETFQNSVFVATFLRYAVVLNATWLVNSAAHLFGYRPYDKNISPRENILVSLGAVGEGFHNYHHSFPYDYSASEYRWHINFTTFFIDCMAALGLAYDRKKVSKAAILARIKRTGDGNYKSG

SEQ ID NO: 65567 - protein, 242 aa, Homo sapiens
MPAHLLQDDISSSYTTTTTITAPPSRVLQNGGDKLETMPLYLEDDIRPDIKDDIYDPTYKDKEGPSPKVEYVWRNIILMSLLHLGALYGITLIPTCKFYTWLWGVFYYFVSALGITAGAHRLWSHRSYKARLPLRLFLIIANTMAFQNDVYEWARDHRAHHKFSETHADPHNSRRGFFFSHVGWLLVRKHPAVKEKGSTLDLSDLEAEKLVMFQRRYYKPGLLMMCFILPTLVPWYFWGETF

SEQ ID NO: 65568 - protein, 270 aa, Homo sapiens
MACRPRSPPRHQSRCDGDASPPSPARWSLGRKRRADGRRWRPEDAEEAEHRGAERRPESFTTPEGPKPRSRCSDWASAVEEDEMRTRVNKEMARYKRKLLINDFGRERKSSSGSSDSKESMSTVPADFETDESVLMRRQKQINYGKNTIAYDRYIKEVPRHLRQPGIHPKTPNKFKKYSRRSWDQQIKLWKVALHFWDPPAEEGCDLQEIHPVDLESAESSSEPQTSSQDDFDVYSGTPTKVRHMDSQVEDEFDLEACLTEPLRDFSAMS

SEQ ID NO: 65569 - protein, 1775 aa, Homo sapiens
MALSLWPLLLLLLLLLLLSFAVTLAPTGPHSLDPGLSFLKSLLSTLDQAPQGSLSRSRFFTFLANISSSFEPGRMGEGPVGEPPPLQPPALRLHDFLVTLRGSPDWEPMLGLLGDMLALLGQEQTPRDFLVHQAGVLGGLVEVLLGALVPGGPPTPTRPPCTRDGPSDCVLAADWLPSLLLLLEGTRWQALVQVQPSVDPTNATGLDGREAAPHFLQGLLGLLTPTGELGSKEALWGGLLRTVGAPLYAAFQEGLLRVTHSLQDEVFSILGQPEPDTNGQCQGGNLQQLLLWGVRHNLSWDVQALGFLSGSPPPPPALLHCLSTGVPLPRASQPSAHISPRQRRAITVEALCENHLGPAPPYSISNFSIHLLCQHTKPATPQPHPSTTAICQTAVWYAVSWAPGAQGWLQACHDQFPDEFLDAICSNLSFSALSGSNRRLVKRLCAGLLPPPTSCPEGLPPVPLTPDIFWGCFLENETLWAERLCGEASLQAVPPSNQAWVQHVCQGPTPDVTASPPCHIGPCGERCPDGGSFLVMVCANDTMYEVLVPFWPWLAGQCRISRGGNDTCFLEGLLGPLLPSLPPLGPSPLCLTPGPFLLGMLSQLPRCQSSVPALAHPTRLHYLLRLLTFLLGPGAGGAEAQGMLGRALLLSSLPDNCSFWDAFRPEGRRSVLRTIGEYLEQDEEQPTPSGFEPTVNPSSGISKMELLACFSPVLWDLLQREKSVWALQILVQAYLHMPPENLQQLVLSAEREAAQGFLTLMLQGKLQGKLQVPPSEEQALGRLTALLLQRYPRLTSQLFIDLSPLIPFLAVSDLMRFPPSLLANDSVLAAIRDYSPGMRPEQKEALAKRLLAPELFGEVPAWPQELLWAVLPLLPHLPLENFLQLSPHQIQALEDSWPAAGLGPGHARHVLRSLVNQSVQDGEEQVRRLGPLACFLSPEELQSLVPLSDPTGPVERGLLECAANGTLSPEGRVAYELLGVLRSSGGAVLSPRELRVWAPLFSQLGLRFLQELSEPQLRAMLPVLQGTSVTPAQAVLLLGRLLPRHDLSLEELCSLHLLLPGLSPQTLQAIPRRVLVGACSCLAPELSRLSACQTAALLQTFRVKDGVKNMGTTGAGPAVCIPGQPIPTTWPDCLLPLLPLKLLQLDSLALLANRRRYWELPWSEQQAQFLWKKMQVPTNLTLRNLQALGTLAGGMSCEFLQQINSMVDFLEVVHMIYQLPTRVRGSLRACIWAELQRRMAMPEPEWTTVGPELNGLDSKLLLDLPIQLMDRLSNESIMLVVELVQRAPEQLLALTPLHQAALAERALQNLAPKETPVSGEVLETLGPLVGFLGTESTRQIPLQILLSHLSQLQGFCLGETFATELGWLLLQESVLGKPELWSQDEVEQAGRLVFTLSTEAISLIPREALGPETLERLLEKQQSWEQSRVGQLCREPQLAAKKAALVAGVVRPAAEDLPEPVPNCADVRGTFPAAWSATQIAEMELSDFEDCLTLFAGDPGLGPEELRAAMGKAKQLWGPPRGFRPEQILQLGRLLIGLGDRELQELILVDWGVLSTLGQIDGWSTTQLRIVVSSFLRQSGRHVSHLDFVHLTALGYTLCGLRPEELQHISSWEFSQAALFLGTLHLQCSEEQLEVLAHLLVLPGGFGPISNWGPEIFTEIGTIAAGIPDLALSALLRGQIQGVTPLAISVIPPPKFAVVFSPIQLSSLTSAQAVAVTPEQMAFLSPEQRRAVAWAQHEGKESPEQQGRSTAWGLQDWSRPSWSLVLTISFLGHLL

SEQ ID NO: 65570 - protein, 351 aa, Homo sapiens
MALSLWPLLLLLLLLLLLSFAVTLAPTGPHSLDPGLSFLKSLLSTLDQAPQGSLSRSRFFTFLANISSSFEPGRMGEGPVGEPPPLQPPALRLHDFLVTLRGSPDWEPMLGLLGDMLALLGQEQTPRDFLVHQAGVLGGLVEVLLGALVPGGPPTPTQPPCTRDGPSDCVLAADWLPSLLLLLEGTRWQALVQVQPSVDPTNATGLDGREAAPHFLQGLLGLLTPTGELGSKEALWGGLLRTVGAPLYAAFQEGLLRVTHSLQDEVFSILGQPEPDTNGQCQGGNLQQLLLWGVRHNLSWDVQALGFLSGSPPPPPALLHCLSTGVPLPRASQPSAHISPRQRRAITVEAL

SEQ ID NO: 65571 - protein, 1775 aa, Homo sapiens; identical to SEQ ID NO: 65569

SEQ ID NO: 65572 - protein, 351 aa, Homo sapiens
MALSLWPLLLLLLLLLLLSFAVTLAPTGPHSLDPGLSFLKSLLSTLDQAPQGSLSRSRFFTFLANISSSFEPGRMGEGPVGEPPPLQPPALRLHDFLVTLRGSPDWEPMLGLLGDMLALLGQEQTPRDFLVHQAGVLGGLVEVLLGALVPGGPPTPTRPPCTRDGPSDCVLAADWLPSLLLLLEGTRWQALVQVQPSVDPTNATGLDGREAAPHFLQGLLGLLTPTGELGSKEALWGGLLRTVGAPLYAAFQEGLLRVTHSLQDEVFSILGQPEPDTNGQCQGGNLQQLLLWGVRHNLSWDVQALGFLSGSPPPPPALLHCLSTGVPLPRASQPSAHISPRQRRAITVEAL

SEQ ID NO: 65573 - protein, 699 aa, Homo sapiens
MALSLWPLLLLLLLLLLLSFAVTLAPTGPHSLDPGLSFLKSLLSTLDQAPQGSLSRSRFFTFLANISSSFEPGRMGEGPVGEPPPLQPPALRLHDFLVTLRGSPDWEPMLGLLGDMLALLGQEQTPRDFLVHQAGVLGGLVEVLLGALVPGGPPTPTQPPCTRDGPSDCVLAADWLPSLLLLLEGTRWQALVQVQPSVDPTNATGLDGREAAPHFLQGLLGLLTPTGELGSKEALWGGLLRTVGAPLYAAFQEGLLRVTHSLQDEVFSILGQPEPDTNGQCQGGNLQQLLLWGVRHNLSWDVQALGFLSGSPPPPPALLHCLSTGVPLPRASQPSAHISPRQRRAITVEALCENHLGPAPPYSISNFSIHLLCQHTKPATPQPHPSTTAICQTAVWYAVSWAPGAQGWLQACHDQFPDEFLDAICSNLSFSALSGSNRRLVKRLCAGLLPPPTSCPEGLPPVPLTPDIFWGCFLENETLWAERLCGEASLQAVPPSNQAWVQHVCQGPTPDVTASPPCHIGPCGERCPDGGSFLVMVCANDTMYEVLVPFWPWLAGQCRISRGGNDTCFLEGLLGPLLPSLPPLGPSPLCLTPGPFLLGMLSQLPRCQSSVPALAHPTRLHYLLRLLTFLLGPGAGGAEAQGMLGRALLLSSLPDNCSFWDAFRPEGRRSVLRTIGEYNKMRSSQPHQALNPLSTPALV

SEQ ID NO: 65574 - protein, 1002 aa, Homo sapiens
MELLACFSPVLWDLLQREKSVWALQILVQAYLHMPPENLQQLVLSAEREAAQGFLTLMLQGKLQGKLQVPPSEEQALGRLTALLLQRYPRLTSQLFIDLSPLIPFLAVSDLMRFPPSLLANDSVQQGYRGSEENSLEEDKGLRPMTPRSLAAIRDYSPGMRPEQKEALAKRLLAPELFGEVPAWPQELLWAVLPLLPHLPLENFLQLSPHQIQALEDSWPAAGLGPGHARHVLRSLVNQSVQDGEEQVRRLGPLACFLSPEELQSLVPLSDPTGPVERGLLECAANGTLSPEGRVAYELLGVLRSSGGAVLSPRELRVWAPLFSQLGLRFLQELSEPQLRAMLPVLQGTSVTPAQAVLLLGRLLPRHDLLQLDSLALLANRRRYWELPWSEQQAQFLWKKMQVPTNLTLRNLQALGTLAGGMSCEFLQQINSMVDFLEVVHMIYQLPTRVRGSLRACIWAELQRRMAMPEPEWTTVGPELNGLDSKLLLDLPIQLMDRLSNESIMLVVELVQRAPEQLLALTPLHQAALAERALQNLAPKETPVSGEVLETLGPLVGFLGTESTRQIPLQILLSHLSQLQGFCLGETFATELGWLLLQESVLGKPELWSQDEVEQAGRLVFTLSTEAISLIPREALGPETLERLLEKQQSWEQSRVGQLCREPQLAAKKAALVAGVVRPAAEDLPEPVPNCADVRGTFPAAWSATQIAEMELSDFEDCLTLFAGDPGLGPEELRAAMGKAKQLWGPPRGFRPEQILQLGRLLIGLGDRELQELILVDWGVLSTLGQIDGWSTTQLRIVVSSFLRQSGRHVSHLDFVHLTALGYTLCGLRPEELQHISSWEFSQAALFLGTLHLQCSEEQLEVLAHLLVLPGGFGPISNWGPEIFTEIGTIAAGIPDLALSALLRGQIQGVTPLAISVIPPPKFAVVFSPIQLSSLTSAQAVAVTPEQMAFLSPEQRRAVAWAQHEGKESPEQQGRSTAWGLQDWSRPSWSLVLTISFLGHLL

SEQ ID NO: 65575 - protein, 629 aa, Homo sapiens
MFRDQVGVLAGWFKGWNECEQTVALLSLLKRVSQTQARFLQLCLEHSLADCAELHVLEREANSPGIINQWQQESKDKVISLLLTHLPLLKPGNLDAKVEYMKLLPKILAHSIEHNQHIEESRQLLSYALIHPATSLEDRSALAMWLNHLEDRTSTSFGGQNRGRSDSVDYGQTHYYHQRQNSDDKLNGWQNSRDSGICINASNWQDKSMGCENGHVPLYSSSSVPTTINTIGTSTSTNVPAWLKSLRLHKYAALFSQMTYEEMMALTECQLEAQNVTKGARHKIVISIQKLKERQNLLKSLERDIIEGGSLRIPLQELHQMILTPIKAYSSPSTTPEARRREPQAPRQPSLMGPESQSPDCKDGAAATGATATPSAGASGGLQPHQLSSCDGELAVAPLPEGDLPGQFTRVMGKVCTQLLVSRPDEENISSYLQLIDKCLIHEAFTETQKKRLLSWKQQVQKLFRSFPRKTLLDISGYRQQRNRGFGQSNSLPTAGSVGGGMGRRNPRQYQIPSRNVPSARLGLLGTSGFVSSNQRNTTATPTIMKQGRQNLWFANPGGSNSMPSRTHSSVQRTRSLPVHTSPQNMLMFQQPEFQLPVTEPDINNRLESLCLSMTEHALGDGVDRTSTI

SEQ ID NO: 65576 - protein, 630 aa, Homo sapiens
MMFRDQVGVLAGWFKGWNECEQTVALLSLLKRVSQTQARFLQLCLEHSLADCAELHVLEREANSPGIINQWQQESKDKVISLLLTHLPLLKPGNLDAKVEYMKLLPKILAHSIEHNQHIEESRQLLSYALIHPATSLEDRSALAMWLNHLEDRTSTSFGGQNRGRSDSVDYGQTHYYHQRQNSDDKLNGWQNSRDSGICINASNWQDKSMGCENGHVPLYSSSSVPTTINTIGTSTSTNVPAWLKSLRLHKYAALFSQMTYEEMMALTECQLEAQNVTKGARHKIVISIQKLKERQNLLKSLERDIIEGGSLRIPLQELHQMILTPIKAYSSPSTTPEARRREPQAPRQPSLMGPESQSPDCKDGAAATGATATPSAGASGGLQPHQLSSCDGELAVAPLPEGDLPGQFTRVMGKVCTQLLVSRPDEENISSYLQLIDKCLIHEAFTETQKKRLLSWKQQVQKLFRSFPRKTLLDISGYRQQRNRGFGQSNSLPTAGSVGGGMGRRNPRQYQIPSRNVPSARLGLLGTSGFVSSNQRNTTATPTIMKQGRQNLWFANPGGSNSMPSRTHSSVQRTRSLPVHTSPQNMLMFQQPEFQLPVTEPDINNRLESLCLSMTEHALGDGVDRTSTI

SEQ ID NO: 65577 - protein, 717 aa, Homo sapiens
MFRDQVGVLAGWFKGWNECEQTVALLSLLKRVSQTQARFLQLCLEHSLADCAELHVLEREANSPGIINQWQQESKDKVISLLLTHLPLLKPGNLDAKVEYMKLLPKILAHSIEHNQHIEESRQLLSYALIHPATSLEDRSALAMWLNHLEDRTSTSFGGQNRGRSDSVDYGQTHYYHQRQNSDDKLNGWQNSRDSGICINASNWQDKSMGCENGHVPLYSSSSVPTTINTIGTSTSTILSGQAHHSPLKRSVSLTPPMNVPNQPLGHGWMSHEDLRARGPQCLPSDHAPLSPQSSVASSGSGGSEHLEDQTTARNTFQEEGSGMKDVPAWLKSLRLHKYAALFSQMTYEEMMALTECQLEAQNVTKGARHKIVISIQKLKERQNLLKSLERDIIEGGSLRIPLQELHQMILTPIKAYSSPSTTPEARRREPQAPRQPSLMGPESQSPDCKDGAAATGATATPSAGASGGLQPHQLSSCDGELAVAPLPEGDLPGQFTRVMGKVCTQLLVSRPDEENISSYLQLIDKCLIHEAFTETQKKRLLSWKQQVQKLFRSFPRKTLLDISGYRQQRNRGFGQSNSLPTAGSVGGGMGRRNPRQYQIPSRNVPSARLGLLGTSGFVSSNQRNTTATPTIMKQGRQNLWFANPGGSNSMPSRTHSSVQRTRSLPVHTSPQNMLMFQQPEFQLPVTEPDINNRLESLCLSMTEHALGDGVDRTSTI

SEQ ID NO: 65578 - protein, 718 aa, Homo sapiens
MMFRDQVGVLAGWFKGWNECEQTVALLSLLKRVSQTQARFLQLCLEHSLADCAELHVLEREANSPGIINQWQQESKDKVISLLLTHLPLLKPGNLDAKVEYMKLLPKILAHSIEHNQHIEESRQLLSYALIHPATSLEDRSALAMWLNHLEDRTSTSFGGQNRGRSDSVDYGQTHYYHQRQNSDDKLNGWQNSRDSGICINASNWQDKSMGCENGHVPLYSSSSVPTTINTIGTSTSTILSGQAHHSPLKRSVSLTPPMNVPNQPLGHGWMSHEDLRARGPQCLPSDHAPLSPQSSVASSGSGGSEHLEDQTTARNTFQEEGSGMKDVPAWLKSLRLHKYAALFSQMTYEEMMALTECQLEAQNVTKGARHKIVISIQKLKERQNLLKSLERDIIEGGSLRIPLQELHQMILTPIKAYSSPSTTPEARRREPQAPRQPSLMGPESQSPDCKDGAAATGATATPSAGASGGLQPHQLSSCDGELAVAPLPEGDLPGQFTRVMGKVCTQLLVSRPDEENISSYLQLIDKCLIHEAFTETQKKRLLSWKQQVQKLFRSFPRKTLLDISGYRQQRNRGFGQSNSLPTAGSVGGGMGRRNPRQYQIPSRNVPSARLGLLGTSGFVSSNQRNTTATPTIMKQGRQNLWFANPGGSNSMPSRTHSSVQRTRSLPVHTSPQNMLMFQQPEFQLPVTEPDINNRLESLCLSMTEHALGDGVDRTSTI

SEQ ID NO: 65579 - protein, 718 aa, Homo sapiens; identical to SEQ ID NO: 65578

SEQ ID NO: 65580 - protein, 345 aa, Homo sapiens
MILTPIKAYSSPSTTPEARRREPQAPRQPSLMGPESQSPDCKDGAAATGATATPSAGASGGLQPHQLSSCDGELAVAPLPEGDLPGQFTRVMGKVCTQLLVSRPDEENISSYLQLIDKCLIHEAFTETQKKRLLSWKQQVQKLFRSFPRKTLLDISGYRQQRNRGFGQSNSLPTAGSVGGGMGRRNPRQYQIPSRNVPSARLGLLGTSGFVSSNQRNTTATPTIMKQGRQNLWFANPGGSNSMPSRTHSSVQRTRSLPVHTSPQNMLMFQQPGSQVHSGLCLTDLRGWLSLSGAPSMPALTVPKSSQGEFQLPVTEPDINNRLESLCLSMTEHALGDGVDRTSTI

SEQ ID NO: 65581 - protein, 326 aa, Homo sapiens
MAGPNQLCIRRWTTKHVAVWLKDEGFFEYVDILCNKHRLDGITLLTLTEYDLRSPPLEIKVLGDIKRLMLSVRKLQKIHIDVLEEMGYNSDSPMGSMTPFISALQSTDWLCNGELSHDCDGPITDLNSDQYQYMNGKNKHSVRRLDPEYWKTILSCIYVFIVFGFTSFIMVIVHERVPDMQTYPPLPDIFLDSVPRIPWAFAMTEVCGMILCYIWLLVLLLHKHRSILLRRLCSLMGTVFLLRCFTMFVTSLSVPGQHLQCTGKIYGSVWEKLHRAFAIWSGFGMTLTGVHTCGDYMFSGHTVVLTMLNFFVTECKYLFSASMRIR

SEQ ID NO: 65582 - protein, 478 aa, Homo sapiens
MPARSRHRPRLHSGSPPRAPPPPLEALHSGEAGRAPDSDGGSDADSEVGPGSPTRTAEAAEEEMAGPNQLCIRRWTTKHVAVWLKDEGFFEYVDILCNKHRLDGITLLTLTEYDLRSPPLEIKVLGDIKRLMLSVRKLQKIHIDVLEEMGYNSDSPMGSMTPFISALQSTDWLCNGELSHDCDGPITDLNSDQYQYMNGKNKHSVRRLDPEYWKTILSCIYVFIVFGFTSFIMVIVHERVPDMQTYPPLPDIFLDSVPRIPWAFAMTEVCGMILCYIWLLVLLLHKHRSILLRRLCSLMGTVFLLRCFTMFVTSLSVPGQHLQCTGKIYGSVWEKLHRAFAIWSGFGMTLTGVHTCGDYMFSGHTVVLTMLNFFVTEYTPRSWNFLHTLSWVLNLFGIFFILAAHEHYSIDVFIAFYITTRLFLYYHTLANTRAYQQSRRARIWFPMFSFFECNVNGTVPNEYCWPFSKPAIMKRLIG

SEQ ID NO: 65583 - protein, 254 aa, Homo sapiens
MAGPNQLCIRRWTTKHVAVWLKDEGFFEYVDILCNKHRLDGITLLTLTEYDLRSPPLEIKVLGDIKRLMLSVRKLQKIHIDVLEEMGYNSDSPMGSMTPFISALQSTDWLCNGELSHDCDGPITDLNSDQYQYMNGKNKHSVRRLDPEYWKTILSCIYVFIVFGFTSFIMVIVHERVPDMQTYPPLPDIFLDSVPRIPWAFAMTEVCGMILCYIWLLVLLLHKHRSILLRRLCSLMGTVFLLRCFTMFVTSLSV

SEQ ID NO: 65584 - protein, 415 aa, Homo sapiens
MAGPNQLCIRRWTTKHVAVWLKDEGFFEYVDILCNKHRLDGITLLTLTEYDLRSPPLEIKVLGDIKRLMLSVRKLQKIHIDVLEEMGYNSDSPMGSMTPFISALQSTDWLCNGELSHDCDGPITDLNSDQYQYMNGKNKHSVRRLDPEYWKTILSCIYVFIVFGFTSFIMVIVHERVPDMQTYPPLPDIFLDSVPRIPWAFAMTEVCGMILCYIWLLVLLLHKHRSILLRRLCSLMGTVFLLRCFTMFVTSLSVPGQHLQCTGKIYGSVWEKLHRAFAIWSGFGMTLTGVHTCGDYMFSGHTVVLTMLNFFVTEYTPRSWNFLHTLSWVLNLFGIFFILAAHEHYSIDVFIAFYITTRLFLYYHTLANTRAYQQSRRARIWFPMFSFFECNVNGTVPNEYCWPFSKPAIMKRLIG

SEQ ID NO: 65585 - protein, 1589 aa, Homo sapiens
MAKQLNLPENTDDWTKEDVNQWLESHKIDQKHREILTEQDVNGAVLKWLKKEHLVDMGITHGPAIQIEELFKELRKTAIEDSIQTSKMGKPSKNAPKDQTVSQKERRETSKQKQKGKENPDMANPSAMSTTAKGSKSLKVELIEDKIDYTKERQPSIDLTCVSYPFDEFSNPYRYKLDFSLQPETGPGNLIDPIHEFKAFTNTATATEEDVKMKFSNEVFRFASACMNSRTNGTIHFGVKDKPHGKIVGIKVTNDTKEALINHFNLMINKYFEDHQVQQAKKCIREPRFVEVLLPNSTLSDRFVIEVDIIPQFSECQYDYFQIKMQNYNNKIWEQSKKFSLFVRDGTSSKDITKNKVDFRAFKADFKTLAESRKAAEEKFRAKTNKKEREGPKLVKLLTGNQDLLDNSYYEQYILVTNKCHPDQTKHLDFLKEIKWFAVLEFDPESNINGVVKAYKESRVANLHFPSVYVEQKTTPNETISTLNLYHQPSWIFCNGRLDLDSEKYKPFDPSSWQRERASDVRKLISFLTHEDIMPRGKFLVVFLLLSSVDDPRDPLIETFCAFYQDLKGMENILCICVHPHIFQGWKDLLEARLIKHQDEISSQCISALSLEEINGTILKLKSVTQSSKRLLPSIGLSTVLLKKEEDIMTALEIICENECEGTLLEKDKNKFLEFKASKEEDFYRGGKVSWWNFYFSSESYSSPFVKRDKYERLEAMIQNCADSSKPTSTKIIHLYHHPGCGGTTLAMHILWELRKKFRCAVLKNKTVDFSEIGEQVTSLITYGAMNRQEYVPVLLLVDDFEEQDNVYLLQYSIQTAIAKKYIRYEKPLVIILNCMRSQNPEKSARIPDSIAVIQQLSPKEQRAFELKLKEIKEQHKNFEDFYSFMIMKTNFNKEYIENVVRNILKGQNIFTKEAKLFSFLALLNSYVPDTTISLSQCEKFLGIGNKKAFWGTEKFEDKMGTYSTILIKTEVIECGNYCGVRIIHSLIAEFSLEELKKSYHLNKSQIMLDMLTENLFFDTGMGKSKFLQDMHTLLLTRHRDEHEGETGNWFSPFIEALHKDEGNEAVEAVLLESIHRFNPNAFICQALARHFYIKKKDFGNALNWAKQAKIIEPDNSYISDTLGQVYKSKIRWWIEENGGNGNISVDDLIALLDLAEHASSAFKESQQQSEDREYEVKERLYPKSKRRYDTYNIAGYQGEIEVGLYTIQILQLIPFFDNKNELSKRYMVNFVSGSSDIPGDPNNEYKLALKNYIPYLTKLKFSLKKSFDFFDEYFVLLKPRNNIKQNEEAKTRRKVAGYFKKYVDIFCLLEESQNNTGLGSKFSEPLQVERCRRNLVALKADKFSGLLEYLIKSQEDAISTMKCIVNEYTFLLEQCTVKIQSKEKLNFILANIILSCIQPTSRLVKPVEKLKDQLREVLQPIGLTYQFSEPYFLASLLFWPENQQLDQHSEQMKEYAQALKNSFKGQYKHMHRTKQPIAYFFLGKGKRLERLVHKGKIDQCFKKTPDINSLWQSGDVWKEEKVQELLLRLQGRAENNCLYIEYGINEKITIPITPAFLGQLRSGRSIEKVSFYLGFSIGGPLAYDIEIV

SEQ ID NO: 65586 - protein, 1283 aa, Homo sapiens
MAKQLNLPENTDDWTKEDVNQWLESHKIDQKHREILTEQDVNGAVLKWLKKEHLVDMGITHGPAIQIEELFKELRKTAIEDSIQTSKMGKPSKNAPKDQTVSQKERRETSKQKQKGKENPDMANPSAMSTTAKGSKSLKVELIEDKIDYTKERQPSIDLTCVSYPFDEFSNPYRYKLDFSLQPETGPGNLIDPIHEFKAFTNTATATEEDVKMKFSNEVFRFASACMNSRTNGTIHFGVKDKPHGKIVGIKVTNDTKEALINHFNLMINKYFEDHQVQQAKKCIREPRFVEVLLPNSTLSDRFVIEVDIIPQFSECQYDYFQIKMQNYNNKIWEQSKKFSLFVRDGTSSKDITKNKVDFRAFKADFKTLAESRKAAEEKFRAKTNKKEREGPKLVKLLTGNQDLLDNSYYEQYILVTNKCHPDQTKHLDFLKEIKWFAVLEFDPESNINGVVKAYKESRVANLHFPSVYVEQKTTPNETISTLNLYHQPSWIFCNGRLDLDSEKYKPFDPSSWQRERASDVRKLISFLTHEDIMPRGKFLVVFLLLSSVDDPRDPLIETFCAFYQDLKGMENILCICVHPHIFQGWKDLLEARLIKHQDEISSQCISALSLEEINGTILKLKSVTQSSKRLLPSIGLSTVLLKKEEDIMTALEIICENECEGTLLEKDKNKFLEFKASKEEDFYRGGKVSWWNFYFSSESYSSPFVKRDKYERLEAMIQNCADSSKPTSTKIIHLYHHPGCGGTTLAMHILWELRKKFRCAVLKNKTVDFSEIGEQVTSLITYGAMNRQEYVPVLLLVDDFEEQDNVYLLQYSIQTAIAKKYIRYEKPLVIILNCMRSQNPEKSARIPDSIAVIQQLSPKEQRAFELKLKEIKEQHKNFEDFYSFMIMKTNFNKEYIENVVRNILKGQNIFTKEAKLFSFLALLNSYVPDTTISLSQCEKFLGIGNKKAFWGTEKFEDKMGTYSTILIKTEVIECGNYCGVRIIHSLIAEFSLEELKKSYHLNKSQIMLDMLTENLFFDTGMGKSKFLQDMHTLLLTRHRDEHEGETGNWFSPFIEALHKDEGNEAVEAVLLESIHRFNPNAFICQALARHFYIKKKDFGNALNWAKQAKIIEPDNSYISDTLGQVYKSKIRWWIEENGGNGNISVDDLIALLDLAEHASSAFKESQQQSEDREYEVKERLYPKSKRRYDTYNIAGYQGEIEVGLYTIQILQLIPFFDNKNELSKRYMVNFVSGSSDIPGDPNNEYKLALKNYIPYLTKLKFSLKKSFDFFDEYFVLLKPRNN

SEQ ID NO: 65587 - protein, 1584 aa, Homo sapiens
MSKQVSLPEMIKDWTKEHVKKWVNEDLKINEQYGQILLSEEVTGLVLQELTEKDLVEMGLPWGPALLIKRSYNKLNSKSPESDNHDPGQLDNSKPSKTEHQKNPKHTKKEEENSMSSNIDYDPREIRDIKQEESILMKENVLDEVANAKHKKKGKLKPEQLTCMPYPFDQFHDSHRYIEHYTLQPETGALNLIDPIHEFKALTNTETATEVDIKMKFSNEVFRFASACMNSRTNGTIHFGVKDKPHGEIVGVKITSKAAFIDHFNVMIKKYFEESEINEAKKCIREPRFVEVLLQNNTPSDRFVIEVDTIPKHSICNDKYFYIQMQICKDKIWKQNQNLSLFVREGASSRDILANSKQRDVDFKAFLQNLKSLVASRKEAEEEYGMKAMKKESEGLKLVKLLIGNRDSLDNSYYDWYILVTNKCHPNQIKHLDFLKEIKWFAVLEFDPESMINGVVKAYKESRVANLHFPNQYEDKTTNMWEKISTLNLYQQPSWIFCNGRSDLKSETYKPLEPHLWQRERASEVRKLILFLTDENIMTRGKFLVVFLLLSSVESPGDPLIETFWAFYQALKGMENMLCISVNSHIYQRWKDLLQTRMKMEDELTNHSISTLNIELVNSTILKLKSVTRSSRRFLPARGSSSVILEKKKEDVLTALEILCENECTETDIEKDKSKFLEFKKSKEEHFYRGGKVSWWNFYFSSENYSSDFVKRDSYEKLKDLIHCWAESPKPIFAKIINLYHHPGCGGTTLAMHVLWDLKKNFRCAVLKNKTTDFAEIAEQVINLVTYRAKSHQDYIPVLLLVDDFEEQENVYFLQNAIHSVLAEKDLRYEKTLVIILNCMRSRNPDESAKLADSIALNYQLSSKEQRAFGAKLKEIEKQHKNCENFYSFMIMKSNFDETYIENVVRNILKGQDVDSKEAQLISFLALLSSYVTDSTISVSQCEIFLGIIYTSTPWEPESLEDKMGTYSTLLIKTEVAEYGRYTGVRIIHPLIALYCLKELERSYHLDKCQIALNILEENLFYDSGIGRDKFQHDVQTLLLTRQRKVYGDETDTLFSPLMEALQNKDIEKVLSAGSRRFPQNAFICQALARHFYIKEKDFNTALDWARQAKMKAPKNSYISDTLGQVYKSEIKWWLDGNKNCRSITVNDLTHLLEAAEKASRAFKESQRQTDSKNYETENWSPQKSQRRYDMYNTACFLGEIEVGLYTIQILQLTPFFHKENELSKKHMVQFLSGKWTIPPDPRNECYLALSKFTSHLKNLQSDLKRCFDFFIDYMVLLKMRYTQKEIAEIMLSKKVSRCFRKYTELFCHLDPCLLQSKESQLLQEENCRKKLEALRADRFAGLLEYLNPNYKDATTMESIVNEYAFLLQQNSKKPMTNEKQNSILANIILSCLKPNSKLIQPLTTLKKQLREVLQFVGLSHQYPGPYFLACLLFWPENQELDQDSKLIEKYVSSLNRSFRGQYKRMCRSKQASTLFYLGKRKGLNSIVHKAKIEQYFDKAQNTNSLWHSGDVWKKNEVKDLLRRLTGQAEGKLISVEYGTEEKIKIPVISVYSGPLRSGRNIERVSFYLGFSIEGPLAYDIEVI

SEQ ID NO: 65588 - protein, 406 aa, Homo sapiens
MSKQVSLPEMIKDWTKEHVKKWVNEDLKINEQYGQILLSEEVTGLVLQELTEKDLVEMGLPWGPALLIKRSYNKLNSKSPESDNHDPGQLDNSKPSKTEHQKNPKHTKKEEENSMSSNIDYDPREIRDIKQEESILMKENVLDEVANAKHKKKLEALRADRFAGLLEYLNPNYKDATTMESIVNEYAFLLQQNSKKPMTNEKQNSILANIILSCLKPNSKLIQPLTTLKKQLREVLQFVGLSHQYPGPYFLACLLFWPENQELDQDSKLIEKYVSSLNRSFRGQYKRMCRSKQASTLFYLGKRKGLNSIVHKAKIEQYFDKAQNTNSLWHSGDVWKKNEVKDLLRRLTGQAEGKLISVEYGTEEKIKIPVISVYSGPLRSGRNIERVSFYLGFSIEGPLAYDIEVI

SEQ ID NO: 65589 - protein, 1584 aa, Homo sapiens; identical to SEQ ID NO: 65587

SEQ ID NO: 65590 - protein, 70 aa, Homo sapiens
MSKQVSLPEMIKDWTKEHVKKWVNEDLKINEQYGQILLSEEVTGLVLQELTEKDLVEMGLPWGPALLIKR

SEQ ID NO: 65591 - protein, 1584 aa, Homo sapiens; identical to SEQ ID NO: 65587

SEQ ID NO: 65592 - protein, 70 aa, Homo sapiens; identical to SEQ ID NO: 65590

SEQ ID NO: 65593 - protein, 70 aa, Homo sapiens; identical to SEQ ID NO: 65590

SEQ ID NO: 65594 - protein, 70 aa, Homo sapiens; identical to SEQ ID NO: 65590

SEQ ID NO: 65595 - protein, 318 aa, Homo sapiens
MAPWAEAEHSALNPLRAVWLTLTAAFLLTLLLQLLPPGLLPGCAIFQDLIRYGKTKCGEPSRPAACRAFDVPKRYFSHFYIISVLWNGFLLWCLTQSLFLGAPFPSWLHGLLRILGAAQFQGGELALSAFLVLVFLWLHSLRRLFECLYVSVFSNVMIHVVQYCFGLVYYVLVGLTVLSQVPMDGRNAYITGKNLLMQARWFHILGMMMFIWSSAHQYKCHVILGNLRKNKAGVVIHCNHRIPFGDWFEYVSSPNYLAELMIYVSMAVTFGFHNLTWWLVVTNVFFNQALSAFLSHQFYKSKFVSYPKHRKAFLPFLF

SEQ ID NO: 65596 - protein, 236 aa, Homo sapiens
MTRCPAGQAEVEMAELYVKPGNKERGWNDPPQFSYGLQTQAGGPRRSLLTKRVAAPQDGSPRVPASETSPGPPPMGPPPPSSKAPRSPPVGSGPASGVEPTSFPVESEAVMEDVLRPLEQALEDCRGHTRKQVCDDISRRLALLQEQWAGGKLSIPVKKRMALLVQELSSHRWDAADDIHRSLMVDHVTEVSQWMVGVKRLIAEKRSLFSEEAANEEKSAATAEKNHTIPGFQQAS

SEQ ID NO: 65597 - protein, 583 aa, Homo sapiens
MPLRKMKIPFLLLFFLWEAESHAASRPNIILVMADDLGIGDPGCYGNKTIRTPNIDRLASGGVKLTQHLAASPLCTPSRAAFMTGRYPVRSGMASWSRTGVFLFTASSGGLPTDEITFAKLLKDQGYSTALIGKWHLGMSCHSKTDFCHHPLHHGFNYFYGISLTNLRDCKPGEGSVFTTGFKRLVFLPLQIVGVTLLTLAALNCLGLLHVPLGVFFSLLFLAALILTLFLGFLHYFRPLNCFMMRNYEIIQQPMSYDNLTQRLTVEAAQFIQRNTETPFLLVLSYLHVHTALFSSKDFAGKSQHGVYGDAVEEMDWSVGQILNLLDELRLANDTLIYFTSDQGAHVEEVSSKGEIHGGSNGIYKGGKANNWEGGIRVPGILRWPRVIQAGQKIDEPTSNMDIFPTVAKLAGAPLPEDRIIDGRDLMPLLEGKSQRSDHEFLFHYCNAYLNAVRWHPQNSTSIWKAFFFTPNFNPVGSNGCFATHVCFCFGSYVTHHDPPLLFDISKDPRERNPLTPASEPRFYEILKVMQEAADRHTQTLPEVPDQFSWNNFLWKPWLQLCCPSTGLSCQCDREKQDKRLSR

SEQ ID NO: 65598 - protein, 259 aa, Homo sapiens
MATATGVAEERLLAALAYLQCAVGCAVFARNRQTNSVYGRHALPSHRLRVPARAAWVVQELPSLALPLYQYASESAPRLRSAPNCILLAMFLVHYGHRCLIYPFLMRGGKPMPLLACTMAIMFCTCNGYLQSRYLSHCAVYADDWVTDPRFLIGFGLWLTGMLINIHSDHILRNLRKPGDTGYKIPRGGLFEYVTAANYFGEIMEWCGYALASWSVQGAAFAFFTFCFLSGRAKEHHEWYLRKFEEYPKFRKIIIPFLF

SEQ ID NO: 65599 - protein, 194 aa, Homo sapiens
MEHAAQPWRWQRRRGWRRSACWPRSPTCSAPWAARSSRAIVRRTQCTAATRCPATGSECRRGPPGWCRSCPRWPCRSTSTPASPPRVSAARPTASSWPCSSSTTGIGNVGMQALAVCLHPKCQPMVPIVCPDLNHDSKTQREIAGIRCSYSLLGNTAASRRIPTSLMTQHLNAHLLANTCFAVNQYEVFLGVLA

SEQ ID NO: 65600 - protein, 212 aa, Homo sapiens
MEHAAQPWRWQRRRGWRRSACWPRSPTCSAPWAARSSRAIVRRTQCTAATRCPATGSECRRGPPGWCRSCPRWPCRSTSTPASPPRVSAARPTASSWPCSSSTTGIGFGLWLTGMLINIHSDHILRNLRKPGDTGYKIPRGGLFEYVTAANYFGEIMEWCGYALASWSVQGAAFAFFTFCFLSGRAKEHHEWYLRKFEEYPKFRKIIIPFLF

SEQ ID NO: 65601 - protein, 285 aa, Homo sapiens
MLLATFKLCAGSSYRHMRNMKGLRQQAVMAISQELNRRALGGPTPSTWINQVRRRSSLLGSRLEETLYSDQELAYLQQGEEAMQKALGILSNQEGWKKESQQDNGDKVMSKVVPDVGKVFRLEVVVDQPMERLYEELVERMEAMGEWNPNVKEIKVLQKIGKDTFITHELAAEAAGNLVGPRDFVSVRCAKRRGSTCVLAGMATDFGNMPEQKGVIRAEHGPTCMVLHPLAGSPSKTKLTWLLSIDLKGWLPKSIINQVLSQTQVDFANHLRKRLESHPASEARC

SEQ ID NO: 65602 - protein, 247 aa, Homo sapiens
MLLATFKLCAGSSYRHMRNMKGSRLEETLYSDQELAYLQQGEEAMQKALGILSNQEGWKKESQQDNGDKVMSKVVPDVGKVFRLEVVVDQPMERLYEELVERMEAMGEWNPNVKEIKVLQKIGKDTFITHELAAEAAGNLVGPRDFVSVRCAKRRGSTCVLAGMATDFGNMPEQKGVIRAEHGPTCMVLHPLAGSPSKTKLTWLLSIDLKGWLPKSIINQVLSQTQVDFANHLRKRLESHPASEARC

SEQ ID NO: 65603 - protein, 322 aa, Homo sapiens
MSSSPWEPATLRRVFVVGVGMTKFVKPGAENSRDYPDLAEEAGKKALADAQIPYSAVDQACVGYVFGVAECVLALGFEKMSKGSLGIKFSDRTIPTDKHVDLLINKYGLSAHPVAPQMFGYAGKEHMEKYGTKIEHFAKIGWKNHKHSVNNPYSQFQDEYSLDEVMASKEVFDFLTILQCCPTSDGAAAAILASEAFVQKYGLQSKAVEILAQEMMTDLPSSFEEKSIIKMVGFDMSKEAARKCYEKSGLTPNDIDVIELHDCFSTNELLTYEALGLCPEGQGATLVDRGDNTYGGKWVINPSGGLISKGHPLGATGGHSCS

SEQ ID NO: 65604 - protein, 547 aa, Homo sapiens
MSSSPWEPATLRRVFVVGVGMTKFVKPGAENSRDYPDLAEEAGKKALADAQIPYSAVDQACVGYVFGDSTCGQRAIYHSLGMTGIPIINVNNNCATGSTALFMARQLIQGGVAECVLALGFEKMSKGSLGIKFSDRTIPTDKHVDLLINKYGLSAHPVAPQMFGYAGKEHMEKYGTKIEHFAKIGWKNHKHSVNNPYSQFQDEYSLDEVMASKEVFDFLTILQCCPTSDGAAAAILASEAFVQKYGLQSKAVEILAQEMMTDLPSSFEEKSIIKMVGFDMSKEAARKCYEKSGLTPNDIDVIELHDCFSTNELLTYEALGLCPEGQGATLVDRGDNTYGGKWVINPSGGLISKGHPLGATGLAQCAELCWQLRGEAGKRQVPGAKVALQHNLGIGGAVVVTLYKMGFPEAASSFRTHQIEAVPTSSASDGFKANLVFKEIEKKLEEEGEQFVKKIGGIFAFKVKDGPGGKEATWVVDVKNGKGSVLPNSDKKADCTITMADSDFLALMTGKMNPQSAFFQGKLKITGNMGLAMKLQNLQLQPGNAKL

SEQ ID NO: 65605 - protein, 523 aa, Homo sapiens
MSSSPWEPATLRRVFVVGVGMTKFVKPGAENSRDYPDLAEEAGDSTCGQRAIYHSLGMTGIPIINVNNNCATGSTALFMARQLIQGGVAECVLALGFEKMSKGSLGIKFSDRTIPTDKHVDLLINKYGLSAHPVAPQMFGYAGKEHMEKYGTKIEHFAKIGWKNHKHSVNNPYSQFQDEYSLDEVMASKEVFDFLTILQCCPTSDGAAAAILASEAFVQKYGLQSKAVEILAQEMMTDLPSSFEEKSIIKMVGFDMSKEAARKCYEKSGLTPNDIDVIELHDCFSTNELLTYEALGLCPEGQGATLVDRGDNTYGGKWVINPSGGLISKGHPLGATGLAQCAELCWQLRGEAGKRQVPGAKVALQHNLGIGGAVVVTLYKMGFPEAASSFRTHQIEAVPTSSASDGFKANLVFKEIEKKLEEEGEQFVKKIGGIFAFKVKDGPGGKEATWVVDVKNGKGSVLPNSDKKADCTITMADSDFLALMTGKMNPQSAFFQGKLKITGNMGLAMKLQNLQLQPGNAKL

SEQ ID NO: 65606 - protein, 59 aa, Homo sapiens
MGFPEAASSFRTHQIEAVPTSSASDGFKANLVFKEIEKKLEEIRRLTAQSQWLTQTSWL

SEQ ID NO: 65607 - protein, 140 aa, Homo sapiens
MGFPEAARTHQIEAVPTSSASDGFKANLVFKEIEKKLEEEGEQFVKKIGGIFAFKVKDGPGGKEATWVVDVKNGKGSVLPNSDKKADCTITMADSDFLALMTGKMNPQSAFFQGKLKITGNMGLAMKLQNLQLQPGNAKL

SEQ ID NO: 65608 - protein, 143 aa, Homo sapiens
MGFPEAASSFRTHQIEAVPTSSASDGFKANLVFKEIEKKLEEEGEQFVKKIGGIFAFKVKDGPGGKEATWVVDVKNGKGSVLPNSDKKADCTITMADSDFLALMTGKMNPQSAFFQGKLKITGNMGLAMKLQNLQLQPGNAKL

SEQ ID NO: 65609 - protein, 59 aa, Homo sapiens; identical to SEQ ID NO: 65606

SEQ ID NO: 65610 - protein, 466 aa, Homo sapiens
MTGIPIINVNNNCATGSTALFMARQLIQGGVAECVLALGFEKMSKGSLGIKFSDRTIPTDKHVDLLINKYGLSAHPVAPQMFGYAGKEHMEKYGTKIEHFAKIGWKNHKHSVNNPYSQFQDEYSLDEVMASKEVFDFLTILQCCPTSDGAAAAILASEAFVQKYGLQSKAVEILAQEMMTDLPSSFEEKSIIKMVGFDMSKEAARKCYEKSGLTPNDIDVIELHDCFSTNELLTYEALGLCPEGQGATLVDRGDNTYGGKWVINPSGGLISKGHPLGATGLAQCAELCWQLRGEAGKRQVPGAKVALQHNLGIGGAVVVTLYKMGFPEAASSFRTHQIEAVPTSSASDGFKANLVFKEIEKKLEEEGEQFVKKIGGIFAFKVKDGPGGKEATWVVDVKNGKGSVLPNSDKKADCTITMADSDFLALMTGKMNPQSAFFQGKLKITGNMGLAMKLQNLQLQPGNAKL

SEQ ID NO: 65611 - protein, 503 aa, Homo sapiens
MSSSPWEPATLRRVFVVGVGMTKFVKPGAENSRDYPDLAEEAGKKALADAQIPYSAVDQACVGYVFGVAECVLALGFEKMSKGSLGIKFSDRTIPTDKHVDLLINKYGLSAHPVAPQMFGYAGKEHMEKYGTKIEHFAKIGWKNHKHSVNNPYSQFQDEYSLDEVMASKEVFDFLTILQCCPTSDGAAAAILASEAFVQKYGLQSKAVEILAQEMMTDLPSSFEEKSIIKMVGFDMSKEAARKCYEKSGLTPNDIDVIELHDCFSTNELLTYEALGLCPEGQGATLVDRGDNTYGGKWVINPSGGLISKGHPLGATGLAQCAELCWQLRGEAGKRQVPGAKVALQHNLGIGGAVVVTLYKMGFPEAASSFRTHQIEAVPTSSASDGFKANLVFKEIEKKLEEEGEQFVKKIGGIFAFKVKDGPGGKEATWVVDVKNGKGSVLPNSDKKADCTITMADSDFLALMTGKMNPQSAFFQGKLKITGNMGLAMKLQNLQLQPGNAKL

SEQ ID NO: 65612 - protein, 550 aa, Homo sapiens
MVGEEKMSLRNRLSKSRENPEEDEDQRNPAKESLETPSNGRIDIKQLIAKKIKLTAEAEELKPFFMKEVGSHFDDFVTNLIEKSASLDNGGCALTTFSVLEGEKNNHRAKDLRAPPEQGKIFIARRSLLDELLEVDHIRTIYHMFIALLILFILSTLVVDYIDEGRLVLEFSLLSYAFGKFPTVVWTWWIMFLSTFSVPYFLFQHWATGYSKSSHPLIRSLFHGFLFMIFQIGVLGFGPTYVVLAYTLPPASRFIIIFEQIRFVMKAHSFVRENVPRVLNSAKEKSSTVPIPTVNQYLYFLFAPTLIYRDSYPRNPTVRWGYVAMKFAQVFGCFFYVYYIFERLCAPLFRNIKQEPFSARVLVLCVFNSILPGVLILFLTFFAFLHCWLNAFAEMLRFGDRMFYKDWWNSTSYSNYYRTWNVVVHDWLYYYAYKDFLWFFSKRFKSAAMLAVFAVSAVVHEYALAVCLSFFYPVLFVLFMFFGMAFNFIVNDSRKKPIWNVLMWTSLFLGNGVLLCFYSQEWYARQHCPLKNPTFLDYVRPRSWTCRYVF

SEQ ID NO: 65613 - protein, 260 aa, Homo sapiens
MVGEEKMSLRNRLSKSRENPEEDEDQRNPAKESLETPSNGRIDIKQLIAKKIKLTAEAEELKPFFMKEVGSHFDDFVTNLIEKSASLDNGGCALTTFSVLEGEKNNHRAKDLRAPPEQGKIFIARRSLLDELLEVDHIRTIYHMFIALLILFILSTLVVDYIDEGRLVLEFSLLSYAFGKFPTVVWTWWIMFLSTFSVPYFLFQHWATGYSKSSHPLIRSLFHGFLFMIFQIGVLGFGPTYVVLAYTLPPASRFIIIFEQ

SEQ ID NO: 65614 - protein, 286 aa, Homo sapiens
MKAHSFVRENVPRVLNSAKEKSSTVPIPTVNQYLYFLFAPTLIYRDSYPRNPTVRWGYVAMKFAQVFGCFFYVYYIFERLCAPLFRNIKQEPFSARVLVLCVFNSILPGVLILFLTFFAFLHCWLNAFAEMLRFGDRMFYKDWWNSTSYSNYYRTWNVVVHDWLYYYAYKDFLWFFSKRFKSAAMLAVFAVSAVVHEYALAVCLSFFYPVLFVLFMFFGMAFNFIVNDSRKKPIWNVLMWTSLFLGNGVLLCFYSQEWYARQHCPLKNPTFLDYVRPRSWTCRYVF

SEQ ID NO: 65615 - protein, 485 aa, Homo sapiens
MKEVGSHFDDFVTNLIEKSASLDNGGCALTTFSVLEGEKNNHRAKDLRAPPEQGKIFIARRSLLDELLEVDHIRTIYHMFIALLILFILSTLVVDYIDEGRLVLEFSLLSYAFGKFPTVVWTWWIMFLSTFSVPYFLFQHWATGYSKSSHPLIRSLFHGFLFMIFQIGVLGFGPTYVVLAYTLPPASRFIIIFEQIRFVMKAHSFVRENVPRVLNSAKEKSSTVPIPTVNQYLYFLFAPTLIYRDSYPRNPTVRWGYVAMKFAQVFGCFFYVYYIFERLCAPLFRNIKQEPFSARVLVLCVFNSILPGVLILFLTFFAFLHCWLNAFAEMLRFGDRMFYKDWWNSTSYSNYYRTWNVVVHDWLYYYAYKDFLWFFSKRFKSAAMLAVFAVSAVVHEYALAVCLSFFYPVLFVLFMFFGMAFNFIVNDSRKKPIWNVLMWTSLFLGNGVLLCFYSQEWYARQHCPLKNPTFLDYVRPRSWTCRYVF

SEQ ID NO: 65616 - protein, 492 aa, Homo sapiens
MELKPFFMKEVGSHFDDFVTNLIEKSASLDNGGCALTTFSVLEGEKNNHRAKDLRAPPEQGKIFIARRSLLDELLEVDHIRTIYHMFIALLILFILSTLVVDYIDEGRLVLEFSLLSYAFGKFPTVVWTWWIMFLSTFSVPYFLFQHWATGYSKSSHPLIRSLFHGFLFMIFQIGVLGFGPTYVVLAYTLPPASRFIIIFEQIRFVMKAHSFVRENVPRVLNSAKEKSSTVPIPTVNQYLYFLFAPTLIYRDSYPRNPTVRWGYVAMKFAQVFGCFFYVYYIFERLCAPLFRNIKQEPFSARVLVLCVFNSILPGVLILFLTFFAFLHCWLNAFAEMLRFGDRMFYKDWWNSTSYSNYYRTWNVVVHDWLYYYAYKDFLWFFSKRFKSAAMLAVFAVSAVVHEYALAVCLSFFYPVLFVLFMFFGMAFNFIVNDSRKKPIWNVLMWTSLFLGNGVLLCFYSQEWYARQHCPLKNPTFLDYVRPRSWTCRYVF

SEQ ID NO: 65617 - protein, 522 aa, Homo sapiens
MEPGGARLRLQRTEGLGGERERQPCGDGNTETHRAPDLVQWTRHMEAVKAQLLEQAQGQLRELLDRAMREAIQSYPSQDKPLPPPPPGSLSRTQEPSLGKQKVFIIRKSLLDELMEVQHFRTIYHMFIAGLCVFIISTLAIDFIDEGRLLLEFDLLIFSFGQLPLALVTWVPMFLSTLLAPYQALRLWARGTWTQATGLGCALLAAHAVVLCALPVHVAVEHQLPPASRCVLVFEQVRFLMKSYSFLREAVPGTLRARRGEGIQAPSFSSYLYFLFCPTLIYRETYPRTPYVRWNYVAKNFAQALGCVLYACFILGRLCVPVFANMSREPFSTRALVLSILHATLPGIFMLLLIFFAFLHCWLNAFAEMLRFGDRMFYRDWWNSTSFSNYYRTWNVVVHDWLYSYVYQDGLRLLGARARGVAMLGVFLVSAVAHEYIFCFVLGFFYPVMLILFLVIGGMLNFMMHDQRTGPAWNVLMWTMLFLGQGIQVSLYCQEWYARRHCPLPQATFWGLVTPRSWSCHT

SEQ ID NO: 65618 - protein, 1141 aa, Homo sapiens
MDDSGELGGLETMETLTELGDELTLGDIDEMLQFVSNQVGEFPDLFSEQLCSSFPGSGGSGSSSGSSGSSSSSSNGRGSSSGAVDPSVQRSFTQVTLPSFSPSAASPQAPTLQVKVSPTSVPTTPRATPILQPRPQPQPQPQTQLQQQTVMITPTFSTTPQTRIIQQPLIYQNAATSFQVLQPQVQSLVTSSQVQPVTIQQQVQTVQAQRVLTQTANGTLQTLAPATVQTVAAPQVQQVPVLVQPQIIKTDSLVLTTLKTDGSPVMAAVQNPALTALTTPIQTAALQVPTLVGSSGTILTTMPVMMGQEKVPIKQVPGGVKQLEPPKEGERRTTHNIIEKRYRSSINDKIIELKDLVMGTDAKMHKSGVLRKAIDYIKYLQQVNHKLRQENMVLKLANQKNKLLKGIDLGSLVDNEVDLKIEDFNQNVLLMSPPASDSGSQAGFSPYSIDSEPGSPLLDDAKVKDEPDSPPVALGMVDRSRILLCVLTFLCLSFNPLTSLLQWGGAHDSDQHPHSGSGRSVLSFESGSGGWFDWMMPTLLLWLVNGVIVLSVFVKLLVHGEPVIRPHSRSSVTFWRHRKQADLDLARGDFAAAAGNLQTCLAVLGRALPTSRLDLACSLSWNVIRYSLQKLRLVRWLLKKVFQCRRATPATEAGFEDEAKTSARDAALAYHRLHQLHITGKLPAGSACSDVHMALCAVNLAECAEEKIPPSTLVEIHLTAAMGLKTRCGGKLGFLASYFLSRAQSLCGPEHSAVPDSLRWLCHPLGQKFFMERSWSVKSAAKESLYCAQRNPADPIAQVHQAFCKNLLERAIESLVKPQAKKKAGDQEEESCEFSSALEYLKLLHSFVDSVGVMSPPLSRSSVLKSALGPDIICRWWTSAITVAISWLQGDDAAVRSHFTKVERIPKALEVTESPLVKAIFHACRAMHASLPGKADGQQSSFCHCERASGHLWSSLNVSGATSDPALNHVVQLLTCDLLLSLRTALWQKQASASQAVGETYHASGAELAGFQRDLGSLRRLAHSFRPAYRKVFLHEATVRLMAGASPTRTHQLLEHSLRRRTTQSTKHGEVDAWPGQRERATAILLACRHLPLSFLSSPGQRAVLLAEAARTLEKVGDRRSCNDCQQMIVKLGGGTAIAAS

SEQ ID NO: 65619 - protein, 684 aa, Homo sapiens
MDDSGELGGLETMETLTELGDELTLGDIDEMLQFVSNQVGEFPDLFSEQLCSSFPGSGGSGSSSGSSGSSSSSSNGRGSSSGAVDPSVQRSFTQVTLPSFSPSAASPQAPTLQVKVSPTSVPTTPRATPILQPRPQPQPQPQTQLQQQTVMITPTFSTTPQTRIIQQPLIYQNAATSFQVLQPQVQSLVTSSQVQPVTIQQQVQTVQAQRVLTQTANGTLQTLAPATVQTVAAPQVQQVPVLVQPQIIKTDSLVLTTLKTDGSPVMAAVQNPALTALTTPIQTAALQVPTLVGSSGTILTTMPVMMGQEKVPIKQVPGGVKQLEPPKEGERRTTHNIIEKRYRSSINDKIIELKDLVMGTDAKMHKSGVLRKAIDYIKYLQQVNHKLRQENMVLKLANQKNKLLKGIDLGSLVDNEVDLKIEDFNQNVLLMSPPASDSGSQAGFSPYSIDSEPGSPLLDDAKVKDEPDSPPVALGMVDRSRILLCVLTFLCLSFNPLTSLLQWGGAHDSDQHPHSGSGRSVLSFESGSGGWFDWMMPTLLLWLVNGVIVLSVFVKLLVHGEPVIRPHSRSSVTFWRHRKQADLDLARGVYGKKSGATHSIEEELNIHISRGTRTRTLLSSRRFCSCCRQPTNLPGSFGPGTAHLPPGPGLQPLLERDPLQPAEATPGALAAQESLPVPAGHASH

SEQ ID NO: 65620 - protein, 1102 aa, Homo sapiens
MDDSGELGGLETMETLTELGDELTLGDIDEMLQFVSNQVGEFPDLFSEQLCSSFPGSGGSGSSSGSSGSSSSSSNGRGSSSGAVDPSVQRSFTQVTLPSFSPSAASPQAPTLQVKVSPTSVPTTPRATPILQPRPQPQPQPQTQLQQQTVMITPTFSTTPQTRIIQQPLIYQNAATSFQVLQPQVQSLVTSSQVQPVTIQQQVQTVQAQRVLTQTANGTLQTLAPATVQTVAAPQVQQVPVLVQPQIIKTDSLVLTTLKTDGSPVMAAVQNPALTALTTPIQTAALQVPTLVGSSGTILTTMPVMMGQEKVPIKQVPGGVKQLEPPKEGERRTTHNIIEKRYRSSINDKIIELKDLVMGTDAKMHKSGVLRKAIDYIKYLQQVNHKLRQENMVLKLANQKNKLLKGIDLGSLVDNEVDLKIEDFNQNVLLMSPPASDSGSQAGFSPYSIDSEPGSPLLDDAKVKDEPDSPPVALGMVDRSRILLCVLTFLCLSFNPLTSLLQWGGAHDSDQHPHSGSGRSVLSFESGSGGWFDWMMPTLLLWLVNGVIVLSVFVKLLVHGEPVIRPHSRSSVTFWRHRKQADLDLARGDFAAAAGNLQTCLAVLGRALPTSRLDLACSLSWNVIRYSLQKLRLVRWLLKKVFQCRRATPATEAGFEDEAKTSARDAALAYHRLHQLHITGKLPAGSACSDVHMALCAVNLAECAEEKIPPSTLVEIHLTAAMGLKTRCGGKLGFLASYFLSRAQSLCGPEHSAVPDSLRWLCHPLGQKFFMERSWSVKSAAKESLYCAQRNPADPIAQVHQAFCKNLLERAIESLVKPQAKKKAGDQEEESCEFSSALEYLKLLHSFVDSVGVMSPPLSRSSVLKSALGPDIICRWWTSAITVAISWLQGDDAAVRSHFTKVERIPKALEVTESPLVKAIFHACRAMHASLPGKADGQQSSFCHCERASGHLWSSLNVSGATSDPALNHVVQLLTCDLLLSLRTALWQKQASASQAVGETYHASGAELAGFQRDLGSLRRLAHSFRPAYRKVFLHEATVRLMAGASPTRTHQLLEHSLRRRTTQSTKHGEVDAWPGQRERATAILLACRHLPLSFLPCLQPS

SEQ ID NO: 65621 - protein, 215 aa, Homo sapiens
MHASLPGKADGQQSSFCHCERASGHLWSSLNVSGATSDPALNHVVQLLTCDLLLSLRTALWQKQASASQAVGETYHASGAELAGFQRDLGSLRRLAHSFRPAYRKVFLHEATVRLMAGASPTRTHQLLEHSLRRRTTQSTKHGEVDAWPGQRERATAILLACRHLPLSFLSSPGQRAVLLAEAARTLEKVGDRRSCNDCQQMIVKLGGGTAIAAS

SEQ ID NO: 65622 - protein, 299 aa, Homo sapiens
MDLVLRVADYYFFTPYVYPATWPEDDIFRQAISLLIVTNVGAYILYFFCATLSYYFVFDHALMKHPQFLKNQVRREIKFTVQALPWISILTVALFLLEIRGYSKLHDDLGEFPYGLFELVVSIISFLFFTDMFIYWIHRGLHHRLVYKRLHKPHHIWKIPTPFASHAFHPIDGFLQSLPYHIYPFIFPLHKVVYLSLYILVNIWTISIHDGDFRVPQILQPFINGSAHHTDHHMFFDYNYGQYFTLWDRIGGSFKNPSSFEGKGPLSYVKEMTEGKRSSHSGNGCKNEKLFNGEFTKTE

SEQ ID NO: 65623 - protein, 299 aa, Homo sapiens; identical to SEQ ID NO: 65622

SEQ ID NO: 65624 - protein, 63 aa, Homo sapiens
MEGAGAGSGFRKELVSRLLHLHFKDDKTKEAAVRGVRQAQAEDALRVDVDQLEKVLPQLLLDF

SEQ ID NO: 65625 - protein, 81 aa, Homo sapiens
MEGAGAGSGFRKELVSRLLHLHFKDDKTKVSGDALQLMVELLKVFVVEAAVRGVRQAQAEDALRVDVDQLEKVLPQLLLDF

SEQ ID NO: 65626 - protein, 706 aa, Homo sapiens
MGGKGGGDTRGPVLFPCQLAQALSPRRAFPRELKEKGQRMSSQPAGNQTSPGATEDYSYGSWYIDEPQGGEELQPEGEVPSCHTSIPPGLYHACLASLSILVLLLLAMLVRRRQLWPDCVRGRPGLPSPVDFLAGDRPRAVPAAVFMVLLSSLCLLLPDEDALPFLTLASAPSQDGKTEAPRGAWKILGLFYYAALYYPLAACATAGHTAAHLLGSTLSWAHLGVQVWQRAECPQVPKIYKYYSLLASLPLLLGLGFLSLWYPVQLVRSFSRRTGAGSKGLQSSYSEEYLRNLLCRKKLGSSYHTSKHGFLSWARVCLRHCIYTPQPGFHLPLKLVLSATLTGTAIYQVALLLLVGVVPTIQKVRAGVTTDVSYLLAGFGIVLSEDKQEVVELVKHHLWALEVCYISALVLSCLLTFLVLMRSLVTHRTNLRALHRGAALDLSPLHRSPHPSRQAIFCWMSFSAYQTAFICLGLLVQQIIFFLGTTALAFLVLMPVLHGRNLLLFRSLESSWPFWLTLALAVILQNMAAHWVFLETHDGHPQLTNRRVLYAATFLLFPLNVLVGAMVATWRVLLSALYNAIHLGQMDLSLLPPRAATLDPGYYTYRNFLKIEVSQSHPAMTAFCSLLLQAQSLLPRTMAAPQDSLRPGEEDEGMQLLQTKDSMAKGARPGASRGRARWGLAYTLLHNPTLQVFRKTALLGANGAQP

SEQ ID NO: 65627 - protein, 667 aa, Homo sapiens
MSSQPAGNQTSPGATEDYSYGSWYIDEPQGGEELQPEGEVPSCHTSIPPGLYHACLASLSILVLLLLAMLVRRRQLWPDCVRGRPGLPSPVDFLAGDRPRAVPAAVFMVLLSSLCLLLPDEDALPFLTLASAPSQDGKTEAPRGAWKILGLFYYAALYYPLAACATAGHTAAHLLGSTLSWAHLGVQVWQRAECPQVPKIYKYYSLLASLPLLLGLGFLSLWYPVQLVRSFSRRTGAGSKGLQSSYSEEYLRNLLCRKKLGSSYHTSKHGFLSWARVCLRHCIYTPQPGFHLPLKLVLSATLTGTAIYQVALLLLVGVVPTIQKVRAGVTTDVSYLLAGFGIVLSEDKQEVVELVKHHLWALEVCYISALVLSCLLTFLVLMRSLVTHRTNLRALHRGAALDLSPLHRSPHPSRQAIFCWMSFSAYQTAFICLGLLVQQIIFFLGTTALAFLVLMPVLHGRNLLLFRSLESSWPFWLTLALAVILQNMAAHWVFLETHDGHPQLTNRRVLYAATFLLFPLNVLVGAMVATWRVLLSALYNAIHLGQMDLSLLPPRAATLDPGYYTYRNFLKIEVSQSHPAMTAFCSLLLQAQSLLPRTMAAPQDSLRPGEEDEGMQLLQTKDSMAKGARPGASRGRARWGLAYTLLHNPTLQVFRKTALLGANGAQP

SEQ ID NO: 65628 - protein, 667 aa, Homo sapiens; identical to SEQ ID NO: 65627

SEQ ID NO: 65629 - protein, 599 aa, Homo sapiens
MLVRRRQLWPDCVRGRPGLPSPVDFLAGDRPRAVPAAVFMVLLSSLCLLLPDEDALPFLTLASAPSQDGKTEAPRGAWKILGLFYYAALYYPLAACATAGHTAAHLLGSTLSWAHLGVQVWQRAECPQVPKIYKYYSLLASLPLLLGLGFLSLWYPVQLVRSFSRRTGAGSKGLQSSYSEEYLRNLLCRKKLGSSYHTSKHGFLSWARVCLRHCIYTPQPGFHLPLKLVLSATLTGTAIYQVALLLLVGVVPTIQKVRAGVTTDVSYLLAGFGIVLSEDKQEVVELVKHHLWALEVCYISALVLSCLLTFLVLMRSLVTHRTNLRALHRGAALDLSPLHRSPHPSRQAIFCWMSFSAYQTAFICLGLLVQQIIFFLGTTALAFLVLMPVLHGRNLLLFRSLESSWPFWLTLALAVILQNMAAHWVFLETHDGHPQLTNRRVLYAATFLLFPLNVLVGAMVATWRVLLSALYNAIHLGQMDLSLLPPRAATLDPGYYTYRNFLKIEVSQSHPAMTAFCSLLLQAQSLLPRTMAAPQDSLRPGEEDEGMQLLQTKDSMAKGARPGASRGRARWGLAYTLLHNPTLQVFRKTALLGANGAQP

SEQ ID NO: 65630 - protein, 658 aa, Homo sapiens
MSSQPAGNQTSPGATEDYSYGSWYIDEPQGGEELQPEGEVPSCHTSIPPGLYHACLASLSILVLLLLAMLVRRRQLWPDCVRGRPGLPRPRAVPAAVFMVLLSSLCLLLPDEDALPFLTLASAPSQDGKTEAPRGAWKILGLFYYAALYYPLAACATAGHTAAHLLGSTLSWAHLGVQVWQRAECPQVPKIYKYYSLLASLPLLLGLGFLSLWYPVQLVRSFSRRTGAGSKGLQSSYSEEYLRNLLCRKKLGSSYHTSKHGFLSWARVCLRHCIYTPQPGFHLPLKLVLSATLTGTAIYQVALLLLVGVVPTIQKVRAGVTTDVSYLLAGFGIVLSEDKQEVVELVKHHLWALEVCYISALVLSCLLTFLVLMRSLVTHRTNLRALHRGAALDLSPLHRSPHPSRQAIFCWMSFSAYQTAFICLGLLVQQIIFFLGTTALAFLVLMPVLHGRNLLLFRSLESSWPFWLTLALAVILQNMAAHWVFLETHDGHPQLTNRRVLYAATFLLFPLNVLVGAMVATWRVLLSALYNAIHLGQMDLSLLPPRAATLDPGYYTYRNFLKIEVSQSHPAMTAFCSLLLQAQSLLPRTMAAPQDSLRPGEEDEGMQLLQTKDSMAKGARPGASRGRARWGLAYTLLHNPTLQVFRKTALLGANGAQP

SEQ ID NO: 65631 - protein, 159 aa, Homo sapiens
MSSQPAGNQTSPGATEDYSYGSWYIDEPQGGEELQPEGEVPSCHTSIPPGLYHACLASLSILVLLLLAMLVRRRQLWPDCVRGRPGLPSPVDFLAGDRPRAVPAAVFMVLLSSLCLLLPDEDALPFLTLASAPSQDGKTEAPRGNLPKITELRLVRAWI

SEQ ID NO: 65632 - protein, 706 aa, Homo sapiens; identical to SEQ ID NO: 65626

SEQ ID NO: 65633 - protein, 704 aa, Homo sapiens
MQIRLLRAELVVPLWQFIRQWPPGSDGWGQMEEKGQRMSSQPAGNQTSPGATEDYSYGSWYIDEPQGGEELQPEGEVPSCHTSIPPGLYHACLASLSILVLLLLAMLVRRRQLWPDCVRGRPGLPSPVDFLAGDRPRAVPAAVFMVLLSSLCLLLPDEDALPFLTLASAPSQDGKTEAPRGAWKILGLFYYAALYYPLAACATAGHTAAHLLGSTLSWAHLGVQVWQRAECPQVPKIYKYYSLLASLPLLLGLGFLSLWYPVQLVRSFSRRTGAGSKGLQSSYSEEYLRNLLCRKKLGSSYHTSKHGFLSWARVCLRHCIYTPQPGFHLPLKLVLSATLTGTAIYQVALLLLVGVVPTIQKVRAGVTTDVSYLLAGFGIVLSEDKQEVVELVKHHLWALEVCYISALVLSCLLTFLVLMRSLVTHRTNLRALHRGAALDLSPLHRSPHPSRQAIFCWMSFSAYQTAFICLGLLVQQIIFFLGTTALAFLVLMPVLHGRNLLLFRSLESSWPFWLTLALAVILQNMAAHWVFLETHDGHPQLTNRRVLYAATFLLFPLNVLVGAMVATWRVLLSALYNAIHLGQMDLSLLPPRAATLDPGYYTYRNFLKIEVSQSHPAMTAFCSLLLQAQSLLPRTMAAPQDSLRPGEEDEGMQLLQTKDSMAKGARPGASRGRARWGLAYTLLHNPTLQVFRKTALLGANGAQP

SEQ ID NO: 65634 - protein, 557 aa, Homo sapiens
MAAGTSMSPDEDALPFLTLASAPSQDGKTEAPRGAWKILGLFYYAALYYPLAACATAGHTAAHLLGSTLSWAHLGVQVWQRAECPQVPKIYKYYSLLASLPLLLGLGFLSLWYPVQLVRSFSRRTGAGSKGLQSSYSEEYLRNLLCRKKLGSSYHTSKHGFLSWARVCLRHCIYTPQPGFHLPLKLVLSATLTGTAIYQVALLLLVGVVPTIQKVRAGVTTDVSYLLAGFGIVLSEDKQEVVELVKHHLWALEVCYISALVLSCLLTFLVLMRSLVTHRTNLRALHRGAALDLSPLHRSPHPSRQAIFCWMSFSAYQTAFICLGLLVQQIIFFLGTTALAFLVLMPVLHGRNLLLFRSLESSWPFWLTLALAVILQNMAAHWVFLETHDGHPQLTNRRVLYAATFLLFPLNVLVGAMVATWRVLLSALYNAIHLGQMDLSLLPPRAATLDPGYYTYRNFLKIEVSQSHPAMTAFCSLLLQAQSLLPRTMAAPQDSLRPGEEDEGMQLLQTKDSMAKGARPGASRGRARWGLAYTLLHNPTLQVFRKTALLGANGAQP

SEQ ID NO: 65635 - protein, 476 aa, Homo sapiens
MGKLRLQEIYKYYSLLASLPLLLGLGFLSLWYPVQLVRSFSRRTGAGSKGLQSSYSEEYLRNLLCRKKLGSSYHTSKHGFLSWARVCLRHCIYTPQPGFHLPLKLVLSATLTGTAIYQVALLLLVGVVPTIQKVRAGVTTDVSYLLAGFGIVLSEDKQEVVELVKHHLWALEVCYISALVLSCLLTFLVLMRSLVTHRTNLRALHRGAALDLSPLHRSPHPSRQAIFCWMSFSAYQTAFICLGLLVQQIIFFLGTTALAFLVLMPVLHGRNLLLFRSLESSWPFWLTLALAVILQNMAAHWVFLETHDGHPQLTNRRVLYAATFLLFPLNVLVGAMVATWRVLLSALYNAIHLGQMDLSLLPPRAATLDPGYYTYRNFLKIEVSQSHPAMTAFCSLLLQAQSLLPRTMAAPQDSLRPGEEDEGMQLLQTKDSMAKGARPGASRGRARWGLAYTLLHNPTLQVFRKTALLGANGAQP

SEQ ID NO: 65636 - protein, 330 aa, Homo sapiens
MGKIDVDKILFFNQEIRLWQLIMATPEENSNPHDRATPQLPAQLQELEHRVARRRLSQARHRATLAALFNNLRKTVYSQSDLIASKWQVLNKAKSHIPELEQTLDNLLKLKASFNLEDGHASSLEEVKKEYASMYSGNDSFPQNGSSPWYLNFYKQTMDLLTGSGIITPQEAALPIVSAAISHLWQNLSEERKASLRQAWAQKHRGPATLAEACREPACAEGSVKDSGVDSQGASCSLVSTPEEILFEDAFDVASFLDKSEVPSTSSSSSVLASCNPENPEEKFQLYMQIINFFKGLSCANTQVKQEASFPVDEEMIMLQCTETFDDEDL

SEQ ID NO: 65637 - protein, 303 aa, Homo sapiens
MKGKEEKEGGARLGAGGGSPEKSPSAQELKEQGNRLFVGRKYPEAAACYGRAITRNPLVAVYYTNRALCYLKMQQHEQALADCRRALELDGQSVKAHFFLGQCQLEMESYDEAIANLQRAYSLAKEQRLNFGDDIPSALRIAKKKRWNSIEERRIHQESELHSYLSRLIAAERERELEECQRNHEGDEDDSHVRAQQACIEAKHDKYMADMDELFSQVDEKRKKRDIPDYLCGKISFELMREPCITPSGITYDRKDIEEHLQRVGHFDPVTRSPLTQEQLIPNLAMKEVIDAFISENGWVEDY

SEQ ID NO: 65638 - protein, 398 aa, Homo sapiens
MLGRSGYRALPLGDFDRFQQSSFGFLGSQKGCLSPERGGVGTGADVPQSWPSCLCHGLISFLGFLLLLVTFPISGWFALKIVPTYERMIVFRLGRIRTPQGPGMVLLLPFIDSFQRVDLRTRAFNVPPCKLASKDGAVLSVGADVQFRIWDPVLSVMTVKDLNTATRMTAQNAMTKALLKRPLREIQMEKLKISDQLLLEINDVTRAWGLEVDRVELAVEAVLQPPQDSPAGPNLDSTLQQLALHFLGGSMNSMAGGAPSPGPADTVEMVSEVEPPAPQVGARSSPKQPLAEGLLTALQPFLSEALVSQVGACYQFNVVLPSGTQSAYFLDLTTGRGRVGHGVPDGIPDVVVEMAEADLRALLCRELRPLGAYMSGRLKVKGDLAMAMKLEAVLRALK

SEQ ID NO: 65639 - protein, 348 aa, Homo sapiens
MLGRSGYRALPLGDFDRFQQSSFGFLGSQKGCLSPERGGVGTGADVPQSWPSCLCHGLISFLGFLLLLVTFPISGWFALKLASKDGAVLSVGADVQFRIWDPVLSVMTVKDLNTATRMTAQNAMTKALLKRPLREIQMEKLKISDQLLLEINDVTRAWGLEVDRVELAVEAVLQPPQDSPAGPNLDSTLQQLALHFLGGSMNSMAGGAPSPGPADTVEMVSEVEPPAPQVGARSSPKQPLAEGLLTALQPFLSEALVSQVGACYQFNVVLPSGTQSAYFLDLTTGRGRVGHGVPDGIPDVVVEMAEADLRALLCRELRPLGAYMSGRLKVKGDLAMAMKLEAVLRALK

SEQ ID NO: 65640 - protein, 327 aa, Homo sapiens
MLGRSGYRALPLGDFDRFQQSSFGFLGSQKGCLSPERGGVGTGADVPQSWPSCLCHGLISFLGFLLLLVTFPISGWFALKIVPTYERMIVFRLGRIRTPQGPGMVLLLPFIDSFQRVDLRTRAFNVPPCKLASKDGAVLSVGADVQFRIWDPVLSVMTVKDLNTATRMTAQNAMTKALLKRPLREIQMEKLKISDQLLLEINDVTRAWGLEVDRVELAVEAVLQPPQDSPAGPNLDSTLQQLALHFLGGSMNSMAGGAPSPGPGRGRVGHGVPDGIPDVVVEMAEADLRALLCRELRPLGAYMSGRLKVKGDLAMAMKLEAVLRALK

SEQ ID NO: 65641 - protein, 355 aa, Homo sapiens
MPDVPQSWPSCLCHGLISFLGFLLLLVTFPISGWFALKIVPTYERMIVFRLGRIRTPQGPGMVLLLPFIDSFQRVDLRTRAFNVPPCKLASKDGAVLSVGADVQFRIWDPVLSVMTVKDLNTATRMTAQNAMTKALLKRPLREIQMEKLKISDQLLLEINDVTRAWGLEVDRVELAVEAVLQPPQDSPAGPNLDSTLQQLALHFLGGSMNSMAGGAPSPGPDTVEMVSEVEPPAPQVGARSSPKQPLAEGLLTALQPFLSEALVSQVGACYQFNVVLPSGTQSAYFLDLTTGRGRVGHGVPDGIPDVVVEMAEADLRALLCRELRPLGAYMSGRLKVKGDLAMAMKLEAVLRALK

SEQ ID NO: 65642 - protein, 310 aa, Homo sapiens
MIVFRLGRIRTPQGPGMVLLLPFIDSFQRVDLRTRAFNVPPCKLASKDGAVLSVGADVQFRIWDPVLSVMTVKDLNTATRMTAQNAMTKALLKRPLREIQMEKLKISDQLLLEINDVTRAWGLEVDRVELAVEAVLQPPQDSPAGPNLDSTLQQLALHFLGGSMNSMAGGAPSPGPDTVEMVSEVEPPAPQVGARSSPKQPLAEGLLTALQPFLSEALVSQVGACYQFNVVLPSGTQSAYFLDLTTGRGRVGHGVPDGIPDVVVEMAEADLRALLCRELRPLGAYMSGRLKVKGDLAMAMKLEAVLRALK

SEQ ID NO: 65643 - protein, 347 aa, Homo sapiens
MLGRSGYRALPLGDFDRFQQSSFGFLGSQKGCLSPERGGVGTGADVPQSWPSCLCHGLISFLGFLLLLVTFPISGWFALKLASKDGAVLSVGADVQFRIWDPVLSVMTVKDLNTATRMTAQNAMTKALLKRPLREIQMEKLKISDQLLLEINDVTRAWGLEVDRVELAVEAVLQPPQDSPAGPNLDSTLQQLALHFLGGSMNSMAGGAPSPGPDTVEMVSEVEPPAPQVGARSSPKQPLAEGLLTALQPFLSEALVSQVGACYQFNVVLPSGTQSAYFLDLTTGRGRVGHGVPDGIPDVVVEMAEADLRALLCRELRPLGAYMSGRLKVKGDLAMAMKLEAVLRALK

SEQ ID NO: 65644 - protein, 356 aa, Homo sapiens
MLARAARGTGALLLRGSLLASGRAPRRASSGLPRNTVVLFVPQQEAWVVERMGRFHRILEPGLNILIPVLDRIRYVQSLKEIVINVPEQSAVTLDNVTLQIDGVLYLRIMDPYKASYGVEDPEYAVTQLAQTTMRSELGKLSLDKVFRERESLNASIVDAINQAADCWGIRCLRYEIKDIHVPPRVKESMQMQVEAERRKRATVLESEGTRESAINVAEGKKQAQILASEAEKAEQINQAAGEASAVLAKAKAKAEAIRILAAALTQHNGDAAASLTVAEQYVSAFSKLAKDSNTILLPSNPGDVTSMVAQAMGVYGALTKAPVPGTPDSLSSGSSRDVQGTDASLDEELDRVKMS

SEQ ID NO: 65645 - protein, 311 aa, Homo sapiens
MLARAARGTGALLLRGSLLASGRAPRRASSGLPRNTVVLFVPQQEAWVVERMGRFHRILEPGLNILIPVLDRIRYVQSLKEIVINVPEQSAVTLDNVTLQIDGVLYLRIMDPYKASYGVEDPEYAVTQLAQTTMRSELGKLSLDKVFRVEAERRKRATVLESEGTRESAINVAEGKKQAQILASEAEKAEQINQAAGEASAVLAKAKAKAEAIRILAAALTQHNGDAAASLTVAEQYVSAFSKLAKDSNTILLPSNPGDVTSMVAQAMGVYGALTKAPVPGTPDSLSSGSSRDVQGTDASLDEELDRVKMS

SEQ ID NO: 65646 - protein, 291 aa, Homo sapiens
MDSRVSSPEKQDKENFVGVNNKRLGVCGWILFSLSFLLVIITFPISIWMCLKIIKEYERAVVFRLGRIQADKAKGPGLILVLPCIDVFVKVDLRTVTCNIPPQEILTRDSVTTQVDGVVYYRIYSAVSAVANVNDVHQATFLLAQTTLRNVLGTQTLSQILAGREEIAHSIQTLLDDATELWGIRVARVEIKDVRIPVQLQRSMAAEAEATREARAKVLAAEGEMNASKSLKSASMVLAESPIALQLRYLQTLSTVATEKNSTIVFPLPMNILEGIGGVSYDNHKKLPNKA

SEQ ID NO: 65647 - protein, 282 aa, Homo sapiens
MNSRGELVGVNNKRLGVCGWILFSLSFLLVIITFPISIWMCLKIIKEYERAVVFRLGRIQADKAKGPGLILVLPCIDVFVKVDLRTVTCNIPPQEILTRDSVTTQVDGVVYYRIYSAVSAVANVNDVHQATFLLAQTTLRNVLGTQTLSQILAGREEIAHSIQTLLDDATELWGIRVARVEIKDVRIPVQLQRSMAAEAEATREARAKVLAAEGEMNASKSLKSASMVLAESPIALQLRYLQTLSTVATEKNSTIVFPLPMNILEGIGGVSYDNHKKLPNKA

SEQ ID NO: 65648 - protein, 989 aa, Homo sapiens
MARPVQLAPGSLALVLCRLEAQKAAGAAEEPGGRAVFRAFRRANARCFWNARLARAASRLAFQGWLRRGVLLVRAPPACLQVLRDAWRRRALRPPRGFRIRAVGDVFPVQMNPITQSQFVPLGEVLCCAISDMNTAQIVVTQESLLERLMKHYPGIAIPSEDILYTTLGTLIKERKIYHTGEGYFIVTPQTYFITNTTTQENKRMLPSDESRLMPASMTYLVSMESCAESAQENAAPISHCQSCQCFRDMHTQDVQEAPVAAEVTRKSHRGLGESVSWVQNGAVSVSAEHHICESTKPLPYTRDKEKGKKFGFSLLWRSLSRKEKPKTEHSSFSAQFPPEEWPVRDEDDLDNIPRDVEHEIIKRINPILTVDNLIKHTVLMQKYEEQKKYNSQGTSTDMLTIGHKYPSKEGVKKRQGLSAKPQGQGHSRRDRHKARNQGSEFQPGSIRLEKHPKLPATQPIPRIKSPNEMVGQKPLGEITTVLGSHLIYKKRISNPFQGLSHRGSTISKGHKIQKTSDLKPSQTGPKEKPFQKPRSLDSSRIFDGKAKEPYAEQPNDKMEAESIYINDPTVKPINDDFRGHLFSHPQQSMLQNDGKCCPFMESMLRYEVYGGENEVIPEVLRKSHSHFDKLGETKQTPHSLPSRGASFSDRTPSACRLVDNTIHQFQNLGLLDYPVGVNPLRQAARQDKDSEELLRKGFVQDAETTSLENEQLSNDDQALYQNEVEDDDGACSSLYLEEDDISENDDLRQMLPGHSQYSFTGGSQGNHLGKQKVIERSLTEYNSTMERVESQVLKRNECYKPTGLHATPGESQEPNLSAESCGLNSGAQFGFNYEEEPSVAKCVQASAPADERIFDYYSARKASFEAEVIQDTIGDTGKKPASWSQSPQNQEMRKHFPQKFQLFNTSHMPVLAQDVQYEHSHLEGTENHSMAGDSGIDSPRTQSLGSNNSVILDGLKRRQNFLQNVEGTKSSQPLTSNSLLPLTPVINV

SEQ ID NO: 65649 - protein, 169 aa, Homo sapiens
MARPVQLAPGSLALVLCRLEAQKAAGAAEEPGGRAVFRAFRRANARCFWNARLARAASRLAFQGWLRRGVLLVRAPPACLQVLRDAWRRRALRPPRGFRIRAVGDVFPVQMNPITQSQFVPLGEVLCCAISDMNTAQIVVTQESLLERLMKHYPGHRVWDLIIQSFWMD

SEQ ID NO: 65650 - protein, 227 aa, Homo sapiens
MARPVQLAPGSLALVLCRLEAQKAAGAAEEPGGRAVFRAFRRANARCFWNARLARAASRLAFQGWLRRGVLLVRAPPACLQVLRDAWRRRALRPPRGFRIRAVGDVFPVQMNPITQSQFVPLGEVLCCAISDMNTAQIVVTQESLLERLMKHYPGIAIPSEDILYTTLGTLIKERKIYHTGEGYFIVTPQTYFITNTTTQENKRMLPSDESRLMPASMTYLDTESGI

SEQ ID NO: 65651 - protein, 989 aa, Homo sapiens; identical to SEQ ID NO: 65648

SEQ ID NO: 65652 - protein, 879 aa, Homo sapiens
MNPITQSQFVPLGEVLCCAISDMNTAQIVVTQESLLERLMKHYPGIAIPSEDILYTTLGTLIKERKIYHTGEGYFIVTPQTYFITNTTTQENKRMLPSDESRLMPASMTYLVSMESCAESAQENAAPISHCQSCQCFRDMHTQDVQEAPVAAEVTRKSHRGLGESVSWVQNGAVSVSAEHHICESTKPLPYTRDKEKGKKFGFSLLWRSLSRKEKPKTEHSSFSAQFPPEEWPVRDEDDLDNIPRDVEHEIIKRINPILTVDNLIKHTVLMQKYEEQKKYNSQGTSTDMLTIGHKYPSKEGVKKRQGLSAKPQGQGHSRRDRHKARNQGSEFQPGSIRLEKHPKLPATQPIPRIKSPNEMVGQKPLGEITTVLGSHLIYKKRISNPFQGLSHRGSTISKGHKIQKTSDLKPSQTGPKEKPFQKPRSLDSSRIFDGKAKEPYAEQPNDKMEAESIYINDPTVKPINDDFRGHLFSHPQQSMLQNDGKCCPFMESMLRYEVYGGENEVIPEVLRKSHSHFDKLGETKQTPHSLPSRGASFSDRTPSACRLVDNTIHQFQNLGLLDYPVGVNPLRQAARQDKDSEELLRKGFVQDAETTSLENEQLSNDDQALYQNEVEDDDGACSSLYLEEDDISENDDLRQMLPGHSQYSFTGGSQGNHLGKQKVIERSLTEYNSTMERVESQVLKRNECYKPTGLHATPGESQEPNLSAESCGLNSGAQFGFNYEEEPSVAKCVQASAPADERIFDYYSARKASFEAEVIQDTIGDTGKKPASWSQSPQNQEMRKHFPQKFQLFNTSHMPVLAQDVQYEHSHLEGTENHSMAGDSGIDSPRTQSLGSNNSVILDGLKRRQNFLQNVEGTKSSQPLTSNSLLPLTPVINV

SEQ ID NO: 65653 - protein, 1392 aa, Homo sapiens
MVEPGQDLLLAALSESGISPNDLFDIDGGDAGLATPMPTPSVQQSVPLSALELGLETEAAVPVKQEPETVPTPALLNVRQPPSTTTFVLNQINHLPPLGSTIVMTKTPPVTTNRQTITLTKFIQTTASTRPSVSAPTVRNAMTSAPSKDQVQLKDLLKNNSLNELMKLKPPANIAQPVATAATDVSNGTVKKESSNKEGARMWINDMKMRSFSPTMKVPVVKEDDEPEEEDEEEMGHAETYAEYMPIKLKIGLRHPDAVVETSSLSSVTPPDVWYKTSISEETIDNGWLSALQLEAITYAAQQHETFLPNGDRAGFLIGDGAGVGKGRTIAGIIYENYLLSRKRALWFSVSNDLKYDAERDLRDIGAKNILVHSLNKFKYGKISSKHNGSVKKGVIFATYSSLIGESQSGGKYKTRLKQLLHWCGDDFDGVIVFDECHKAKNLCPVGSSKPTKTGLAVLELQNKLPKARVVYASATGASEPRNMAYMNRLGIWGEGTPFREFSDFIQAVERRGVGAMEIVAMDMKLRGMYIARQLSFTGVTFKIEEVLLSQSYVKMYNKAVKLWVIARERFQQAADLIDAEQRMKKSMWGQFWSAHQRFFKYLCIASKVKRVVQLAREEIKNGKCVVIGLQSTGEARTLEALEEGGGELNDFVSTAKGVLQSLIEKHFPAPDRKKLYSLLGIDLTAPSNNSSPRDSPCKENKIKKRKGEEITREAKKARKVGGLTGSSSDDSGSESDASDNEESDYESSKNMSSGDDDDFNPFLDESNEDDENDPWLIRKDHKKNKEKKKKKSIDPDSIQSALLASGLGSKRPSFSSTPVISPAPNSTPANSNTNSNSSLITSQDAVERAQQMKKDLLDKLEKLAEDLPPNTLDELIDELGGPENVAEMTGRKGRVVSNDDGSISYESRSELDVPVEILNITEKQRFMDGDKNIAIISEAASSGISLQADRRAKNQRRRVHMTLELPWSADRAIQQFGRTHRSNQVTAPEYVFLISELAGEQRFASIVAKRLESLGALTHGDRRATESRDLSRFNFDNKYGRNALEIVMKSIVNLDSPMVSPPPDYPGEFFKDVRQGLIGVGLINVEDRSGILTLDKDYNNIGKFLNRILGMEVHQQNALFQYFADTLTAVVQNAKKNGRYDMGILDLGSGDEKVRKSDVKKFLTPGYSTSGHVELYTISVERGMSWEEATKIWAELTGPDDGFYLSLQIRNNKKTAILVKEVNPKKKLFLVYRPNTGKQLKLEIYADLKKKYKKVVSDDALMHWLDQYNSSADTCTHAYWRGNCKKASLGLVCEIGLRCRTYYVLCGSVLSVWTKVEGVLASVSGTNVKMQIVRLRTEDGQRIVGLIIPANCVSPLVNLLSTSDQSQQLAVQQKQLWQQHHPQSITNLSNA

SEQ ID NO: 65654 - protein, 1393 aa, Homo sapiens
MVEPGQDLLLAALSESGISPNDLFDIDGGDAGLATPMPTPSVQQSVPLSALELGLETEAAVPVKQEPETVPTPALLNVRQQPPSTTTFVLNQINHLPPLGSTIVMTKTPPVTTNRQTITLTKFIQTTASTRPSVSAPTVRNAMTSAPSKDQVQLKDLLKNNSLNELMKLKPPANIAQPVATAATDVSNGTVKKESSNKEGARMWINDMKMRSFSPTMKVPVVKEDDEPEEEDEEEMGHAETYAEYMPIKLKIGLRHPDAVVETSSLSSVTPPDVWYKTSISEETIDNGWLSALQLEAITYAAQQHETFLPNGDRAGFLIGDGAGVGKGRTIAGIIYENYLLSRKRALWFSVSNDLKYDAERDLRDIGAKNILVHSLNKFKYGKISSKHNGSVKKGVIFATYSSLIGESQSGGKYKTRLKQLLHWCGDDFDGVIVFDECHKAKNLCPVGSSKPTKTGLAVLELQNKLPKARVVYASATGASEPRNMAYMNRLGIWGEGTPFREFSDFIQAVERRGVGAMEIVAMDMKLRGMYIARQLSFTGVTFKIEEVLLSQSYVKMYNKAVKLWVIARERFQQAADLIDAEQRMKKSMWGQFWSAHQRFFKYLCIASKVKRVVQLAREEIKNGKCVVIGLQSTGEARTLEALEEGGGELNDFVSTAKGVLQSLIEKHFPAPDRKKLYSLLGIDLTAPSNNSSPRDSPCKENKIKKRKGEEITREAKKARKVGGLTGSSSDDSGSESDASDNEESDYESSKNMSSGDDDDFNPFLDESNEDDENDPWLIRKDHKKNKEKKKKKSIDPDSIQSALLASGLGSKRPSFSSTPVISPAPNSTPANSNTNSNSSLITSQDAVERAQQMKKDLLDKLEKLAEDLPPNTLDELIDELGGPENVAEMTGRKGRVVSNDDGSISYESRSELDVPVEILNITEKQRFMDGDKNIAIISEAASSGISLQADRRAKNQRRRVHMTLELPWSADRAIQQFGRTHRSNQVTAPEYVFLISELAGEQRFASIVAKRLESLGALTHGDRRATESRDLSRFNFDNKYGRNALEIVMKSIVNLDSPMVSPPPDYPGEFFKDVRQGLIGVGLINVEDRSGILTLDKDYNNIGKFLNRILGMEVHQQNALFQYFADTLTAVVQNAKKNGRYDMGILDLGSGDEKVRKSDVKKFLTPGYSTSGHVELYTISVERGMSWEEATKIWAELTGPDDGFYLSLQIRNNKKTAILVKEVNPKKKLFLVYRPNTGKQLKLEIYADLKKKYKKVVSDDALMHWLDQYNSSADTCTHAYWRGNCKKASLGLVCEIGLRCRTYYVLCGSVLSVWTKVEGVLASVSGTNVKMQIVRLRTEDGQRIVGLIIPANCVSPLVNLLSTSDQSQQLAVQQKQLWQQHHPQSITNLSNA

SEQ ID NO: 65655 - protein, 732 aa, Homo sapiens
MVEPGQDLLLAALSESGISPNDLFDIDGGDAGLATPMPTPSVQQSVPLSALELGLETEAAVPVKQEPETVPTPALLNVRQPPSTTTFVLNQINHLPPLGSTIVMTKTPPVTTNRQTITLTKFIQTTASTRPSVSAPTVRNAMTSAPSKDQVQLKDLLKNNSLNELMKLKPPANIAQPVATAATDVSNGTVKKESSNKEGARMWINDMKMRSFSPTMKVPVVKEDDEPEEEDEEEMGHAETYAEYMPIKLKIGLRHPDAVVETSSLSSVTPPDVWYKTSISEETIDNGWLSALQLEAITYAAQQHETFLPNGDRAGFLIGDGAGVGKGRTIAGIIYENYLLSRKRALWFSVSNDLKYDAERDLRDIGAKNILVHSLNKFKYGKISSKHNGSVKKGVIFATYSSLIGESQSGGKYKTRLKQLLHWCGDDFDGVIVFDECHKAKNLCPVGSSKPTKTGLAVLELQNKLPKARVVYASATGASEPRNMAYMNRLGIWGEGTPFREFSDFIQAVERRGVGAMEIVAMDMKLRGMYIARQLSFTGVTFKIEEVLLSQSYVKMYNKAVKLWVIARERFQQAADLIDAEQRMKKSMWGQFWSAHQRFFKYLCIASKVKRVVQLAREEIKNGKCVVIGLQSTGEARTLEALEEGGGELNDFVSTAKGVLQSLIEKHFPAPDRKKLYSLLGIDLTAPSNNSSPRDSPCKENKIKKRKGEEITREAKKARKMSLMRMMKMVSS

SEQ ID NO: 65656 - protein, 543 aa, Homo sapiens
MEQVNELKEKGNKALSVGNIDDALQCYSEAIKLDPHNHVLYSNRSAAYAKKGDYQKAYEDGCKTVDLKPDWGKGYSRKAAALEFLNRFEEAKRTYEEGLKHEANNPQLKEGLQNMEARLAERKFMNPFNMPNLYQKLESDPRTRTLLSDPTYRELIEQLRNKPSDLGTKLQDPRIMTTLSVLLGVDLGSMDEEEEIATPPPPPPPKKETKPEPMEEDLPENKKQALKEKELGNDAYKKKDFDTALKHYDKAKELDPTNMTYITNQAAVYFEKGDYNKCRELCEKAIEVGRENREDYRQIAKAYARIGNSYFKEEKYKDAIHFYNKSLAEHRTPDVLKKCQQAEKILKEQERLAYINPDLALEEKNKGNECFQKGDYPQAMKHYTEAIKRNPKDAKLYSNRAACYTKLLEFQLALKDCEECIQLEPTFIKGYTRKAAALEAMKDYTKAMDVYQKALDLDSSCKEAADGYQRCMMAQYNRHDSPEDVKRRAMADPEVQQIMSDPAMRLILEQMQKDPQALSEHLKNPVIAQKIQKLMDVGLIAIR

SEQ ID NO: 65657 - protein, 1268 aa, Homo sapiens
MIAAPEIPTDFNLLQESETHFSSDTDFEDIEGKNQKQGKGKTCKKGKKGPAEKGKGGNGGGKPPSGPNRMNGHHQQNGVENMMLFEVVKMGKSAMQSVVDDWIESYKHDRDIALLDLINFFIQCSGCKGVVTAEMFRHMQNSEIIRKMTEEFDEDSGDYPLTMAGPQWKKFKSSFCEFIGVLVRQCQYSIIYDEYMMDTVISLLTGLSDSQVRAFRHTSTLAAMKLMTALVNVALNLSINMDNTQRQYEAERNKMIGKRANERLELLLQKRKELQENQDEIENMMNAIFKGVFVHRYRDAIAEIRAICIEEIGIWMKMYSDAFLNDSYLKYVGWTMHDKQGEVRLKCLTALQGLYYNKELNSKLELFTSRFKDRIVSMTLDKEYDVAVQAIKLLTLVLQSSEEVLTAEDCENVYHLVYSAHRPVAVAAGEFLYKKLFSRRDPEEDGMMKRRGRQGPNANLVKTLVFFFLESELHEHAAYLVDSMWDCATELLKDWECMNSLLLEEPLSGEEALTDRQESALIEIMLCTIRQAAECHPPVGRGTGKRVLTAKEKKTQLDDRTKITELFAVALPQLLAKYSVDAEKVTNLLQLPQYFDLEIYTTGRLEKHLDALLRQIRNIVEKHTDTDVLEACSKTYHALCNEEFTIFNRVDISRSQLIDELADKFNRLLEDFLQEGEEPDEDDAYQVLSTLKRITAFHNAHDLSKWDLFACNYKLLKTGIENGDMPEQIVIHALQCTHYVILWQLAKITESSSTKEDLLRLKKQMRVFCQICQHYLTNVNTTVKEQAFTILCDILMIFSHQIMSGGRDMLEPLVYTPDSSLQSELLSFILDHVFIEQDDDNNSADGQQEDEASKIEALHKRRNLLAAFCKLIVYTVVEMNTAADIFKQYMKYYNDYGDIIKETMSKTRQIDKIQCAKTLILSLQQLFNEMIQENGYNFDRSSSTFSGIKELARRFALTFGLDQLKTREAIAMLHKDGIEFAFKEPNPQGESHPPLNLAFLDILSEFSSKLLRQDKRTVYVYLEKFMTFQMSLRREDVWLPLMSYRNSLLAGGDDDTMSVISGISSRGSTVRSKKSKPSTGKRKVVEGMQLSLTEESSSSDSMWLSREQTLHTPVMMQTPQLTSTIMREPKRLRPEDSFMSVYPMQTEHHQTPLDYNTQVTWMLAQRQQEEARQQQERAAMSYVKLRTNLQHAIRRGTSLMEDDEEPIVEDVMMSSEGRIEDLNEGMDFDTMDIDLPPSKNRRERTELKPDFFDPASIMDESVLGVSMF

SEQ ID NO: 65658 - protein, 1162 aa, Homo sapiens
MNGHHQQNGVENMMLFEVVKMGKSAMQSVVDDWIESYKHDRDIALLDLINFFIQCSGCKGVVTAEMFRHMQNSEIIRKMTEEFDEDSGDYPLTMAGPQWKKFKSSFCEFIGVLVRQCQYSIIYDEYMMDTVISLLTGLSDSQVRAFRHTSTLAAMKLMTALVNVALNLSINMDNTQRQYEAERNKMIGKRANERLELLLQKRKELQENQDEIENMMNAIFKGVFVHRYRDAIAEIRAICIEEIGIWMKMYSDAFLNDSYLKYVGWTMHDKQGEVRLKCLTALQGLYYNKELNSKLELFTSRFKDRIVSMTLDKEYDVAVQAIKLLTLVLQSSEEVLTAEDCENVYHLVYSAHRPVAVAAGEFLYKKLFSRRDPEEDGMMKRRGRQGPNANLVKTLVFFFLESELHEHAAYLVDSMWDCATELLKDWECMNSLLLEEPLSGEEALTDRQESALIEIMLCTIRQAAECHPPVGRGTGKRVLTAKEKKTQLDDRTKITELFAVALPQLLAKYSVDAEKVTNLLQLPQYFDLEIYTTGRLEKHLDALLRQIRNIVEKHTDTDVLEACSKTYHALCNEEFTIFNRVDISRSQLIDELADKFNRLLEDFLQEGEEPDEDDAYQVLSTLKRITAFHNAHDLSKWDLFACNYKLLKTGIENGDMPEQIVIHALQCTHYVILWQLAKITESSSTKEDLLRLKKQMRVFCQICQHYLTNVNTTVKEQAFTILCDILMIFSHQIMSGGRDMLEPLVYTPDSSLQSELLSFILDHVFIEQDDDNNSADGQQEDEASKIEALHKRRNLLAAFCKLIVYTVVEMNTAADIFKQYMKYYNDYGDIIKETMSKTRQIDKIQCAKTLILSLQQLFNEMIQENGYNFDRSSSTFSGIKELARRFALTFGLDQLKTREAIAMLHKDGIEFAFKEPNPQGESHPPLNLAFLDILSEFSSKLLRQDKRTVYVYLEKFMTFQMSLRREDVWLPLMSYRNSLLAGGDDDTMSVISGISSRGSTVRSKKSKPSTGKRKVVEGMQLSLTEESSSSDSMWLSREQTLHTPVMMQTPQLTSTIMREPKRLRPEDSFMSVYPMQTEHHQTPLDYNRRGTSLMEDDEEPIVEDVMMSSEGRIEDLNEGMDFDTMDIDLPPSKNRRERTELKPDFFDPASIMDESVLGVSMF

SEQ ID NO: 65659 - protein, 1231 aa, Homo sapiens
MIAAPEIPTDFNLLQESETHFSSDTDFEDIEGKNQKQGKGKTCKKGKKGPAEKGKGGNGGGKPPSGPNRMNGHHQQNGVENMMLFEVVKMGKSAMQSVVDDWIESYKHDRDIALLDLINFFIQCSGCKGVVTAEMFRHMQNSEIIRKMTEEFDEDSGDYPLTMAGPQWKKFKSSFCEFIGVLVRQCQYSIIYDEYMMDTVISLLTGLSDSQVRAFRHTSTLAAMKLMTALVNVALNLSINMDNTQRQYEAERNKMIGKRANERLELLLQKRKELQENQDEIENMMNAIFKGVFVHRYRDAIAEIRAICIEEIGIWMKMYSDAFLNDSYLKYVGWTMHDKQGEVRLKCLTALQGLYYNKELNSKLELFTSRFKDRIVSMTLDKEYDVAVQAIKLLTLVLQSSEEVLTAEDCENVYHLVYSAHRPVAVAAGEFLYKKLFSRRDPEEDGMMKRRGRQGPNANLVKTLVFFFLESELHEHAAYLVDSMWDCATELLKDWECMNSLLLEEPLSGEEALTDRQESALIEIMLCTIRQAAECHPPVGRGTGKRVLTAKEKKTQLDDRTKITELFAVALPQLLAKYSVDAEKVTNLLQLPQYFDLEIYTTGRLEKHLDALLRQIRNIVEKHTDTDVLEACSKTYHALCNEEFTIFNRVDISRSQLIDELADKFNRLLEDFLQEGEEPDEDDAYQVLSTLKRITAFHNAHDLSKWDLFACNYKLLKTGIENGDMPEQIVIHALQCTHYVILWQLAKITESSSTKEDLLRLKKQMRVFCQICQHYLTNVNTTVKEQAFTILCDILMIFSHQIMSGGRDMLEPLVYTPDSSLQSELLSFILDHVFIEQDDDNNSADGQQEDEASKIEALHKRRNLLAAFCKLIVYTVVEMNTAADIFKQYMKYYNDYGDIIKETMSKTRQIDKIQCAKTLILSLQQLFNEMIQENGYNFDRSSSTFSGIKELARRFALTFGLDQLKTREAIAMLHKDGIEFAFKEPNPQGESHPPLNLAFLDILSEFSSKLLRQDKRTVYVYLEKFMTFQMSLRREDVWLPLMSYRNSLLAGGDDDTMSVISGISSRGSTVRSKKSKPSTGKRKVVEGMQLSLTEESSSSDSMWLSREQTLHTPVMMQTPQLTSTIMREPKRLRPEDSFMSVYPMQTEHHQTPLDYNRRGTSLMEDDEEPIVEDVMMSSEGRIEDLNEGMDFDTMDIDLPPSKNRRERTELKPDFFDPASIMDESVLGVSMF

SEQ ID NO: 65660 - protein, 1268 aa, Homo sapiens; identical to SEQ ID NO: 65657

SEQ ID NO: 65661 - protein, 1231 aa, Homo sapiens; identical to SEQ ID NO: 65659

SEQ ID NO: 65662 - protein, 1231 aa, Homo sapiens; identical to SEQ ID NO: 65659

SEQ ID NO: 65663 - protein, 70 aa, Homo sapiens
MIAAPEIPTDFNLLQESETHFSSDTDFEDIEGKNQKQGKGKTCKKGKKGPAEKGKGGNGGGKPPSGPNRM

SEQ ID NO: 65664 - protein, 115 aa, Homo sapiens
MIAAPEIPTDFNLLQESETHFSSDTDFEDIEGKNQKQGKGKTCKKGKKGPAEKGKGGNGGGKPPSGPNRMNGHHQQNGVENMMLFEVVKMGKSAMQSVVDDWIESYKHDRDIALL

SEQ ID NO: 65665 - protein, 169 aa, Homo sapiens
MIAAPEIPTDFNLLQESETHFSSDTDFEDIEGKNQKQGKGKTCKKGKKGPAEKGKGGNGGGKPPSGPNRMNGHHQQNGVENMMLFEVVKMGKSAMQSVVDDWIESYKHDRDIALLDLINFFIQCSGCKGVVTAEMFRHMQNSEIIRKMTEEFDEDSGDYPLTMAGPQWK

SEQ ID NO: 65666 - protein, 154 aa, Homo sapiens
MIAAPEIPTDFNLLQESETHFSSDTDFEDIEGKNQKQGKGKTCKKGKKGPAEKGKGGNGGGKPPSGPNRMNGHHQQNGVENMMLFEVVKMGKSAMQSVVDDWIESYKHDRDIALLDLINFFIQCSGCKGVVTAEMFRHMQNSEIIRKMTEEFDE

SEQ ID NO: 65667 - protein, 208 aa, Homo sapiens
MIAAPEIPTDFNLLQESETHFSSDTDFEDIEGKNQKQGKGKTCKKGKKGPAEKGKGGNGGGKPPSGPNRMNGHHQQNGVENMMLFEVVKMGKSAMQSVVDDWIESYKHDRDIALLDLINFFIQCSGCKGVVTAEMFRHMQNSEIIRKMTEEFDEDSGDYPLTMAGPQWKKFKSSFCEFIGVLVRQCQYSIIYDEYMMDTVISLLTGLS

SEQ ID NO: 65668 - protein, 548 aa, Homo sapiens
MIAAPEIPTDFNLLQESETHFSSDTDFEDIEGKNQKQGKGKTCKKGKKGPAEKGKGGNGGGKPPSGPNRMNGHHQQNGVENMMLFEVVKMGKSAMQSVVDDWIESYKHDRDIALLDLINFFIQCSGCKGVVTAEMFRHMQNSEIIRKMTEEFDEDSGDYPLTMAGPQWKKFKSSFCEFIGVLVRQCQYSIIYDEYMMDTVISLLTGLSDSQVRAFRHTSTLAAMKLMTALVNVALNLSINMDNTQRQYEAERNKMIGKRANERLELLLQKRKELQENQDEIENMMNAIFKGVFVHRYRDAIAEIRAICIEEIGIWMKMYSDAFLNDSYLKYVGWTMHDKQGEVRLKCLTALQGLYYNKELNSKLELFTSRFKDRIVSMTLDKEYDVAVQAIKLLTLVLQSSEEVLTAEDCENVYHLVYSAHRPVAVAAGEFLYKKLFSRRDPEEDGMMKRRGRQGPNANLVKTLVFFFLESELHEHAAYLVDSMWDCATELLKDWECMNSLLLEEPLSGEEALTDRQESALIEIMLCTIRQAAECHPPVGRGTGKRVL

SEQ ID NO: 65669 - protein, 40 aa, Homo sapiens
MIAAPEIPTDFNLLQESETHFSSDTDFEDIEGKNQKQGKG

SEQ ID NO: 65670 - protein, 1225 aa, Homo sapiens
MSSPLQRAVGDTKRALSASSSSSASLPFDDRDSNHTSEGNGDSLLADEDTDFEDSLNRNVKKRAAKRPPKTTPVAKHPKKGSRVVHRHSRKQSEPPANDLFNAVKAAKSDMQSLVDEWLDSYKQDQDAGFLELVNFFIQSCGCKGIVTPEMFKKMSNSEIIQHLTEQFNEDSGDYPLIAPGPSWKKFQGSFCEFVRTLVCQCQYSLLYDGFPMDDLISLLTGLSDSQVRAFRHTSTLAAMKLMTSLVKVALQLSVHQDNNQRQYEAERNKGPGQRAPERLESLLEKRKELQEHQEEIEGMMNALFRGVFVHRYRDVLPEIRAICIEEIGCWMQSYSTSFLTDSYLKYIGWTLHDKHREVRLKCVKALKGLYGNRDLTTRLELFTSRFKDRMVSMVMDREYDVAVEAVRLLILILKNMEGVLTDADCESVYPVVYASHRGLASAAGEFLYWKLFYPECEIRMMGGREQRQSPGAQRTFFQLLLSFFVESELHDHAAYLVDSLWDCAGARLKDWEGLTSLLLEKDQNLGDVQESTLIEILVSSARQASEGHPPVGRVTGRKGLTSKERKTQADDRVKLTEHLIPLLPQLLAKFSADAEKVTPLLQLLSCFDLHIYCTGRLEKHLELFLQQLQEVVVKHAEPAVLEAGAHALYLLCNPEFTFFSRADFARSQLVDLLTDRFQQELEELLQSSFLDEDEVYNLAATLKRLSAFYNTHDLTRWELYEPCCQLLQKAVDTGEVPHQVILPALTLVYFSILWTLTHISKSDASQKQLSSLRDRMVAFCELCQSCLSDVDTEIQEQAFVLLSDLLLIFSPQMIVGGRDFLRPLVFFPEATLQSELASFLMDHVFIQPGDLGSGDSQEDHLQIERLHQRRRLLAGFCKLLLYGVLEMDAASDVFKHYNKFYNDYGDIIKETLTRARQIDRSHCSRILLLSLKQLYTELLQEHGPQGLNELPAFIEMRDLARRFALSFGPQQLQNRDLVVMLHKEGIQFSLSELPPAGSSNQPPNLAFLELLSEFSPRLFHQDKQLLLSYLEKCLQHVSQAPGHPWGPVTTYCHSLSPVENTAETSPQVLPSSKRRRVEGPAKPNREDVSSSQEESLQLNSIPPTPTLTSTAVKSRQPLWGLKEMEEEDGSELDFAQGQPVAGTERSRFLGPQYFQTPHNPSGPGLGNQLMRLSLMEEDEEEELEIQDESNEERQDTDMQASSYSSTSERGLDLLDSTELDIEDF

SEQ ID NO: 65671 - protein, 888 aa, Homo sapiens
MSSPLQRAVGDTKRALSASSSSSASLPFDDRDSNHTSEGNGDSLLADEDTDFEDSLNRNVKKRAAKRPPKTTPVAKHPKKGSRVVHRHSRKQSEPPANDLFNAVKAAKSDMQSLVDEWLDSYKQDQDAGFLELVNFFIQSCGCKGIVTPEMFKKMSNSEIIQHLTEQFNEMDDLISLLTGLSDSQVRAFRHTSTLAAMKLMTSLVKVALQLSVHQDNNQRQYEAERNKGPGQRAPERLESLLEKRKELQEHQEEIEGMMNALFRGVFVHRYRDVLPEIRAICIEEIGCWMQSYSTSFLTDSYLKYIGWTLHDKHREVRLKCVKALKGLYGNRDLTTRLELFTSRFKDRMVSMVMDREYDVAVEAVRLLILILKNMEGVLTDADCESVYPVVYASHRGLASAAGEFLYWKLFYPECEIRMMGGREQRQSPGAQRTFFQLLLSFFVESELHDHAAYLVDSLWDCAGARLKDWEGLTSLLLEKDQNLGDVQESTLIEILVSSARQASEGHPPVGRVTGRKGLTSKERKTQADDRVKLTEHLIPLLPQLLAKFSADAEKVTPLLQLLSCFDLHIYCTGRLEKHLELFLQQLQEVVVKHAEPAVLEAGAHALYLLCNPEFTFFSRADFARSQLVDLLTDRFQQELEELLQSSFLDEDEVYNLAATLKRLSAFYNTHDLTRWELYEPCCQLLQKAVDTGEVPHQVILPALTLVYFSILWTLTHSLSPVENTAETSPQVLPSSKRRRVEGPAKPNREDVSSSQEESLQLNSIPPTPTLTSTAVKSRQPLWGLKEMEEEDGSELDFAQGQPVAGTERSRFLGPQYFQTPHNPSGPGLGNQLMRLSLMEEDEEEELEIQDESNEERQDTDMQASSYSSTSERGLDLLDSTELDIEDF

SEQ ID NO: 65672 - protein, 262 aa, Homo sapiens
MLHKEGIQFSLSELPPAGSSNQPPNLAFLELLSEFSPRLFHQDKQLLLSYLEKCLQHVSQAPGHPWGPVTTYCHSLSPVENTAETSPQVLPSSKRRRVEGPAKPNREDVSSSQEESLQLNSIPPTPTLTSTAVKSRQPLWGLKEMEEEDGSELDFAQGSQPVAGTERSRFLGPQYFQTPHNPSGPGLGNQLMRLSLMEEDEEEELEIQDESNEERQDTDMQASSYSSTSERGLDLLDSTELDIEITESLPLLGKSPHPYNSR

SEQ ID NO: 65673 - protein, 145 aa, Homo sapiens
MSSPLQRAVGDTKRALSASSSSSASLPFDDRDSNHTSEGNGDSLLADEDTDFEDSLNRNVKKRAAKRPPKTTPVAKHPKKGSRVVHRHSRKQSEPPANDLFNAVKAAKSDMQSLVDEWLDSYKQDQDAGFLELVNFFIQSCGCKG

SEQ ID NO: 65674 - protein, 112 aa, Homo sapiens
MSSPLQRAVGDTKRALSASSSSSASLPFDDRDSNHTSEGNGDSLLADEDTDFEDSLNRNVKKRAAKRPPKTTPVAKHPKKGSRVVHRHSRKQSEPPANDLFNAVKAAKSDMQ

SEQ ID NO: 65675 - protein, 1225 aa, Homo sapiens; identical to SEQ ID NO: 65670

SEQ ID NO: 65676 - protein, 188 aa, Homo sapiens
MSSPLQRAVGDTKRALSASSSSSASLPFDDRDSNHTSEGNGDSLLADEDTDFEDSLNRNVKKRAAKRPPKTTPVAKHPKKGSRVVHRHSRKQSEPPANDLFNAVKAAKSDMQDSGDYPLIAPGPSWKKFQGSFCEFVRTLVCQCQYSLLYDGFPMDDLISLLTGLSDSQVRAFRHTSTLAAMKLMTSL

SEQ ID NO: 65677 - protein, 348 aa, Homo sapiens
MVWPWVAMASRWGPLIGLAPCCLWLLGAVLLMDASARPANHSSTRERVANREENEILPPDHLNGVKLEMDGHLNRGFHQEVFLGKDLGGFDEDAEPRRSRRKLMVIFSKVDVNTDRKISAKEMQRWIMEKTAEHFQEAMEESKTHFRAVDPDGDGHVSWDEYKVKFLASKGHSEKEVADAIRLNEELKVDEETQEVLENLKDRWYQADSPPADLLLTEEEFLSFLHPEHSRGMLRFMVKEIVRDLDQDGDKQLSVPEFISLPVGTVENQQGQDIDDNWVKDRKKEFEELIDSNHDGIVTAEELENVPTLPLQPIGTLNSHFVRLAAELGGGKATLTCAPLARRATWTP

SEQ ID NO: 65678 - protein, 362 aa, Homo sapiens
MVWPWVAMASRWGPLIGLAPCCLWLLGAVLLMDASARPANHSSTRERVANREENEILPPDHLNGVKLEMDGHLNRGFHQEVFLGKDLGGFDEDAEPRRSRRKLMVIFSKVDVNTDRKISAKEMQRWIMEKTAEHFQEAMEESKTHFRAVDPDGDGHVSWDEYKVKFLASKGHSEKEVADAIRLNEELKVDEETQEVLENLKDRWYQADSPPADLLLTEEEFLSFLHPEHSRGMLRFMVKEIVRDLDQDGDKQLSVPEFISLPVGTVENQQGQDIDDNWVKDRKKEFEELIDSNHDGIVTAEELESYMDPMNEYNALNEAKQMIAVADENQNHHLEPEEVLKYSEFFTGSKLVDYARSVHEEF

SEQ ID NO: 65679 - protein, 243 aa, Homo sapiens
  VARIANT 1: note = MOD_RES - Any amino acid
XLEMDGHLNRGFHQEVFLGKDLGGFDEDAEPRRSRRKLMVIFSKVDVNTDRKISAKEMQRWIMEKTAEHFQEAMEESKTHFRAVDPDGDGHVSWDEYKVKFLASKGHSEKEVADAIRLNEELKVDEESSTSRNFLDLRAGVCRPRYPQAAPLSAQEVLENLKDRWYQADSPPADLLLTEEEFLSFLHPEHSRGMLRFMVKEIVRDLDQDGDKQLSVPEFISLPVGTVENQQGQDIDDNWVKDR

SEQ ID NO: 65680 - protein, 202 aa, Homo sapiens
MVWPWVAMASRWGPLIGLAPCCLWLLGAVLLMDASARPANHSSTRERVANREENEILPPDHLNGVKLEMDGHLNRGFHQEVFLGKDLGGFDEDAEPRRSRRKLMVIFSKVDVNTDRKISAKEMQRWIMEKTAEHFQEAMEESKTHFRAVDPDGDGHVSWDEYKVKFLASKGHSEKEVADAIRLNEELKVDEERHGPPGPRAL

SEQ ID NO: 65681 - protein, 211 aa, Homo sapiens
MAVVPLLLLGGLWSAVGASSLGVVTCGSVVKLLNTRHNVRLHSHDVRYGSGSGQQSVTGVTSVDDSNSYWRIRGKSATVCERGTPIKCGQPIRLTHVNTGRNLHSHHFTSPLSGNQEVSAFGEEGEGDYLDDWTVLCNGPYWVRDGEVRFKHSSTEVLLSVTGEQYGRPISGQKEVHGMAQPSQNNYWKAMEGIFMKPSELLKAEAHHAEL

SEQ ID NO: 65682 - protein, 221 aa, Homo sapiens
MWSAGRGGAAWPVLLGLLLALLVPGGGAAKTGAELVTCGSVLKLLNTHHRVRLHSHDIKYGSGSGQQSVTGVEASDDANSYWRIRGGSEGGCPRGSPVRCGQAVRLTHVLTGKNLHTHHFPSPLSNNQEVSAFGEDGEGDDLDLWTVRCSGQHWEREAAVRFQHVGTSVFLSVTGEQYGSPIRGQHEVHGMPSANTHNTWKAMEGIFIKPSVEPSAGHDEL

SEQ ID NO: 65683 - protein, 685 aa, Homo sapiens
MDVCVRLALWLLWGLLLHQGQSLSHSHSEKATGTSSGANSEESTAAEFCRIDKPLCHSEDEKLSFEAVRNIHKLMDDDANGDVDVEESDEFLREDLNYHDPTVKHSTFHGEDKLISVEDLWKAWKSSEVYNWTVDEVVQWLITYVELPQYEETFRKLQLSGHAMPRLAVTNTTMTGTVLKMTDRSHRQKLQLKALDTVLFGPPLLTRHNHLKDFMLVVSIVIGVGGCWFAYIQNRYSKEHMKKMMKDLEGLHRAEQSLHDLQERLHKAQEEHRTVEVEKVHLEKKLRDEINLAKQEAQRLKELREGTENERSRQKYAEEELEQVREALRKAEKELESHSSWYAPEALQKWLQLTHEVEVQYYNIKKQNAEKQLLVAKEGAEKIKKKRNTLFGTFHVAHSSSLDDVDHKILTAKQALSEVTAALRERLHRWQQIEILCGFQIVNNPGIHSLVAALNIDPSWMGSTRPNPAHFIMTDDVDDMDEEIVSPLSMQSPSLQSSVRQRLTEPQHGLGSQRDLTHSDSESSLHMSDRQRVAPKPPQMSRAADEALNAMTSNGSHRLIEGVHPGSLVEKLPDSPALAKKALLALNHGLDKAHSLMELSPSAPPGGSPHLDSSRSHSPSSPDPDTPSPVGDSRALQASRNTRIPHLAGKKAVAEEDNGSIGEETDSSPGRKKFPLKIFKKPLKK

SEQ ID NO: 65684 - protein, 833 aa, Homo sapiens
MNAAGIRAPEAAGADGTRLAPGGSPCLRRRGRPEESPAAVVAPRGAGELQAAGAPLRFHPASPRRLHPASTPGPAWGWLLRRRRWAALLVLGLLVAGAADGCELVPRHLRGRRATGSAATAASSPAAAAGDSPALMTDPCMSLSPPCFTEEDRFSLEALQTIHKQMDDDKDGGIEVEESDEFIREDMKYKDATNKHSHLHREDKHITIEDLWKRWKTSEVHNWTLEDTLQWLIEFVELPQYEKNFRDNNVKGTTLPRIAVHEPSFMISQLKISDRSHRQKLQLKALDVVLFGPLTRPPHNWMKDFILTVSIVIGVGGCWFAYTQNKTSKEHVAKMMKDLESLQTAEQSLMDLQERLEKAQEENRNVAVEKQNLERKMMDEINYAKEEACRLRELREGAECELSRRQYAEQELEQVRMALKKAEKEFELRSSWSVPDALQKWLQLTHEVEVQYYNIKRQNAEMQLAIAKDEAEKIKKKRSTVFGTLHVAHSSSLDEVDHKILEAKKALSELTTCLRERLFRWQQIEKICGFQIAHNSGLPSLTSSLYSDHSWVVMPRVSIPPYPIAGGVDDLDEDTPPIVSQFPGTMAKPPGSLARSSSLCRSRRSIVPSSPQPQRAQLAPHAPHPSHPRHPHHPQHTPHSLPSPDPDILSVSSCPALYRNEEEEEAIYFSAEKQWEVPDTASECDSLNSSIGRKQSPPLSLEIYQTLSPRKISRDEVSLEDSSRGDSPVTVDVSWGSPDCVGLTETKSMIFSPASKVYNGILEKSCSMNQLSSGIPVPKPRHTSCSSAGNDSKPVQEAPSVARISSIPHDLCHNGEKSKKPSKIKSLFKKKSK

SEQ ID NO: 65685 - protein, 841 aa, Homo sapiens [sequence omitted]

SEQ ID NO: 65686 - protein, 686 aa, Homo sapiens
MNAAGIRAPEAAGADGTRLAPGGSPCLRRRGRPEESPAAVVAPRGAGELQAAGAPLRFHPASPRRLHPASTPGPAWGWLLRRRRWAALLVLGLLVAGAADGCELVPRHLRGRRATGSAATAASSPAAAAGDSPALMTDPCMSLSPPCFTEEDRFSLEALQTIHKQMDDDKDGGIEVEESDEFIREDMKYKDATNKHSHLHREDKHITIEDLWKRWKTSEVHNWTLEDTLQWLIEFVELPQYEKNFRDNNVKGTTLPRIAVHEPSFMISQLKISDRSHRQKLQLKALDVVLFGPLTRPPHNWMKDFILTVSIVIGVGGCWFAYTQNKTSKEHVAKMMKDLESLQTAEQSLMDLQERLEKAQEENRNVAVEKQNLERKMMDEINYAKEEACRLRELREGAECELSRRQYAEQELEQVRMALKKAEKEFELRSSWSVPDALQKWLQLTHEVEVQYYNIKRQNAEMQLAIAKDEAEKIKKKRSTVFGTLHVAHSSSLDEVDHKILEAKKALSELTTCLRERLFRWQQIEKICGFQIAHNSGLPSLTSSLYSDHSWVVMPRVSIPPYPIAGGVDDLDEDTPPIVSQFPGTMAKPPGSLARSSSLCRSRRSIVPSSPQPQRAQLAPHAPHPSHPRHPHHPQHTPHSLPSPDPDILSVSSCPALYRNEEEEEAIYFSAEKQCIHLGLGACKSE

SEQ ID NO: 65687 - protein, 746 aa, Homo sapiens
LLVLGLLVAGAADGCELVPRHLRGRRATGSAATAASSPAAAAGDSPALMTDPCMSLSPPCFTEEDRFSLEALQTIHKQMDDDKDGGIEVEESDEFIREDMKYKDATNKHSHLHREDKHITIEDLWKRWKTSEVHNWTLEDTLQWLIEFVELPQYEKNFRDNNVKGTTLPRIAVHEPSFMISQLKISDRSHRQKLQLKALDVVLFGPLTRPPHNWMKDFILTVSIVIGVGGCWFAYTQNKTSKEHVAKMMKDLESLQTAEQSLMDLQERLEKAQEENRNVAVEKQNLERKMMDEINYAKEEACRLRELREGAECELSRRQYAEQELEQVRMALKKAEKEFELRSSWSVPDALQKWLQLTHEVEVQYYNIKRQNAEMQLAIAKDEAEKIKKKRSTVFGTLHVAHSSSLDEVDHKILEAKKALSELTTCLRERLFRWQQIEKICGFQIAHNSGLPSLTSSLYSDHSWVVMPRVSIPPYPIAGGVDDLDEDTPPIVSQFPGTMAKPPGSLARSSSLCRSRRSIVPSSPQPQRAQLAPHAPHPSHPRHPHHPQHTPHSLPSPDPDILSVSSCPALYRNEEEEEAIYFSAEKQWEVPDTASECDSLNSSIGRKQSPPLSLEIYQTLSPRKISRDEVSLEDSSRGDSPVTVDVSWGSPDCVGLTETKSMIFSPASKVYNGILEKSCSMNQLSSGIPVPKPRHTSCSSAGNDSKPVQEAPSVARISSIPHDLCHNGEKSKKPSKIKSLFKKKSK

SEQ ID NO: 65688 - protein, 754 aa, Homo sapiens
LLVLGLLVAGAADGCELVPRHLRGRRATGSAATAASSPAAAAGDSPALMTDPCMSLSPPCFTEEDRFSLEALQTIHKQMDDDKDGGIEVEESDEFIREDMKYKDATNKHSHLHREDKHITIEDLWKRWKTSEVHNWTLEDTLQWLIEFVELPQYEKNFRDNNVKGTTLPRIAVHEPSFMISQLKISDRSHRQKLQLKALDVVLFGPLTRPPHNWMKDFILTVSIVIGVGGCWFAYTQNKTSKEHVAKMMKDLESLQTAEQSLMDLQERLEKAQEENRNVAVEKQNLERKMMDEINYAKEEACRLRELREGAECELSRRQYAEQELEQVRMALKKAEKEFELRSSWSVPDALQKWLQLTHEVEVQYYNIKRQNAEMQLAIAKDEVAASYLIQAEKIKKKRSTVFGTLHVAHSSSLDEVDHKILEAKKALSELTTCLRERLFRWQQIEKICGFQIAHNSGLPSLTSSLYSDHSWVVMPRVSIPPYPIAGGVDDLDEDTPPIVSQFPGTMAKPPGSLARSSSLCRSRRSIVPSSPQPQRAQLAPHAPHPSHPRHPHHPQHTPHSLPSPDPDILSVSSCPALYRNEEEEEAIYFSAEKQWEVPDTASECDSLNSSIGRKQSPPLSLEIYQTLSPRKISRDEVSLEDSSRGDSPVTVDVSWGSPDCVGLTETKSMIFSPASKVYNGILEKSCSMNQLSSGIPVPKPRHTSCSSAGNDSKPVQEAPSVARISSIPHDLCHNGEKSKKPSKIKSLFKKKSK

SEQ ID NO: 65689 - protein, 599 aa, Homo sapiens
LLVLGLLVAGAADGCELVPRHLRGRRATGSAATAASSPAAAAGDSPALMTDPCMSLSPPCFTEEDRFSLEALQTIHKQMDDDKDGGIEVEESDEFIREDMKYKDATNKHSHLHREDKHITIEDLWKRWKTSEVHNWTLEDTLQWLIEFVELPQYEKNFRDNNVKGTTLPRIAVHEPSFMISQLKISDRSHRQKLQLKALDVVLFGPLTRPPHNWMKDFILTVSIVIGVGGCWFAYTQNKTSKEHVAKMMKDLESLQTAEQSLMDLQERLEKAQEENRNVAVEKQNLERKMMDEINYAKEEACRLRELREGAECELSRRQYAEQELEQVRMALKKAEKEFELRSSWSVPDALQKWLQLTHEVEVQYYNIKRQNAEMQLAIAKDEAEKIKKKRSTVFGTLHVAHSSSLDEVDHKILEAKKALSELTTCLRERLFRWQQIEKICGFQIAHNSGLPSLTSSLYSDHSWVVMPRVSIPPYPIAGGVDDLDEDTPPIVSQFPGTMAKPPGSLARSSSLCRSRRSIVPSSPQPQRAQLAPHAPHPSHPRHPHHPQHTPHSLPSPDPDILSVSSCPALYRNEEEEEAIYFSAEKQCIHLGLGACKSE

SEQ ID NO: 65690 - protein, 1217 aa, Homo sapiens
MYIKQVIIQGFRSYRDQTIVDPFSSKHNVIVGRNGSGKSNFFYAIQFVLSDEFSHLRPEQRLALLHEGTGPRVISAFVEIIFDNSDNRLPIDKEEVSLRRVIGAKKDQYFLDKKMVTKNDVMNLLESAGFSRSNPYYIVKQGKINQMATAPDSQRLKLLREVAGTRVYDERKEESISLMKETEGKREKINELLKYIEERLHTLEEEKEELAQYQKWDKMRRALEYTIYNQELNETRAKLDELSAKRETSGEKSRQLRDAQQDARDKMEDIERQVRELKTKISAMKEEKEQLSAERQEQIKQRTKLELKAKDLQDELAGNSEQRKRLLKERQKLLEKIEEKQKELAETEPKFNSVKEKEERGIARLAQATQERTDLYAKQGRGSQFTSKEERDKWIKKELKSLDQAINDKKRQIAAIHKDLEDTEANKEKNLEQYNKLDQDLNEVKARVEELDRKYYEVKNKKDELQSERNYLWREENAEQQALAAKREDLEKKQQLLRAATGKAILNGIDSINKVLDHFRRKGINQHVQNGYHGIVMNNFECEPAFYTCVEVTAGNRLFYHIVDSDEVSTKILMEFNKMNLPGEVTFLPLNKLDVRDTAYPETNDAIPMISKLRYNPRFDKAFKHVFGKTLICRSMEVSTQLARAFTMDCITLEGDQVSHRGALTGGYYDTRKSRLELQKDVRKAEEELGELEAKLNENLRRNIERINNEIDQLMNQMQQIETQQRKFKASRDSILSEMKMLKEKRQQSEKTFMPKQRSLQSLEASLHAMESTRESLKAELGTDLLSQLSLEDQKRVDALNDEIRQLQQENRQLLNERIKLEGIITRVETYLNENLRKRLDQVEQELNELRETEGGTVLTATTSELEAINKRVKDTMARSEDLDNSIDKTEAGIKELQKSMERWKNMEKEHMDAINHDTKELEKMTNRQGMLLKKKEECMKKIRELGSLPQEAFEKYQTLSLKQLFRKLEQCNTELKKYSHVNKKALDQFVNFSEQKEKLIKRQEELDRGYKSIMELMNVLELRKYEAIQLTFKQVSKNFSEVFQKLVPGGKATLVMKKGDVEGSQSQDEGEGSGESERGSGSQSSVPSVDQFTGVGIRVSFTGKQGEMREMQQLSGGQKSLVALALIFAIQKCDPAPFYLFDEIDQALDAQHRKAVSDMIMELAVHAQFITTTFRPELLESADKFYGVKFRNKVSHIDVITAEMAKDFVEDDTTHG

SEQ ID NO: 65691 - protein, 1101 aa, Homo sapiens
MATPSKKTSTPSPQPSKRALPRDPSSEVPSKRKNSAPQLPLLQSSGPFVEGSIVRISMENFLTYDICEVSPGPHLNMIVGANGTGKSSIVCAICLGLAGKPAFMGRADKVGFFVKRGCSRGMVEIELFRASGNLVITREIDVAKNQSFWFINKKSTTQKIVEEKVAALNIQVGNLCQFLPQDKVGEFAKLSKIELLEATEKSIGPPEMHKYHCELKNLREKEKQLETSCKEKTEYLQKMVQRNERYKQDVERFYERKRHLDLIEMLEAKRPWVEYENVRQEYEEVKLVRDRVKEEVRKLKEGQIPVTCRIEEMENERHNLEARIKEKATDIKEASQKCKQKQDVIERKDKHIEELQQALIVKQNEELDRQRRIGNTRKMIEDLQNELKTTENCENLQPQIDAITNDLRRIQDEKALCEGEIIDKRRERETLEKEKKSVDDHIVRFDNLMNQKEDKLRQRFRDTYDAVLWLRNNRDKFKQRVCEPIMLTINMKDNKNAKYIENHIPSNDLRAFVFESQEDMEVFLKEVRDNKKLRVNAVIAPKSSYADKAPSRSLNELKQYGFFSYLRELFDAPDPVMSYLCCQYHIHEVPVGTEKTRERIERVIQETRLKQIYTAEEKYVVKTSFYSNKVISSNTSLKVAQFLTVTVDLEQRRHLEEQLKEIHRKLQAVDSGLIALRETSKHLEHKDNELRQKKKELLERKTKKRQLEQKISSKLGSLKLMEQDTCNLEEEERKASTKIKEINVQKAKLVTELTNLIKICTSLHIQKVDLILQNTTVISEKNKLESDYMAASSQLRLTEQHFIELDENRQRLLQKCKELMKRARQVCNLGAEQTLPQEYQTQVPTIPNGHNSSLPMVFQDLPNTLDEIDALLTEERSRASCFTGLNPTIVQEYTKREEEIEQLTEELKGKKVELDQYRENISQVKERWLNPLKELVEKINEKFSNFFSSMQCAGEVDLHTENEEDYDKYGIRIRVKFRSSTQLHELTPHHQSGGERSVSTMLYLMALQELNRCPFRVVDEINQGMDPINERRVFEMVVNTACKENTSQYFFITPKLLQNLPYSEKMTVLFVYNGPHMLEPNTWNLKAFQRRRRRITFTQPS

SEQ ID NO: 65692 - protein, 1091 aa, Homo sapiens
MAKRKEENFSSPKNAKRPRQEELEDFDKDGDEDECKGTTLTAAEVGIIESIHLKNFMCHSMLGPFKFGSNVNFVVGNNGSGKSAVLTALIVGLGGRAVATNRGSSLKGFVKDGQNSADISITLRNRGDDAFKASVYGNSILIQQHISIDGSRSYKLKSATGSVVSTRKEELIAILDHFNIQVDNPVSVLTQEMSKQFLQSKNEGDKYKFFMKATQLEQMKEDYSYIMETKERTKEQIHQGEERLTELKRQCVEKEERFQSIAGLSTMKTNLESLKHEMAWAVVNEIEKQLNAIRDNIKIGEDRAARLDRKMEEQQVRLNEAEQKYKDIQDKLEKISEETNARAPECMALKADVVAKKRAYNEAEVLYNRSLNEYKALKKDDEQLCKRIEELKKSTDQSLEPERLERQKKISWLKERVKAFQNQENSVNQEIEQFQQAIEKDKEEHGKIKREELDVKHALSYNQRQLKELKDSKTDRLKRFGPNVPALLEAIDDAYRQGHFTYKPVGPLGACIHLRDPELALAIESCLKGLLQAYCCHNHADERVLQALMKRFYLPGTSRPPIIVSEFRNEIYDVRHRAAYHPDFPTVLTALEIDNAVVANSLIDMRGIETVLLIKNNSVARAVMQSQKPPKNCREAFTADGDQVFAGRYYSSENTRPKFLSRDVDSEISDLENEVENKTAQILNLQQHLSALEKDIKHNEELLKRCQLHYKELKMKIRKNISEIRELENIEEHQSVDIATLEDEAQENKSKMKMVEEHMEQQKENMEHLKSLKIEAENKYDAIKFKINQLSELADPLKDELNLADSEVDNQKRGKRHYEEKQKEHLDTLNKKKRELDMKEKELEEKMSQARQICPERIEVEKSASILDKEINRLRQKIQAEHASHGDREEIMRQYQEARETYLDLDSKVRTLKKFIKLLGEIMEHRFKTYQQFRRCLTLRCKLYFDNLLSQRAYCGKMNFDHKNETLSISVQPGEGNKAAFNDMRALSGGERSFSTVCFILSLWSIAESPFRCLDEFDVYMDMVNRRIAMDLILKMADSQRFRQFILLTPQSMSSLPSSKLIRILRMSDPERGQTTLPFRPVTQEEDDDQR

SEQ ID NO: 65693 - protein, 1117 aa, Homo sapiens
MAKRKEENFSSPKNAKRPRQEELEDFDKDGDEDECKGTTLTAAEVGIIESIHLKNFMCHSMLGPFKFGSNVNFVVGNNGSWSAVVRSRLNATSASQVQAILLFQPCGKSAVLTALIVGLGGRAVATNRGSSLKGFVKDGQNSADISITLRNRGDDAFKASVYGNSILIQQHISIDGSRSYKLKSATGSVVSTRKEELIAILDHFNIQVDNPVSVLTQEMSKQFLQSKNEGDKYKFFMKATQLEQMKEDYSYIMETKERTKEQIHQGEERLTELKRQCVEKEERFQSIAGLSTMKTNLESLKHEMAWAVVNEIEKQLNAIRDNIKIGEDRAARLDRKMEEQQVRLNEAEQKYKDIQDKLEKISEETNARAPECMALKADVVAKKRAYNEAEVLYNRSLNEYKALKKDDEQLCKRIEELKKSTDQSLEPERLERQKKISWLKERVKAFQNQENSVNQEIEQFQQAIEKDKEEHGKIKREELDVKHALSYNQRQLKELKDSKTDRLKRFGPNVPALLEAIDDAYRQGHFTYKPVGPLGACIHLRDPELALAIESCLKGLLQAYCCHNHADERVLQALMKRFYLPGTSRPPIIVSEFRNEIYDVRHRAAYHPDFPTVLTALEIDNAVVANSLIDMRGIETVLLIKNNSVARAVMQSQKPPKNCREAFTADGDQVFAGRYYSSENTRPKFLSRDVDSEISDLENEVENKTAQILNLQQHLSALEKDIKHNEELLKRCQLHYKELKMKIRKNISEIRELENIEEHQSVDIATLEDEAQENKSKMKMVEEHMEQQKENMEHLKSLKIEAENKYDAIKFKINQLSELADPLKDELNLADSEVDNQKRGKRHYEEKQKEHLDTLNKKKRELDMKEKELEEKMSQARQICPERIEVEKSASILDKEINRLRQKIQAEHASHGDREEIMRQYQEARETYLDLDSKVRTLKKFIKLLGEIMEHRFKTYQQFRRCLTLRCKLYFDNLLSQRAYCGKMNFDHKNETLSISVQPGEGNKAAFNDMRALSGGERSFSTVCFILSLWSIAESPFRCLDEFDVYMDMVNRRIAMDLILKMADSQRFRQFILLTPQSMSSLPSSKLIRILRMSDPERGQTTLPFRPVTQEEDDDQR

SEQ ID NO: 65694 - protein, 1091 aa, Homo sapiens; identical to SEQ ID NO: 65692

SEQ ID NO: 65695 - protein, 57 aa, Homo sapiens
MAKRKEENFSSPKNAKRPRQEELEDFDKDGDEDECKGTTLTAAEVGIIESIHLKNFM

SEQ ID NO: 65696 - protein, 1091 aa, Homo sapiens; identical to SEQ ID NO: 65692

SEQ ID NO: 65697 - protein, 709 aa, Homo sapiens
MAETLEFNDVYQEVKGSMNDGRLRLSRQGIIFKNSKTGKVDNIQAGELTEGIWRRVALGHGLKLLTKNGHVYKYDGFRESEFEKLSDFFKTHYRLELMEKDLCVKGWNWGTVKFGGQLLSFDIGDQPVFEIPLSNVSQCTTGKNEVTLEFHQNDDAEVSLMEVRFYVPPTQEDGVDPVEAFAQNVLSKADVIQATGDAICIFRELQCLTPRGRYDIRIYPTFLHLHGKTFDYKIPYTTVLRLFLLPHKDQRQMFFVISLDPPIKQGQTRYHFLILLFSKDEDISLTLNMNEEEVEKRFEGRLTKNMSGSLYEMVSRVMKALVNRKITVPGNFQGHSGAQCITCSYKASSGLLYPLERGFIYVHKPPVHIRFDEISFVNFARGTTTTRSFDFEIETKQGTQYTFSSIEREEYGKLFDFVNAKKLNIKNRGLKEGMNPSYDEYADSDEDQHDAYLERMKEEGKIREENANDSSDDSGEETDESFNPGEEEEDVAEEFDSNASASSSSNEGDSDRDEKKRKQLKKAKMAKDRKSRKKPVEVKKGKDPNAPKRPMSAYMLWLNASREKIKSDHPGISITDLSKKAGEIWKGMSKEKKEEWDRKAEDARRDYEKAMKEYEGGRGESSKRDKSKKKKKVKVKMEKKSTPSRGSSSKSSSRQLSESFKSKEFVSSDESSSGENKSKKKRRRSEDSEEEELASTPPSSEDSASGSDE

SEQ ID NO: 65698 - protein, 79 aa, Homo sapiens
MKSLTWILGLWALAACFTPGESQRGPRGPYPPGPLAPPQPFGPGFVPPPPPPPYGPGRIPPPPPAPYGPGIFPPPPPQP

SEQ ID NO: 65699 - protein, 107 aa, Homo sapiens
MKSLTWILGLWALAACFTPGESQRGPRGPYPPGPLAPPQPFGPGFVPPPPPPPYGPGRIPPPPYSCTPNMNNCSRCHHHHKRHHYPCNYCFYYPKYEFQHCFQETFT

SEQ ID NO: 65700 - protein, 79 aa, Homo sapiens; identical to SEQ ID NO: 65698

SEQ ID NO: 65701 - protein, 115 aa, Homo sapiens
MSRHSRLQRQVLSLYRDLLRAGRGKPGAEARVRAEFRQHAGLPRSDVLRIEYLYRRGRRQLQLLRSGHATAMGAFVRPRAPTGEPGGVGCQPDDGDSPRNPHDSTGAPETRPDGR

SEQ ID NO: 65702 - protein, 166 aa, Homo sapiens
MAVSTVFSTSSLMLALSRHSLLSPLLSVTSFRRFYRGDSPTDSQKDMIEIPLPPWQERTDESIETKRARLLYESRKRGMLENCILLSLFAKEHLQHMTEKQLNLYDRLINEPSNDWDIYYWATEAKPAPEIFENEVMALLRDFAKNKNKEQRLRAPDLEYLFEKPR

SEQ ID NO: 65703 - protein, 280 aa, Homo sapiens
MAAVVALSLRRRLPATTLGGACLQASRGAQTAAATAPRIKKFAIYRWDPDKAGDKPHMQTYEVDLNKCGPMVLDALIKIKNEVDSTLTFRRSCREGICGSCAMNINGGNTLACTRRIDTNLNKVSKIYPLPHMYVIKDLVPDLSNFYAQYKSIEPYLKKKDESQEGKQQYLQSIEEREKLDGLYECILCACCSTSCPSYWWNGDKYLGPAVLMQAYRWMIDSRDDFTEERLAKLQDPFSLYRCHTIMNCTRTCPKGLNPGKAIAEIKKMMATYKEKKASV

SEQ ID NO: 65704 - protein, 150 aa, Homo sapiens
MAALLLRHVGRHCLRAHFSPQLCIRNAVPLGTTAKEEMERFWNKNIGSNRPLSPHITIYSWSLPMAMSICHRGTGIALSADVGPRKRPEDSPAIPVWSGCPGSYCVVLYGAGSHVKKGGSQHHLPTHYYIHPSFCLSFLSPAWEKFSLFV

SEQ ID NO: 65705 - protein, 169 aa, Homo sapiens
MAALLLRHVGRHCLRAHFSPQLCIRNAVPLGTTAKEEMERFWNKNIGSNRPLSPHITIYSWSLPMAMSICHRGTGIALSAGVSLFGMSALLLPGNFESYLELVKSLCLGPALIHTAKFALVFPLMYHTWNGIRHLMWDLGKGLKIPQLYQSGVVVLVLTVLSSMGLAAM

SEQ ID NO: 65706 - protein, 116 aa, Homo sapiens
MAALLLSWSLPMAMSICHRGTGIALSAGVSLFGMSALLLPGNFESYLELVKSLCLGPALIHTAKFALVFPLMYHTWNGIRHLMWDLGKGLKIPQLYQSGVVVLVLTVLSSMGLAAM

SEQ ID NO: 65707 - protein, 135 aa, Homo sapiens
MAALLLRHVGRHCLRAHFSPQLCIRNWSLPMAMSICHRGTGIALSAGVSLFGMSALLLPGNFESYLELVKSLCLGPALIHTAKFALVFPLMYHTWNGIRHLMWDLGKGLKIPQLYQSGVVVLVLTVLSSMGLAAM

SEQ ID NO: 65708 - protein, 159 aa, Homo sapiens
MAVLWRLSAVCGALGGRALLLRTPVVRPAHISAFLQDRPIPEWCGVQHIHLSPSHHSGSKAASLHWTSERVVSVLLLGLLPAAYLNPCSAMDYSLAAALTLHGHWGLGQVVTDYVHGDALQKAAKAGLLALSALTFAGLCYFNYHDVGICKAVAMLWKL

SEQ ID NO: 65709 - protein, 154 aa, Homo sapiens
MAASMFYGRLVAVATLRNHRPRTAQRAAAQGPVLIGSSHGGVNIEDVAAESPEAIIKEPIDIEEGIKKEQALQLAQKMGFPPNIVESAAENMVKLYSLFLKYDATMIEINPMVEDSDGAVLCMDAKINFDSNSAYRQKKIFDLQDWTQEDERDK

SEQ ID NO: 65710 - protein, 298 aa, Homo sapiens
SGRGHPSEPPASDGPAGCCSGSKDVVIKAQVLAGGRGKGTFESGLKGGVKIVFSPEEAKAVSSQMIGKKLFTKQTGEKGRICNQVLVCERKYPRREYYFAITMERSFQGPVLIGSSHGGVNIEDVAAESPEAIIKEPIDIEEGIKKEQALQLAQKMGFPPNIVESAAENMVKLYSLFLKYDATMIEINPMVEDSDGAVLCMDAKINFDSNSAYRQKKIFDLQDWTQEDERDKDAAKANLNYIGLDGNIGCLVNGAGLAMATMDIIKLHGGTPANFLDVGGGATVHQVTEAFKLITSDK

SEQ ID NO: 65711 - protein, 441 aa, Homo sapiens
MAASMFYGRLVAVATLRNHRPRTAQQQQRNLSLHEYMSMELLQEAGVSVPKGYVAKSPDEAYAIAKKLGSKDVVIKAQVLAGGRGKGTFESGLKGGVKIVFSPEEAKAVSSQMIGKKLFTKQTGEKGRICNQVLVCERKYPRREYYFAITMERSFQGPVLIGSSHGGVNIEDVAAESPEAIIKEPIDIEEGIKKEQALQLAQKMGFPPNIVESAAENMVKLYSLFLKYDATMIEINPMVEDSDGAVLCMDAKINFDSNSAYRQKKIFDLQDWTQEDERDKDAAKANLNYIGLDGNIGCLVNGAGLAMATMDIIKLHGGTPANFLDVGGGATVHQVTEAFKLITSDKKVLAILVNIFGGIMRCDVIAQGIVMAVKDLEIKIPVVVRLQGTRVDDAKALIADSGLKILACDDLDEAARMVVKLSEIVTLAKQAHVDVKFQLPI

SEQ ID NO: 65712 - protein, 463 aa, Homo sapiens
MAASMFYGRLVAVATLRNHRPRTAQRAAAQVLGSSGLFNNHGLQVQQQQQRNLSLHEYMSMELLQEAGVSVPKGYVAKSPDEAYAIAKKLGSKDVVIKAQVLAGGRGKGTFESGLKGGVKIVFSPEEAKAVSSQMIGKKLFTKQTGEKGRICNQVLVCERKYPRREYYFAITMERSFQGPVLIGSSHGGVNIEDVAAESPEAIIKEPIDIEEGIKKEQALQLAQKMGFPPNIVESAAENMVKLYSLFLKYDATMIEINPMVEDSDGAVLCMDAKINFDSNSAYRQKKIFDLQDWTQEDERDKDAAKANLNYIGLDGNIGCLVNGAGLAMATMDIIKLHGGTPANFLDVGGGATVHQVTEAFKLITSDKKVLAILVNIFGGIMRCDVIAQGIVMAVKDLEIKIPVVVRLQGTRVDDAKALIADSGLKILACDDLDEAARMVVKLSEIVTLAKQAHVDVKFQLPI

SEQ ID NO: 65713 - protein, 405 aa, Homo sapiens
MSMELLQEAGVSVPKGYVAKSPDEAYAIAKKLGSKDVVIKAQVLAGGRGKGTFESGLKGGVKIVFSPEEAKAVSSQMIGKKLFTKQTGEKGRICNQVLVCERKYPRREYYFAITMERSFQGPVLIGSSHGGVNIEDVAAESPEAIIKEPIDIEEGIKKEQALQLAQKMGFPPNIVESAAENMVKLYSLFLKYDATMIEINPMVEDSDGAVLCMDAKINFDSNSAYRQKKIFDLQDWTQEDERDKDAAKANLNYIGLDGNIGCLVNGAGLAMATMDIIKLHGGTPANFLDVGGGATVHQVTEAFKLITSDKKVLAILVNIFGGIMRCDVIAQGIVMAVKDLEIKIPVVVRLQGTRVDDAKALIADSGLKILACDDLDEAARMVVKLSEIVTLAKQAHVDVKFQLPI

SEQ ID NO: 65714 - protein, 291 aa, Homo sapiens [sequence omitted]

SEQ ID NO: 65715 - protein, 405 aa, Homo sapiens; identical to SEQ ID NO: 65713

SEQ ID NO: 65716 - protein, 329 aa, Homo sapiens
MIGKKLFTKQTGEKGRICNQVLVCERKYPRREYYFAITMERSFQGPVLIGSSHGGVNIEDVAAESPEAIIKEPIDIEEGIKKEQALQLAQKMGFPPNIVESAAENMVKLYSLFLKYDATMIEINPMVEDSDGAVLCMDAKINFDSNSAYRQKKIFDLQDWTQEDERDKDAAKANLNYIGLDGNIGCLVNGAGLAMATMDIIKLHGGTPANFLDVGGGATVHQVTEAFKLITSDKKVLAILVNIFGGIMRCDVIAQGIVMAVKDLEIKIPVVVRLQGTRVDDAKALIADSGLKILACDDLDEAARMVVKLSEIVTLAKQAHVDVKFQLPI

SEQ ID NO: 65717 - protein, 346 aa, Homo sapiens
MTATLAAAADIATMVSGSSGLAAARLLSRSFLLPQNGIRHCSYTASRQHLYVDKNTKIICQGFTGKQGTFHSQQALEYGTKLVGGTTPGKGGQTHLGLPVFNTVKEAKEQTGATASVIYVPPPFAAAAINEAIEAEIPLVVCITEGIPQQDMVRVKHKLLRQEKTRLIGPNCPGVINPGECKIGIMPGHIHKKGRIGIVSRSGTLTYEAVHQTTQVGLGQSLCVGIGGDPFNGTDFIDCLEIFLNDSATEGIILIGEIGGNAEENAAEFLKQHNSGPNSKPVVSFIAGLTAPPGRRMGHAGAIIAGGKGGAKEKISALQSAGVVVSMSPAQLGTTIYKEFEKRKML

SEQ ID NO: 65718 - protein, 1827 aa, Homo sapiens
MARKKFSGLEISLIVLFVIVTIIAIALIVVLATKTPAVDEISDSTSTPATTRVTTNPSDSGKCPNVLNDPVNVRINCIPEQFPTEGICAQRGCCWRPWNDSLIPWCFFVDNHGYNVQDMTTTSIGVEAKLNRIPSPTLFGNDINSVLFTTQNQTPNRFRFKITDPNNRRYEVPHQYVKEFTGPTVSDTLYDVKVAQNPFSIQVIRKSNGKTLFDTSIGPLVYSDQYLQISTRLPSDYIYGIGEQVHKRFRHDLSWKTWPIFTRDQLPGDNNNNLYGHQTFFMCIEDTSGKSFGVFLMNSNAMEIFIQPTPIVTYRVTGGILDFYILLGDTPEQVVQQYQQLVGLPAMPAYWNLGFQLSRWNYKSLDVVKEVVRRNREAGIPFDTQVTDIDYMEDKKDFTYDQVAFNGLPQFVQDLHDHGQKYVIILDPAISIGRRANGTTYATYERGNTQHVWINESDGSTPIIGEVWPGLTVYPDFTNPNCIDWWANECSIFHQEVQYDGLWIDMNEVSSFIQGSTKGCNVNKLNYPPFTPDILDKLMYSKTICMDAVQNWGKQYDVHSLYGYSMAIATEQAVQKVFPNKRSFILTRSTFAGSGRHAAHWLGDNTASWEQMEWSITGMLEFSLFGIPLVGADICGFVAETTEELCRRWMQLGAFYPFSRNHNSDGYEHQDPAFFGQNSLLVKSSRQYLTIRYTLLPFLYTLFYKAHVFGETVARPVLHEFYEDTNSWIEDTEFLWGPALLITPVLKQGADTVSAYIPDAIWYDYESGAKRPWRKQRVDMYLPADKIGLHLRGGYIIPIQEPDVTTTASRKNPLGLIVALGENNTAKGDFFWDDGETKDTIQNGNYILYTFSVSNNTLDIVCTHSSYQEGTTLAFQTVKILGLTDSVTEVRVAENNQPMNAHSNFTYDASNQVLLIADLKLNLGRNFSVQWNQIFSENERFNCYPDADLATEQKCTQRGCVWRTGSSLSKAPECYFPRQDNSYSVNSARYSSMGITADLQLNTANARIKLPSDPISTLRVEVKYHKNDMLQFKIYDPQKKRYEVPVPLNIPTTPISTYEDRLYDVEIKENPFGIQIRRRSSGRVIWDSWLPGFAFNDQFIQISTRLPSEYIYGFGEVEHTAFKRDLNWNTWGMFTRDQPPGYKLNSYGFHPYYMALEEEGNAHGVFLLNSNAMDVTFQPTPALTYRTVGGILDFYMFLGPTPEVATKQYHEVIGHPVMPAYWALGFQLCRYGYANTSEVRELYDAMVAANIPYDVQYTDIDYMERQLDFTIGEAFQDLPQFVDKIRGEGMRYIIILDPAISGNETKTYPAFERGQQNDVFVKWPNTNDICWAKVWPDLPNITIDKTLTEDEAVNASRAHVAFPDFFRTSTAEWWAREIVDFYNEKMKFDGLWIDMNEPSSFVNGTTTNQCRNDELNYPPYFPELTKRTDGLHFRTICMEAEQILSDGTSVLHYDVHNLYGWSQMKPTHDALQKTTGKRGIVISRSTYPTSGRWGGHWLGDNYARWDNMDKSIIGMMEFSLFGMSYTGADICGFFNNSEYHLCTRWMQLGAFYPYSRNHNIANTRRQDPASWNETFAEMSRNILNIRYTLLPYFYTQMHEIHANGGTVIRPLLHEFFDEKPTWDIFKQFLWGPAFMVTPVLEPYVQTVNAYVPNARWFDYHTGKDIGVRGQFQTFNASYDTINLHVRGGHILPCQEPAQNTFYSRQKHMKLIVAADDNQMAQGSLFWDDGESIDTYERDLYLSVQFNLNQTTLTSTILKRGYINKSETRLGSLHVWGKGTTPVNAVTLTYNGNKNSLPFNEDTTNMILRIDLTTHNVTLEEPIEINWS

SEQ ID NO: 65719 - protein, 871 aa, Homo sapiens
MKYSCCALVLAVLGTELLGSLCSTVRSPRFRGRIQQERKNIRPNIILVLTDDQDVELGSLQVMNKTRKIMEHGGATFINAFVTTPMCCPSRSSMLTGKYVHNHNVYTNNENCSSPSWQAMHEPRTFAVYLNNTGYRTAFFGKYLNEYNGSYIPPGWREWLGLIKNSRFYNYTVCRNGIKEKHGFDYAKDYFTDLITNESINYFKMSKRMYPHRPVMMVISHAAPHGPEDSAPQFSKLYPNASQHITPSYNYAPNMDKHWIMQYTGPMLPIHMEFTNILQRKRLQTLMSVDDSVERLYNMLVETGELENTYIIYTADHGYHIGQFGLVKGKSMPYDFDIRVPFFIRGPSVEPGSIVPQIVLNIDLAPTILDIAGLDTPPDVDGKSVLKLLDPEKPGNRFRTNKKAKIWRDTFLVERGKFLRKKEESSKNIQQSNHLPKYERVKELCQQARYQTACEQPGQKWQCIEDTSGKLRIHKCKGPSDLLTVRQSTRNLYARGFHDKDKECSCRESGYRASRSQRKSQRQFLRNQGTPKYKPRFVHTRQTRSLSVEFEGEIYDINLEEEEELQVLQPRNIAKRHDEGHKGPRDLQASSGGNRGRMLADSSNAVGPPTTVRVTHKCFILPNDSIHCERELYQSARAWKDHKAYIDKEIEALQDKIKNLREVRGHLKRRKPEECSCSKQSYYNKEKGVKKQEKLKSHLHPFKEAAQEVDSKLQLFKENNRRRKKERKEKRRQRKGEECSLPGLTCFTHDNNHWQTAPFWNLGSFCACTSSNNNTYWCLRTVNETHNFLFCEFATGFLEYFDMNTDPYQLTNTVHTVERGILNQLHVQLMELRSCQGYKQCNPRPKNLDVGNKDGGSYDLHRGQLWDGWEG

SEQ ID NO: 65720 - protein, 871 aa, Homo sapiens; identical to SEQ ID NO: 65719

SEQ ID NO: 65721 - protein, 871 aa, Homo sapiens; identical to SEQ ID NO: 65719

SEQ ID NO: 65722 - protein, 871 aa, Homo sapiens; identical to SEQ ID NO: 65719

SEQ ID NO: 65723 - protein, 29 aa, Homo sapiens
MKYSCCALVLAVLGTELLGSLCSTVRSPR

SEQ ID NO: 65724 - protein, 172 aa, Homo sapiens
MKYSCCALVLAVLGTELLGSLCSTVRSPRFRGRIQQERKNIRPNIILVLTDDQDVELGSLQVMNKTRKIMEHGGATFINAFVTTPMCCPSRSSMLTGKYVHNHNVYTNNENCSSPSWQAMHEPRTFAVYLNNTGYRTAFFGKYLNEYNGSYIPPGWREWLGLIKNSRFYNYT

SEQ ID NO: 65725 - protein, 76 aa, Homo sapiens
MKYSCCALVLAVLGTELLGSLCSTVRSPRFRGRIQQERKNIRPNIILVLTDDQDVELGSLQVMNKTRKIMEHGGAT

SEQ ID NO: 65726 - protein, 85 aa, Homo sapiens
MKYSCCALVLAVLGTELLGSLCSTVRSPRFRGRIQQERKNIRPNIILVLTDDQDVELGSLQVMNKTRKIMEHGGATFINAFVTTP

SEQ ID NO: 65727 - protein, 56 aa, Homo sapiens
MKYSCCALVLAVLGTELLGSLCSTVRSPRFRGRIQQERKNIRPNIILVLTDDQDVE

SEQ ID NO: 65728 - protein, 870 aa, Homo sapiens
MGPPSLVLCLLSATVFSLLGGSSAFLSHHRLKGRFQRDRRNIRPNIILVLTDDQDVELGSMQVMNKTRRIMEQGGAHFINAFVTTPMCCPSRSSILTGKYVHNHNTYTNNENCSSPSWQAQHESRTFAVYLNSTGYRTAFFGKYLNEYNGSYVPPGWKEWVGLLKNSRFYNYTLCRNGVKEKHGSDYSKDYLTDLITNDSVSFFRTSKKMYPHRPVLMVISHAAPHGPEDSAPQYSRLFPNASQHITPSYNYAPNPDKHWIMRYTGPMKPIHMEFTNMLQRKRLQTLMSVDDSMETIYNMLVETGELDNTYIVYTADHGYHIGQFGLVKGKSMPYEFDIRVPFYVRGPNVEAGCLNPHIVLNIDLAPTILDIAGLDIPADMDGKSILKLLDTERPVNRFHLKKKMRVWRDSFLVERGKLLHKRDNDKVDAQEENFLPKYQRVKDLCQRAEYQTACEQLGQKWQCVEDATGKLKLHKCKGPMRLGGSRALSNLVPKYYGQGSEACTCDSGDYKLSLAGRRKKLFKKKYKASYVRSRSIRSVAIEVDGRVYHVGLGDAAQPRNLTKRHWPGAPEDQDDKDGGDFSGTGGLPDYSAANPIKVTHRCYILENDTVQCDLDLYKSLQAWKDHKLHIDHEIETLQNKIKNLREVRGHLKKKRPEECDCHKISYHTQHKGRLKHRGSSLHPFRKGLQEKDKVWLLREQKRKKKLRKLLKRLQNNDTCSMPGLTCFTHDNQHWQTAPFWTLGPFCACTSANNNTYWCMRTINETHNFLFCEFATGFLEYFDLNTDPYQLMNAVNTLDRDVLNQLHVQLMELRSCKGYKQCNPRTRNMDLGLKDGGSYEQYRQFQRRKWPEMKRPSSKSLGQLWEGWEG

SEQ ID NO: 65729 - protein, 852 aa, Homo sapiens
MGPPSLVLCLLSATVFSLLGGSSAFLSHHRLKGRFQRDRRNIRPNIILVLTDDQDVELGSMQVMNKTRRIMEQGGAHFINAFVTTPMCCPSRSSILTGKYVHNHNTYTNNENCSSPSWQAQHESRTFAVYLNSTGYRTAFFGKYLNEYNGSYVPPGWKEWVGLLKNSRFYNYTLCRNGVKEKHGSDYSKDYLTDLITNDSVSFFRTSKKMYPHRPVLMVISHAAPHGPEDSAPQYSRLFPNASQHITPSYNYAPNPDKHWIMRYTGPMKPIHMEFTNMLQRKRLQTLMSVDDSMETIYNMLVETGELDNTYIVYTADHGYHIGQFGLVKGKSMPYEFDIRVPFYVRGPNVEAGCLNPHIVLNIDLAPTILDIAGLDIPADMDGKSILKLLDTERPVNRFHLKKKMRVWRDSFLVERGKLLHKRDNDKVDAQEENFLPKYQRVKDLCQRAEYQTACEQLGQKWQCVEDATGKLKLHKCKGPMRLGGSRALSNLVPKYYGQGSEACTCDSGDYKLSLAGRRKKLFKKKYKASYVRSRSIRSVAIEVDGRVYHVGLGDAAQPRNLTKRHWPGAPEDQDDKDGGDFSGTGGLPDYSAANPIKVTHRCYILENDTVQCDLDLYKSLQAWKDHKLHIDHEIETLQNKIKNLREVRGHLKKKRPEECDCHKISYHTQHKGRLKHRGSSLHPFRKGLQEKDKVWLLREQKRKKKLRKLLKRLQNNDTCSMPGLTCFTHDNQHWQTAPFWTLGPFCACTSANNNTYWCMRTINETHNFLFCEFATGFLEYFDLNTDPYQLMNAVNTLDRDVLNQLHVQLMELRSCKGYKQCNPRTRNMDLGLKDGGSYEQYRGQLWEGWEG

SEQ ID NO: 65730 - protein, 289 aa, Homo sapiens
FSGTGGLPDYSAANPIKVTHRCYILENDTVQCDLDLYKSLQAWKDHKLHIDHEIETLQNKIKNLREVRGHLKKKRPEECDCHKISYHTQHKGRLKHRGSSLHPFRKGLQEKDKVWLLREQKRKKKLRKLLKRLQNNDTCSMPGLTCFTHDNQHWQTAPFWTLGPFCACTSANNNTYWCMRTINETHNFLFCEFATGFLEYFDLNTDPYQLMNAVNTLDRDVLNQLHVQLMELRSCKGYKQCNPRTRNMDLGLKDGGSYEQYRQFQRRKWPEMKRPSSKSLGQLWEGWEG

SEQ ID NO: 65731 - protein, 867 aa, Homo sapiens
MGPPSLVLCLLSATVFSLLGGSSAFLSHHRLKGRFQRDRRNIRPNIILVLTDDQDVELGSMQVMNKTRRIMEQGGAHFINAFVTTPMCCPSRSSILTGKYVHNHNTYTNNENCSSPSWQAQHESRTFAVYLNSTGYRTAFFGKYLNEYNGSYVPPGWKEWVGLLKNSRFYNYTLCRNGVKEKHGSDYSKDYLTDLITNDSVSFFRTSKKMYPHRPVLMVISHAAPHGPEDSAPQYSRLFPNASQHITPSYNYAPNPDKHWIMRYTGPMKPIHMEFTNMLQRKRLQTLMSVDDSMETIYNMLVETGELDNTYIVYTADHGYHIGQFGLVKGKSMPYEFDIRVPFYVRGPNVEAGCLNPHIVLNIDLAPTILDIAGLDIPADMDGKSILKLLDTERPVNRFHLKKKMRVWRDSFLVERGKLLHKRDNDKVDAQEENFLPKYQRVKDLCQRAEYQTACEQLGQKWQCVEDATGKLKLHKCKGPMRLGGSRALSNLVPKYYGQGSEACTCDSGDYKLSLAGRRKKLFKKKYKASYVRSRSIRSVAIEVDGRVYHVGLGDAAQPRNLTKRHWPGAPEDQDDKDGGDFSGTGGLPDYSAANPIKVTHRCYILENDTVQCDLDLYKSLQAWKDHKLHIDHEIETLQNKIKNLREVRGHLKKKRPEECDCHKISYHTQHKGRLKHRGSSLHPFRKGLQEKDKVWLLREQKRKKKLRKLLKRLQNNDTCSMPGLTCFTHDNQHWQTAPFWTLGPFCACTSANNNTYWCMRTINETHNFLFCEFATGFLEYFDLNTDPYQLMNAVNTLDRDVLNQLHVQLMELRSCKGYKQCNPRTRNMDLDGGSYEQYRQFQRRKWPEMKRPSSKSLGQLWEGWEG

SEQ ID NO: 65732 - protein, 870 aa, Homo sapiens; identical to SEQ ID NO: 65728

SEQ ID NO: 65733 - protein, 374 aa, Homo sapiens
MAAPALGLVCGRCPELGLVLLLLLLSLLCGAAGSQEAGTGAGAGSLAGSCGCGTPQRPGAHGSSAAAHRYSREANAPGPVPGERQLAHSKMVPIPAGVFTMGTDDPQIKQDGEAPARRVTIDAFYMDAYEVSNTEFEKFVNSTGYLTEAEKFGDSFVFEGMLSEQVKTNIQQAVAAAPWWLPVKGANWRHPEGPDSTILHRPDHPVLHVSWNDAVAYCTWAGKRLPTEAEWEYSCRGGLHNRLFPWGNKLQPKGQHYANIWQGEFPVTNTGEDGFQGTAPVDAFPPNGYGLYNIVGNAWEWTSDWWTVHHSVEETLNPKGPPSGKDRVKKGGSYMCHRSYCYRYRCAARSQNTPDSSASNLGFRCAADRLPTMD

SEQ ID NO: 65734 - protein, 426 aa, Homo sapiens
MAAPALGLVCGRCPELGLVLLLLLLSLLCGAAGSQEAGTGAGAGSLAGSCGCGTPQRPGAHGSSAAAHRYSREANAPGPVPGERQLAHSKMVPIPAGVFTMGTDDPQIKQDGEAPARRVTIDAFYMDAYEVSNTEFEKFVNSTGYLTEAEKFGDSFVFEGMLSEQVKTNIQQAVAAAPWWLPVKGANWRHPEGPDSTILHRPDHPVLHVSWNDAVAYCTWAGKRLPTEAEWEYSCRGGLHNRLFPWGNKLQPKGQHYANIWQGEFPVTNTGEDGFQGTAPVDAFPPNGYGLYNIVGNAWEWTSDWWTVHHSVEETLNPKGPPSGKDRVKKGGSYMCHRSQEYYDPYFQDVASEMLRRHTASRWKAFSSLEPCCSIRRHQQYAAIERLTCGKFELRCASLRKIDCLNTNIACSYSMRQDGPRLHCVD

SEQ ID NO: 65735 - protein, 428 aa, Homo sapiens
MAAPALGLVCGRCPELGLVLLLLLLSLLCGAAGSQEAGTGAGAGSLAGSCGCGTPQRPGAHGSSAAAHRYSREANAPGPVPGERQLAHSKMVPIPAGVFTMGTDDPQIKQDGEAPARRVTIDAFYMDAYEVSNTEFEKFVNSTGYLTEAEKFGDSFVFEGMLSEQVKTNIQQAVAAAPWWLPVKGANWRHPEGPDSTILHRPDHPVLHVSWNDAVAYCTWAGKRLPTEAEWEYSCRGGLHNRLFPWGNKLQPKGQHYANIWQGEFPVTNTGEDGFQGTAPVDAFPPNGYGLYNIVGNAWEWTSDWWTVHHSVEETLNPKGPPSGKDRVKKGGLSKAHQRISQEYYDPYFQDVASEMLRRHTASRWKAFSSLEPCCSIRRHQQYAAIERLTCGKFELRCASLRKIDCLNTNIACSYSMRQDGPRLHCVD

SEQ ID NO: 65736 - protein, 349 aa, Homo sapiens
MAAPALGLVCGRCPELGLVLLLLLLSLLCGAAGSQEAGTGAGAGSLAGSCGCGTPQRPGAHGSSAAAHRYSREANAPGPVPGERQLAHSKMVPIPAGVFTMGTDDPQIKQDGEAPARRVTIDAFYMDAYEVSNTEFEKFVNSTGYLTEVAAAPWWLPVKGANWRHPEGPDSTILHRPDHPVLHVSWNDAVAYCTWAGKRLPTEAEWEYSCRGGLHNRLFPWGNKLQPKGQHYANIWQGEFPVTNTGEDGFQGTAPVDAFPPNGYGLYNIVGNAWEWTSDWWTVHHSVEETLNPKGPPSGKDRVKKGGSYMCHRSYCYRYRCAARSQNTPDSSASNLGFRCAADRLPTMD

SEQ ID NO: 65737 - protein, 354 aa, Homo sapiens
MAAPALGLVCGRCPELGLVLLLLLLSLLCGAAGSQEAGTGAGAGSLAGSCGCGTPQRPGAHGSSAAAHRYSREANAPGPVPGERQLAHSKMVPIPAGVFTMGTDDPQIKQDGEAPARRVTIDAFYMDAYEVSNTEFEKFVNSTGYLTEAEKFGDSFVFEGMLSEQVKTNIQQAVAAAPWWLPVKGANWRHPEGPDSTILHRPDHPVLHVSWNDAVAYCTWAGKRLPTEAEWEYSCRGGLHNRLFPWGNKLQPKGQHYANIWQGEFPVTNTGEDGFQGTAPVDAFPPNGYGLYNIVGNAWEWTSDWWTVHHSVEETLNPSYCYRYRCAARSQNTPDSSASNLGFRCAADRLPTMD

SEQ ID NO: 65738 - protein, 545 aa, Homo sapiens
MLLLHRAVVLRLQQACRLKSIPSRICIQACSTNDSFQPQRPSLTFSGDNSSTQGWRVMGTLLGLGAVLAYQDHRCRAAQESTHIYTKEEVSSHTSPETGIWVTLGSEVFDVTEFVDLHPGGPSKLMLAAGGPLEPFWALYAVHNQSHVRELLAQYKIGELNPEDKVAPTVETSDPYADDPVRHPALKVNSQRPFNAEPPPELLTENYITPNPIFFTRNHLPVPNLDPDTYRLHVVGAPGGQSLSLSLDDLHNFPRYEITVTLQCAGNRRSEMTQVKEVKGLEWRTGAISTARWAGARLCDVLAQAGHQLCETEAHVCFEGLDSDPTGTAYGASIPLARAMDPEAEVLLAYEMNGQPLPRDHGFPVRVVVPGVVGARHVKWLGRVSVQPEESYSHWQRRDYKGFSPSVDWETVDFDSAPSIQELPVQSAITEPRDGETVESGEVTIKGYAWSGGGRAVIRVDVSLDGGLTWQVAKLDGEEQRPRKAWAWRLWQLKAPVPAGQKELNIVCKAVDDGYNVQPDTVAPIWNLRGVLSNAWHRVHVYVSP

SEQ ID NO: 65739 - protein, 545 aa, Homo sapiens; identical to SEQ ID NO: 65738

SEQ ID NO: 65740 - protein, 545 aa, Homo sapiens; identical to SEQ ID NO: 65738

SEQ ID NO: 65741 - protein, 545 aa, Homo sapiens; identical to SEQ ID NO: 65738

SEQ ID NO: 65742 - protein, 162 aa, Homo sapiens
MLLLHRAVVLRLQQACRLKSIPSRICIQACSTNDSFQPQRPSLTFSGDNSSTQGWRVMGTLLGLGAVLAYQDHRCRAAQESTHIYTKEEVSSHTSPETGIWVTLGSEVFDVTEFVDLHPGGPSKLMLAAGGPLEPFWALYAVHNQSHVRELLAQYKIGELNP

SEQ ID NO: 65743 - protein, 43 aa, Homo sapiens
MLLLHRAVVLRLQQACRLKSIPSRICIQACSTNDSFQPQRPSL

SEQ ID NO: 65744 - protein, 545 aa, Homo sapiens; identical to SEQ ID NO: 65738

SEQ ID NO: 65745 - protein, 545 aa, Homo sapiens; identical to SEQ ID NO: 65738

SEQ ID NO: 65746 - protein, 121 aa, Homo sapiens
MLLLHRAVVLRLQQACRLKSIPSRICIQACSTNDSFQPQRPSLTFSGDNSSTQGWRVMGTLLGLGAVLAYQDHRCRAAQESTHIYTKEEVSSHTSPETGIWVTLGSEVFDVTEFVDLHPGG

SEQ ID NO: 65747 - protein, 260 aa, Homo sapiens
MAESEAETPSTPGEFESKYFEFHGVRLPPFCRGKMEEIANFPVRPSDVWIVTYPKSGTSLLQEVVYLVSQGADPDEIGLMNIDEQLPVLEYPQPGLDIIKELTSPRLIKSHLPYRFLPSDLHNGDSKVIYMARNPKDLVVSYYQFHRSLRTMSYRGTFQEFCRRFMNDKLGYGSWFEHVQEFWEHRMDSNVLFLKYEDMHRDLVTMVEQLARFLGVSCDKAQLEALTEHCHQLVDQCCNAEALPVGRAHCVFARKIFLSW

SEQ ID NO: 65748 - protein, 284 aa, Homo sapiens
MAESEAETPSTPGEFESKYFEFHGVRLPPFCRGKMEEIANFPVRPSDVWIVTYPKSGTSLLQEVVYLVSQGADPDEIGLMNIDEQLPVLEYPQPGLDIIKELTSPRLIKSHLPYRFLPSDLHNGDSKVIYMARNPKDLVVSYYQFHRSLRTMSYRGTFQEFCRRFMNDKLGYGSWFEHVQEFWEHRMDSNVLFLKYEDMHRDLVTMVEQLARFLGVSCDKAQLEALTEHCHQLVDQCCNAEALPVGRGRVGLWKDIFTVSMNEKFDLVYKQKMGKCDLTFDFYL

SEQ ID NO: 65749 - protein, 171 aa, Homo sapiens
MAESEAETPSTPGEFESKYFEFHGVRLPPFCRGKMEEIANFPVRPSDVWIVTYPKSVGYGSWFEHVQEFWEHRMDSNVLFLKYEDMHRDLVTMVEQLARFLGVSCDKAQLEALTEHCHQLVDQCCNAEALPVGRGRVGLWKDIFTVSMNEKFDLVYKQKMGKCDLTFDFYL

SEQ ID NO: 65750 - protein, 56 aa, Homo sapiens
MLAKLLCDQVVGAPIAVSAFYAGMSILQGKDDIFLDLKQKFWNTYMQTQSWLWRSL

SEQ ID NO: 65751 - protein, 295 aa, Homo sapiens
MELIQDTSRPPLEYVKGVPLIKYFAEALGPLQSFQARPDDLLISTYPKSGTTWVSQILDMIYQGGDLEKCHRAPIFMRVPFLEFKAPGIPSGMETLKDTPAPRLLKTHLPLALLPQTLLDQKVKVVYVARNAKDVAVSYYHFYHMAKVHPEPGTWDSFLEKFMVGEVSYGSWYQHVQEWWELSRTHPVLYLFYEDMKENPKREIQKILEFVGRSLPEETVDFVVQHTSFKEMKKNPMTNYTTVPQEFMDHSISPFMRKGMAGDWKTTFTVAQNERFDADYAEKMAGCSLSFRSEL

SEQ ID NO: 65752 - protein, 295 aa, Homo sapiens; identical to SEQ ID NO: 65751

SEQ ID NO: 65753 - protein, 217 aa, Homo sapiens
MLAKLLCDQVVGAPIAVSAFYAGMSILQGKDDIFLDLKQKFWNTYMVVYVARNAKDVAVSYYHFYHMAKVHPEPGTWDSFLEKFMVGEVSYGSWYQHVQEWWELSRTHPVLYLFYEDMKENPKREIQKILEFVGRSLPEETVDFVVQHTSFKEMKKNPMTNYTTVPQEFMDHSISPFMRKGMAGDWKTTFTVAQNERFDADYAEKMAGCSLSFRSEL

SEQ ID NO: 65754 - protein, 295 aa, Homo sapiens; identical to SEQ ID NO: 65751

SEQ ID NO: 65755 - protein, 295 aa, Homo sapiens; identical to SEQ ID NO: 65751

SEQ ID NO: 65756 - protein, 295 aa, Homo sapiens
MELIQDISRPPLEYVKGVPLIKYFAEALGPLQSFQARPDDLLISTYPKSGTTWVSQILDMIYQGGDLEKCHRAPIFMRVPFLEFKVPGIPSGMETLKNTPAPRLLKTHLPLALLPQTLLDQKVKVVYVARNAKDVAVSYYHFYHMAKVYPHPGTWESFLEKFMAGEVSYGSWYQHVQEWWELSRTHPVLYLFYEDMKENPKREIQKILEFVGRSLPEETVDLMVEHTSFKEMKKNPMTNYTTVRREFMDHSISPFMRKGMAGDWKTTFTVAQNERFDADYAKKMAGCSLSFRSEL

SEQ ID NO: 65757 - protein, 295 aa, Homo sapiens; identical to SEQ ID NO: 65756

SEQ ID NO: 65758 - protein, 192 aa, Homo sapiens
MELIQDISRPPLEYVKGVPLIKYFAEALGPLQSFQARPDDLLISTYPKSGTTWVSQILDMIYQGGDLEKCHRAPIFMRVPFLEFKVPGIPSGMETLKNTPAPRLLKTHLPLALLPQTLLDQKVKVVYVARNAKDVAVSYYHFYHMAKVYPHPGTWESFLEKFMAGEVSYGSWYQHVQEWWELSRTHPVLYLF

SEQ ID NO: 65759 - protein, 296 aa, Homo sapiens
MALTSDLGKQIKLKEVEGTLLQPATVDNWSQIQSFEAKPDDLLICTYPKAGTTWIQEIVDMIEQNGDVEKCQRAIIQHRHPFIEWARPPQPSGVEKAKAMPSPRILKTHLSTQLLPPSFWENNCKFLYVARNAKDCMVSYYHFQRMNHMLPDPGTWEEYFETFINGKVVWGSWFDHVKGWWEMKDRHQILFLFYEDIKRDPKHEIRKVMQFMGKKVDETVLDKIVQETSFEKMKENPMTNRSTVSKSILDQSISSFMRKGTVGDWKNHFTVAQNERFDEIYRRKMEGTSINFCMEL

SEQ ID NO: 65760 - protein, 307 aa, Homo sapiens
MALTSDLGKQIKLKEVEGTLLQPATVDNWSQIQSFEAKPDDLLICTYPKAGTTWIQEIVDMIEQNGDVEKCQRAIIQHRHPFIEWARPPQPSETGFHHVAQAGLKLLSSSNPPASTSQSAKITDLLPPSFWENNCKFLYVARNAKDCMVSYYHFQRMNHMLPDPGTWEEYFETFINGKVVWGSWFDHVKGWWEMKDRHQILFLFYEDIKRDPKHEIRKVMQFMGKKVDETVLDKIVQETSFEKMKENPMTNRSTVSKSILDQSISSFMRKGTVGDWKNHFTVAQNERFDEIYRRKMEGTSINFCMEL

SEQ ID NO: 65761 - protein, 310 aa, Homo sapiens
MALTSDLGKQIKLKEVEGTLLQPATVDNWSQIQSFEAKPDDLLICTYPKAGTTWIQEIVDMIEQNGDVEKCQRAIIQHRHPFIEWARPPQPSVLVLRRCFLLSYFKGVEKAKAMPSPRILKTHLSTQLLPPSFWENNCKFLYVARNAKDCMVSYYHFQRMNHMLPDPGTWEEYFETFINGKVVWGSWFDHVKGWWEMKDRHQILFLFYEDIKRDPKHEIRKVMQFMGKKVDETVLDKIVQETSFEKMKENPMTNRSTVSKSILDQSISSFMRKGTVGDWKNHFTVAQNERFDEIYRRKMEGTSINFCMEL

SEQ ID NO: 65762 - protein, 285 aa, Homo sapiens
MSDDFLWFEGIAFPTMGFRSETLRKVRDEFVIRDEDVIILTYPKSGTNWLAEILCLMHSKGDAKWIQSVPIWERSPWVESEIGYTALSETESPRLFSSHLPIQLFPKSFFSSKAKVIYLMRNPRDVLVSGYFFWKNMKFIKKPKSWEEYFEWFCQGTVLYGSWFDHIHGWMPMREEKNFLLLSYEELKQDTGRTIEKICQFLGKTLEPEELNLILKNSSFQSMKENKMSNYSLLSVDYVVDKAQLLRKGVSGDWKNHFTVAQAEDFDKLFQEKMADLPRELFPWE

SEQ ID NO: 65763 - protein, 365 aa, Homo sapiens
MDGPAEPQIPGLWDTYEDDISEISQKLPGEYFRYKGVPFPVGLYSLESISLAENTQDVRDDDIFIITYPKSGTTWMIEIICLILKEGDPSWIRSVPIWERAPWCETIVGAFSLPDQYSPRLMSSHLPIQIFTKAFFSSKAKVIYMGRNPRDVVVSLYHYSKIAGQLKDPGTPDQFLRDFLKGEVQFGSWFDHIKGWLRMKGKDNFLFITYEELQQDLQGSVERICGFLGRPLGKEALGSVVAHSTFSAMKANTMSNYTLLPPSLLDHRRGAFLRKGVCGDWKNHFTVAQSEAFDRAYRKQMRGMPTFPWDEDPEEDGSPDPEPSPEPEPKPSLEPNTSLEREPRPNSSPSPSPGQASETPHPRPS

SEQ ID NO: 65764 - protein, 350 aa, Homo sapiens
MASPPPFHSQKLPGEYFRYKGVPFPVGLYSLESISLAENTQDVRDDDIFIITYPKSGTTWMIEIICLILKEGDPSWIRSVPIWERAPWCETIVGAFSLPDQYSPRLMSSHLPIQIFTKAFFSSKAKVIYMGRNPRDVVVSLYHYSKIAGQLKDPGTPDQFLRDFLKGEVQFGSWFDHIKGWLRMKGKDNFLFITYEELQQDLQGSVERICGFLGRPLGKEALGSVVAHSTFSAMKANTMSNYTLLPPSLLDHRRGAFLRKGVCGDWKNHFTVAQSEAFDRAYRKQMRGMPTFPWDEDPEEDGSPDPEPSPEPEPKPSLEPNTSLEREPRPNSSPSPSPGQASETPHPRPS

SEQ ID NO: 65765 - protein, 346 aa, Homo sapiens
MVEKEEAGGGISEEEAAQYDRQIRLWGLEAQKRLRASRVLLVGLKGLGAEIAKNLILAGVKGLTMLDHEQVTPEDPGAQFLIRTGSVGRNRAEASLERAQNLNPMVDVKVDTEDIEKKPESFFTQFDAVCLTCCSRDVIVKVDQICHKNSIKFFTGDVFGYHGYTFANLGEHEFVEEKTKVAKVSQGVEDGPDTKRAKLDSSETTMVKKKVVFCPVKEALEVDWSSEKAKAALKRTTSDYFLLQVLLKFRTDKGRDPSSDTYEEDSELLLQIRNDVLDSLGISPDLLPEDFVRYCFSEMAPVCAVVGGILAQEIVKALSQRDPPHNNFFFFDGMKGNGIVECLGPK

SEQ ID NO: 65766 - protein, 266 aa, Homo sapiens
MVEKEEAGGGISEEEAAQYDRQIRLWGLEAQKRLRASRVLLVGLKGLGAEIAKNLILAGVKGLTMLDHEQVTPEDPGAQFLIRTGSVGRNRAEASLERAQNLNPMVDVKVDTEDIEKKPESFFTQFDAVCLTCCSRDVIVKVDQICHKNSIKFFTGDVFGYHGYTFANLGEHEFVEEKTKVAKVSQGVEDGPDTKRAKLDSSETTMVKKKVVFCPVKEALEVDWSSEKAKAALKRTTSDYFLLQGTASPRWPQCVRWLEGFWHRKL

SEQ ID NO: 65767 - protein, 299 aa, Homo sapiens
MVEKEEAGGGISEEEAAQYDRQIRLWGLEAQKRLRASRVLLVGLKGLGAEIAKNLILAGVKGLTMLDHEQVTPEDPGAQFLIRTGSVGRNRAEASLERAQNLNPMVDVKVDTEDIEKKPESFFTQFDAVCLTCCSRDVIVKVDQICHKNSIKFFTGDVFGYHGYTFANLGEHEFVEEKTKVAKVSQGVEDGPDTKRAKLDSSETTMVKKKVVFCPVKEALEVDWSSEKAKAALKRTTSDYFLLQGPVSAGPSSQQLLLLRWHEGEWDCGVPWPQVNSRFGSPRDANCSMPTCIPCPLPS

SEQ ID NO: 65768 - protein, 299 aa, Homo sapiens
MVEKEEAGGGISEEEAAQYDRQIRLWGLEAQKRLRASRVLLVGLKGLGAEIAKNLILAGVKGLTMLDHEQVTPEDPGAQFLIRTGSVGRNRAEASLERAQNLNPMVDVKVDTEDIEKKPESFFTQFDAVCLTCCSRDVIVKVDQICHKNSIKFFTGDVFGYHGYTFANLGEHEFVEEKTKVAKVSQGVEDGPDTKRAKLDSSETTMVKKKVVFCPVKEALEVDWSSEKAKAALKRTTSDYFLLQELFPRIVERVYAQRHPRSTERTHAKMLIPFLTKEKPGFLGEMAVSRSGVGKLQCS

SEQ ID NO: 65769 - protein, 172 aa, Homo sapiens [sequence omitted]

SEQ ID NO: 65770 - protein, 644 aa, Homo sapiens
MDDIADRMRMDAGEVTLVNHNSVFKTHLLPQTGFPEDQLSLSDQQILSSRQGHLDRSFTCSTRSAAYNPSYYSDNPSSDSFLGSGDLRTFGQSANGQWRNSTPSSSSSLQKSRNSRSLYLETRKTSSGLSNSFAGKSNHHCHVSAYEKSFPIKPVPSPSWSGSCRRSLLSPKKTQRRHVSTAEETVQEEEREIYRQLLQMVTGKQFTIAKPTTHFPLHLSRCLSSSKNTLKDSLFKNGNSCASQIIGSDTSSSGSASILTNQEQLSHSVYSLSSYTPDVAFGSKDSGTLHHPHHHHSVPHQPDNLAASNTQSEGSDSVILLKVKDSQTPTPSSTFFQAELWIKELTSVYDSRARERLRQIEEQKALALQLQNQRLQEREHSVHDSVELHLRVPLEKEIPVTVVQETQKKGHKLTDSEDEFPEITEEMEKEIKNVFRNGNQDEVLSEAFRLTITRKDIQTLNHLNWLNDEIINFYMNMLMERSKEKGLPSVHAFNTFFFTKLKTAGYQAVKRWTKKVDVFSVDILLVPIHLGVHWCLAVVDFRKKNITYYDSMGGINNEACRILLQYLKQESIDKKRKEFDTNGWQLFSKKSQEIPQQMNGSDCGMFACKYADCITKDRPINFTQQHMPYFRKRMVWEILHRKLL

SEQ ID NO: 65771 - protein, 162 aa, Homo sapiens
MKIPLTATICLPGSSPPGLCIFAKVSDVKRLEMDDIADRMRMDAGEVTLVNHNSVFKTHLLPQTGFPEDQLSLSDQQILSSRQGHLDRSFTCSTRSAAYNPSYYSGPGLGVLARYSWGKMLTFGGHHGVTLMQIRHMAVAGFSSFINFQIILPQTVFLAQAI

SEQ ID NO: 65772 - protein, 643 aa, Homo sapiens
MDDIADRMRMDAGEVTLVNHNSVFKTHLLPQTGFPEDQLSLSDQQILSSRQGHLDRSFTCSTRSAAYNPSYYSDNPSSDSFLGSGDLRTFGQSANGQWRNSTPSSSSSLQKSRNSRSLYLETRKTSSGLSNSFAGKSNHHCHVSAYEKSFPIKPVPSPSWSGSCRRSLLSPKKTQRRHVSTAEETVQEEEREIYRQLLQMVTGKQFTIAKPTTHFPLHLSRCLSSSKNTLKDSLFKNGNSCASQIIGSDTSSSGSASILTNQEQLSHSVYSLSSYTPDVAFGSKDSGTLHHPHHHHSVPHQPDNLAASNTQSEGSDSVILLKVKDSQTPTPSSTFFQAELWIKELTSVYDSRARERLRQIEEQKALALQLQNQRLQEREHSVHDSVELHLRVPLEKEIPVTVVQETQKKGHKLTDSEDEFPEITEEMEKEIKNVFRNGNQDEVLSEAFRLTITRKDIQTLNHLNWLNDEIINFYMNMLMERSKEKGLPSVHAFNTFFFTKLKTAGYQAVKRWTKKVDVFSVDILLVPIHLGVHWCLAVVDFRKKNITYYDSMGGINNEACRILLQYLKQESIDKKRKEFDTNGWQLFSKKSQIPQQMNGSDCGMFACKYADCITKDRPINFTQQHMPYFRKRMVWEILHRKLL

SEQ ID NO: 65773 - protein, 644 aa, Homo sapiens; identical to SEQ ID NO: 65770

SEQ ID NO: 65774 - protein, 643 aa, Homo sapiens; identical to SEQ ID NO: 65772

SEQ ID NO: 65775 - protein, 644 aa, Homo sapiens; identical to SEQ ID NO: 65770

SEQ ID NO: 65776 - protein, 755 aa, Homo sapiens
MKKQRKILWRKGIHLAFSEKWNTGFGGFKKFYFHQHLCILKAKLGRPVTWNRQLRHFQGRKKALQIQKTWIKDEPLCAKTKFNVATQNVSTLSSKVKRKDAKHFISSSKTLLRLQAEKLLSSAKNSDHEYCREKNLLKAVTDFPSNSALGQANGHRPRTDPQPSDFPMKFNGESQSPGESGTIVVTLNNHKRKGFCYGCCQGPEHHRNGGPLIPKKFQLNQHRRIKLSPLMMYEKLSMIRFRYRILRSQHFRTKSKVCKLRKAQRSWVQKVTGDHQETRRENGEGGSCSPFPSPEPKDPSCRHQPYFPDMDSSAVVKGTNSHVPDCHTKGSSFLGKELSLDEAFPDQQNGSATNAWDQSSCSSPKWECTELIHDIPLPEHRSNTMFISETEREIMTLGQENQTSSVSDDRVKLSVSGADTSVSSVDGPVSQKAVQNENSYQMEEDGSLKQSILSSELLDHPYCKSPLEAPLVCSGLKLENQVGGGKNSQKASPVDDEQLSVCLSGFLDEVMKKYGSLVPLSEKEVLGRLKDVFNEDFSNRKPFINREITNYRARHQKCNFRIFYNKHMLDMDDLATLDGQNWLNDQVINMYGELIMDAVPDKVHFFNSFFHRQLVTKGYNGVKRWTKKVDLFKKSLLLIPIHLEVHWSLITVTLSNRIISFYDSQGIHFKFCVENIRKYLLTEAREKNRPEFLQGWQTAVTKCIPQQKNDSDCGVFVLQYCKCLALEQPFQFSQEDMPRVRKRIYKELCECRLMD

SEQ ID NO: 65777 - protein, 1105 aa, Homo sapiens
MAAGKSGGSAGEITFLEALARSESKRDGGFKNNWSFDHEEESEGDTDKDGTNLLSVDEDEDSETSKGKKLNRRSEIVANSSGEFILKTYVRRNKSESFKTLKGNPIGLNMLSNNKKLSENTQNTSLCSGTVVHGRRFHHAHAQIPVVKTAAQRKEYPPHVQKVEINPVRLSRLQGVERIMKKTEESESQVEPEIKRKVQQKRHCSTYQPTPPLSPASKKCLTHLEDLQRNCRQAITLNESTGPLLRTSIHQNSGGQKSQNTGLTTKKFYGNNVEKVPIDIIVNCDDSKHTYLQTNGKVILPGAKIPKITNLKERKTSLSDLNDPIILSSDDDDDNDRTNRRESISPQPADSACSSPAPSTGKVEAALNENTCRAERELRSIPEDSELNTVTLPRKARMKDQFGNSIINTPLKRRKVFSQEPPDALALSCQSSFDSVILNCRSIRVGTLFRLLIEPVIFCLDFIKIQLDEPDHDPVEIILNTSDLTKCEWCNVRKLPVVFLQAIPAVYQKLSIQLQMNKEDKVWNDCKGVNKLTNLEEQYIILIFQNGLDPPANMVFESIINEIGIKNNISNFFAKIPFEEANGRLVACTRTYEESIKGSCGQKENKIKTVSFESKIQLRSKQEFQFFDEEEETGENHTIFIGPVEKLIVYPPPPAKGGISVTNEDLHCLNEGEFLNDVIIDFYLKYLVLEKLKKEDADRIHIFSSFFYKRLNQRERRNHETTNLSIQQKRHGRVKTWTRHVDIFEKDFIFVPLNEAAHWFLAVVCFPGLEKPKYEPNPHYHENAVIQKCSTVEDSCISSSASEMESCSQNSSAKPVIKKMLNKKHCIAVIDSNPGQEESDPRYKRNICSVKYSVKKINHTASENEEFNKGESTSQKVADRTKSENGLQNESLSSTHHTDGLSKIRLNYSDESPEAGKMLEDELVDFSEDQDNQDDSSDDGFLADDNCSSEIGQWHLKPTICKQPCILLMDSLRGPSRSNVVKILREYLEVEWEVKKGSKRSFSKDVMKGSNPKVPQQNNFSDCGVYVLQYVESFFENPILSFELPMNLANWFPPPRMRTKREEIRNIILKLQEDQSKEKRKHKDTYSTEAPLGEGTEQYVNSISD

SEQ ID NO: 65778 - protein, 1112 aa, Homo sapiens
MAAGKSGGSAGEITFLEALARSESKRDGGFKNNWSFDHEEESEGDTDKDGTNLLSVDEDEDSETSKGKKLNRRSEIVANSSGEFILKTYVRRNKSESFKTLKGNPIGLNMLSNNKKLSENTQNTSLCSGTVVHGRRFHHAHAQIPVVKTAAQRLLSNQILKEYPPHVQKVEINPVRLSRLQGVERIMKKTEESESQVEPEIKRKVQQKRHCSTYQPTPPLSPASKKCLTHLEDLQRNCRQAITLNESTGPLLRTSIHQNSGGQKSQNTGLTTKKFYGNNVEKVPIDIIVNCDDSKHTYLQTNGKVILPGAKIPKITNLKERKTSLSDLNDPIILSSDDDDDNDRTNRRESISPQPADSACSSPAPSTGKVEAALNENTCRAERELRSIPEDSELNTVTLPRKARMKDQFGNSIINTPLKRRKVFSQEPPDALALSCQSSFDSVILNCRSIRVGTLFRLLIEPVIFCLDFIKIQLDEPDHDPVEIILNTSDLTKCEWCNVRKLPVVFLQAIPAVYQKLSIQLQMNKEDKVWNDCKGVNKLTNLEEQYIILIFQNGLDPPANMVFESIINEIGIKNNISNFFAKIPFEEANGRLVACTRTYEESIKGSCGQKENKIKTVSFESKIQLRSKQEFQFFDEEEETGENHTIFIGPVEKLIVYPPPPAKGGISVTNEDLHCLNEGEFLNDVIIDFYLKYLVLEKLKKEDADRIHIFSSFFYKRLNQRERRNHETTNLSIQQKRHGRVKTWTRHVDIFEKDFIFVPLNEAAHWFLAVVCFPGLEKPKYEPNPHYHENAVIQKCSTVEDSCISSSASEMESCSQNSSAKPVIKKMLNKKHCIAVIDSNPGQEESDPRYKRNICSVKYSVKKINHTASENEEFNKGESTSQKVADRTKSENGLQNESLSSTHHTDGLSKIRLNYSDESPEAGKMLEDELVDFSEDQDNQDDSSDDGFLADDNCSSEIGQWHLKPTICKQPCILLMDSLRGPSRSNVVKILREYLEVEWEVKKGSKRSFSKDVMKGSNPKVPQQNNFSDCGVYVLQYVESFFENPILSFELPMNLANWFPPPRMRTKREEIRNIILKLQEDQSKEKRKHKDTYSTEAPLGEGTEQYVNSISD

SEQ ID NO: 65779 - protein, 1112 aa, Homo sapiens
MAAGKSGGSAGEITFLEALARSESKRDGGFKNNWSFDHEEESEGDTDKDGTNLLSVDEDEDSETSKGKKLNRRSEIVANSSGEFILKTYVRRNKSESFKTLKGNPIGLNMLSNNKKLSENTQNTSLCSGTVVHGRRFHHAHAQIPVVKTAAQSSLDRKERKEYPPHVQKVEINPVRLSRLQGVERIMKKTEESESQVEPEIKRKVQQKRHCSTYQPTPPLSPASKKCLTHLEDLQRNCRQAITLNESTGPLLRTSIHQNSGGQKSQNTGLTTKKFYGNNVEKVPIDIIVNCDDSKHTYLQTNGKVILPGAKIPKITNLKERKTSLSDLNDPIILSSDDDDDNDRTNRRESISPQPADSACSSPAPSTGKVEAALNENTCRAERELRSIPEDSELNTVTLPRKARMKDQFGNSIINTPLKRRKVFSQEPPDALALSCQSSFDSVILNCRSIRVGTLFRLLIEPVIFCLDFIKIQLDEPDHDPVEIILNTSDLTKCEWCNVRKLPVVFLQAIPAVYQKLSIQLQMNKEDKVWNDCKGVNKLTNLEEQYIILIFQNGLDPPANMVFESIINEIGIKNNISNFFAKIPFEEANGRLVACTRTYEESIKGSCGQKENKIKTVSFESKIQLRSKQEFQFFDEEEETGENHTIFIGPVEKLIVYPPPPAKGGISVTNEDLHCLNEGEFLNDVIIDFYLKYLVLEKLKKEDADRIHIFSSFFYKRLNQRERRNHETTNLSIQQKRHGRVKTWTRHVDIFEKDFIFVPLNEAAHWFLAVVCFPGLEKPKYEPNPHYHENAVIQKCSTVEDSCISSSASEMESCSQNSSAKPVIKKMLNKKHCIAVIDSNPGQEESDPRYKRNICSVKYSVKKINHTASENEEFNKGESTSQKVADRTKSENGLQNESLSSTHHTDGLSKIRLNYSDESPEAGKMLEDELVDFSEDQDNQDDSSDDGFLADDNCSSEIGQWHLKPTICKQPCILLMDSLRGPSRSNVVKILREYLEVEWEVKKGSKRSFSKDVMKGSNPKVPQQNNFSDCGVYVLQYVESFFENPILSFELPMNLANWFPPPRMRTKREEIRNIILKLQEDQSKEKRKHKDTYSTEAPLGEGTEQYVNSISD

SEQ ID NO: 65780 - protein, 357 aa, Homo sapiens
MAAGKSGGSAGEITFLEALARSESKRDGGFKNNWSFDHEEESEGDTDKDGTNLLSVDEDEDSETSKGKKLNRRSEIVANSSGEFILKTYVRRNKSESFKTLKGNPIGLNMLSNNKKLSENTQNTSLCSGTVVHGRRFHHAHAQIPVVKTAAQSNQILKEYPPHVQKVEINPVRLSRLQGVVILSSDDDDDNDRTNRRESISPQPADSACSSPAPSTGKVEAALNENTCRAERELRSIPEDSELNTVTLPRKARMKDQFGNSIINTPLKRRKVFSQEPPDALALSCQSSFDSVILNCRSIRVGTLFRLLIEPVIVIIKIFFITHKKPDHDPVEIILNTSDLTKCEWCNVRKLPVVFLQ

SEQ ID NO: 65781 - protein, 368 aa, Homo sapiens
MKDQFGNSIINTPLKRRKVFSQEPPDALALSCQSSFDSVILNCRSIRVGTLFRLLIEPVIFCLDFIKIQLDEPDHDPVEIILNTSDLTKCEWCNVRKLPVVFLQAIPAVYQKLSIQLQMNKEDKVWNDCKGVNKLTNLEEQYIILIFQNGLDPPANMVFESIINEIGIKNNISNFFAKIPFEEANGRLVACTRTYEESIKGSCGQKENKIKTVSFESKIQLRSKQEFQFFDEEEETGENHTIFIGPVEKLIVYPPPPAKGGISVTNEDLHCLNEGEFLNDVIIDFYLKYLVLEKLKKEDADRIHIFSSFFYKRLNQRERRNHETTNLSIQQKRHGRVKTWTRHVDIFEKDFIFVPLNEAWLKQNQTKL

SEQ ID NO: 65782 - protein, 984 aa, Homo sapiens
MDKRKLGRRPSSSEIITEGKRKKSSSDLSEIRKMLNAKPEDVHVQSPLSKFRSSERWTLPLQWERSLRNKVISLDHKNKKHIRGCPVTSKSSPERIPRVILTNVLGTELGRKYIRTPPVTEGSLSDTDNLQSEQLSSSSDGSLESYQNLNPHKSCYLSERGSQRSKTVDDNSAKQTAHNKEKRRKDDGISLLISDTQPEDLNSGSRGCDHLEQESRNKDVKYSDSKVELTLISRKTKRRLRNNLPDSQYCTSLDKSTEQTKKQEDDSTISTEFEKPSENYHQDPKLPEEITTKPTKSDFTKLSSLNSQELTLSNATKSASAGSTTETVENSNSIDIVGISSLVEKDENELNTIEKPILRGHNEGNQSLISAEPIVVSSDEEGPVEHKSSEILKLQSKQDRETTNENESTSESALLELPLITCESVQMSSELCPYNPVMENISSIMPSNEMDLQLDFIFTSVYIGKIKGASKGCVTITKKYIKIPFQVSLNEISLLVDTTHLKRFGLWKSKDDNHSKRSHAILFFWVSSDYLQEIQTQLEHSVLSQQSKSSEFIFLELHNPVSQREELKLKDIMTEISIISGELELSYPLSWVQAFPLFQNLSSKESSFIHYYCVSTCSFPAGVAVAEEMKLKSVSQPSNTDAAKPTYTFLQKQSSGCYSLSITSNPDEEWREVRHTGLVQKLIVYPPPPTKGGLGVTNEDLECLEEGEFLNDVIIDFYLKYLILEKASDELVERSHIFSSFFYKCLTRKENNLTEDNPNLSMAQRRHKRVRTWTRHINIFNKDYIFVPVNESSHWYLAVICFPWLEEAVYEDFPQTVSQQSQAQQSQNDNKTIDNDLRTTSTLSLSAEDSQSTESNMSVPKKMCKRPCILILDSLKAASVQNTVQNLREYLEVEWEVKLKTHRQFSKTNMVDLCPKVPKQDNSSDCGVYLLQYVESFFKDPIVNFELPIHLEKWFPRHVIKTKREDIRELILKLHLQQQKGSSS

SEQ ID NO: 65783 - protein, 1017 aa, Homo sapiens
MLNAKPEDVHVQSPLSKFRSSERWTLPLQWERSLRNKVISLDHKNKKHIRGCPVTSKSSPERQLKVMLTNVLWTDLGRKFRKTLPRNDANLCDANKVQSDSLPSTSVDSLETCQKLEPLRQSLNLSERIPRVILTNVLGTELGRKYIRTPPVTEGSLSDTDNLQSEQLSSSSDGSLESYQNLNPHKSCYLSERGSQRSKTVDDNSAKQTAHNKEKRRKDDGISLLISDTQPEDLNSGSRGCDHLEQESRNKDVKYSDSKVELTLISRKTKRRLRNNLPDSQYCTSLDKSTEQTKKQEDDSTISTEFEKPSENYHQDPKLPEEITTKPTKSDFTKLSSLNSQELTLSNATKSASAGSTTETVENSNSIDIVGISSLVEKDENELNTIEKPILRGHNEGNQSLISAEPIVVSSDEEGPVEHKSSEILKLQSKQDRETTNENESTSESALLELPLITCESVQMSSELCPYNPVMENISSIMPSNEMDLQLDFIFTSVYIGKIKGASKGCVTITKKYIKIPFQVSLNEISLLVDTTHLKRFGLWKSKDDNHSKRSHAILFFWVSSDYLQEIQTQLEHSVLSQQSKSSEFIFLELHNPVSQREELKLKDIMTEISIISGELELSYPLSWVQAFPLFQNLSSKESSFIHYYCVSTCSFPAGVAVAEEMKLKSVSQPSNTDAAKPTYTFLQKQSSGCYSLSITSNPDEEWREVRHTGLVQKLIVYPPPPTKGGLGVTNEDLECLEEGEFLNDVIIDFYLKYLILEKASDELVERSHIFSSFFYKCLTRKENNLTEDNPNLSMAQRRHKRVRTWTRHINIFNKDYIFVPVNESSHWYLAVICFPWLEEAVYEDFPQTVSQQSQAQQSQNDNKTIDNDLRTTSTLSLSAEDSQSTESNMSVPKKMCKRPCILILDSLKAASVQNTVQNLREYLEVEWEVKLKTHRQFSKTNMVDLCPKVPKQDNSSDCGVYLLQYVESFFKDPIVNFELPIHLEKWFPRHVIKTKREDIRELILKLHLQQQKGSSS

SEQ ID NO: 65784 - protein, 886 aa, Homo sapiens
MLNAKPEDVHVQSPLSKFRSSERWTLPLQWERSLRNKVISLDHKNKKHIRGCPVTSKSSPERGSQRSKTVDDNSAKQTAHNKEKRRKDDGISLLISDTQPEDLNSGSRGCDHLEQESRNKDVKYSDSKVELTLISRKTKRRLRNNLPDSQYCTSLDKSTEQTKKQEDDSTISTEFEKPSENYHQDPKLPEEITTKPTKSDFTKLSSLNSQELTLSNATKSASAGSTTETVENSNSIDIVGISSLVEKDENELNTIEKPILRGHNEGNQSLISAEPIVVSSDEEGPVEHKSSEILKLQSKQDRETTNENESTSESALLELPLITCESVQMSSELCPYNPVMENISSIMPSNEMDLQLDFIFTSVYIGKIKGASKGCVTITKKYIKIPFQVSLNEISLLVDTTHLKRFGLWKSKDDNHSKRSHAILFFWVSSDYLQEIQTQLEHSVLSQQSKSSEFIFLELHNPVSQREELKLKDIMTEISIISGELELSYPLSWVQAFPLFQNLSSKESSFIHYYCVSTCSFPAGVAVAEEMKLKSVSQPSNTDAAKPTYTFLQKQSSGCYSLSITSNPDEEWREVRHTGLVQKLIVYPPPPTKGGLGVTNEDLECLEEGEFLNDVIIDFYLKYLILEKASDELVERSHIFSSFFYKCLTRKENNLTEDNPNLSMAQRRHKRVRTWTRHINIFNKDYIFVPVNESSHWYLAVICFPWLEEAVYEDFPQTVSQQSQAQQSQNDNKTIDNDLRTTSTLSLSAEDSQSTESNMSVPKKMCKRPCILILDSLKAASVQNTVQNLREYLEVEWEVKLKTHRQFSKTNMVDLCPKVPKQDNSSDCGVYLLQYVESFFKDPIVNFELPIHLEKWFPRHVIKTKREDIRELILKLHLQQQKGSSS

SEQ ID NO: 65785 - protein, 238 aa, Homo sapiens
MKKFLYIKSVFHTLRMAQRRHKRVRTWTRHINIFNKDYIFVPVNESSHWYLAVICFPWLEEAVYEDFPQTVSQQSQAQQSQNDNKTIDNDLRTTSTLSLSAEDSQSTESNMSVPKKMCKRPCILILDSLKAASVQNTVQNLREYLEVEWEVKLKTHRQFSKTNMVDLCPKVPKQDNSSDCGVYLLQYVESFFKDPIVNFELPIHLEKWFPRHVIKTKREDIRELILKLHLQQQKGSSS

SEQ ID NO: 65786 - protein, 985 aa, Homo sapiens
MDKRKLGRRPSSSEIITEGKRKKSSSDLSEIRKMLNAKPEDVHVQSPLSKFRSSERWTLPLQWERSLRNKVISLDHKNKKHIRGCPVTSKSSPERQLKVMLTNVLWTDLGRKFRKTLPRNDANLCDANKVQSDSLPSTSVDSLETCQKLEPLRQSLNLSERGSQRSKTVDDNSAKQTAHNKEKRRKDDGISLLISDTQPEDLNSGSRGCDHLEQESRNKDVKYSDSKVELTLISRKTKRRLRNNLPDSQYCTSLDKSTEQTKKQEDDSTISTEFEKPSENYHQDPKLPEEITTKPTKSDFTKLSSLNSQELTLSNATKSASAGSTTETVENSNSIDIVGISSLVEKDENELNTIEKPILRGHNEGNQSLISAEPIVVSSDEEGPVEHKSSEILKLQSKQDRETTNENESTSESALLELPLITCESVQMSSELCPYNPVMENISSIMPSNEMDLQLDFIFTSVYIGKIKGASKGCVTITKKYIKIPFQVSLNEISLLVDTTHLKRFGLWKSKDDNHSKRSHAILFFWVSSDYLQEIQTQLEHSVLSQQSKSSEFIFLELHNPVSQREELKLKDIMTEISIISGELELSYPLSWVQAFPLFQNLSSKESSFIHYYCVSTCSFPAGVAVAEEMKLKSVSQPSNTDAAKPTYTFLQKQSSGCYSLSITSNPDEEWREVRHTGLVQKLIVYPPPPTKGGLGVTNEDLECLEEGEFLNDVIIDFYLKYLILEKASDELVERSHIFSSFFYKCLTRKENNLTEDNPNLSMAQRRHKRVRTWTRHINIFNKDYIFVPVNESSHWYLAVICFPWLEEAVYEDFPQTVSQQSQAQQSQNDNKTIDNDLRTTSTLSLSAEDSQSTESNMSVPKKMCKRPCILILDSLKAASVQNTVQNLREYLEVEWEVKLKTHRQFSKTNMVDLCPKVPKQDNSSDCGVYLLQYVESFFKDPIVNFELPIHLEKWFPRHVIKTKREDIRELILKLHLQQQKGSSS

SEQ ID NO: 65787 - protein, 1050 aa, Homo sapiens
MDKRKLGRRPSSSEIITEGKRKKSSSDLSEIRKMLNAKPEDVHVQSPLSKFRSSERWTLPLQWERSLRNKVISLDHKNKKHIRGCPVTSKSSPERQLKVMLTNVLWTDLGRKFRKTLPRNDANLCDANKVQSDSLPSTSVDSLETCQKLEPLRQSLNLSERIPRVILTNVLGTELGRKYIRTPPVTEGSLSDTDNLQSEQLSSSSDGSLESYQNLNPHKSCYLSERGSQRSKTVDDNSAKQTAHNKEKRRKDDGISLLISDTQPEDLNSGSRGCDHLEQESRNKDVKYSDSKVELTLISRKTKRRLRNNLPDSQYCTSLDKSTEQTKKQEDDSTISTEFEKPSENYHQDPKLPEEITTKPTKSDFTKLSSLNSQELTLSNATKSASAGSTTETVENSNSIDIVGISSLVEKDENELNTIEKPILRGHNEGNQSLISAEPIVVSSDEEGPVEHKSSEILKLQSKQDRETTNENESTSESALLELPLITCESVQMSSELCPYNPVMENISSIMPSNEMDLQLDFIFTSVYIGKIKGASKGCVTITKKYIKIPFQVSLNEISLLVDTTHLKRFGLWKSKDDNHSKRSHAILFFWVSSDYLQEIQTQLEHSVLSQQSKSSEFIFLELHNPVSQREELKLKDIMTEISIISGELELSYPLSWVQAFPLFQNLSSKESSFIHYYCVSTCSFPAGVAVAEEMKLKSVSQPSNTDAAKPTYTFLQKQSSGCYSLSITSNPDEEWREVRHTGLVQKLIVYPPPPTKGGLGVTNEDLECLEEGEFLNDVIIDFYLKYLILEKASDELVERSHIFSSFFYKCLTRKENNLTEDNPNLSMAQRRHKRVRTWTRHINIFNKDYIFVPVNESSHWYLAVICFPWLEEAVYEDFPQTVSQQSQAQQSQNDNKTIDNDLRTTSTLSLSAEDSQSTESNMSVPKKMCKRPCILILDSLKAASVQNTVQNLREYLEVEWEVKLKTHRQFSKTNMVDLCPKVPKQDNSSDCGVYLLQYVESFFKDPIVNFELPIHLEKWFPRHVIKTKREDIRELILKLHLQQQKGSSS

SEQ ID NO: 65788 - protein, 589 aa, Homo sapiens
MYRWLVRILGTIFRFCDRSVPPARALLKRRRSDSTLFSTVDTDEIPAKRPRLDCFIHQVKNSLYNAASLFGFPFQLTTKPMVTSACNGTRNVAPSGEVFSNSSSCELTGSGSWNNMLKLGNKSPNGISDYPKIRVTVTRDQPRRVLPSFGFTLNSEGCNRRPGGRRHSKGNPESSLMWKPQEQAVTEMISEESGKGLRRPHCTVEEGVQKEEREKYRKLLERLKESGHGNSVCPVTSNYHSSQRSQMDTLKTKGWGEEQNHGVKTTQFVPKQYRLVETRGPLCSLRSEKRCSKGKITDTETMVGIRFENESRRGYQLEPDLSEEVSARLRLGSGSNGLLRRKVSIIETKEKNCSGKERDRRTDDLLELTEDMEKEISNALGHGPQDEILSSAFKLRITRGDIQTLKNYHWLNDEVINFYMNLLVERNKKQGYPALHVFSTFFYPKLKSGGYQAVKRWTKGVNLFEQEIILVPIHRKVHWSLVVIDLRKKCLKYLDSMGQKGHRICEILLQYLQDESKTKRNSDLNLLEWTHHSMKPHEIPQQLNGSDCGMFTCKYADYISRDKPITFTQHQMPLFRKKMVWEILHQQLL

SEQ ID NO: 65789 - protein, 413 aa, Homo sapiens [sequence omitted]

SEQ ID NO: 65790 - protein, 460 aa, Homo sapiens
MYRWLVRILGTIFRFCDRSVPPARALLKRRRSDSTLFSTVDTDEIPAKRPRLDCFIHQVKNSLYNAASLFGFPFQLTTKPMVTSACNGTRNVAPSGEVNGNSVCPVTSNYHSSQRSQMDTLKTKGWGEEQNHGVKTTQFVPKQYRLVETRGPLCSLRSEKRCSKGKITDTETMVGIRFENESRRGYQLEPDLSEEVSARLRLGSGSNGLLRRKVSIIETKEKNCSGKERDRRTDDLLELTEDMEKEISNALGHGPQDEILSSAFKLRITRGDIQTLKNYHWLNDEVINFYMNLLVERNKKQGYPALHVFSTFFYPKLKSGGYQAVKRWTKGVNLFEQEIILVPIHRKVHWSLVVIDLRKKCLKYLDSMGQKGHRICEILLQYLQDESKTKRNSDLNLLEWTHHSMKPHEIPQQLNGSDCGMFTCKYADYISRDKPITFTQHQMPLFRKKMVWEILHQQLL

SEQ ID NO: 65791 - protein, 579 aa, Homo sapiens
MDSHPCLYCGPQDSEGTNWQTSPSTLFSTVDTDEIPAKRPRLDCFIHQVKNSLYNAASLFGFPFQLTTKPMVTSACNGTRNVAPSGEVFSNSSSCELTGSGSWNNMLKLGNKSPNGISDYPKIRVTVTRDQPRRVLPSFGFTLNSEGCNRRPGGRRHSKGNPESSLMWKPQEQAVTEMISEESGKGLRRPHCTVEEGVQKEEREKYRKLLERLKESGHGNSVCPVTSNYHSSQRSQMDTLKTKGWGEEQNHGVKTTQFVPKQYRLVETRGPLCSLRSEKRCSKGKITDTETMVGIRFENESRRGYQLEPDLSEEVSARLRLGSGSNGLLRRKVSIIETKEKNCSGKERDRRTDDLLELTEDMEKEISNALGHGPQDEILSSAFKLRITRGDIQTLKNYHWLNDEVINFYMNLLVERNKKQGYPALHVFSTFFYPKLKSGGYQAVKRWTKGVNLFEQEIILVPIHRKVHWSLVVIDLRKKCLKYLDSMGQKGHRICEILLQYLQDESKTKRNSDLNLLEWTHHSMKPHEIPQQLNGSDCGMFTCKYADYISRDKPITFTQHQMPLFRKKMVWEILHQQLL

SEQ ID NO: 65792 - protein, 573 aa, Homo sapiens
MKETIQGTGSWGPEPPGPGIPPAYSSPRRERLRWPPPPKPRLKSGGGFGPDPGSGTTVPARRLPVPRPSFDASASEEEEEEEEEEDEDEEEEVAAWRLPPRWSQLGTSQRPRPSRPTHRKTCSQRRRRAMRAFRMLLYSKSTSLTFHWKLWGRHRGRRRGLAHPKNHLSPQQGGATPQVPSPCCRFDSPRGPPPPRLGLLGALMAEDGVRGSPPVPSGPPMEEDGLRWTPKSPLDPDSGLLSCTLPNGFGGQSGPEGERSLAPPDASILISNVCSIGDHVAQELFQGSDLGMAEEAERPGEKAGQHSPLREEHVTCVQSILDEFLQTYGSLIPLSTDEVVEKLEDIFQQEFSTPSRKGLVLQLIQSYQRMPGNAMVRGFRVAYKRHVLTMDDLGTLYGQNWLNDQVMNMYGDLVMDTVPEKVHFFNSFFYDKLRTGYDGVKRWTKNVDIFNKELLLIPIHLEVHWSLISVDVRRRTITYFDSQRTLNRRCPKHIAKYLQAEAVKKDRLDFHQGWKGYFKMNVARQNNDSDCGAFVLQYCKHLALSQPFSFTQQDMPKLRRQIYKELCHCKLTV

SEQ ID NO: 65793 - protein, 574 aa, Homo sapiens
MKETIQGTGSWGPEPPGPGIPPAYSSPRRERLRWPPPPKPRLKSGGGFGPDPGSGTTVPARRLPVPRPSFDASASEEEEEEEEEEDEDEEEEVAAWRLPPRWSQLGTSQRPRPSRPTHRKTCSQRRRRAMRAFRMLLYSKSTSLTFHWKLWGRHRGRRRGLAHPKNHLSPQQGGATPQVPSPCCRFDSPRGPPPPRLGLLGALMAEDGVRGSPPVPSGPPMEEDGLRWTPKSPLDPDSGLLSCTLPNGFGGQSGPEGERSLAPPDASILISNVCSIGDHVAQELFQGSDLGMAEEAERPGEKAGQHSPLREEHVTCVQSILDEFLQTYGSLIPLSTDEVVEKLEDIFQQEFSTPSRKGLVLQLIQSYQRMPGNAMVRGFRVAYKRHVLTMDDLGTLYGQNWLNDQVMNMYGDLVMDTVPEKVHFFNSFFYDKLRTKGYDGVKRWTKNVDIFNKELLLIPIHLEVHWSLISVDVRRRTITYFDSQRTLNRRCPKHIAKYLQAEAVKKDRLDFHQGWKGYFKMNVARQNNDSDCGAFVLQYCKHLALSQPFSFTQQDMPKLRRQIYKELCHCKLTV

SEQ ID NO: 65794 - protein, 1246 aa, Homo sapiens
MMETERLVLPPPDPLDLPLRAVELGCTGHWELLNLPGAPESSLPHGLPPCAPDLQQEAEQLFLSSPAWLPLHGVEHSARKWQRKTDPWSLLAVLGAPVPSDLQAQRHPTTGQILGYKEVLLENTNLSATTSLSLRRPPGPASQSLWGNPTQYPFWPGGMDEPTITDLNTREEAEEEIDFEKDLLTIPPGFKKGMDFAPKDCPTPAPGLLSLSCMLEPLDLGGGDEDENEAVGQPGGPRGDTVSASPCSAPLARASSLEDLVLKEASTAVSTPEAPEPPSQEQWAIPVDATSPVGDFYRLIPQPAFQWAFEPDVFQKQAILHLERHDSVFVAAHTSAGKTVVAEYAIALAQKHMTRTIYTSPIKALSNQKFRDFRNTFGDVGLLTGDVQLHPEASCLIMTTEILRSMLYSGSDVIRDLEWVIFDEVHYINDVERGVVWEEVLIMLPDHVSIILLSATVPNALEFADWIGRLKRRQIYVISTVTRPVPLEHYLFTGNSSKTQGELFLLLDSRGAFHTKGYYAAVEAKKERMSKHAQTFGAKQPTHQGGPAQDRGVYLSLLASLRTRAQLPVVVFTFSRGRCDEQASGLTSLDLTTSSEKSEIHLFLQRCLARLRGSDRQLPQVLHMSELLNRGLGVHHSGILPILKEIVEMLFSRGLVKVLFATETFAMGVNMPARTVVFDSMRKHDGSTFRDLLPGEYVQMAGRAGRRGLDPTGTVILLCKGRVPEMADLHRMMMGKPSQLQSQFRLTYTMILNLLRVDALRVEDMMKRSFSEFPSRKDSKAHEQALAELTKRLGALEEPDMTGQLVDLPEYYSWGEELTETQHMIQRRIMESVNGLKSLSAGRVVVVKNQEHHNALGVILQVSSNSTSRVFTTLVLCDKPLSQDPQDRGPATAEVPYPDDLVGFKLFLPEGPCDHTVVKLQPGDMAAITTKVLRVNGEKILEDFSKRQQPKFKKDPPLAAVTTAVQELLRLAQAHPAGPPTLDPVNDLQLKDMSVVEGGLRARKLEELIQGAQCVHSPRFPAQYLKLRERMQIQKEMERLRFLLSDQSLLLLPEYHQRVEVLRTLGYVDEAGTVKLAGRVACAMSSHELLLTELMFDNALSTLRPEEIAALLSGLVCQSPGDAGDQLPNTLKQGIERVRAVAKRIGEVQVACGLNQTVEEFVGELNFGLVEVVYEWARGMPFSELAGLSGTPEGLVVRCIQRLAEMCRSLRGAARLVGEPVLGAKMETAATLLRRDIVFAASLYTQ

SEQ ID NO: 65795 - protein, 1246 aa, Homo sapiens
MMETERLVLPPPDPLDLPLRAVELGCTGHWELLNLPGAPESSLPHGLPPCAPDLQQEAEQLFLSSPAWLPLHGVEHSARKWQRKTDPWSLLAVLGAPVPSDLQAQRHPTTGQILGYKEVLLENTNLSATTSLSLRRPPGPASQSLWGNPTQYPFWPGGMDEPTITDLNTREEAEEEIDFEKDLLTIPPGFKKGMDFAPKDCPTPAPGLLSLSCLLEPLDLGGGDEDENEAVGQPGGPRGDTVSASPCSAPLARASSLEDLVLKEASTAVSTPEAPEPPSQEQWAIPVDATSPVGDFYRLIPQPAFQWAFEPDVFQKQAILHLERHDSVFVAAHTSAGKTVVAEYAIALAQKHMTRTIYTSPIKALSNQKFRDFRNTFGDVGLLTGDVQLHPEASCLIMTTEILRSMLYSGSDVIRDLEWVIFDEVHYINDVERGVVWEEVLIMLPDHVSIILLSATVPNALEFADWIGRLKRRQIYVISTVTRPVPLEHYLFTGNSSKTQGELFLLLDSRGAFHTKGYYAAVEAKKERMSKHAQTFGAKQPTHQGGPAQDRGVYLSLLASLRTRAQLPVVVFTFSRGRCDEQASGLTSLDLTTSSEKSEIHLFLQRCLARLRGSDRQLPQVLHMSELLNRGLGVHHSGILPILKEIVEMLFSRGLVKVLFATETFAMGVNMPARTVVFDSMRKHDGSTFRDLLPGEYVQMAGRAGRRGLDPTGTVILLCKGRVPEMADLHRMMMGKPSQLQSQFRLTYTMILNLLRVDALRVEDMMKRSFSEFPSRKDSKAHEQALAELTKRLGALEEPDMTGQLVDLPEYYSWGEELTETQHMIQRRIMESVNGLKSLSAGRVVVVKNQEHHNALGVILQVSSNSTSRVFTTLVLCDKPLSQDPQDRGPATAEVPYPDDLVGFKLFLPEGPCDHTVVKLQPGDMAAITTKVLRVNGEKILEDFSKRQQPKFKKDPPLAAVTTAVQELLRLAQAHPAGPPTLDPVNDLQLKDMSVVEGGLRARKLEELIQGAQCVHSPRFPAQYLKLRERMQIQKEMERLRFLLSDQSLLLLPEYHQRVEVLRTLGYVDEAGTVKLAGRVACAMSSHELLLTELMFDNALSTLRPEEIAALLSGLVCQSPGDAGDQLPNTLKQGIERVRAVAKRIGEVQVACGLNQTVEEFVGELNFGLVEVVYEWARGMPFSELAGLSGTPEGLVVRCIQRLAEMCRSLRGAARLVGEPVLGAKMETAATLLRRDIVFAASLYTQ

SEQ ID NO: 65796 - protein, 1246 aa, Homo sapiens; identical to SEQ ID NO: 65795

SEQ ID NO: 65797 - protein, 1246 aa, Homo sapiens; identical to SEQ ID NO: 65795

SEQ ID NO: 65798 - protein, 1246 aa, Homo sapiens; identical to SEQ ID NO: 65795

SEQ ID NO: 65799 - protein, 1088 aa, Homo sapiens
MDEPTITDLNTREEAEEEIDFEKDLLTIPPGFKKGMDFAPKDCPTPAPGLLSLSCMLEPLDLGGGDEDENEAVGQPGGPRGDTVSASPCSAPLARASSLEDLVLKEASTAVSTPEAPEPPSQEQWAIPVDATSPVGDFYRLIPQPAFQWAFEPDVFQKQAILHLERHDSVFVAAHTSAGKTVVAEYAIALAQKHMTRTIYTSPIKALSNQKFRDFRNTFGDVGLLTGDVQLHPEASCLIMTTEILRSMLYSGSDVIRDLEWVIFDEVHYINDVERGVVWEEVLIMLPDHVSIILLSATVPNALEFADWIGRLKRRQIYVISTVTRPVPLEHYLFTGNSSKTQGELFLLLDSRGAFHTKGYYAAVEAKKERMSKHAQTFGAKQPTHQGGPAQDRGVYLSLLASLRTRAQLPVVVFTFSRGRCDEQASGLTSLDLTTSSEKSEIHLFLQRCLARLRGSDRQLPQVLHMSELLNRGLGVHHSGILPILKEIVEMLFSRGLVKVLFATETFAMGVNMPARTVVFDSMRKHDGSTFRDLLPGEYVQMAGRAGRRGLDPTGTVILLCKGRVPEMADLHRMMMGKPSQLQSQFRLTYTMILNLLRVDALRVEDMMKRSFSEFPSRKDSKAHEQALAELTKRLGALEEPDMTGQLVDLPEYYSWGEELTETQHMIQRRIMESVNGLKSLSAGRVVVVKNQEHHNALGVILQVSSNSTSRVFTTLVLCDKPLSQDPQDRGPATAEVPYPDDLVGFKLFLPEGPCDHTVVKLQPGDMAAITTKVLRVNGEKILEDFSKRQQPKFKKDPPLAAVTTAVQELLRLAQAHPAGPPTLDPVNDLQLKDMSVVEGGLRARKLEELIQGAQCVHSPRFPAQYLKLRERMQIQKEMERLRFLLSDQSLLLLPEYHQRVEVLRTLGYVDEAGTVKLAGRVACAMSSHELLLTELMFDNALSTLRPEEIAALLSGLVCQSPGDAGDQLPNTLKQGIERVRAVAKRIGEVQVACGLNQTVEEFVGELNFGLVEVVYEWARGMPFSELAGLSGTPEGLVVRCIQRLAEMCRSLRGAARLVGEPVLGAKMETAATLLRRDIVFAASLYTQ

SEQ ID NO: 65800 - protein, 1246 aa, Homo sapiens; identical to SEQ ID NO: 65794

SEQ ID NO: 65801 - protein, 1053 aa, Homo sapiens
MDFAPKDCPTPAPGLLSLSCMLEPLDLGGGDEDENEAVGQPGGPRGDTVSASPCSAPLARASSLEDLVLKEASTAVSTPEAPEPPSQEQWAIPVDATSPVGDFYRLIPQPAFQWAFEPDVFQKQAILHLERHDSVFVAAHTSAGKTVVAEYAIALAQKHMTRTIYTSPIKALSNQKFRDFRNTFGDVGLLTGDVQLHPEASCLIMTTEILRSMLYSGSDVIRDLEWVIFDEVHYINDVERGVVWEEVLIMLPDHVSIILLSATVPNALEFADWIGRLKRRQIYVISTVTRPVPLEHYLFTGNSSKTQGELFLLLDSRGAFHTKGYYAAVEAKKERMSKHAQTFGAKQPTHQGGPAQDRGVYLSLLASLRTRAQLPVVVFTFSRGRCDEQASGLTSLDLTTSSEKSEIHLFLQRCLARLRGSDRQLPQVLHMSELLNRGLGVHHSGILPILKEIVEMLFSRGLVKVLFATETFAMGVNMPARTVVFDSMRKHDGSTFRDLLPGEYVQMAGRAGRRGLDPTGTVILLCKGRVPEMADLHRMMMGKPSQLQSQFRLTYTMILNLLRVDALRVEDMMKRSFSEFPSRKDSKAHEQALAELTKRLGALEEPDMTGQLVDLPEYYSWGEELTETQHMIQRRIMESVNGLKSLSAGRVVVVKNQEHHNALGVILQVSSNSTSRVFTTLVLCDKPLSQDPQDRGPATAEVPYPDDLVGFKLFLPEGPCDHTVVKLQPGDMAAITTKVLRVNGEKILEDFSKRQQPKFKKDPPLAAVTTAVQELLRLAQAHPAGPPTLDPVNDLQLKDMSVVEGGLRARKLEELIQGAQCVHSPRFPAQYLKLRERMQIQKEMERLRFLLSDQSLLLLPEYHQRVEVLRTLGYVDEAGTVKLAGRVACAMSSHELLLTELMFDNALSTLRPEEIAALLSGLVCQSPGDAGDQLPNTLKQGIERVRAVAKRIGEVQVACGLNQTVEEFVGELNFGLVEVVYEWARGMPFSELAGLSGTPEGLVVRCIQRLAEMCRSLRGAARLVGEPVLGAKMETAATLLRRDIVFAASLYTQ

SEQ ID NO: 65802 - protein, 1053 aa, Homo sapiens; identical to SEQ ID NO: 65801

SEQ ID NO: 65803 - protein, 230 aa, Homo sapiens
MMETERLVLPPPDPLDLPLRAVELGCTGHWELLNLPGAPESSLPHGLPPCAPDLQQEAEQLFLSSPAWLPLHGVEHSARKWQRKTDPWSLLAVLGAPVPSDLQAQRHPTTGQILGYKEVLLENTNLSATTSLSLRRPPGPASQSLWGNPTQYPFWPGGMDEPTITDLNTREEAEEEIDFEKDLLTIPPGFKKGMDFAPKGSVHSCIHPRGPRASISGAVGHPCGRHLPCW

SEQ ID NO: 65804 - protein, 1088 aa, Homo sapiens [sequence omitted]

SEQ ID NO: 65805 - protein, 1053 aa, Homo sapiens
MDFAPKDCPTPAPGLLSLSCLLEPLDLGGGDEDENEAVGQPGGPRGDTVSASPCSAPLARASSLEDLVLKEASTAVSTPEAPEPPSQEQWAIPVDATSPVGDFYRLIPQPAFQWAFEPDVFQKQAILHLERHDSVFVAAHTSAGKTVVAEYAIALAQKHMTRTIYTSPIKALSNQKFRDFRNTFGDVGLLTGDVQLHPEASCLIMTTEILRSMLYSGSDVIRDLEWVIFDEVHYINDVERGVVWEEVLIMLPDHVSIILLSATVPNALEFADWIGRLKRRQIYVISTVTRPVPLEHYLFTGNSSKTQGELFLLLDSRGAFHTKGYYAAVEAKKERMSKHAQTFGAKQPTHQGGPAQDRGVYLSLLASLRTRAQLPVVVFTFSRGRCDEQASGLTSLDLTTSSEKSEIHLFLQRCLARLRGSDRQLPQVLHMSELLNRGLGVHHSGILPILKEIVEMLFSRGLVKVLFATETFAMGVNMPARTVVFDSMRKHDGSTFRDLLPGEYVQMAGRAGRRGLDPTGTVILLCKGRVPEMADLHRMMMGKPSQLQSQFRLTYTMILNLLRVDALRVEDMMKRSFSEFPSRKDSKAHEQALAELTKRLGALEEPDMTGQLVDLPEYYSWGEELTETQHMIQRRIMESVNGLKSLSAGRVVVVKNQEHHNALGVILQVSSNSTSRVFTTLVLCDKPLSQDPQDRGPATAEVPYPDDLVGFKLFLPEGPCDHTVVKLQPGDMAAITTKVLRVNGEKILEDFSKRQQPKFKKDPPLAAVTTAVQELLRLAQAHPAGPPTLDPVNDLQLKDMSVVEGGLRARKLEELIQGAQCVHSPRFPAQYLKLRERMQIQKEMERLRFLLSDQSLLLLPEYHQRVEVLRTLGYVDEAGTVKLAGRVACAMSSHELLLTELMFDNALSTLRPEEIAALLSGLVCQSPGDAGDQLPNTLKQGIERVRAVAKRIGEVQVACGLNQTVEEFVGELNFGLVEVVYEWARGMPFSELAGLSGTPEGLVVRCIQRLAEMCRSLRGAARLVGEPVLGAKMETAATLLRRDIVFAASLYTQ

SEQ ID NO: 65806 - protein, 880 aa, Homo sapiens
MMETERLVLPPPDPLDLPLRAVELGCTGHWELLNLPGAPESSLPHGLPPCAPDLQQEAEQLFLSSPAWLPLHGVEHSARKWQRKTDPWSLLAVLGAPVPSDLQAQRHPTTGQILGYKEVLLEHYLFTGNSSKTQGELFLLLDSRGAFHTKGYYAAVEAKKERMSKHAQTFGAKQPTHQGGPAQDRGVYLSLLASLRTRAQLPVVVFTFSRGRCDEQASGLTSLDLTTSSEKSEIHLFLQRCLARLRGSDRQLPQVLHMSELLNRGLGVHHSGILPILKEIVEMLFSRGLVKVLFATETFAMGVNMPARTVVFDSMRKHDGSTFRDLLPGEYVQMAGRAGRRGLDPTGTVILLCKGRVPEMADLHRMMMGKPSQLQSQFRLTYTMILNLLRVDALRVEDMMKRSFSEFPSRKDSKAHEQALAELTKRLGALEEPDMTGQLVDLPEYYSWGEELTETQHMIQRRIMESVNGLKSLSAGRVVVVKNQEHHNALGVILQVSSNSTSRVFTTLVLCDKPLSQDPQDRGPATAEVPYPDDLVGFKLFLPEGPCDHTVVKLQPGDMAAITTKVLRVNGEKILEDFSKRQQPKFKKDPPLAAVTTAVQELLRLAQAHPAGPPTLDPVNDLQLKDMSVVEGGLRARKLEELIQGAQCVHSPRFPAQYLKLRERMQIQKEMERLRFLLSDQSLLLLPEYHQRVEVLRTLGYVDEAGTVKLAGRVACAMSSHELLLTELMFDNALSTLRPEEIAALLSGLVCQSPGDAGDQLPNTLKQGIERVRAVAKRIGEVQVACGLNQTVEEFVGELNFGLVEVVYEWARGMPFSELAGLSGTPEGLVVRCIQRLAEMCRSLRGAARLVGEPVLGAKMETAATLLRRDIVFAASLYTQ

SEQ ID NO: 65807 - protein, 1088 aa, Homo sapiens [sequence omitted]

SEQ ID NO: 65808 - protein, 880 aa, Homo sapiens; identical to SEQ ID NO: 65806

SEQ ID NO: 65809 - protein, 880 aa, Homo sapiens; identical to SEQ ID NO: 65806

SEQ ID NO: 65810 - protein, 230 aa, Homo sapiens; identical to SEQ ID NO: 65803

SEQ ID NO: 65811 - protein, 880 aa, Homo sapiens; identical to SEQ ID NO: 65806

SEQ ID NO: 65812 - protein, 1088 aa, Homo sapiens [sequence omitted]

SEQ ID NO: 65813 - protein, 1088 aa, Homo sapiens [sequence omitted]

SEQ ID NO: 65814 - protein, 230 aa, Homo sapiens; identical to SEQ ID NO: 65803

SEQ ID NO: 65815 - protein, 1088 aa, Homo sapiens; identical to SEQ ID NO: 65799

SEQ ID NO: 65816 - protein, 230 aa, Homo sapiens; identical to SEQ ID NO: 65803

SEQ ID NO: 65817 - protein, 880 aa, Homo sapiens; identical to SEQ ID NO: 65806

SEQ ID NO: 65818 - protein, 230 aa, Homo sapiens; identical to SEQ ID NO: 65803

SEQ ID NO: 65819 - protein, 1053 aa, Homo sapiens; identical to SEQ ID NO: 65805

SEQ ID NO: 65820 - protein, 1053 aa, Homo sapiens; identical to SEQ ID NO: 65805

SEQ ID NO: 65821 - protein, 1053 aa, Homo sapiens; identical to SEQ ID NO: 65805

SEQ ID NO: 65822 - protein, 154 aa, Homo sapiens [sequence omitted]

SEQ ID NO: 65823 - protein, 35 aa, Homo sapiens
MATKAVCVLKGDGPVQGIINFEQKESNGPEGVGKH

SEQ ID NO: 65824 - protein, 369 aa, Homo sapiens
MDPRKVNELRAFVKMCKQDPSVLHTEEMRFLREWVESMGGKVPPATQKAKSEENTKEEKPDSKKVEEDLKADEPSSEESDLEIDKEGVIEPDTDAPQEMGDENAEITEEMMDQANDKKVAAIEALNDGELQKAIDLFTDAIKLNPRLAILYAKRASVFVKLQKPNAAIRDCDRAIEINPDSAQPYKWRGKAHRLLGHWEEAAHDLALACKLDYDEDASAMLKEVQPRAQKIAEHRRKYERKREEREIKERIERVKKAREEHERAQREEEARRQSGAQYGSFPGGFPGGMPGNFPGGMPGMGGGMPGMAGMPGLNEILSDPEVLAAMQDPEVMVAFQDVAQNPANMSKYQSNPKVMNLISKLSAKFGGQA

SEQ ID NO: 65825 - protein, 211 aa, Homo sapiens [sequence omitted]

SEQ ID NO: 65826 - protein, 162 aa, Homo sapiens
MGGKVPPATQKAKSEENTKEEKPDSKKVEEDLKADEPSSEESDLEIDKEGVIEPDTDAPQEMGDENAEITEEMMDQANDKKVAAIEALNDGELQKAIDLFTDAIKLNPRLAILYAKRASVFVKLQKPNAAIRDCDRAIEINPDSAQPYKWRGKAHRLLGHWE

SEQ ID NO: 65827 - protein, 121 aa, Homo sapiens
MDPRKVNELRAFVKMCKQDPSVLHTEEMRFLREWVESMGGKVPPATQKAKSEENTKEEKPDSKKVEEDLKADEPSSEESDLEIDKEGVIEPDTDAPQEMGDENAEITEEMMDQANDKSGCY

SEQ ID NO: 65828 - protein, 855 aa, Homo sapiens [sequence omitted]

SEQ ID NO: 65829 - protein, 1137 aa, Homo sapiens
MTMTANKNSSITHGAGGTKAPRGTLSRSQSVSPPPVLSPPRSPIYPLSDSETSACRYPSHSSSRVLLKDRHPPAPSPQNPQDPSPDTSPPTCPFKTASFGYLDRSPSACKRDAQKESVQGAAQDVAGVAACLPLAQSTPFPGPAAGPRGVLLTRTGTRAHSLGIREKISAWEGRREASPRMSMCGEKREGSGSEWAASEGCPSLGCPSVVPSPCSSEKTFDFKGLRRMSRTFSECSYPETEEEGEALPVRDSFYRLEKRLGRSEPSAFLRGHGSRKESSAVLSRIQKIEQVLKEQPGRGLPQLPSSCYSVDRGKRKTGTLGSLEEPAGGASVSAGSRAVGVAGVAGEAGPPPEREGSGSTKPGTPGNSPSSQRLPSKSSLDPAVNPVPKPKRTFEYEADKNPKSKPSNGLPPSPTPAAPPPLPSTPAPPVTRRPKKDMRGHRKSQSRKSFEFEDASSLQSLYPSSPTENGTENQPKFGSKSTLEENAYEDIVGDLPKENPYEDVDLKSRRAGRKSQQLSENSLDSLHRMWSPQDRKYNSPPTQLSLKPNSQSLRSGNWSERKSHRLPRLPKRHSHDDMLLLAQLSLPSSPSSLNEDSLSTTSELLSSRRARRIPKLVQRINSIYNAKRGKKRLKKLSMSSIETASLRDENSESESDSDDRFKAHTQRLVHIQSMLKRAPSYRTLELELLEWQERELFEYFVVVSLKKKPSRNTYLPEVSYQFPKLDRPTKQMREAEERLKAIPQFCFPDAKDWLPVSEYSSETFSFMLTGEDGSRRFGYCRRLLPSGKGPRLPEVYCVISRLGCFGLFSKVLDEVERRRGISAALVYPFMRSLMESPFPAPGKTIKVKTFLPGAGNEVLELRRPMDSRLEHVDFECLFTCLSVRQLIRIFASLLLERRVIFVADKLSTLSSCSHAVVALLYPFSWQHTFIPVLPASMIDIVCCPTPFLVGLLSSSLPKLKELPVEEALMVNLGSDRFIRQMDDEDTLLPRKLQAALEQALERKNELISQDSDSDSDDECNTLNGLVSEVFIRFFVETVGHYSLFLTQSEKGERAFQREAFRKSVASKSIRRFLEVFMESQMFAGFIQDRELRKCRAKGLFEQRVEQYLEELPDTEQSGMNKFLRGLGNKMKFLHKKN

SEQ ID NO: 65830 - protein, 1137 aa, Homo sapiens; identical to SEQ ID NO: 65829

SEQ ID NO: 65831 - protein, 420 aa, Homo sapiens [sequence omitted]

SEQ ID NO: 65832 - protein, 57 aa, Homo sapiens
MTMTANKNSSITHGAGGTKAPRGTLSRSQSVSPPPVLSPPRSPIYPLSDSETSACRY

SEQ ID NO: 65833 - protein, 40 aa, Homo sapiens
MTMTANKNSSITHGAGGTKAPRGTLSRSQSVSPPPVLSPP

SEQ ID NO: 65834 - protein, 47 aa, Homo sapiens
MWSPQDRKYNSPPTQLSLKPNSQSLRSGNWSERKSHRLPRLPKRHSH

SEQ ID NO: 65835 - protein, 72 aa, Homo sapiens
MTMTANKNSSITHGAGGTKAPRGTLSRKSFEFEDASSLQSLYPSSPTENGTENQPKFGSKSTLEENAYEDIV

SEQ ID NO: 65836 - protein, 124 aa, Homo sapiens
MTMTANKNSSITHGAGGTKAPRGTLSRSQSVSPPPVLSPPRSPIYPLSDSETSACRYPSHSSSRVLLKDRHPPAPSPQNPQDPSPDTSPPTCPFKTASFGYLDRSPSACKRDAQKESVQGAAQD

SEQ ID NO: 65837 - protein, 142 aa, Homo sapiens
MTMTANKNSSITHGAGGTKAPRGTLSRSQSVSPPPVLSPPRSPIYPLSDSETSACRYPSHSSSRVLLKDRHPPAPSPQNPQDPSPDTSPPTCPFKTASFGYLDRSPSACKRDAQKESVQGAAQDVAGVAACLPLAQSTPFPG

SEQ ID NO: 65838 - protein, 717 aa, Homo sapiens
MTMTANKNSSITHGAGGTKAPRGTLSRKSFEFEDASSLQSLYPSSPTENGTENQPKFGSKSTLEENAYEDIVGDLPKENPYEDVDLKSRRAGRKSQQLSENSLDSLHRMWSPQDRKYNSPPTQLSLKPNSQSLRSGNWSERKSHRLPRLPKRHSHDDMLLLAQLSLPSSPSSLNEDSLSTTSELLSSRRARRIPKLVQRINSIYNAKRGKKRLKKLSMSSIETASLRDENSESESDSDDRFKAHTQRLVHIQSMLKRAPSYRTLELELLEWQERELFEYFVVVSLKKKPSRNTYLPEVSYQFPKLDRPTKQMREAEERLKAIPQFCFPDAKDWLPVSEYSSETFSFMLTGEDGSRRFGYCRRLLPSGKGPRLPEVYCVISRLGCFGLFSKVLDEVERRRGISAALVYPFMRSLMESPFPAPGKTIKVKTFLPGAGNEVLELRRPMDSRLEHVDFECLFTCLSVRQLIRIFASLLLERRVIFVADKLSTLSSCSHAVVALLYPFSWQHTFIPVLPASMIDIVCCPTPFLVGLLSSSLPKLKELPVEEALMVNLGSDRFIRQMDDEDTLLPRKLQAALEQALERKNELISQDSDSDSDDECNTLNGLVSEVFIRFFVETVGHYSLFLTQSEKGERAFQREAFRKSVASKSIRRFLEVFMESQMFAGFIQDRELRKCRAKGLFEQRVEQYLEELPDTEQSGMNKFLRGLGNKMKFLHKKN

SEQ ID NO: 65839 - protein, 52 aa, Homo sapiens
MTMTANKNSSITHGAGGTKAPRGTLSRSQSVSPPPVLSPPRSPIYPLSDSET

SEQ ID NO: 65840 - protein, 111 aa, Homo sapiens
MTMTANKNSSITHGAGGTKAPRGTLSRSQSVSPPPVLSPPRSPIYPLSDSETSACRYPSHSSSRVLLKDRHPPAPSPQNPQDPSPDTSPPTCPFKTASFGYLDRSPSACKR

SEQ ID NO: 65841 - protein, 53 aa, Homo sapiens
MTMTANKNSSITHGAGGTKAPRGTLSRSQSVSPPPVLSPPRSPIYPLSDSETS

SEQ ID NO: 65842 - protein, 83 aa, Homo sapiens
MTMTANKNSSITHGAGGTKAPRGTLSRSQSVSPPPVLSPPRSPIYPLSDSETSACRYPSHSSSRVLLKDRHPPAPSPQNPQDP

SEQ ID NO: 65843 - protein, 95 aa, Homo sapiens
MTMTANKNSSITHGAGGTKAPRGTLSRSQSVSPPPVLSPPRSPIYPLSDSETSACRYPSHSSSRVLLKDRHPPAPSPQNPQDPSPDTSPPTCPFK

SEQ ID NO: 65844 - protein, 154 aa, Homo sapiens
MTMTANKNSSITHGAGGTKAPRGTLSRSQSVSPPPVLSPPRSPIYPLSDSETSACRYPSHSSSRVLLKDRHPPAPSPQNPQDPSPDTSPPTCPFKTASFGYLDRSPSACKRDAQKESVQGAAQDVAGVAACLPLAQSTPFPGPAAGPRGVLLTR

SEQ ID NO: 65845 - protein, 179 aa, Homo sapiens
MWSPQDRKYNSPPTQLSLKPNSQSLRSGNWSERKSHRLPRLPKRHSHDDMLLLAQLSLPSSPSSLNEDSLSTTSELLSSRRARRIPKLVQRINSIYNAKRGKKRLKKLSMSSIETASLRDENSESESDSDDRFKAHTQRLVHIQSMLKRAPSYRTLELELLEWQERELFEYFVVVSLKK

SEQ ID NO: 65846 - protein, 717 aa, Homo sapiens; identical to SEQ ID NO: 65838

SEQ ID NO: 65847 - protein, 136 aa, Homo sapiens
MTMTANKNSSITHGAGGTKAPRGTLSRKSFEFEDASSLQSLYPSSPTENGTENQPKFGSKSTLEENAYEDIVGDLPKENPYEDVDLKSRRAGRKSQQLSENSLDSLHRMWSPQDRKYNSPPTQLSLKPNSQSLRSG

SEQ ID NO: 65848 - protein, 74 aa, Homo sapiens
MTMTANKNSSITHGAGGTKAPRGTLSRSQSVSPPPVLSPPRSPIYPLSDSETSACRYPSHSSSRVLLKDRHPPA

SEQ ID NO: 65849 - protein, 139 aa, Homo sapiens
MTMTANKNSSITHGAGGTKAPRGTLSRSQSVSPPPVLSPPRSPIYPLSDSETSACRYPSHSSSRVLLKDRHPPAPSPQNPQDPSPDTSPPTCPFKTASFGYLDRSPSACKRDAQKESVQGAAQDVAGVAACLPLAQSTP

SEQ ID NO: 65850 - protein, 609 aa, Homo sapiens
MWSPQDRKYNSPPTQLSLKPNSQSLRSGNWSERKSHRLPRLPKRHSHDDMLLLAQLSLPSSPSSLNEDSLSTTSELLSSRRARRIPKLVQRINSIYNAKRGKKRLKKLSMSSIETASLRDENSESESDSDDRFKAHTQRLVHIQSMLKRAPSYRTLELELLEWQERELFEYFVVVSLKKKPSRNTYLPEVSYQFPKLDRPTKQMREAEERLKAIPQFCFPDAKDWLPVSEYSSETFSFMLTGEDGSRRFGYCRRLLPSGKGPRLPEVYCVISRLGCFGLFSKVLDEVERRRGISAALVYPFMRSLMESPFPAPGKTIKVKTFLPGAGNEVLELRRPMDSRLEHVDFECLFTCLSVRQLIRIFASLLLERRVIFVADKLSTLSSCSHAVVALLYPFSWQHTFIPVLPASMIDIVCCPTPFLVGLLSSSLPKLKELPVEEALMVNLGSDRFIRQMDDEDTLLPRKLQAALEQALERKNELISQDSDSDSDDECNTLNGLVSEVFIRFFVETVGHYSLFLTQSEKGERAFQREAFRKSVASKSIRRFLEVFMESQMFAGFIQDRELRKCRAKGLFEQRVEQYLEELPDTEQSGMNKFLRGLGNKMKFLHKKN

SEQ ID NO: 65851 - protein, 77 aa, Homo sapiens
MTMTANKNSSITHGAGGTKAPRGTLSRKSFEFEDASSLQSLYPSSPTENGTENQPKFGSKSTLEENAYEDIVGDLPK

SEQ ID NO: 65852 - protein, 26 aa, Homo sapiens
MTMTANKNSSITHGAGGTKAPRGTLS

SEQ ID NO: 65853 - protein, 344 aa, Homo sapiens
MWSPQDRKYNSPPTQLSLKPNSQSLRSGNWSERKSHRLPRLPKRHSHDDMLLLAQLSLPSSPSSLNEDSLSTTSELLSSRRARRIPKLVQRINSIYNAKRGKKRLKKLSMSSIETASLRDENSESESDSDDRFKAHTQRLVHIQSMLKRAPSYRTLELELLEWQERELFEYFVVVSLKKKPSRNTYLPEVSYQFPKLDRPTKQMREAEERLKAIPQFCFPDAKDWLPVSEYSSETFSFMLTGEDGSRRFGYCRRLLPSGKGPRLPEVYCVISRLGCFGLFSKVLDEVERRRGISAALVYPFMRSLMESPFPAPGKTIKVKTFLPGAGNEVLELRRPMDSRLEHV

SEQ ID NO: 65854 - protein, 76 aa, Homo sapiens
MTMTANKNSSITHGAGGTKAPRGTLSRKSFEFEDASSLQSLYPSSPTENGTENQPKFGSKSTLEENAYEDIVGDLP

SEQ ID NO: 65855 - protein, 74 aa, Homo sapiens; identical to SEQ ID NO: 65848

SEQ ID NO: 65856 - protein, 144 aa, Homo sapiens
MTMTANKNSSITHGAGGTKAPRGTLSRSQSVSPPPVLSPPRSPIYPLSDSETSACRYPSHSSSRVLLKDRHPPAPSPQNPQDPSPDTSPPTCPFKTASFGYLDRSPSACKRDAQKESVQGAAQDVAGVAACLPLAQSTPFPGPA

SEQ ID NO: 65857 - protein, 1137 aa, Homo sapiens; identical to SEQ ID NO: 65829

SEQ ID NO: 65858 - protein, 122 aa, Homo sapiens
MTMTANKNSSITHGAGGTKAPRGTLSRSQSVSPPPVLSPPRSPIYPLSDSETSACRYPSHSSSRVLLKDRHPPAPSPQNPQDPSPDTSPPTCPFKTASFGYLDRSPSACKRDAQKESVQGAA

SEQ ID NO: 65859 - protein, 30 aa, Homo sapiens
MTMTANKNSSITHGAGGTKAPRGTLSRSQS

SEQ ID NO: 65860 - protein, 585 aa, Homo sapiens
MAEAATGFLEQLKSCIVWSWTYLWTVWFFIVLFLVYILRVPLKINDNLSTVSMFLNTLTPKFYVALTGTSSLISGLILIFEWWYFRKYGTSFIEQVSVSHLRPLLGGVDNNSSNNSNSSNGDSDSNRQSVSECKVWRNPLNLFRGAEYNRYTWVTGREPLTYYDMNLSAQDHQTFFTCDSDHLRPADAIMQKAWRERNPQARISAAHEALEINEIRSRVEVPLIASSTIWEIKLLPKCATAYILLAEEEATTIAEAEKLFKQALKAGDGCYRRSQQLQHHGSQYEAQHRRDTNVLVYIKRRLAMCARRLGRTREAVKMMRDLMKEFPLLSMFNIHENLLEALLELQAYADVQAVLAKYDDISLPKSATICYTAALLKARAVSDKFSPEAASRRGLSTAEMNAVEAIHRAVEFNPHVPKYLLEMKSLILPPEHILKRGDSEAIAYAFFHLAHWKRVEGALNLLHCTWEGTFRMIPYPLEKGHLFYPYPICTETADRELLPSFHEVSVYPKKELPFFILFTAGLCSFTAMLALLTHQFPELMGVFAKAMIDIFCSAEFRDWNCKSIFMRVEDELEIPPAPQSQHFQN

SEQ ID NO: 65861 - protein, 499 aa, Homo sapiens
MSMFLNTLTPKFYVALTGTSSLISGLILIFEWWYFRKYGTSFIEQVSVSHLRPLLGGVDNNSSNNSNSSNGDSDSNRQSVSECKVWRNPLNLFRGAEYNRYTWVTGREPLTYYDMNLSAQDHQTFFTCDSDHLRPADAIMQKAWRERNPQARISAAHEALEINECATAYILLAEEEATTIAEAEKLFKQALKAGDGCYRRSQQLQHHGSQYEAQHRRDTNVLVYIKRRLAMCARRLGRTREAVKMMRDLMKEFPLLSMFNIHENLLEALLELQAYADVQAVLAKYDDISLPKSATICYTAALLKARAVSDKFSPEAASRRGLSTAEMNAVEAIHRAVEFNPHVPKYLLEMKSLILPPEHILKRGDSEAIAYAFFHLAHWKRVEGALNLLHSFRMIPYPLEKGHLFYPYPICTETADRELLPSFHEVSVYPKKELPFFILFTAGLCSFTAMLALLTHQFPELMGVFAKAFLSTLFAPLNFVMEKVESILPSSLWHQLTRI

SEQ ID NO: 65862 - protein, 511 aa, Homo sapiens
MFGTESSLSMFLNTLTPKFYVALTGTSSLISGLILIFEWWYFRKYGTSFIEQVSVSHLRPLLGGVDNNSSNNSNSSNGDSDSNRQSVSECKVWRNPLNLFRGAEYNRYTWVTGREPLTYYDMNLSAQDHQTFFTCDSDHLRPADAIMQKAWRERNPQARISAAHEALEINECATAYILLAEEEATTIAEAEKLFKQALKAGDGCYRRSQQLQHHGSQYEAQHRRDTNVLVYIKRRLAMCARRLGRTREAVKMMRDLMKEFPLLSMFNIHENLLEALLELQAYADVQAVLAKYDDISLPKSATICYTAALLKARAVSDKFSPEAASRRGLSTAEMNAVEAIHRAVEFNPHVPKYLLEMKSLILPPEHILKRGDSEAIAYAFFHLAHWKRVEGALNLLHCTWEGTFRMIPYPLEKGHLFYPYPICTETADRELLPSFHEVSVYPKKELPFFILFTAGLCSFTAMLALLTHQFPELMGVFAKAFLSTLFAPLNFVMEKVESILPSSLWHQLTRI

SEQ ID NO: 65863 - protein, 534 aa, Homo sapiens
MFGTESSLSMFLNTLTPKFYVALTGTSSLISGLILIFEWWYFRKYGTSFIEQVSVSHLRPLLGGVDNNSSNNSNSSNGDSDSNRQSVSECKVWRNPLNLFRGAEYNRYTWVTGREPLTYYDMNLSAQDHQTFFTCDSDHLRPADAIMQKAWRERNPQARISAAHEALEINEIRSRVEVPLIASSTIWEIKLLPKCATAYILLAEEEATTIAEAEKLFKQALKAGDGCYRRSQQLQHHGSQYEAQHRRDTNVLVYIKRRLAMCARRLGRTREAVKMMRDLMKEFPLLSMFNIHENLLEALLELQAYADVQAVLAKYDDISLPKSATICYTAALLKARAVSDKFSPEAASRRGLSTAEMNAVEAIHRAVEFNPHVPKYLLEMKSLILPPEHILKRGDSEAIAYAFFHLAHWKRVEGALNLLHCTWEGTFRMIPYPLEKGHLFYPYPICTETADRELLPSFHEVSVYPKKELPFFILFTAGLCSFTAMLALLTHQFPELMGVFAKAFLSTLFAPLNFVMEKVESILPSSLWHQLTRI

SEQ ID NO: 65864 - protein, 554 aa, Homo sapiens
MAEAATGFLEQLKSCIVWSWTYLWTVWFFIVLFLVYILRVPLKINDNLSTVSMFLNTLTPKFYVALTGTSSLISGLILIFEWWYFRKYGTSFIEQVSVSHLRPLLGGVDNNSSNNSNSSNGDSDSNRQSVSECKVWRNPLNLFRGAEYNRYTWVTGREPLTYYDMNLSAQDHQTFFTCDSDHLRPADAIMQKAWRERNPQARISAAHEALEINECATAYILLAEEEATTIAEAEKLFKQALKAGDGCYRRSQQLQHHGSQYEAQHRRDTNVLVYIKRRLAMCARRLGRTREAVKMMRDLMKEFPLLSMFNIHENLLEALLELQAYADVQAVLAKYDDISLPKSATICYTAALLKARAVSDKFSPEAASRRGLSTAEMNAVEAIHRAVEFNPHVPKYLLEMKSLILPPEHILKRGDSEAIAYAFFHLAHWKRVEGALNLLHCTWEGTFRMIPYPLEKGHLFYPYPICTETADRELLPSFHEVSVYPKKELPFFILFTAGLCSFTAMLALLTHQFPELMGVFAKAFLSTLFAPLNFVMEKVESILPSSLWHQLTRI

SEQ ID NO: 65865 - protein, 62 aa, Homo sapiens
MSMFLNTLTPKFYVALTGTSSLISGLILIFEWWYFRKYGTSFIEQVSVSHLRPLLGGVDNNS

SEQ ID NO: 65866 - protein, 87 aa, Homo sapiens
MSMFLNTLTPKFYVALTGTSSLISGLILIFEWWYFRKYGTSFIEQVSVSHLRPLLGGVDNNSSNNSNSSNGDSDSNRQSVSECKVWR

SEQ ID NO: 65867 - protein, 440 aa, Homo sapiens
MAENNENISKNVDVRPKTSRSRSADRKDGYVWSGKKLSWSKKSESYSDAETVNGIEKTEVSLRNQERKHSCSSIELDLDHSCGHRFLGRSLKQKLQDAVGQCFPIKNCSSRHSSGLPSKRKIHISELMLDKCPFPPRSDLAFRWHFIKRHTAPINSKSDEWVSTDLSQTELRDGQLKRRNMEENINCFSHTNVQPCVITTDNALCREGPMTGSVMNLVSNNSIEDSDMDSDDEILTLCTSSRKRNKPKWDLDDEILQLETPPKYHTQIDYVHCLVPDLLQINNNPCYWGVMDKYAAEALLEGKPEGTFLLRDSAQEDYLFSVSFRRYSRSLHARIEQWNHNFSFDAHDPCVFHSPDITGLLEHYKDPSACMFFEPLLSTPLIRTFPFSLQHICRTVICNCTTYDGIDALPIPSSMKLYLKEYHYKSKVRVLRIDAPEQQC

SEQ ID NO: 65868 - protein, 440 aa, Homo sapiens; identical to SEQ ID NO: 65867

SEQ ID NO: 65869 - protein, 440 aa, Homo sapiens; identical to SEQ ID NO: 65867

SEQ ID NO: 65870 - protein, 536 aa, Homo sapiens
MDKVGKMWNNFKYRCQNLFGHEGGSRSENVDMNSNRCLSVKEKNISIGDSTPQQQSSPLRENIALQLGLSPSKNSSRRNQNCATEIPQIVEISIEKDNDSCVTPGTRLARRDSYSRHAPWGGKKKHSCSTKTQSSLDADKKFGRTRSGLQRRERRYGVSSVHDMDSVSSRTVGSRSLRQRLQDTVGLCFPMRTYSKQSKPLFSNKRKIHLSELMLEKCPFPAGSDLAQKWHLIKQHTAPVSPHSTFFDTFDPSLVSTEDEEDRLRERRRLSIEEGVDPPPNAQIHTFEATAQVNPLYKLGPKLAPGMTEISGDSSAIPQANCDSEEDTTTLCLQSRRQKQRQISGDSHTHVSRQGAWKVHTQIDYIHCLVPDLLQITGNPCYWGVMDRYEAEALLEGKPEGTFLLRDSAQEDYLFSVSFRRYNRSLHARIEQWNHNFSFDAHDPCVFHSSTVTGLLEHYKDPSSCMFFEPLLTISLNRTFPFSLQYICRAVICRCTTYDGIDGLPLPSMLQDFLKEYHYKQKVRVRWLEREPVKAK

SEQ ID NO: 65871 - protein, 536 aa, Homo sapiens; identical to SEQ ID NO: 65870

SEQ ID NO: 65872 - protein, 1087 aa, Homo sapiens
MSDSEDSNFSEEEDSERSSDGEEAEVDEERRSAAGSEKEEEPEDEEEEEEEEEYDEEEEEEDDDRPPKKPRHGGFILDEADVDDEYEDEDQWEDGAEDILEKEEIEASNIDNVVLDEDRSGARRLQNLWRDQREEELGEYYMKKYAKSSVGETVYGGSDELSDDITQQQLLPGVKDPNLWTVKCKIGEERATAISLMRKFIAYQFTDTPLQIKSVVAPEHVKGYIYVEAYKQTHVKQAIEGVGNLRLGYWNQQMVPIKEMTDVLKVVKEVANLKPKSWVRLKRGIYKDDIAQVDYVEPSQNTISLKMIPRIDYDRIKARMSLKDWFAKRKKFKRPPQRLFDAEKIRSLGGDVASDGDFLIFEGNRYSRKGFLFKSFAMSAVITEGVKPTLSELEKFEDQPEGIDLEVVTESTGKEREHNFQPGDNVEVCEGELINLQGKILSVDGNKITIMPKHEDLKDMLEFPAQELRKYFKMGDHVKVIAGRFEGDTGLIVRVEENFVILFSDLTMHELKVLPRDLQLCSETASGVDVGGQHEWGELVQLDPQTVGVIVRLERETFQVLNMYGKVVTVRHQAVTRKKDNRFAVALDSEQNNIHVKDIVKVIDGPHSGREGEIRHLFRSFAFLHCKKLVENGGMFVCKTRHLVLAGGSKPRDVTNFTVGGFAPMSPRISSPMHPSAGGQRGGFGSPGGGSGGMSRGRGRRDNELIGQTVRISQGPYKGYIGVVKDATESTARVELHSTCQTISVDRQRLTTVGSRRPGGMTSTYGRTPMYGSQTPMYGSGSRTPMYGSQTPLQDGSRTPHYGSQTPLHDGSRTPAQSGAWDPNNPNTPSRAEEEYEYAFDDEPTPSPQAYGGTPNPQTPGYPDPSSPQVNPQYNPQTPGTPAMYNTDQFSPYAAPSPQGSYQPSPSPQSYHQVAPSPAGYQNTHSPASYHPTPSPMAYQASPSPSPVGYSPMTPGAPSPGGYNPHTPGSGIEQNSSDWVTTDIQVKVRDTYLDTQVVGQTGVIRSVTGGMCSVYLKDSEKVVSISSEHLEPITPTKNNKVKVILGEDREATGVLLSIDGEDGIVRMDLDEQLKILNLRFLGKLLEA

SEQ ID NO: 65873 - protein, 1065 aa, Homo sapiens
MSDSEDSNFSEEEDSERSSDGEEAEVDEERRSAAGSEKEDDDRPPKKPRHGGFILDEADVDDEYEDEDQWEDGAEDILEKEEIEASNIDNVVLDEDRSGARRLQNLWRDQREEELGEYYMKKYAKSSVGETVYGGSDELSDDITQQQLLPGVKDPNLWTVKCKIGEERATAISLMRKFIAYQFTDTPLQIKSVVAPEHVKGYIYVEAYKQTHVKQAIEGVGNLRLGYWNQQMVPIKEMTDVLKVVKEVANLKPKSWVRLKRGIYKDDIAQVDYVEPSQNTISLKMIPRIDYDRIKARMSLKDWFAKRKKFKRPPQRLFDAEKIRSLGGDVASDGDFLIFEGNRYSRKGFLFKSFAMSAVITEGVKPTLSELEKFEDQPEGIDLEVVTESTGKEREHNFQPGDNVEVCEGELINLQGKILSVDGNKITIMPKHEDLKDMLEFPAQELRKYFKMGDHVKVIAGRFEGDTGLIVRVEENFVILFSDLTMHELKVLPRDLQLCSETASGVDVGGQHEWGELVQLDPQTVGVIVRLERETFQVLNMYGKVVTVRHQAVTRKKDNRFAVALDSEQNNIHVKDIVKVIDGPHSGREGEIRHLFRSFAFLHCKKLVENGGMFVCKTRHLVLAGGSKPRDVTNFTVGGFAPMSPRISSPMHPSAGGQRGGFGSPGGGSGGMSRGRGRRDNELIGQTVRISQGPYKGYIGVVKDATESTARVELHSTCQTISVDRQRLTTVGSRRPGGMTSTYGRTPMYGSQTPMYGSGSRTPMYGSQTPLQDGSRTPHYGSQTPLHDGSRTPAQSGAWDPNNPNTPSRAEEEYEYAFDDEPTPSPQAYGGTPNPQTPGYPDPSSPQVNPQYNPQTPGTPAMYNTDQFSPYAAPSPQGSYQPSPSPQSYHQVAPSPAGYQNTHSPASYHPTPSPMAYQASPSPSPVGYSPMTPGAPSPGGYNPHTPGSGIEQNSSDWVTTDIQVKVRDTYLDTQVVGQTGVIRSVTGGMCSVYLKDSEKVVSISSEHLEPITPTKNNKVKVILGEDREATGVLLSIDGEDGIVRMDLDEQLKILNLRFLGKLLEA

SEQ ID NO: 65874 - protein, 1083 aa, Homo sapiens
MSDSEDSNFSEEEDSERSSDGEEAEVDEERRSAAGSEKEEEPEDEEEEEEEEEYDEEEEEEDDDRPPKKPRHGGFILDEADVDDEYEDEDQWEDGAEDILEKASNIDNVVLDEDRSGARRLQNLWRDQREEELGEYYMKKYAKSSVGETVYGGSDELSDDITQQQLLPGVKDPNLWTVKCKIGEERATAISLMRKFIAYQFTDTPLQIKSVVAPEHVKGYIYVEAYKQTHVKQAIEGVGNLRLGYWNQQMVPIKEMTDVLKVVKEVANLKPKSWVRLKRGIYKDDIAQVDYVEPSQNTISLKMIPRIDYDRIKARMSLKDWFAKRKKFKRPPQRLFDAEKIRSLGGDVASDGDFLIFEGNRYSRKGFLFKSFAMSAVITEGVKPTLSELEKFEDQPEGIDLEVVTESTGKEREHNFQPGDNVEVCEGELINLQGKILSVDGNKITIMPKHEDLKDMLEFPAQELRKYFKMGDHVKVIAGRFEGDTGLIVRVEENFVILFSDLTMHELKVLPRDLQLCSETASGVDVGGQHEWGELVQLDPQTVGVIVRLERETFQVLNMYGKVVTVRHQAVTRKKDNRFAVALDSEQNNIHVKDIVKVIDGPHSGREGEIRHLFRSFAFLHCKKLVENGGMFVCKTRHLVLAGGSKPRDVTNFTVGGFAPMSPRISSPMHPSAGGQRGGFGSPGGGSGGMSRGRGRRDNELIGQTVRISQGPYKGYIGVVKDATESTARVELHSTCQTISVDRQRLTTVGSRRPGGMTSTYGRTPMYGSQTPMYGSGSRTPMYGSQTPLQDGSRTPHYGSQTPLHDGSRTPAQSGAWDPNNPNTPSRAEEEYEYAFDDEPTPSPQAYGGTPNPQTPGYPDPSSPQVNPQYNPQTPGTPAMYNTDQFSPYAAPSPQGSYQPSPSPQSYHQVAPSPAGYQNTHSPASYHPTPSPMAYQASPSPSPVGYSPMTPGAPSPGGYNPHTPGSGIEQNSSDWVTTDIQVKVRDTYLDTQVVGQTGVIRSVTGGMCSVYLKDSEKVVSISSEHLEPITPTKNNKVKVILGEDREATGVLLSIDGEDGIVRMDLDEQLKILNLRFLGKLLEA

SEQ ID NO: 65875 - protein, 1087 aa, Homo sapiens; identical to SEQ ID NO: 65872

SEQ ID NO: 65876 - protein, 1087 aa, Homo sapiens; identical to SEQ ID NO: 65872

SEQ ID NO: 65877 - protein, 1087 aa, Homo sapiens; identical to SEQ ID NO: 65872

SEQ ID NO: 65878 - protein, 1726 aa, Homo sapiens
MSDFVESEAEESEEEYNDEGEVVPRVTKKFVEEEDDDEEEEEENLDDQDEQGNLKGFINDDDDEDEGEEDEGSDSGDSEDDVGHKKRKRTSFDDRLEDDDFDLIEENLGVKVKRGQKYRRVKKMSDDEDDDEEEYGKEEHEKEAIAEEIFQDGEGEEGQEAMEAPMAPPEEEEEDDEESDIDDFIVDDDGQPLKKPKWRKKLPGYTDAALQEAQEIFGVDFDYDEFEKYNEYDEELEEEYEYEDDEAEGEIRVRPKKTTKKRVSRRSIFEMYEPSELESSHLTDQDNEIRATDLPERFQLRSIPVKGAEDDELEEEADWIYRNAFATPTISLQESCDYLDRGQPASSFSRKGPSTIQKIKEALGFMRNQHFEVPFIAFYRKEYVEPELHINDLWRVWQWDEKWTQLRIRKENLTRLFEKMQAYQYEQISADPDKPLADGIRALDTTDMERLKDVQSMDELKDVYNHFLLYYGRDIPKMQNAAKASRKKLKRVREEGDEEGEGDEAEDEEQRGPELKQASRRDMYTICQSAGLDGLAKKFGLTPEQFGENLRDSYQRHETEQFPAEPLELAKDYVCSQFPTPEAVLEGARYMVALQIAREPLVRQVLRQTFQERAKLNITPTKKGRKDVDEAHYAYSFKYLKNKPVKELRDDQFLKICLAEDEGLLTTDISIDLKGVEGYGNDQTYFEEIKQFYYRDEFSHQVQEWNRQRTMAIERALQQFLYVQMAKELKNKLLAEAKEYVIKACSRKLYNWLRVAPYRPDQQVEEDDDFMDENQGKGIRVLGIAFSSARDHPVFCALVNGEGEVTDFLRLPHFTKRRTAWREEEREKKAQDIETLKKFLLNKKPHVVTVAGENRDAQMLIEDVKRIVHELDQGQQLSSIGVELVDNELAILYMNSKKSEAEFRDYPPVLRQAVSLARRIQDPLIEFAQVCSSDEDILCLKFHPLQEHVVKEELLNALYCEFINRVNEVGVDVNRAIAHPYSQALIQYVCGLGPRKGTHLLKILKQNNTRLESRTQLVTMCHMGPKVFMNCAGFLKIDTASLGDSTDSYIEVLDGSRVHPETYEWARKMAVDALEYDESAEDANPAGALEEILENPERLKDLDLDAFAEELERQGYGDKHITLYDIRAELSCRYKDLRTAYRSPNTEEIFNMLTKETPETFYIGKLIICNVTGIAHRRPQGESYDQAIRNDETGLWQCPFCQQDNFPELSEVWNHFDSGSCPGQAIGVKTRLDNGVTGFIPTKFLSDKVVKRPEERVKVGMTVHCRIMKIDIEKFSADLTCRTSDLMDRNNEWKLPKDTYYDFDAEAADHKQEEDMKRKQQRTTYIKRVIAHPSFHNINFKQAEKMMETMDQGDVIIRPSSKGENHLTVTWKVSDGIYQHVDVREEGKENAFSLGATLWINSEEFEDLDEIVARYVQPMASFARDLLNHKYYQDCSGGDRKKLEELLIKTKKEKPTFIPYFICACKELPGKFLLGYQPRGKPRIEYVTVTPEGFRYRGQIFPTVNGLFRWFKDHYQDPVPGITPSSSSRTRTPASINATPANINLADLTRAVNALPQNMTSQMFSAIAAVTGQGQNPNATPAQWASSQYGYGGSGGGSSAYHVFPTPAQQPVATPLMTPSYSYTTPSQPITTPQYHQLQASTTPQSAQAQPQPSSSSRQRQQQPKSNSHAAIDWGKMAEQWLQEKEAERRKQKQRLTPRPSPSPMIESTPMSIAGDATPLLDEMDR

SEQ ID NO: 65879 - protein, 726 aa, Homo sapiens
MSDFVESEAEESEEEYNDEGEVVPRVTKKFVEEEDDDEEEEEENLDDQDEQGNLKGFINDDDDEDEGEEDEGSDSGDSEDDVGHKKRKRTSFDDRLEDDDFDLIEENLGVKVKRGQKYRRVKKMSDDEDDDEEEYGKEEHEKEAIAEEIFQDGEGEEGQEAMEAPMAPPEEEEEDDEESDIDDFIVDDDGQPLKKPKWRKKLPGYTDAALQEAQEIFGVDFDYDEFEKYNEYDEELEEEYEYEDDEAEGEIRVRPKKTTKKRVSRRSIFEMYEPSELESSHLTDQDNEIRATDLPERFQLRSIPVKGAEDDELEEEADWIYRNAFATPTISLQESCDYLDRGQPASSFSRKGPSTIQKIKEALGFMRNQHFEVPFIAFYRKEYVEPELHINDLWRVWQWDEKWTQLRIRKENLTRLFEKMQAYQYEQISADPDKPLADGIRALDTTDMERLKDVQSMDELKDVYNHFLLYYGRDIPKMQNAAKASRKKLKRVREEGDEEGEGDEAEDEEQRGPELKQASRRDMYTICQSAGLDGLAKKFGLTPEQFGENLRDSYQRHETEQFPAEPLELAKDYVCSQFPTPEAVLEGARYMVALQIAREPLVRQVLRQTFQERAKLMTPSYSYTTPSQPITTPQYHQLQASTTPQSAQAQPQPSSSSRQRQQQPKSNSHAAIDWGKMAEQWLQEKEAERRKQKQRLTPRPSPSPMIESTPMSIAGDATPLLDEMDR

SEQ ID NO: 65880 - protein, 786 aa, Homo sapiens
MSFSRALLWARLPAGRQAGHRAAICSALRPHFGPFPGVLGQVSVLATASSSASGGSKIPNTSLFVPLTVKPQGPSADGDVGAELTRPLDKNEVKKVLDKFYKRKEIQKLGADYGLDARLFHQAFISFRNYIMQSHSLDVDIHIVLNDICFGAAHADDLFPFFLRHAKQIFPVLDCKDDLRKISDLRIPPNWYPDARAMQRKIIFHSGPTNSGKTYHAIQKYFSAKSGVYCGPLKLLAHEIFEKSNAAGVPCDLVTGEERVTVQPNGKQASHVSCTVEMCSVTTPYEVAVIDEIQMIRDPARGWAWTRALLGLCAEEVHLCGEPAAIDLVMELMYTTGEEVEVRDYKRLTPISVLDHALESLDNLRPGDCIVCFSKNDIYSVSRQIEIRGLESAVIYGSLPPGTKLAQAKKFNDPNDPCKILVATDAIGMGLNLSIRRIIFYSLIKPSINEKGERELEPITTSQALQIAGRAGRFSSRFKEGEVTTMNHEDLSLLKEILKRPVDPIRAAGLHPTAEQIEMFAYHLPDATLSNLIDIFVDFSQVDGQYFVCNMDDFKFSAELIQHIPLSLRVRYVFCTAPINKKQPFVCSSLLQFARQYSRNEPLTFAWLRRYIKWPLLPPKNIKDLMDLEAVHDVLDLYLWLSYRFMDMFPDASLIRDLQKELDGIIQDGVHNITKLIKMSETHKLLNLEGFPSGSQSRLSGTLKSQARRTRGTKALGSKATEPPSPDAGELSLASRLVQQGLLTPDMLKQLEKEWMTQQTEHNKEKTESGTHPKGTRRKKKEPDSD

SEQ ID NO: 65881 - protein, 263 aa, Homo sapiens
MSFSRALLWARLPAGRQAGHRAAICSALRPHFGPFPGVLGQVSVLATASSSASGGSKIPNTSLFVPLTVKPQGPSADGDVGAELTRPLDKNEVAVIDEIQMIRDPARGWAWTRALLGLCAEEVHLCGEPAAIDLVMELMYTTGEEVEVRDYKRLTPISVLDHALESLDNLRPGDCIVCFSKNDIYSVSRQIEIRGLESAVIYGSLPPGTKLAQAKKFNDPNDPCKILVATDAIGMGLNLSIRRIIFYSLIKPSINEKGERELE

SEQ ID NO: 65882 - protein, 410 aa, Homo sapiens
MAAVGAEARGAWCVPCLVSLDTLQELCRKEKLTCKSIGITKRNLNNYEVEYLCDYKVVKDMEYYLVKWKGWPDSTNTWEPLQNLKCPLLLQQFSNDKHNYLSQVKKGKAITPKDNNKTLKPAIAEYIVKKAKQRIALQRWQDELNRRKNHKGMIFVENTVDLEGPPSDFYYINEYKPAPGISLVNEATFGCSCTDCFFQKCCPAEAGVLLAYNKNQQIKIPPGTPIYECNSRCQCGPDCPNRIVQKGTQYSLCIFRTSNGRGWGVKTLVKIKRMSFVMEYVGEVITSEEAERRGQFYDNKGITYLFDLDYESDEFTVDAARYGNVSHFVNHSCDPNLQVFNVFIDNLDTRLPRIALFSTRTINAGEELTFDYQMKGSGDISSDSIDHSPAKKRVRTVCKCGAVTCRGYLN

SEQ ID NO: 65883 - protein, 230 aa, Homo sapiens
MAAVGAEARGAWCVPCLVSLDTLQELCRKEKLTCKSIGITKRNLNNYEVEYLCDYKVVKDMEYYLVKWKGWPDSTNTWEPLQNLKCPLLLQQFSNDKHNYLSQVITSEEAERRGQFYDNKGITYLFDLDYESDEFTVDAARYGNVSHFVNHSCDPNLQVFNVFIDNLDTRLPRIALFSTRTINAGEELTFDYQMKGSGDISSDSIDHSPAKKRVRTVCKCGAVTCRGYLN

SEQ ID NO: 65884 - protein, 152 aa, Homo sapiens
MEYYLVKWKGWPDSTNTWEPLQNLKCPLLLQQFSNDKHNYLSQVITSEEAERRGQFYDNKGITYLFDLDYESDEFTVDAARYGNVSHFVNHSCDPNLQVFNVFIDNLDTRLPRIALFSTRTINAGEELTFDYQMKGSGDISSDSIDHSPAKK

SEQ ID NO: 65885 - protein, 350 aa, Homo sapiens
MEYYLVKWKGWPDSTNTWEPLQNLKCPLLLQQFSNDKHNYLSQVKKGKAITPKDNNKTLKPAIAEYIVKKAKQRIALQRWQDELNRRKNHKGMIFVENTVDLEGPPSDFYYINEYKPAPGISLVNEATFGCSCTDCFFQKCCPAEAGVLLAYNKNQQIKIPPGTPIYECNSRCQCGPDCPNRIVQKGTQYSLCIFRTSNGRGWGVKTLVKIKRMSFVMEYVGEVITSEEAERRGQFYDNKGITYLFDLDYESDEFTVDAARYGNVSHFVNHSCDPNLQVFNVFIDNLDTRLPRIALFSTRTINAGEELTFDYQMKGSGDISSDSIDHSPAKKRVRTVCKCGAVTCRGYLN

SEQ ID NO: 65886 - protein, 885 aa, Homo sapiens
MKWLGESKIMVVNGRRNGGKLSNDHQQNQSKLQHTGKDTLKAGKNAVERRSNRCNGNSGFEGQSRYVPSSGMSAKELCENDDLATSLVLDPYLGFQTHKMNTSAFPSRSSRHFSKSDSFSHNNPVRFRPIKGRQEELKEVIERFKKDEHLEKAFKCLTSGEWARHYFLNKNKMQEKLFKEHVFIYLRMFATDSGFEILPCNRYSSEQNGAKIVATKEWKRNDKIELLVGCIAELSEIEENMLLRHGENDFSVMYSTRKNCAQLWLGPAAFINHDCRPNCKFVSTGRDTACVKALRDIEPGEEISCYYGDGFFGENNEFCECYTCERRGTGAFKSRVGLPAPAPVINSKYGLRETDKRLNRLKKLGDSSKNSDSQSVSSNTDADTTQEKNNATSNRKSSVGVKKNSKSRTLTRQSMSRIPASSNSTSSKLTHINNSRVPKKLKKPAKPLLSKIKLRNHCKRLEQKNASRKLEMGNLVLKEPKVVLYKNLPIKKDKEPEGPAQAAVASGCLTRHAAREHRQNPVRGAHSQGESSPCTYITRRSVRTRTNLKEASDIKLEPNTLNGYKSSVTEPCPDSGEQLQPAPVLQEEELAHETAQKGEAKCHKSDTGMSKKKSRQGKLVKQFAKIEESTPVHDSPGKDDAVPDLMGPHSDQGEHSGTVGVPVSYTDCAPSPVGCSVVTSDSFKTKDSFRTAKSKKKRRITRYDAQLILENNSGIPKLTLRRRHDSSSKTNDQENDGMNSSKISIKLSKDHDNDNNLYVAKLNNGFNSGSGSSSTKLKIQLKRDEENRGSYTEGLHENGVCCSDPLSLLESRMEVDDYSQYEEESTDDSSSSEGDEEEDDYDDDFEDDFIPLPPAKRLRLIVGKDSIDIDISSRRREDQSLRLNA

SEQ ID NO: 65887 - protein, 393 aa, Homo sapiens
MKWLGESKIMVVNGRRNGGKLSNDHQQNQSKLQHTGKDTLKAGKNAVERRSNRCNGNSGFEGQSRYVPSSGMSAKELCENDDLATSLVLDPYLGFQTHKMNTSAFPSRSSRHFSKSDSFSHNNPVRFRPIKGRQEELKEVIERFKKDEHLEKAFKCLTSGEWARHYFLNKNKMQEKLFKEHVFIYLRMFATDSGFEILPCNRYSSEQNGAKIVATKEWKRNDKIELLVGCIAELSEIEENMLLRHGENDFSVMYSTRKNCAQLWLGPAAFINHDCRPNCKFVSTGRDTACVKALRDIEPGEEISCYYGDGFFGENNEFCECYTCERRGTGAFKSRVGLPAPAPVINSKYGLRETDKRLNRLKKLGDSSKNSDSQSVSSNTDADTTQEKNNASK

SEQ ID NO: 65888 - protein, 393 aa, Homo sapiens; identical to SEQ ID NO: 65887

SEQ ID NO: 65889 - protein, 118 aa, Homo sapiens
MKWLGESKIMVVNGRRNGGKLSNDHQQNQSKLQHTGKDTLKAGKNAVERRSNRCNGNSGFEGQSRYVPSSGMSAKELCENDDLATSLVLDPYLGFQTHKMNTSAFPSRSSRHFSKSDS

SEQ ID NO: 65890 - protein, 462 aa, Homo sapiens
MGPDRVTARELCENDDLATSLVLDPYLGFRTHKMNVSPVPPLRRQQHLRSALETFLRQRDLEAAYRALTLGGWTARYFQSRGPRQEAALKTHVYRYLRAFLPESGFTILPCTRYSMETNGAKIVSTRAWKKNEKLELLVGCIAELREADEGLLRAGENDFSIMYSTRKRSAQLWLGPAAFINHDCKPNCKFVPADGNAACVKVLRDIEPGDEVTCFYGEGFFGEKNEHCECHTCERKGEGAFRTRPREPALPPRPLDKYQLRETKRRLQQGLDSGSRQGLLGPRACVHPSPLRRDPFCAACQPLRLPACSARPDTSPLWLQWLPQPQPRVRPRKRRRPRPRRAPVLSTHHAARVSLHRWGGCGPHCRLRGEALVALGQPPHARWAPQQDWHWARRYGLPYVVRVDLRRLAPAPPATPAPAGTPGPILIPKQALAFAPFSPPKRLRLVVSHGSIDLDVGGEEL

SEQ ID NO: 65891 - protein, 129 aa, Homo sapiens
MPRRGRWLSCSPEAEGIRRVGSRAALRVHPLEHRPRWGTPGGMTKGSRFLAPESELSWGPGDATPGLWFFISDGVGEDLWNSAGWSSVPEGFGQRMRGPGLTPHTDAGGDGNKRRHSERLCRASVLQPP

SEQ ID NO: 65892 - protein, 247 aa, Homo sapiens
MHLARLVGSCSLLLLLGALSGWAASDDPIEKVIEGINRGLSNAEREVGKALDGINSGITHAGREVEKVFNGLSNMGSHTGKELDKGVQGLNHGMDKVAHEINHGIGQAGKEAEKLGHGVNNAAGQAGKEADKAVQGFHTGVHQAGKEAEKLGQGVNHAADQAGKEVEKLGQGAHHAAGQAGKELQNAHNGVNQASKEANQLLNGNHQSGSSSHQGGATTTPLASGASVNTPFINLPALWRSVANIMP

SEQ ID NO: 65893 - protein, 590 aa, Homo sapiens
MHLARLVGSCSLLLLLGALSGWAASDDPIEKVIEGINRGLSNAEREVGKALDGINSGITHAGREVEKVFNGLSNMGSHTGKELDKGVQGLNHGMDKVAHEINHGIGQAGKEAEKLGHGVNNAAGQVGKEADKLIHHGVHHGANQAGSEAGKFGQGVDNAAGQAGNEAGRFGQGVHHAAGQAGNEAGRFGQGVHHAAGQAGNEAGRFGQGAHHGLSEGWKETEKFGQGIHHAAGQVGKEAEKFGQGAHHAAGQAGNEAGRFGQGVHHGLSEGWKETEKFGQGVHHTAGQVGKEAEKFGQGAHHAAGQAGNEAGRFGQGAHHAAGQAGNEAGRFGQGVHHGLSEGWKETEKFGQGVHHAASQFGKETEKLGHGVHHGVNEAWKEAEKFGQGVHHAASQVGKEEDRVVQGLHHGVSQAGREAGQFGHDIHHTAGQAGKEGDIAVHGVQPGVHEAGKEAGQFGQGVHHTLEQAGKEADKAVQGFHTGVHQAGKEAEKLGQGVNHAADQAGKEVEKLGQGAHHAAGQAGKELQNAHNGVNQASKEANQLLNGNHQSGSSSHQGGATTTPLASGASVNTPFINLPALWRSVANIMP

SEQ ID NO: 65894 - protein, 95 aa, Homo sapiens
MGSHTGKELDKGVQGLNHGMDKVAHEINHGIGQAGKEAEKLGHGVNNAAGQGNHQSGSSSHQGGATTTPLASGASVNTPFINLPALWRSVANIMP

SEQ ID NO: 65895 - protein, 245 aa, Homo sapiens
MWLCPLALNLILMAASGAVCEVKDVCVGSPGIPGTPGSHGLPGRDGRDGLKGDPGPPGPMGPPGEMPCPPGNDGLPGAPGIPGECGEKGEPGERGPPGLPAHLDEELQATLHDFRHQILQTRGALSLQGSIMTVGEKVFSSNGQSITFDAIQEACARAGGRIAVPRNPEENEAIASFVKKYNTYAYVGLTEGPSPGDFRYSDGTPVNYTNWYRGEPAGRGKEQCVEMYTDGQWNDRNCLYSRLTI

SEQ ID NO: 65896 - protein, 189 aa, Homo sapiens
MGPPGEMPCPPGNDGLPGAPGIPGECGEKGEPGERGPPGLPAHLDEELQATLHDFRHQILQTRGALSLQGSIMTVGEKVFSSNGQSITFDAIQEACARAGGRIAVPRNPEENEAIASFVKKYNTYAYVGLTEGPSPGDFRYSDGTPVNYTNWYRGEPAGRGKEQCVEMYTDGQWNDRNCLYSRLTICEF

SEQ ID NO: 65897 - protein, 248 aa, Homo sapiens
MWLCPLALNLILMAASGAVCEVKDVCVGSPGIPGTPGSHGLPGRDGRDGLKGDPGPPGPMGPPGEMPCPPGNDGLPGAPGIPGECGEKGEPGERGPPGLPAHLDEELQATLHDFRHQILQTRGALSLQGSIMTVGEKVFSSNGQSITFDAIQEACARAGGRIAVPRNPEENEAIASFVKKYNTYAYVGLTEGPSPGDFRYSDGTPVNYTNWYRGEPAGRGKEQCVEMYTDGQWNDRNCLYSRLTICEF

SEQ ID NO: 65898 - protein, 248 aa, Homo sapiens; identical to SEQ ID NO: 65897

SEQ ID NO: 65899 - protein, 263 aa, Homo sapiens
MRPCQVPGAATGPRAMWLCPLALNLILMAASGAVCEVKDVCVGSPGIPGTPGSHGLPGRDGRDGLKGDPGPPGPMGPPGEMPCPPGNDGLPGAPGIPGECGEKGEPGERGPPGLPAHLDEELQATLHDFRHQILQTRGALSLQGSIMTVGEKVFSSNGQSITFDAIQEACARAGGRIAVPRNPEENEAIASFVKKYNTYAYVGLTEGPSPGDFRYSDGTPVNYTNWYRGEPAGRGKEQCVEMYTDGQWNDRNCLYSRLTICEF

SEQ ID NO: 65900 - protein, 248 aa, Homo sapiens; identical to SEQ ID NO: 65897

SEQ ID NO: 65901 - protein, 158 aa, Homo sapiens
MWLCPLALNLILMAASGAVCEVKDVCVGSPGIPGTPGSHGLPGRDGRDGLKGDPGPPGPMGPPGEMPCPPGNDGLPGAPGIPGECGEKGEPGERGPPGLPAHLDEELQATLHDFRHQILQTRGALSLQGSIMTVGEKVFSSNGQSITFDAIQEACARA

SEQ ID NO: 65902 - protein, 158 aa, Homo sapiens; identical to SEQ ID NO: 65901

SEQ ID NO: 65903 - protein, 248 aa, Homo sapiens
MWLCPLALTLILMAASGAACEVKDVCVGSPGIPGTPGSHGLPGRDGRDGVKGDPGPPGPMGPPGETPCPPGNNGLPGAPGVPGERGEKGEAGERGPPGLPAHLDEELQATLHDFRHQILQTRGALSLQGSIMTVGEKVFSSNGQSITFDAIQEACARAGGRIAVPRNPEENEAIASFVKKYNTYAYVGLTEGPSPGDFRYSDGTPVNYTNWYRGEPAGRGKEQCVEMYTDGQWNDRNCLYSRLTICEF

SEQ ID NO: 65904 - protein, 248 aa, Homo sapiens; identical to SEQ ID NO: 65903

SEQ ID NO: 65905 - protein, 158 aa, Homo sapiens
MWLCPLALTLILMAASGAACEVKDVCVGSPGIPGTPGSHGLPGRDGRDGVKGDPGPPGPMGPPGETPCPPGNNGLPGAPGVPGERGEKGEAGERGPPGLPAHLDEELQATLHDFRHQILQTRGALSLQGSIMTVGEKVFSSNGQSITFDAIQEACARA

SEQ ID NO: 65906 - protein, 214 aa, Homo sapiens
MRPCQVPGAATGPRAMWLCPLALTLILMAASGAACEVKDVCVGSPGIPGKRGEKGEAGERGPPGLPAHLDEELQATLHDFRHQILQTRGALSLQGSIMTVGEKVFSSNGQSITFDAIQEACARAGGRIAVPRNPEENEAIASFVKKYNTYAYVGLTEGPSPGDFRYSDGTPVNYTNWYRGEPAGRGKEQCVEMYTDGQWNDRNCLYSRLTICEF

SEQ ID NO: 65907 - protein, 381 aa, Homo sapiens
MAESHLLQWLLLLLPTLCGPGTAAWTTSSLACAQGPEFWCQSLEQALQCRALGHCLQEVWGHVGADDLCQECEDIVHILNKMAKEAIFQDTMRKFLEQECNVLPLKLLMPQCNQVLDDYFPLVIDYFQNQTDSNGICMHLGLCKSRQPEPEQEPGMSDPLPKPLRDPLPDPLLDKLVLPVLPGALQARPGPHTQDLSEQQFPIPLPYCWLCRALIKRIQAMIPKGALAVAVAQVCRVVPLVAGGICQCLAERYSVILLDTLLGRMLPQLVCRLVLRCSMDDSAGPRSPTGEWLPRDSECHLCMSVTTQAGNSSEQAIPQAMLQACVGSWLDREKCKQFVEQHTPQLLTLVPRGWDAHTTCQALGVCGTMSSPLQCIHSPDL

SEQ ID NO: 65908 - protein, 375 aa, Homo sapiens
MLLFLLSALVLLTQPLGYLEAEMKTYSHRTMPSACTLVMCSSVESGLPGRDGRDGREGPRGEKGDPGLPGAAGQAGMPGQAGPVGPKGDNGSVGEPGPKGDTGPSGPPGPPGVPGPAGREGPLGKQGNIGPQGKPGPKGEAGPKGEVGAPGMQGSAGARGLAGPKGERGVPGERGVPGNTGAAGSAGAMGPQGSPGARGPPGLKGDKGIPGDKGAKGESGLPDVASLRQQVEALQGQVQHLQAAFSQYKKVELFPNGQSVGEKIFKTAGFVKPFTEAQLLCTQAGGQLASPRSAAENAALQQLVVAKNEAAFLSMTDSKTEGKFTYPTGESLVYSNWAPGEPNDDGGSEDCVEIFTNGKWNDRACGEKRLVVCEF

SEQ ID NO: 65909 - protein, 218 aa, Homo sapiens
MFLSTSKHGRQEAMLLFLLSALVLLTQPLGYLEAEMKTYSHRTMPSACTLVMCSSVESGLPGRDGRDGREGPRGEKGDPGLPGAAGQAGMPGQAGPVGPKGDNGSVGEPGPKGDTGPSGPPGPPGVPGPAGREGPLGKQGNIGPQGKPGPKGEAGPKGEVGAPGMQGSAGARGLAGPKGERGVPGERGVPGNTGAAGSAGAMGPQGSPGARGPPGLKG

SEQ ID NO: 65910 - protein, 300 aa, Homo sapiens
MAAVAALQLGLRAAGLGRAPASAAWRSVLRVSPRPGVAWRPSRCGSSAAEASATKAEDDSFLQWVLLLIPVTAFGLGTWQVQRRKWKLNLIAELESRVLAEPVPLPADPMELKNLEYRPVKVRGCFDHSKELYMMPRTMVDPVREAREGGLISSSTQSGAYVVTPFHCTDLGVTILVNRGFVPRKKVNPETRQKGQIEGEVDLIGMVRLTETRQPFVPENNPERNHWHYRDLEAMARITGAEPIFIDANFQSTVPGGPIGGQTRVTLRNEHLQYIVTWYGLSAATSYLWFKKFLRGTPGV

SEQ ID NO: 65911 - protein, 270 aa, Homo sapiens
APASAAWRSVLRVSPRPGVAWRPSRCGSSAAEASATKAEDDSFLQWVLLLIPVTAFGLGTWQVQRRKWKLNLIAELESRVLAEPVPLPADPMELKNLEYRPVKVRGCFDHSKELYMMPRTMVDPVREAREGGLISSSTQSGAYVVTPFHCTDLGKKVNPETRQKGQIEGEVDLIGMVRLTETRQPFVPENNPERNHWHYRDLEAMARITGAEPIFIDANFQSTVPGGPIGGQTRVTLRNEHLQYIVTWYGLSAATSYLWFKKFLRGTPGV

SEQ ID NO: 65912 - protein, 256 aa, Homo sapiens
MSELPGDVRAFLREHPSLRLQTDARKVRCILTGHELPCRLPELQVYTRGKKYQRLVRASPAFDYAEFEPHIVPSTKNPHQLFCKLTLRHINKCPEHVLRHTQGRRYQRALCKYEECQKQGVEYVPACLVHRRRRREDQMDGDGPRPREAFWEPTSSDEGGAASDDSMTDLYPPELFTRKDLGSTEDGDGTDDFLTDKEDEKAKPPREKATDESRRETTVYRGLVQKRGKKQLGSLKKKFKSHHRKPKSFSSCKQPG

SEQ ID NO: 65913 - protein, 269 aa, Homo sapiens
MGQNDLMGTAEDFADQFLRVTKQYLPHVARLCLISTFLEDGIRMWFQWSEQRDYIDTTWNCGYLLASSFVFLNLLGQLTGCVLVLSRNFVQYACFGLFGIIALQTIAYSILWDLKFLMRNLALGGGLLLLLAESRSEGKSMFAGVPTMRESSPKQYMQLGGRVLLVLMFMTLLHFDASFFSIVQNIVGTALMILVAIGFKTKLAALTLVVWLFAINVYFNAFWTIPVYKPMHDFLKYDFFQTMSVIGGLLLVVALGPGGVSMDEKKKEW

SEQ ID NO: 65914 - protein, 186 aa, Homo sapiens
MGQNDLMGTAEDFADQFLRVTKQYLPHVARLCLISTFLEDGIRMWFQWSEQRDYIDTTWNCGYLLASSFVFLNLLGQLTGCVLVLSRNFVQYACFGLFGIIALQTIAYSILWDLKFLMRNLALGGGLLLLLAESRSEGKSMFAGVPTMRESSPKQYMQLGGRVLLVLMFMTLLHFDASFFSQPSQQ

SEQ ID NO: 65915 - protein, 188 aa, Homo sapiens [sequence omitted]

SEQ ID NO: 65916 - protein, 260 aa, Homo sapiens
MRSLATEFLRVTKQYLPHVARLCLISTFLEDGIRMWFQWSEQRDYIDTTWNCGYLLASSFVFLNLLGQLTGCVLVLSRNFVQYACFGLFGIIALQTIAYSILWDLKFLMRNLALGGGLLLLLAESRSEGKSMFAGVPTMRESSPKQYMQLGGRVLLVLMFMTLLHFDASFFSIVQNIVGTALMILVAIGFKTKLAALTLVVWLFAINVYFNAFWTIPVYKPMHDFLKYDFFQTMSVIGGLLLVVALGPGGVSMDEKKKEW

SEQ ID NO: 65917 - protein, 128 aa, Homo sapiens
MGQNDLMGTAEDFADQFLRVTKQYLPHVARLCLISTFLEDGIRMWFQWSEQRDYIDTTWNCGYLLASSFVFLNLLGQLTGCVLVLSRNFVQYACFGLFGIIALQTIAYSILWDLKFLMRLSRTSWAQL

SEQ ID NO: 65918 - protein, 361 aa, Homo sapiens
MASLLAKDAYLQSLAKKICSHSAPEQQARTRAGKTQGSETAGPPKKKRKKTQKKFRKREEKAAEHKAKSLGEKSPAASGARRPEAAKEEAAWASSSAGNPADGLATEPESVFALDVLRQRLHEKIQEARGQGSAKELSPAALEKRRRRKQERDRKKRKRKELRAKEKARKAEEATEAQEVVEATPEGACTEPREPPGLIFNKVEVSEDEPASKAQRRKEKRQRVKGNLTPLTGRNYRQLLERLQARQSRLDELRGQDEGKAQELEAKMKWTNLLYKAEGVKIRDDERLLQEALKRKEKRRAQRQRRWEKRTAGVVEKMQQRQDRRRQNLRRKKAARAERRLLRARKKGRILPQDLERAGLV

SEQ ID NO: 65919 - protein, 262 aa, Homo sapiens
MAMSSGGSGGGVPEQEDSVLFRRGTGQSDDSDIWDDTALIKAYDKAVASFKHALKNGDICETSGKPKTTPKRKPAKKNKSQKKNTAASLQQWKVGDKCSAIWSEDGCIYPATIASIDFKRETCVVVYTGYGNREEQNLSDLLSPICEVANNIEQNAQENENESQVSTDESENSRSPGNKSDNIKPKSAPWNSFLPPPPPMPGPRLGPGKIIPPPPPICPDSLDDADALGSMLISWYMSGYHTGYYMGFRQNQKEGRCSHSLN

SEQ ID NO: 65920 - protein, 294 aa, Homo sapiens
MAMSSGGSGGGVPEQEDSVLFRRGTGQSDDSDIWDDTALIKAYDKAVASFKHALKNGDICETSGKPKTTPKRKPAKKNKSQKKNTAASLQQWKVGDKCSAIWSEDGCIYPATIASIDFKRETCVVVYTGYGNREEQNLSDLLSPICEVANNIEQNAQENENESQVSTDESENSRSPGNKSDNIKPKSAPWNSFLPPPPPMPGPRLGPGKPGLKFNGPPPPPPPPPPHLLSCWLPPFPSGPPIIPPPPPICPDSLDDADALGSMLISWYMSGYHTGYYMGFRQNQKEGRCSHSLN

SEQ ID NO: 65921 - protein, 262 aa, Homo sapiens; identical to SEQ ID NO: 65919

SEQ ID NO: 65922 - protein, 282 aa, Homo sapiens
MAMSSGGSGGGVPEQEDSVLFRRGTGQSDDSDIWDDTALIKAYDKAVASFKHALKNGDICETSGKPKTTPKRKPAKKNKSQKKNTAASLQQWKVGDKCSAIWSEDGCIYPATIASIDFKRETCVVVYTGYGNREEQNLSDLLSPICEVANNIEQNAQENENESQVSTDESENSRSPGNKSDNIKPKSAPWNSFLPPPPPMPGPRLGPGKPGLKFNGPPPPPPPPPPHLLSCWLPPFPSGPPIIPPPPPICPDSLDDADALGSMLISWYMSGYHTGYYMEMLA

SEQ ID NO: 65923 - protein, 294 aa, Homo sapiens
MAMSSGGSGGGVPEQEDSVLFRRGTGQSDDSDIWDDTALIKAYDKAVASFKHALKNGDICETSGKPKTTPKRKPAKKNKSQKKNTAASLQQWKVGDKCSAIWSEDGCIYPATIASIDFKRETCVVVYTGYGNREEQNLSDLLSPICEVANNIEQNAQENENESQVSTDESENSRSPGNKSDNIKPKSAPWNSFLPPPPPMPGPRLGPGKPGLKFNGPPPPPPPPPPHLLSCWLPPFPSGPPIIPPPPPICPDSLDDADALGSMLISWYMSGYHTGYYMTGFHCVSQDGLNLLTP

SEQ ID NO: 65924 - protein, 227 aa, Homo sapiens
MAMSSGGSGGGVPEQEDSVLFRRGTGQSDDSDIWDDTALIKAYDKAVASFKHALKNGDICETSGKPKTTPKRKPAKKNKSQKKNTAASLQQNENESQVSTDESENSRSPGNKSDNIKPKSAPWNSFLPPPPPMPGPRLGPGKPGLKFNGPPPPPPPPPPHLLSCWLPPFPSGPPIIPPPPPICPDSLDDADALGSMLISWYMSGYHTGYYMGFRQNQKEGRCSHSLN

SEQ ID NO: 65925 - protein, 282 aa, Homo sapiens; identical to SEQ ID NO: 65922

SEQ ID NO: 65926 - protein, 262 aa, Homo sapiens; identical to SEQ ID NO: 65919

SEQ ID NO: 65927 - protein, 294 aa, Homo sapiens; identical to SEQ ID NO: 65920

SEQ ID NO: 65928 - protein, 294 aa, Homo sapiens; identical to SEQ ID NO: 65923

SEQ ID NO: 65929 - protein, 227 aa, Homo sapiens; identical to SEQ ID NO: 65924

SEQ ID NO: 65930 - protein, 1497 aa, Homo sapiens
MPRCIAHFCEKPPSVSYSILESVSKAKFAAGSVVSFKCMEGFVLNTSAKIECMRGGQWNPSPMSIQCIPVRCGEPPSIMNGYASGSNYSFGAMVAYSCNKGFYIKGEKKSTCEATGQWSSPIPTCHPVSCGEPPKVENGFLEHTTGRIFESEVRYQCNPGYKSVGSPVFVCQANRHWHSESPLMCVPLDCGKPPPIQNGFMKGENFEVGSKVQFFCNEGYELVGDSSWTCQKSGKWNKKSNPKCMPAKCPEPPLLENQLVLKELTTEVGVVTFSCKEGHVLQGPSVLKCLPSQQWNDSFPVCKIVLCTPPPLISFGVPIPSSALHFGSTVKYSCVGGFFLRGNSTTLCQPDGTWSSPLPECVPVECPQPEEIPNGIIDVQGLAYLSTALYTCKPGFELVGNTTTLCGENGHWLGGKPTCKAIECLKPKEILNGKFSYTDLHYGQTVTYSCNRGFRLEGPSALTCLETGDWDVDAPSCNAIHCDSPQPIENGFVEGADYSYGAIIIYSCFPGFQVAGHAMQTCEESGWSSSIPTCMPIDCGLPPHIDFGDCTKLKDDQGYFEQEDDMMEVPYVTPHPPYHLGAVAKTWENTKESPATHSSNFLYGTMVSYTCNPGYELLGNPVLICQEDGTWNGSAPSCISIECDLPTAPENGFLRFTETSMGSAVQYSCKPGHILAGSDLRLCLENRKWSGASPRCEAISCKKPNPVMNGSIKGSNYTYLSTLYYECDPGYVLNGTERRTCQDDKNWDEDEPICIPVDCSSPPVSANGQVRGDEYTFQKEIEYTCNEGFLLEGARSRVCLANGSWSGATPDCVPVRCATPPQLANGVTEGLDYGFMKEVTFHCHEGYILHGAPKLTCQSDGNWDAEIPLCKPVNCGPPEDLAHGFPNGFSFIHGGHIQYQCFPGYKLHGNSSRRCLSNGSWSGSSPSCLPCRCSTPVIEYGTVNGTDFDCGKAARIQCFKGFKLLGLSEITCEADGQWSSGFPHCEHTSCGSLPMIPNAFISETSSWKENVITYSCRSGYVIQGSSDLICTEKGVWSQPYPVCEPLSCGSPPSVANAVATGEAHTYESEVKLRCLEGYTMDTDTDTFTCQKDGRWFPERISCSPKKCPLPENITHILVHGDDFSVNRQVSVSCAEGYTFEGVNISVCQLDGTWEPPFSDESCSPVSCGKPESPEHGFVVGSKYTFESTIIYQCEPGYELEGNRERVCQENRQWSGGVAICKETRCETPLEFLNGKADIENRTTGPNVVYSCNRGYSLEGPSEAHCTENGTWSHPVPLCKPNPCPVPFVIPENALLSEKEFYVDQNVSIKCREGFLLQGHGIITCNPDETWTQTSAKCEKISCGPPAHVENAIARGVHYQYGDMITYSCYSGYMLEGFLRSVCLENGTWTSPPICRAVCRFPCQNGGICQRPNACSCPEGWMGRLCEEPICILPCLNGGRCVAPYQCDCPPGWTGSRCHTAVCQSPCLNGGKCVRPNRCHCLSSWTGHNCSRKRRTGF

SEQ ID NO: 65931 - protein, 1549 aa, Homo sapiens
MWPRLAFCCWGLALVSGWATFQQMSPSRNFSFRLFPETAPGAPGSIPAPPAPGDEAAGSRVERLGQAFRRRVRLLRELSERLELVFLVDDSSSVGEVNFRSELMFVRKLLSDFPVVPTATRVAIVTFSSKNYVVPRVDYISTRRARQHKCALLLQEIPAISYRGGGTYTKGAFQQAAQILLHARENSTKVVFLITDGYSNGGDPRPIAASLRDSGVEIFTFGIWQGNIRELNDMASTPKEEHCYLLHSFEEFEALARRALHEDLPSGSFIQDDMVHCSYLCDEGKDCCDRMGSCKCGTHTGHFECICEKGYYGKGLQYECTACPSGTYKPEGSPGGISSCIPCPDENHTSPPGSTSPEDCVCREGYRASGQTCELVHCPALKPPENGYFIQNTCNNHFNAACGVRCHPGFDLVGSSIILCLPNGLWSGSESYCRVRTCPHLRQPKHGHISCSTREMLYKTTCLVACDEGYRLEGSDKLTCQGNSQWDGPEPRCVERHCSTFQMPKDVIISPHNCGKQPAKFGTICYVSCRQGFILSGVKEMLRCTTSGKWNVGVQAAVCKDVEAPQINCPKDIEAKTLEQQDSANVTWQIPTAKDNSGEKVSVHVHPAFTPPYLFPIGDVAIVYTATDLSGNQASCIFHIKVIDAEPPVIDWCRSPPPVQVSEKVHAASWDEPQFSDNSGAELVITRSHTQGDLFPQGETIVQYTATDPSGNNRTCDIHIVIKGSPCEIPFTPVNGDFICTPDNTGVNCTLTCLEGYDFTEGSTDKYYCAYEDGVWKPTYTTEWPDCAKKRFANHGFKSFEMFYKAARCDDTDLMKKFSEAFETTLGKMVPSFCSDAEDIDCRLEENLTKKYCLEYNYDYENGFAIGPGGWGAANRLDYSYDDFLDTVQETATSIGNAKSSRIKRSAPLSDYKIKLIFNITASVPLPDERNDTLEWENQQRLLQTLETITNKLKRTLNKDPMYSFQLASEILIADSNSLETKKASPFCRPGSVLRGRMCVNCPLGTYYNLEHFTCESCRIGSYQDEEGQLECKLCPSGMYTEYIHSRNISDCKAQCKQGTYSYSGLETCESCPLGTYQPKFGSRSCLSCPENTSTVKRGAVNISACGVPCPEGKFSRSGLMPCHPCPRDYYQPNAGKAFCLACPFYGTTPFAGSRSITECSSFSSTFSAAEESVVPPASLGHIKKRHEISSRVFHECFFNPCHNSGTCQQLGRGYVCLCPLGYTGLKCETDIDECSPLPCLNNGVCKDLVGEFICECPSGYTGQRCEENINECSSSPCLNKGICVDGVAGYRCTCVKGFVGLHCETEVNECQSNPCLNNAVCEDQVGGFLCKCPPGFLGTRCGKNVDECLSQPCKNGATCKDGANSFRCLCAAGFTGSHCELNINECQSNPCRNQATCVDELNSYSCKCQPGFSGKRCETEQSTGFNLDFEVSGIYGYVMLDGMLPSLHALTCTFWMKSSDDMNYGTPISYAVDNGSDNTLLLTDYNGWVLYVNGREKITNCPSVNDGRWHHIAITWTSANGIWKVYIDGKLSDGGAGLSVGLPIPGMF

SEQ ID NO: 65932 - protein, 845 aa, Homo sapiens
MSPSRNFSFRLFPETAPGAPGSIPAPPAPGDEAAGSRVERLGQAFRRRVRLLRELSERLELVFLVDDSSSVGEVNFRSELMFVRKLLSDFPVVPTATRVAIVTFSSKNYVVPRVDYISTRRARQHKCALLLQEIPAISYRGGGTYTKGAFQQAAQILLHARENSTKVVFLITDGYSNGGDPRPIAASLRDSGVEIFTFGIWQGNIRELNDMASTPKEEHCYLLHSFEEFEALARRALHEDLPSGSFIQDDMVHCSYLCDEGKDCCDRMGSCKCGTHTGHFECICEKGYYGKGLQYECTACPSGTYKPEGSPGGISSCIPCPDENHTSPPGSTSPEDCVCREGYRASGQTCELVHCPALKPPENGYFIQNTCNNHFNAACGVRCHPGFDLVGSSIILCLPNGLWSGSESYCRVRTCPHLRQPKHGHISCSTREMLYKTTCLVACDEGYRLEGSDKLTCQGNSQWDGPEPRCVERHCSTFQMPKDVIISPHNCGKQPAKFGTICYVSCRQGFILSGVKEMLRCTTSGKWNVGVQAAVCKDVEAPQINCPKDIEAKTLEQQDSANVTWQIPTAKDNSGEKVSVHVHPAFTPPYLFPIGDVAIVYTATDLSGNQASCIFHIKVIDAEPPVIDWCRSPPPVQVSEKVHAASWDEPQFSDNSGAELVITRSHTQGDLFPQGETIVQYTATDPSGNNRTCDIHIVIKGSPCEIPFTPVNGDFICTPDNTGVNCTLTCLEGYDFTEGSTDKYYCAYEDGVWKPTYTTEWPDCAKKRFANHGFKSFEMFYKAARCDDTDLMKKFSEAFETTLGKMVPSFCSDAEDIDCRLEENLTKKYCLEYNYDYENGFAIGN

SEQ ID NO: 65933 - protein, 515 aa, Homo sapiens
LENQLVLKELTTEVGVVTFSCKEGHVLQGPSVLKCLPSQQWNDSFPVCKIVLCTPPPLISFGVPIPSSALHFGSTVKYSCVGGFFLRGNSTTLCQPDGTWSSPLPECVPVECPQPEEIPNGIIDVQGLAYLSTALYTCKPGFELVGNTTTLCGENGHWLGGKPTCKAIECLKPKEILNGKFSYTDLHYGQTVTYSCNRGFRLEGPSALTCLETGDWDVDAPSCNAIHCDSPQPIENGFVEGADYSYGAIIIYSCFPGFQVAGHAMQTCEESGWSSSIPTCMPIDCGLPPHIDFGDCTKLKDDQGYFEQEDDMMEVPYVTPHPPYHLGAVAKTWENTKESPATHSSNFLYGTMVSYTCNPGYELLGNPVLICQEDGTWNGSAPSCISIECDLPTAPENGFLRFTETSMGSAVQYSCKPGHILAGSDLRLCLENRKWSGASPRCEAISCKKPNPVMNGSIKGSNYTYLSTLYYECDPGYVLNGTERRTCQDDKTGMRMSPFAFLWTAVHPQSQPMAR

SEQ ID NO: 65934 - protein, 3548 aa, Homo sapiens
MSPSRNFSFRLFPETAPGAPGSIPAPPAPGDEAAGSRVERLGQAFRRRVRLLRELSERLELVFLVDDSSSVGEVNFRSELMFVRKLLSDFPVVPTATRVAIVTFSSKNYVVPRVDYISTRRARQHKCALLLQEIPAISYRGGGTYTKGAFQQAAQILLHARENSTKVVFLITDGYSNGGDPRPIAASLRDSGVEIFTFGIWQGNIRELNDMASTPKEEHCYLLHSFEEFEALARRALHEDLPSGSFIQDDMVHCSYLCDEGKDCCDRMGSCKCGTHTGHFECICEKGYYGKGLQYECTACPSGTYKPEGSPGGISSCIPCPDENHTSPPGSTSPEDCVCREGYRASGQTCELVHCPALKPPENGYFIQNTCNNHFNAACGVRCHPGFDLVGSSIILCLPNGLWSGSESYCRVRTCPHLRQPKHGHISCSTREMLYKTTCLVACDEGYRLEGSDKLTCQGNSQWDGPEPRCVERHCSTFQMPKDVIISPHNCGKQPAKFGTICYVSCRQGFILSGVKEMLRCTTSGKWNVGVQAAVCKDVEAPQINCPKDIEAKTLEQQDSANVTWQIPTAKDNSGEKVSVHVHPAFTPPYLFPIGDVAIVYTATDLSGNQASCIFHIKVIDAEPPVIDWCRSPPPVQVSEKVHAASWDEPQFSDNSGAELVITRSHTQGDLFPQGETIVQYTATDPSGNNRTCDIHIVIKGSPCEIPFTPVNGDFICTPDNTGVNCTLTCLEGYDFTEGSTDKYYCAYEDGVWKPTYTTEWPDCAKKRFANHGFKSFEMFYKAARCDDTDLMKKFSEAFETTLGKMVPSFCSDAEDIDCRLEENLTKKYCLEYNYDYENGFAIGPGGWGAANRLDYSYDDFLDTVQETATSIGNAKSSRIKRSAPLSDYKIKLIFNITASVPLPDERNDTLEWENQQRLLQTLETITNKLKRTLNKDPMYSFQLASEILIADSNSLETKKASPFCRPGSVLRGRMCVNCPLGTYYNLEHFTCESCRIGSYQDEEGQLECKLCPSGMYTEYIHSRNISDCKAQCKQGTYSYSGLETCESCPLGTYQPKFGSRSCLSCPENTSTVKRGAVNISACGVPCPEGKFSRSGLMPCHPCPRDYYQPNAGKAFCLACPFYGTTPFAGSRSITECSSFSSTFSAAEESVVPPASLGHIKKRHEISSQVFHECFFNPCHNSGTCQQLGRGYVCLCPLGYTGLKCETDIDECSPLPCLNNGVCKDLVGEFICECPSGYTGQRCEENINECSSSPCLNKGICVDGVAGYRCTCVKGFVGLHCETEVNECQSNPCLNNAVCEDQVGGFLCKCPPGFLGTRCGKNVDECLSQPCKNGATCKDGANSFRCLCAAGFTGSHCELNINECQSNPCRNQATCVDELNSYSCKCQPGFSGKRCETEQSTGFNLDFEVSGIYGYVMLDGMLPSLHALTCTFWMKSSDDMNYGTPISYAVDNGSDNTLLLTDYNGWVLYVNGREKITNCPSVNDGRWHHIAITWTSANGIWKVYIDGKLSDGGAGLSVGLPIPGGGALVLGQEQDKKGEGFSPAESFVGSISQLNLWDYVLSPQQVKSLATSCPEELSKGNVLAWPDFLSGIVGKVKIDSKSIFCSDCPRLGGSVPHLRTASEDLKPGSKVNLFCDPGFQLVGNPVQYCLNQGQWTQPLPHCERISCGVPPPLENGFHSADDFYAGSTVTYQCNNGYYLLGDSRMFCTDNGSWNGVSPSCLDVDECAVGSDCSEHASCLNVDGSYICSCVPPYTGDGKNCAEPIKCKAPGNPENGHSSGEIYTVGAEVTFSCQEGYQLMGVTKITCLESGEWNHLIPYCKAVSCGKPAIPENGCIEELAFTFGSKVTYRCNKGYTLAGDKESSCLANSSWSHSPPVCEPVKCSSPENINNGKYILSGLTYLSTASYSCDTGYSLQGPSIIECTASGIWDRAPPACHLVFCGEPPAIKDAVITGNNFTFRNTVTYTCKEGYTLAGLDTIECLADGKWSRSDQQCLAVSCDEPPIVDHASPETAHRLFGDIAFYYCSDGYSLADNSQLLCNAQGKWVPPEGQDMPRCIAHFCEKPPSVSYSILESVSKAKFAAGSVVSFKCMEGFVLNTSAKIECMRGGQWNPSPMSIQCIPVRCGEPPSIMNGYASGSNYSFGAMVAYSCNKGFYIKGEKKSTCEATGQWSSPIPTCHPVSCGEPPKVENGFLEHTTGRIFESEVRYQCNPGYKSVGSPVFVCQANRHWHSESPLMCVPLDCGKPPPIQNGFMKGENFEVGSKVQFFCNEGYELVGDSSWTCQKSGKWNKKSNPKCMPAKCPEPPLLENQLVLKELTTEVGVVTFSCKEGHVLQGPSVLKCLPSQQWNDSFPVCKIVLCTPPPLISFGVPIPSSALHFGSTVKYSCVGGFFLRGNSTTLCQPDGTWSSPLPECVPVECPQPEEIPNGIIDVQGLAYLSTALYTCKPGFELVGNTTTLCGENGHWLGGKPTCKAIECLKPKEILNGKFSYTDLHYGQTVTYSCNRGFRLEGPSALTCLETGDWDVDAPSCNAIHCDSPQPIENGFVEGADYSYGAIIIYSCFPGFQVAGHAMQTCEESGWSSSIPTCMPIDCGLPPHIDFGDCTKLKDDQGYFEQEDDMMEVPYVTPHPPYHLGAVAKTWENTKESPATHSSNFLYGTMVSYTCNPGYELLGNPVLICQEDGTWNGSAPSCISIECDLPTAPENGFLRFTETSMGSAVQYSCKPGHILAGSDLRLCLENRKWSGASPRCEAISCKKPNPVMNGSIKGSNYTYLSTLYYECDPGYVLNGTERRTCQDDKNWDEDEPICIPVDCSSPPVSANGQVRGDEYTFQKEIEYTCNEGFLLEGARSRVCLANGSWSGATPDCVPVRCATPPQLANGVTEGLDYGFMKEVTFHCHEGYILHGAPKLTCQSDGNWDAEIPLCKPVNCGPPEDLAHGFPNGFSFIHGGHIQYQCFPGYKLHGNSSRRCLSNGSWSGSSPSCLPCRCSTPVIEYGTVNGTDFDCGKAARIQCFKGFKLLGLSEITCEADGQWSSGFPHCEHTSCGSLPMIPNAFISETSSWKENVITYSCRSGYVIQGSSDLICTEKGVWSQPYPVCEPLSCGSPPSVANAVATGEAHTYESEVKLRCLEGYTMDTDTDTFTCQKDGRWFPERISCSPKKCPLPENITHILVHGDDFSVNRQVSVSCAEGYTFEGVNISVCQLDGTWEPPFSDESCSPVSCGKPESPEHGFVVGSKYTFESTIIYQCEPGYELEGNRERVCQENRQWSGGVAICKETRCETPLEFLNGKADIENRTTGPNVVYSCNRGYSLEGPSEAHCTENGTWSHPVPLCKPNPCPVPFVIPENALLSEKEFYVDQNVSIKCREGFLLQGHGIITCNPDETWTQTSAKCEKISCGPPAHVENAIARGVHYQYGDMITYSCYSGYMLEGFLRSVCLENGTWTSPPICRAVCRFPCQNGGICQRPNACSCPEGWMGRLCEEPICILPCLNGGRCVAPYQCDCPPGWTGSRCHTAVCQSPCLNGGKCVRPNRCHCLSSWTGHNCSRKRRTGF

SEQ ID NO: 65935 - protein, 3571 aa, Homo sapiens
MWPRLAFCCWGLALVSGWATFQQMSPSRNFSFRLFPETAPGAPGSIPAPPAPGDEAAGSRVERLGQAFRRRVRLLRELSERLELVFLVDDSSSVGEVNFRSELMFVRKLLSDFPVVPTATRVAIVTFSSKNYVVPRVDYISTRRARQHKCALLLQEIPAISYRGGGTYTKGAFQQAAQILLHARENSTKVVFLITDGYSNGGDPRPIAASLRDSGVEIFTFGIWQGNIRELNDMASTPKEEHCYLLHSFEEFEALARRALHEDLPSGSFIQDDMVHCSYLCDEGKDCCDRMGSCKCGTHTGHFECICEKGYYGKGLQYECTACPSGTYKPEGSPGGISSCIPCPDENHTSPPGSTSPEDCVCREGYRASGQTCELVHCPALKPPENGYFIQNTCNNHFNAACGVRCHPGFDLVGSSIILCLPNGLWSGSESYCRVRTCPHLRQPKHGHISCSTREMLYKTTCLVACDEGYRLEGSDKLTCQGNSQWDGPEPRCVERHCSTFQMPKDVIISPHNCGKQPAKFGTICYVSCRQGFILSGVKEMLRCTTSGKWNVGVQAAVCKDVEAPQINCPKDIEAKTLEQQDSANVTWQIPTAKDNSGEKVSVHVHPAFTPPYLFPIGDVAIVYTATDLSGNQASCIFHIKVIDAEPPVIDWCRSPPPVQVSEKVHAASWDEPQFSDNSGAELVITRSHTQGDLFPQGETIVQYTATDPSGNNRTCDIHIVIKGSPCEIPFTPVNGDFICTPDNTGVNCTLTCLEGYDFTEGSTDKYYCAYEDGVWKPTYTTEWPDCAKKRFANHGFKSFEMFYKAARCDDTDLMKKFSEAFETTLGKMVPSFCSDAEDIDCRLEENLTKKYCLEYNYDYENGFAIGPGGWGAANRLDYSYDDFLDTVQETATSIGNAKSSRIKRSAPLSDYKIKLIFNITASVPLPDERNDTLEWENQQRLLQTLETITNKLKRTLNKDPMYSFQLASEILIADSNSLETKKASPFCRPGSVLRGRMCVNCPLGTYYNLEHFTCESCRIGSYQDEEGQLECKLCPSGMYTEYIHSRNISDCKAQCKQGTYSYSGLETCESCPLGTYQPKFGSRSCLSCPENTSTVKRGAVNISACGVPCPEGKFSRSGLMPCHPCPRDYYQPNAGKAFCLACPFYGTTPFAGSRSITECSSFSSTFSAAEESVVPPASLGHIKKRHEISSQVFHECFFNPCHNSGTCQQLGRGYVCLCPLGYTGLKCETDIDECSPLPCLNNGVCKDLVGEFICECPSGYTGQRCEENINECSSSPCLNKGICVDGVAGYRCTCVKGFVGLHCETEVNECQSNPCLNNAVCEDQVGGFLCKCPPGFLGTRCGKNVDECLSQPCKNGATCKDGANSFRCLCAAGFTGSHCELNINECQSNPCRNQATCVDELNSYSCKCQPGFSGKRCETEQSTGFNLDFEVSGIYGYVMLDGMLPSLHALTCTFWMKSSDDMNYGTPISYAVDNGSDNTLLLTDYNGWVLYVNGREKITNCPSVNDGRWHHIAITWTSANGIWKVYIDGKLSDGGAGLSVGLPIPGGGALVLGQEQDKKGEGFSPAESFVGSISQLNLWDYVLSPQQVKSLATSCPEELSKGNVLAWPDFLSGIVGKVKIDSKSIFCSDCPRLGGSVPHLRTASEDLKPGSKVNLFCDPGFQLVGNPVQYCLNQGQWTQPLPHCERISCGVPPPLENGFHSADDFYAGSTVTYQCNNGYYLLGDSRMFCTDNGSWNGVSPSCLDVDECAVGSDCSEHASCLNVDGSYICSCVPPYTGDGKNCAEPIKCKAPGNPENGHSSGEIYTVGAEVTFSCQEGYQLMGVTKITCLESGEWNHLIPYCKAVSCGKPAIPENGCIEELAFTFGSKVTYRCNKGYTLAGDKESSCLANSSWSHSPPVCEPVKCSSPENINNGKYILSGLTYLSTASYSCDTGYSLQGPSIIECTASGIWDRAPPACHLVFCGEPPAIKDAVITGNNFTFRNTVTYTCKEGYTLAGLDTIECLADGKWSRSDQQCLAVSCDEPPIVDHASPETAHRLFGDIAFYYCSDGYSLADNSQLLCNAQGKWVPPEGQDMPRCIAHFCEKPPSVSYSILESVSKAKFAAGSVVSFKCMEGFVLNTSAKIECMRGGQWNPSPMSIQCIPVRCGEPPSIMNGYASGSNYSFGAMVAYSCNKGFYIKGEKKSTCEATGQWSSPIPTCHPVSCGEPPKVENGFLEHTTGRIFESEVRYQCNPGYKSVGSPVFVCQANRHWHSESPLMCVPLDCGKPPPIQNGFMKGENFEVGSKVQFFCNEGYELVGDSSWTCQKSGKWNKKSNPKCMPAKCPEPPLLENQLVLKELTTEVGVVTFSCKEGHVLQGPSVLKCLPSQQWNDSFPVCKIVLCTPPPLISFGVPIPSSALHFGSTVKYSCVGGFFLRGNSTTLCQPDGTWSSPLPECVPVECPQPEEIPNGIIDVQGLAYLSTALYTCKPGFELVGNTTTLCGENGHWLGGKPTCKAIECLKPKEILNGKFSYTDLHYGQTVTYSCNRGFRLEGPSALTCLETGDWDVDAPSCNAIHCDSPQPIENGFVEGADYSYGAIIIYSCFPGFQVAGHAMQTCEESGWSSSIPTCMPIDCGLPPHIDFGDCTKLKDDQGYFEQEDDMMEVPYVTPHPPYHLGAVAKTWENTKESPATHSSNFLYGTMVSYTCNPGYELLGNPVLICQEDGTWNGSAPSCISIECDLPTAPENGFLRFTETSMGSAVQYSCKPGHILAGSDLRLCLENRKWSGASPRCEAISCKKPNPVMNGSIKGSNYTYLSTLYYECDPGYVLNGTERRTCQDDKNWDEDEPICIPVDCSSPPVSANGQVRGDEYTFQKEIEYTCNEGFLLEGARSRVCLANGSWSGATPDCVPVRCATPPQLANGVTEGLDYGFMKEVTFHCHEGYILHGAPKLTCQSDGNWDAEIPLCKPVNCGPPEDLAHGFPNGFSFIHGGHIQYQCFPGYKLHGNSSRRCLSNGSWSGSSPSCLPCRCSTPVIEYGTVNGTDFDCGKAARIQCFKGFKLLGLSEITCEADGQWSSGFPHCEHTSCGSLPMIPNAFISETSSWKENVITYSCRSGYVIQGSSDLICTEKGVWSQPYPVCEPLSCGSPPSVANAVATGEAHTYESEVKLRCLEGYTMDTDTDTFTCQKDGRWFPERISCSPKKCPLPENITHILVHGDDFSVNRQVSVSCAEGYTFEGVNISVCQLDGTWEPPFSDESCSPVSCGKPESPEHGFVVGSKYTFESTIIYQCEPGYELEGNRERVCQENRQWSGGVAICKETRCETPLEFLNGKADIENRTTGPNVVYSCNRGYSLEGPSEAHCTENGTWSHPVPLCKPNPCPVPFVIPENALLSEKEFYVDQNVSIKCREGFLLQGHGIITCNPDETWTQTSAKCEKISCGPPAHVENAIARGVHYQYGDMITYSCYSGYMLEGFLRSVCLENGTWTSPPICRAVCRFPCQNGGICQRPNACSCPEGWMGRLCEEPICILPCLNGGRCVAPYQCDCPPGWTGSRCHTAVCQSPCLNGGKCVRPNRCHCLSSWTGHNCSRKRRTGF

SEQ ID NO: 65936 - protein, 451 aa, Homo sapiens
MDFDVGRTTHLSSSPCSASNGGESGQVSKRRCLIGESGHDTPWCSPIKVKYGDVYCRAPQGGYYKTALGTRCDIRCQKGYELHGSSLLICQSNKRWSDKVICKQKRCPTLAMPANGGFKCVDGAYFNSRCEYYCSPGYTLKGERTVTCMDNKAWSGRPASCVDMEPPRIKCPSVKERIAEPNKLTVRVSWETPEGRDTADGILTDVILKGLPPGSNFPEGDHKIQYTVYDRAENKGTCKFRVKVRVKRCGKLNAPENGYMKCSSDGDNYGATCEFSCIGGYELQGSPARVCQSNLAWSGTEPTCAAMNVNVGVRTAAALLDQFYEKRRLLIVSTPTARNLLYRLQLGMLQQAQCGLDLRHITVVELVGVFPTLIGRIGAKIMPPALALQLRLLLRIPLYSFSMVLVDKHGMDKERYVSLVMPVALFNLIDTFPLRKEEMVLQAEMSQTCNT

SEQ ID NO: 65937 - protein, 464 aa, Homo sapiens
MGSPAHRPALLLLLPPLLLLLLLRVPPSRSFPGSGDSPLEDDEVGYSHPRYKDTPWCSPIKVKYGDVYCRAPQGGYYKTALGTRCDIRCQKGYELHGSSLLICQSNKRWSDKVICKQKRCPTLAMPANGGFKCVDGAYFNSRCEYYCSPGYTLKGERTVTCMDNKAWSGRPASCVDMEPPRIKCPSVKERIAEPNKLTVRVSWETPEGRDTADGILTDVILKGLPPGSNFPEGDHKIQYTVYDRAENKGTCKFRVKVRVKRCGKLNAPENGYMKCSSDGDNYGATCEFSCIGGYELQGSPARVCQSNLAWSGTEPTCAAMNVNVGVRTAAALLDQFYEKRRLLIVSTPTARNLLYRLQLGMLQQAQCGLDLRHITVVELVGVFPTLIGRIGAKIMPPALALQLRLLLRIPLYSFSMVLVDKHGMDKERYVSLVMPVALFNLIDTFPLRKEEMVLQAEMSQTCNT

SEQ ID NO: 65938 - protein, 405 aa, Homo sapiens
MGSPAHRPALLLLLPPLLLLLLLRVPPSRSFPGSGDSPLEDDEVGYSHPRYKDTPWCSPIKVKYGDVYCRAPQGGYYKTALGTRCDIRCQKGYELHGSSLLICQSNKRWSDKVICKHMEPPRIKCPSVKERIAEPNKLTVRVSWETPEGRDTADGILTDVILKGLPPGSNFPEGDHKIQYTVYDRAENKGTCKFRVKVRVKRCGKLNAPENGYMKCSSDGDNYGATCEFSCIGGYELQGSPARVCQSNLAWSGTEPTCAAMNVNVGVRTAAALLDQFYEKRRLLIVSTPTARNLLYRLQLGMLQQAQCGLDLRHITVVELVGVFPTLIGRIGAKIMPPALALQLRLLLRIPLYSFSMVLVDKHGMDKERYVSLVMPVALFNLIDTFPLRKEEMVLQAEMSQTCNT

SEQ ID NO: 65939 - protein, 379 aa, Homo sapiens
MGSPAHRPALLLLLPPLLLLLLLRVPPSRSFPGSGDSPLEDDEVGYSHPRYKDTPWCSPIKVKYGDVYCRAPQGGYYKTALGTRCDIRCQKGYELHGSSLLICQSNKRWSDKVICKQKRCPTLAMPANGGFKCVDGAYFNSRCEYYCSPGYTLKGERTVTCMDNKAWSGRPASCVDMEPPRIKCPSVKERIAEPNKLTVRVSWETPEGRDTADGILTDVILKGLPPGSNFPEGDHKIQYTVYDRAENKGTCKFRVKVRVKRCGKLNAPENGYMKCSSDGDNYGATCEFSCIGGYELQGSPARVCQSNLAWSGTEPTCAAMNVNVGVRTAAALLDQFYEKRRLLIVSTPTARNLLYRLQLGMLQAVAANPTLLLQYGASG

SEQ ID NO: 65940 - protein, 444 aa, Homo sapiens
MGSPAHRPALLLLLPPLLLLLLLRVPPSRSFPDTPWCSPIKVKYGDVYCRAPQGGYYKTALGTRCDIRCQKGYELHGSSLLICQSNKRWSDKVICKQKRCPTLAMPANGGFKCVDGAYFNSRCEYYCSPGYTLKGERTVTCMDNKAWSGRPASCVDMEPPRIKCPSVKERIAEPNKLTVRVSWETPEGRDTADGILTDVILKGLPPGSNFPEGDHKIQYTVYDRAENKGTCKFRVKVRVKRCGKLNAPENGYMKCSSDGDNYGATCEFSCIGGYELQGSPARVCQSNLAWSGTEPTCAAMNVNVGVRTAAALLDQFYEKRRLLIVSTPTARNLLYRLQLGMLQQAQCGLDLRHITVVELVGVFPTLIGRIGAKIMPPALALQLRLLLRIPLYSFSMVLVDKHGMDKERYVSLVMPVALFNLIDTFPLRKEEMVLQAEMSQTCNT

SEQ ID NO: 65941 - protein, 465 aa, Homo sapiens
MASQLTQRGALFLLFFLTPAVTPTWYAGSGYYPDESYNEVYAEEVPQAPALDYRVPRWCYTLNIQDGEATCYSPKGGNYHSSLGTRCELSCDRGFRLIGRRSVQCLPSRRWSGTAYCRQMRCHALPFITSGTYTCTNGVLLDSRCDYSCSSGYHLEGDRSRICMEDGRWSGGEPVCVDIDPPKIRCPHSREKMAEPEKLTARVYWDPPLVKDSADGTITRVTLRGPEPGSHFPEGEHVIRYTAYDRAYNRASCKFIVKVQVRRCPTLKPPQHGYLTCTSAGDNYGATCEYHCDGGYDRQGTPSRVCQSSRQWSGSPPICAPMKINVNVNSAAGLLDQFYEKQRLLIISAPDPSNRYYKMQISMLQQSTCGLDLRHVTIIELVGQPPQEVGRIREQQLSANIIEELRQFQRLTRSYFNMVLIDKQGIDRDRYMEPVTPEEIFTFIDDYLLSNQELTQRREQRDICE

SEQ ID NO: 65942 - protein, 483 aa, Homo sapiens
  VARIANT 1: note = MOD_RES - Any amino acid
XTFMVEDAVEAIGFGKFQWKLSVLTGLAWMADAMEMMILSILAPQLHCEWRLPSWQVALLTSVVFVGMMSSSTLWGNISDQYGRKTGLKISVLWTLYYGILSAFAPVYSWILVLRGLVGFGIGGVPQSVTLYAEFLPMKARAKCILLIEVFWAIGTVFEVVLAVFVMPSLGWRWLLILSAVPLLLFAVLCFWLPESARYDVLSGNQEKAIATLKRIATENGAPMPLGKLIISRQEDRGKMRDLFTPHFRWTTLLLWFIWFSNAFSYYGLVLLTTELFQAGDVCGISSRKKAVEAKCSLACEYLSEEDYMDLLWTTLSEFPGVLVTLWIIDRLGRKKTMALCFVIFSFCSLLLFICVGRNVLTLLLFIARAFISGGFQAAYVYTPEVYPTATRALGLGTCSGMARVGALITPFIAQVMLESSVYLTLAVYSGCCLLAALASCFLPIETKGRGLQESSHREWGQEMVGRGMHGAGVTRSNSGSQE

SEQ ID NO: 65943 - protein, 12 aa, Homo sapiens
MEEDLFQLRQLP

SEQ ID NO: 65944 - protein, 340 aa, Homo sapiens
MAAGRLIIKTEFLPTKYRGYMLPLSQVFWLAGSLLIIGLASVIIPTIGWRWLIRVASIPGIILIVAFKFIPESARFNVSTGNTRAALATLERVAKMNRSVMPEGKLVEPVLEKRGRFADLLDAKYLRTTLQIWVIWLGISFAYYGVILASAELLERDLVCGSKSDSAVVVTGGDSGESQSPCYCHMFAPSDYRTMIISTIGEIALNPLNILGINFLGRRLSLSITMGCTALFFLLLNICTSSAGLIGFLFMLRALVAANFNTVYIYTAEVYPTTMRALGMGTSGSLCRIGAMVAPFISQVLMSASILGALCLFSSVCVVCAISAFTLPIETKGRALQQIK

SEQ ID NO: 65945 - protein, 492 aa, Homo sapiens
MATKPTEPVTILSLRKLSLGTAEPQVKEPKTFTVEDAVETIGFGRFHIALFLIMGSTGVVEAMEIMLIAVVSPVIRCEWQLENWQVALVTTMVFFGYMVFSILFGLLADRYGRWKILLISFLWGAYFSLLTSFAPSYIWFVFLRTMVGCGVSGHSQGLIIKTEFLPTKYRGYMLPLSQVFWLAGSLLIIGLASVIIPTIGWRWLIRVASIPGIILIVAFKFIPESARFNVSTGNTRAALATLERVAKMNRSVMPEGKLVEPVLEKRGRFADLLDAKYLRTTLQIWVIWLGISFAYYGVILASAELLERDLVCGSKSDSAVVVTGGDSGESQSPCYCHMFAPSDYRTMIISTIGEIALNPLNILGINFLGRRLSLSITMGCTALFFLLLNICTSSAGLIGFLFMLRALVAANFNTVYIYTAEVYPTTMRALGMGTSGSLCRIGAMVAPFISQVLMSASILGALCLFSSVCVVCAISAFTLPIETKGRALQQIK

SEQ ID NO: 65946 - protein, 340 aa, Homo sapiens; identical to SEQ ID NO: 65944

SEQ ID NO: 65947 - protein, 585 aa, Homo sapiens
MGSLKEELLKAIWHAFTALDQDHSGKVSKSQLKVLSHNLCTVLKVPHDPVALEEHFRDDDEGPVSNQGYMPYLNRFILEKVQDNFDKIEFNRMCWTLCVKKNLTKNPLLITEEDAFKIWVIFNFLSEDKYPLIIVSEEIEYLLKKLTEAMGGGWQQEQFEHYKINFDDSKNGLSAWELIELIGNGQFSKGMDRQTVSMAINEVFNELILDVLKQGYMMKKGHRRKNWTERWFVLKPNIISYYVSEDLKDKKGDILLDENCCVESLPDKDGKKCLFLVKCFDKTFEISASDKKKKQEWIQAIHSTIHLLKLGSPPPHKEARQRRKELRKKQLAEQEELERQMKELQAANESKQQELEAVRKKLEEAASRAAEEEKKRLQTQVELQARFSTELEREKLIRQQMEEQVAQKSSELEQYLQRVRELEDMYLKLQEALEDERQARQDEETVRKLQARLLEEESSKRAELEKWHLEQQQAIQTTEAEKQELENQRVLKEQALQEAMEQLEQLELERKQALEQYEEVKKKLEMATNKTKSWKDKVAHHEGLIRLIEPGSKNPHLITNWGPAAFTEAELEEREKNWKEKKTTE

SEQ ID NO: 65948 - protein, 1042 aa, Homo sapiens
MEQDTAAVAATVAAADATATIVVIEDEQPGPSTSQEEGAAAAATEATAATEKGEKKKEKNVSSFQLKLAAKAPKSEKEMDPEYEEKMKADRAKRFEFLLKQTELFAHFIQPSAQKSPTSPLNMKLGRPRIKKDEKQSLISAGDYRHRRTEQEEDEELLSESRKTSNVCIRFEVSPSYVKGGPLRDYQIRGLNWLISLYENGVNGILADEMGLGKTLQTIALLGYLKHYRNIPGPHMVLVPKSTLHNWMNEFKRWVPSLRVICFVGDKDARAAFIRDEMMPGEWDVCVTSYEMVIKEKSVFKKFHWRYLVIDEAHRIKNEKSKLSEIVREFKSTNRLLLTGTPLQNNLHELWALLNFLLPDVFNSADDFDSWFDTKNCLGDQKLVERLHAVLKPFLLRRIKTDVEKSLPPKKEIKIYLGLSKMQREWYTKILMKDIDVLNSSGKMDKMRLLNILMQLRKCCNHPYLFDGAEPGPPYTTDEHIVSNSGKMVVLDKLLAKLKEQGSRVLIFSQMTRLLDILEDYCMWRGYEYCRLDGQTPHEEREEAIEAFNAPNSSKFIFMLSTRAGGLGINLASADVVILYDSDWNPQVDLQAMDRAHRIGQKKPVRVFRLITDNTVEERIVERAEIKLRLDSIVIQQGRLIDQQSNKLAKEEMLQMIRHGATHVFASKESELTDEDITTILERGEKKTAEMNERLQKMGESSLRNFRMDIEQSLYKFEGEDYREKQKLGMVEWIEPPKRERKANYAVDAYFREALRVSEPKIPKAPRPPKQPNVQDFQFFPPRLFELLEKEILYYRKTIGYKVPRNPDIPNPALAQREEQKKIDGAEPLTPEETEEKEKLLTQGFTNWTKRDFNQFIKANEKYGRDDIDNIAREVEGKSPEEVMEYSAVFWERCNELQDIEKIMAQIERGEARIQRRISIKKALDAKIARYKAPFHQLRIQYGTSKGKNYTEEEDRFLICMLHKMGFDRENVYEELRQCVRNAPQFRFDWFIKSRTAMEFQRRCNTLISLIEKENMEIEERERAEKKKRATKTPMVKFSAFS

SEQ ID NO: 65949 - protein, 1054 aa, Homo sapiens
MEQDTAAVAATVAAADATATIVVIEDEQPGPSTSQEEGAAAAATEATAATEKGEKKKEKNVSSFQLKLAAKAPKSEKEMDPEYEEKMKADRAKRFEFLLKQTELFAHFIQPSAQKSPTSPLNMKLGRPRIKKDEKQSLISAGDYRHRRTEQEEDEELLSESRKTSNVCIRFEVSPSYVKGGPLRDYQIRGLNWLISLYENGVNGILADEMGLGKTLQTIALLGYLKHYRNIPGPHMVLVPKSTLHNWMNEFKRWVPSLRVICFVGDKDARAAFIRDEMMPGEWDVCVTSYEMVIKEKSVFKKFHWRYLVIDEAHRIKNEKSKLSEIVREFKSTNRLLLTGTPLQNNLHELWALLNFLLPDVFNSADDFDSWFDTKNCLGDQKLVERLHAVLKPFLLRRIKTDVEKSLPPKKEIKIYLGLSKMQREWYTKILMKDIDVLNSSGKMDKMRLLNILMQLRKCCNHPYLFDGAEPGPPYTTDEHIVSNSGKMVVLDKLLAKLKEQGSRVLIFSQMTRLLDILEDYCMWRGYEYCRLDGQTPHEEREDKFLEVEFLGQREAIEAFNAPNSSKFIFMLSTRAGGLGINLASADVVILYDSDWNPQVDLQAMDRAHRIGQKKPVRVFRLITDNTVEERIVERAEIKLRLDSIVIQQGRLIDQQSNKLAKEEMLQMIRHGATHVFASKESELTDEDITTILERGEKKTAEMNERLQKMGESSLRNFRMDIEQSLYKFEGEDYREKQKLGMVEWIEPPKRERKANYAVDAYFREALRVSEPKIPKAPRPPKQPNVQDFQFFPPRLFELLEKEILYYRKTIGYKVPRNPDIPNPALAQREEQKKIDGAEPLTPEETEEKEKLLTQGFTNWTKRDFNQFIKANEKYGRDDIDNIAREVEGKSPEEVMEYSAVFWERCNELQDIEKIMAQIERGEARIQRRISIKKALDAKIARYKAPFHQLRIQYGTSKGKNYTEEEDRFLICMLHKMGFDRENVYEELRQCVRNAPQFRFDWFIKSRTAMEFQRRCNTLISLIEKENMEIEERERAEKKKRATKTPMVKFSAFS

SEQ ID NO: 65950 - protein, 1042 aa, Homo sapiens; identical to SEQ ID NO: 65948

SEQ ID NO: 65951 - protein, 1005 aa, Homo sapiens
MEQDTAAVAATVAAADATATIVVIEDEQPGPSTSQEEKNVSSFQLKLAAKAPKSEKEMDPEYEEKMKADRAKRFEFLLKQTELFAHFIQPSAQKSPTSPLNMKLGRPRIKKDEKQSLISAGDYRHRRTEQEEDEELLSESRKTSNVCIRFEVSPSYVKGGPLRDYQIRGLNWLISLYENGVNGILADEMGLGKTLQTIALLGYLKHYRNIPGPHMVLVPKSTLHNWMNEFKRWVPSLRVICFVGDKDARAAFIRDEMMPGEWDVCVTSYEMVIKEKSVFKKFHWRYLVIDEAHRIKNEKSKLSEIVREFKSTNRLLLTGTPLQNNLHELWALLNFLLPDVFNSADDFDSWFDTKNCLGDQKLVERLHAVLKPFLLRRIKTDVEKSLPPKKEIKIYLGLSKMQREWYTKILMKDIDVLNSSGKMDKMRLLNILMQLRKCCNHPYLFDGAEPGPPYTTDEHIVSNSGKMVVLDKLLAKLKEQGSRVLIFSQMTRLLDILEDYCMWRGYEYCRLDGQTPHEEREDKFLEVEFLGQREAIEAFNAPNSSKFIFMLSTRAGGLGINLASADVVILYDSDWNPQVDLQAMDRAHRIGQKKPVRVFRLITDNTVEERIVERAEIKLRLDSIVIQQGRLIDQQSNKLAKEEMLQMIRHGATHVFASKESELTDEDITTILERGEKKTAEMNERLQKMGESSLRNFRMDIEQSLYKFEGEDYREKQKLGMVEWIEPPKRERKANYAVDAYFREALRVSEPKIPKAPRPPKQPNVQDFQFFPPRLFELLEKEILYYRKTIGYKVPRNPDIPNPALAQREEQKKIDGAEPLTPEETEEKEKLLTQGFTNWTKRDFNQFIKANEKYGRDDIDNIAREVEGKSPEEVMEYSAVFWERCNELQDIEKIMAQIERGEARIQRRISIKKALDAKIARYKAPFHQLRIQYGTSKGKNYTEEEDRFLICMLHKMGFDRENVYEELRQCVRNAPQFRFDWFIKSRTAMEFQRRCNTLISLIEKE

SEQ ID NO: 65952 - protein, 278 aa, Homo sapiens
MLMKRLAARCFAGLLILSPLTVISDSRPADSGKAIEDGNLEEMEEEVRLKKRKRRRNVDKDPAKEDVEKAKKRRGRPPAEKLSPNPPKLTKQMNAIIDTVINYKDSSGRQLSEVFIQLPSRKELPEYYELIRKPVDFKKIKERIRNHKYRSLGDLEKDVMLLCHNAQTFNLEGSQIYEDSIVLQSVFKSARQKIAKEEESEDESNEEEEEEDEEESESEAKSVKVKIKLNKKDDKGRDKGKGKKRPNRGKAKPVVSDFDSDEEQDEREQSEGSGTDDE

SEQ ID NO: 65953 - protein, 236 aa, Homo sapiens
MEEEVRLKKRKRRRNVDKDPAKEDVEKAKKRRGRPPAEKLSPNPPKLTKQMNAIIDTVINYKDSSGRQLSEVFIQLPSRKELPEYYELIRKPVDFKKIKERIRNHKYRSLGDLEKDVMLLCHNAQTFNLEGSQIYEDSIVLQSVFKSARQKIAKEEESEDESNEEEEEEDEEESESEAKSVKVKIKLNKKDDKGRDKGKGKKRPNRGKAKPVVSDFDSDEEQDEREQSEGSGTDDE

SEQ ID NO: 65954 - protein, 1590 aa, Homo sapiens
MSTPTDPGAMPHPGPSPGPGPSPGPILGPSPGPGPSPGSVHSMMGPSPGPPSVSHPMPTMGSTDFPQEGMHQMHKPIDGIHDKGIVEDIHCGSMKGTGMRPPHPGMGPPQSPMDQHSQGYMSPHPSPLGAPEHVSSPMSGGGPTPPQMPPSQPGALIPGDPQAMSQPNRGPSPFSPVQLHQLRAQILAYKMLARGQPLPETLQLAVQGKRTLPGLQQQQQQQQQQQQQQQQQQQQQQQPQQQPPQPQTQQQQQPALVNYNRPSGPGPELSGPSTPQKLPVPAPGGRPSPAPPAAAQPPAAAVPGPSVPQPAPGQPSPVLQLQQKQSRISPIQKPQGLDPVEILQEREYRLQARIAHRIQELENLPGSLPPDLRTKATVELKALRLLNFQRQLRQEVVACMRRDTTLETALNSKAYKRSKRQTLREARMTEKLEKQQKIEQERKRRQKHQEYLNSILQHAKDFKEYHRSVAGKIQKLSKAVATWHANTEREQKKETERIEKERMRRLMAEDEEGYRKLIDQKKDRRLAYLLQQTDEYVANLTNLVWEHKQAQAAKEKKKRRRRKKKAEENAEGGESALGPDGEPIDESSQMSDLPVKVTHTETGKVLFGPEAPKASQLDAWLEMNPGYEVAPRSDSEESDSDYEEEDEEEESSRQETEEKILLDPNSEEVSEKDAKQIIETAKQDVDDEYSMQYSARGSQSYYTVAHAISERVEKQSALLINGTLKHYQLQGLEWMVSLYNNNLNGILADEMGLGKTIQTIALITYLMEHKRLNGPYLIIVPLSTLSNWTYEFDKWAPSVVKISYKGTPAMRRSLVPQLRSGKFNVLLTTYEYIIKDKHILAKIRWKYMIVDEGHRMKNHHCKLTQVLNTHYVAPRRILLTGTPLQNKLPELWALLNFLLPTIFKSCSTFEQWFNAPFAMTGERVDLNEEETILIIRRLHKVLRPFLLRRLKKEVESQLPEKVEYVIKCDMSALQKILYRHMQAKGILLTDGSEKDKKGKGGAKTLMNTIMQLRKICNHPYMFQHIEESFAEHLGYSNGVINGAELYRASGKFELLDRILPKLRATNHRVLLFCQMTSLMTIMEDYFAFRNFLYLRLDGTTKSEDRAALLKKFNEPGSQYFIFLLSTRAGGLGLNLQAADTVVIFDSDWNPHQDLQAQDRAHRIGQQNEVRVLRLCTVNSVEEKILAAAKYKLNVDQKVIQAGMFDQKSSSHERRAFLQAILEHEEENEEEDEVPDDETLNQMIARREEEFDLFMRMDMDRRREDARNPKRKPRLMEEDELPSWIIKDDAEVERLTCEEEEEKIFGRGSRQRRDVDYSDALTEKQWLRAIEDGNLEEMEEEVRLKKRKRRRNVDKDPAKEDVEKAKKRRGRPPAEKLSPNPPKLTKQMNAIIDTVINYKDRCNVEKVPSNSQLEIEGNSSGRQLSEVFIQLPSRKELPEYYELIRKPVDFKKIKERIRNHKYRSLGDLEKDVMLLCHNAQTFNLEGSQIYEDSIVLQSVFKSARQKIAKEEESEDESNEEEEEEDEEESESEAKSVKVKIKLNKKDDKGRDKGKGKKRPNRGKAKPVVSDFDSDEEQDEREQSEGSGTDDE

SEQ ID NO: 65955 - protein, 1572 aa, Homo sapiens
MSTPTDPGAMPHPGPSPGPGPSPGPILGPSPGPGPSPGSVHSMMGPSPGPPSVSHPMPTMGSTDFPQEGMHQMHKPIDGIHDKGIVEDIHCGSMKGTGMRPPHPGMGPPQSPMDQHSQGYMSPHPSPLGAPEHVSSPMSGGGPTPPQMPPSQPGALIPGDPQAMSQPNRGPSPFSPVQLHQLRAQILAYKMLARGQPLPETLQLAVQGKRTLPGLQQQQQQQQQQQQQQQQQQQQQQQPQQQPPQPQTQQQQQPALVNYNRPSGPGPELSGPSTPQKLPVPAPGGRPSPAPPAAAQPPAAAVPGPSVPQPAPGQPSPVLQLQQKQSRISPIQKPQGLDPVEILQEREYRLQARIAHRIQELENLPGSLPPDLRTKATVELKALRLLNFQRQLRQEVVACMRRDTTLETALNSKAYKRSKRQTLREARMTEKLEKQQKIEQERKRRQKHQEYLNSILQHAKDFKEYHRSVAGKIQKLSKAVATWHANTEREQKKETERIEKERMRRLMAEDEEGYRKLIDQKKDRRLAYLLQQTDEYVANLTNLVWEHKQAQAAKEKKKRRRRKKKAEENAEGGESALGPDGEPIDESSQMSDLPVKVTHTETGKVLFGPEAPKASQLDAWLEMNPGYEVAPRSDSEESDSDYEEEDEEEESSRQETEEKILLDPNSEEVSEKDAKQIIETAKQDVDDEYSMQYSARGSQSYYTVAHAISERVEKQSALLINGTLKHYQLQGLEWMVSLYNNNLNGILADEMGLGKTIQTIALITYLMEHKRLNGPYLIIVPLSTLSNWTYEFDKWAPSVVKISYKGTPAMRRSLVPQLRSGKFNVLLTTYEYIIKDKHILAKIRWKYMIVDEGHRMKNHHCKLTQVLNTHYVAPRRILLTGTPLQNKLPELWALLNFLLPTIFKSCSTFEQWFNAPFAMTGERVDLNEEETILIIRRLHKVLRPFLLRRLKKEVESQLPEKVEYVIKCDMSALQKILYRHMQAKGILLTDGSEKDKKGKGGAKTLMNTIMQLRKICNHPYMFQHIEESFAEHLGYSNGVINGAELYRASGKFELLDRILPKLRATNHRVLLFCQMTSLMTIMEDYFAFRNFLYLRLDGTTKSEDRAALLKKFNEPGSQYFIFLLSTRAGGLGLNLQAADTVVIFDSDWNPHQDLQAQDRAHRIGQQNEVRVLRLCTVNSVEEKILAAAKYKLNVDQKVIQAGMFDQKSSSHERRAFLQAILEHEEENEEEDEVPDDETLNQMIARREEEFDLFMRMDMDRRREDARNPKRKPRLMEEDELPSWIIKDDAEVERLTCEEEEEKIFGRGSRQRRDVDYSDALTEKQWLRAIEDGNLEEMEEEVRLKKRKRRRNVDKDPAKEDVEKAKKRRGRPPAEKLSPNPPKLTKQMNAIIDTVINYKDSSGRQLSEVFIQLPSRKELPEYYELIRKPVDFKKIKERIRNHKYRSLGDLEKDVMLLCHNAQTFNLEGSQIYEDSIVLQSVFKSARQKIAKEEESEDESNEEEEEEDEEESESEAKSVKVKIKLNKKDDKGRDKGKGKKRPNRGKAKPVVSDFDSDEEQDEREQSEGSGTDDE

SEQ ID NO: 65956 - protein, 119 aa, Homo sapiens [sequence omitted]

SEQ ID NO: 65957 - protein, 236 aa, Homo sapiens; identical to SEQ ID NO: 65953

SEQ ID NO: 65958 - protein, 236 aa, Homo sapiens; identical to SEQ ID NO: 65953

SEQ ID NO: 65959 - protein, 254 aa, Homo sapiens
MEEEVRLKKRKRRRNVDKDPAKEDVEKAKKRRGRPPAEKLSPNPPKLTKQMNAIIDTVINYKDRCNVEKVPSNSQLEIEGNSSGRQLSEVFIQLPSRKELPEYYELIRKPVDFKKIKERIRNHKYRSLGDLEKDVMLLCHNAQTFNLEGSQIYEDSIVLQSVFKSARQKIAKEEESEDESNEEEEEEDEEESESEAKSVKVKIKLNKKDDKGRDKGKGKKRPNRGKAKPVVSDFDSDEEQDEREQSEGSGTDDE

SEQ ID NO: 65960 - protein, 1572 aa, Homo sapiens; identical to SEQ ID NO: 65955

SEQ ID NO: 65961 - protein, 1590 aa, Homo sapiens; identical to SEQ ID NO: 65954

SEQ ID NO: 65962 - protein, 177 aa, Homo sapiens
MEEEVRLKKRKRRRNVDKDPAKEDVEKAKKRRGRPPAEKLSPNPPKLTKQMNAIIDTVINYKDSSGRQLSEVFIQLPSRKELPEYYELIRKPVDFKKIKERIRNHKYRSLGDLEKDVMLLCHNAQTFNLEGSQIYEDSIVLQSVFKSARQKIAKEEESEDESNEEEEEEDEEESESE

SEQ ID NO: 65963 - protein, 271 aa, Homo sapiens
MKRLAARCFAGLLILSPLTVISDSRPADSGKAIEDGNLEEMEEEVRLKKRKRRRNVDKDPAKEDVEKAKKRRGRPPAEKLSPNPPKLTKQMNAIIDTVINYKDSSGRQLSEVFIQLPSRKELPEYYELIRKPVDFKKIKERIRNHKYRSLGDLEKDVMLLCHNAQTFNLEGSQIYEDSIVLQSVFKSARQKIAKEEESEDESNEEEEEEDEEESESEAKSVKVKIKLNKKDDKGRDKGKGKKRPNRGKAKPVVSDFDSDEEQDERVSVADW

SEQ ID NO: 65964 - protein, 153 aa, Homo sapiens
MKRLAARCFAGLLILSPLTVISDSRPADSGKAIEDGNLEEMEEEVRLKKRKRRRNVDKDPAKEDVEKAKKRRGRPPAEKLSPNPPKLTKQMNAIIDTVINYKDSSGRQLSEVFIQLPSRKELPEYYELIRKPVDFKKIKERIRNHKYRSLGDL

SEQ ID NO: 65965 - protein, 155 aa, Homo sapiens
MSTPTDPGAMPHPGPSPGPGPSPGPILGPSPGPGPSPGSVHSMMGPSPGPPSVSHPMPTMGSTDFPQEGMHQMHKPIDGIHDKGIVEDIHCGSMKGTGMRPPHPGMGPPQSPMDQHSQGYMSPHPSPLGAPEHVSSPMSGGGPTPPQMPPSQPGA

SEQ ID NO: 65966 - protein, 559 aa, Homo sapiens
MSTPTDPGAMPHPGPSPGPGPSPGPILGPSPGPGPSPGSVHSMMGPSPGPPSVSHPMPTMGSTDFPQEGMHQMHKPIDGIHDKGIVEDIHCGSMKGTGMRPPHPGMGPPQSPMDQHSQGYMSPHPSPLGAPEHVSSPMSGGGPTPPQMPPSQPGALIPGDPQAMSQPNRGPSPFSPVQLHQLRAQILAYKMLARGQPLPETLQLAVQGKRTLPGLQQQQQQQQQQQQQQQQQQQQQQQPQQQPPQPQTQQQQQPALVNYNRPSGPGPELSGPSTPQKLPVPAPGGRPSPAPPAAAQPPAAAVPGPSVPQPAPGQPSPVLQLQQKQSRISPIQKPQGLDPVEILQEREYRLQARIAHRIQELENLPGSLPPDLRTKATVELKALRLLNFQRQLRQEVVACMRRDTTLETALNSKAYKRSKRQTLREARMTEKLEKQQKIEQERKRRQKHQEYLNSILQHAKDFKEYHRSVAGKIQKLSKAVATWHANTEREQKKETERIEKERMRRLMAEDEEGYRKLIDQKKDRRLAYLLQQTDEYVANLTNLVWEHKQAQAAKEKKKR

SEQ ID NO: 65967 - protein, 171 aa, Homo sapiens
MEEEVRLKKRKRRRNVDKDPAKEDVEKAKKRRGRPPAEKLSPNPPKLTKQMNAIIDTVINYKDRCNVEKVPSNSQLEIEGNSSGRQLSEVFIQLPSRKELPEYYELIRKPVDFKKIKERIRNHKYRSLGDLEKDVMLLCHNAQTFNLEGSQIYEDSIVLQSVFKSARQKIA

SEQ ID NO: 65968 - protein, 66 aa, Homo sapiens
MSTPTDPGAMPHPGPSPGPGPSPGPILGPSPGPGPSPGSVHSMMGPSPGPPSVSHPMPTMGSTDFP

SEQ ID NO: 65969 - protein, 1647 aa, Homo sapiens
MSTPDPPLGGTPRPGPSPGPGPSPGAMLGPSPGPSPGSAHSMMGPSPGPPSAGHPIPTQGPGGYPQDNMHQMHKPMESMHEKGMSDDPRYNQMKGMGMRSGGHAGMGPPPSPMDQHSQGYPSPLGGSEHASSPVPASGPSSGPQMSSGPGGAPLDGADPQALGQQNRGPTPFNQNQLHQLRAQIMAYKMLARGQPLPDHLQMAVQGKRPMPGMQQQMPTLPPPSVSATGPGPGPGPGPGPGPGPAPPNYSRPHGMGGPNMPPPGPSGVPPGMPGQPPGGPPKPWPEGPMANAAAPTSTPQKLIPPQPTGRPSPAPPAVPPAASPVMPPQTQSPGQPAQPAPMVPLHQKQSRITPIQKPRGLDPVEILQEREYRLQARIAHRIQELENLPGSLAGDLRTKATIELKALRLLNFQRQLRQEVVVCMRRDTALETALNAKAYKRSKRQSLREARITEKLEKQQKIEQERKRRQKHQEYLNSILQHAKDFKEYHRSVTGKIQKLTKAVATYHANTEREQKKENERIEKERMRRLMAEDEEGYRKLIDQKKDKRLAYLLQQTDEYVANLTELVRQHKAAQVAKEKKKKKKKKKAENAEGQTPAIGPDGEPLDETSQMSDLPVKVIHVESGKILTGTDAPKAGQLEAWLEMNPGYEVAPRSDSEESGSEEEEEEEEEEQPQAAQPPTLPVEEKKKIPDPDSDDVSEVDARHIIENAKQDVDDEYGVSQALARGLQSYYAVAHAVTERVDKQSALMVNGVLKQYQIKGLEWLVSLYNNNLNGILADEMGLGKTIQTIALITYLMEHKRINGPFLIIVPLSTLSNWAYEFDKWAPSVVKVSYKGSPAARRAFVPQLRSGKFNVLLTTYEYIIKDKHILAKIRWKYMIVDEGHRMKNHHCKLTQVLNTHYVAPRRLLLTGTPLQNKLPELWALLNFLLPTIFKSCSTFEQWFNAPFAMTGEKVDLNEEETILIIRRLHKVLRPFLLRRLKKEVEAQLPEKVEYVIKCDMSALQRVLYRHMQAKGVLLTDGSEKDKKGKGGTKTLMNTIMQLRKICNHPYMFQHIEESFSEHLGFTGGIVQGLDLYRASGKFELLDRILPKLRATNHKVLLFCQMTSLMTIMEDYFAYRGFKYLRLDGTTKAEDRGMLLKTFNEPGSEYFIFLLSTRAGGLGLNLQSADTVIIFDSDWNPHQDLQAQDRAHRIGQQNEVRVLRLCTVNSVEEKILAAAKYKLNVDQKVIQAGMFDQKSSSHERRAFLQAILEHEEQDESRHCSTGSGSASFAHTAPPPAGVNPDLEEPPLKEEDEVPDDETVNQMIARHEEEFDLFMRMDLDRRREEARNPKRKPRLMEEDELPSWIIKDDAEVERLTCEEEEEKMFGRGSRHRKEVDYSDSLTEKQWLKAIEEGTLEEIEEEVRQKKSSRKRKRDSDAGSSTPTTSTRSRDKDDESKKQKKRGRPPAEKLSPNPPNLTKKMKKIVDAVIKYKDSSSGRQLSEVFIQLPSRKELPEYYELIRKPVDFKKIKERIRNHKYRSLNDLEKDVMLLCQNAQTFNLEGSLIYEDSIVLQSVFTSVRQKIEKEDDSEGEESEEEEEGEEEGSESESRSVKVKIKLGRKEKAQDRLKGGRRRPSRGSRAKPVVSDDDSEEEQEEDRSGSGSEED

SEQ ID NO: 65970 - protein, 1679 aa, Homo sapiens
MSTPDPPLGGTPRPGPSPGPGPSPGAMLGPSPGPSPGSAHSMMGPSPGPPSAGHPIPTQGPGGYPQDNMHQMHKPMESMHEKGMSDDPRYNQMKGMGMRSGGHAGMGPPPSPMDQHSQGYPSPLGGSEHASSPVPASGPSSGPQMSSGPGGAPLDGADPQALGQQNRGPTPFNQNQLHQLRAQIMAYKMLARGQPLPDHLQMAVQGKRPMPGMQQQMPTLPPPSVSATGPGPGPGPGPGPGPGPAPPNYSRPHGMGGPNMPPPGPSGVPPGMPGQPPGGPPKPWPEGPMANAAAPTSTPQKLIPPQPTGRPSPAPPAVPPAASPVMPPQTQSPGQPAQPAPMVPLHQKQSRITPIQKPRGLDPVEILQEREYRLQARIAHRIQELENLPGSLAGDLRTKATIELKALRLLNFQRQLRQEVVVCMRRDTALETALNAKAYKRSKRQSLREARITEKLEKQQKIEQERKRRQKHQEYLNSILQHAKDFKEYHRSVTGKIQKLTKAVATYHANTEREQKKENERIEKERMRRLMAEDEEGYRKLIDQKKDKRLAYLLQQTDEYVANLTELVRQHKAAQVAKEKKKKKKKKKAENAEGQTPAIGPDGEPLDETSQMSDLPVKVIHVESGKILTGTDAPKAGQLEAWLEMNPGYEVAPRSDSEESGSEEEEEEEEEEQPQAAQPPTLPVEEKKKIPDPDSDDVSEVDARHIIENAKQDVDDEYGVSQALARGLQSYYAVAHAVTERVDKQSALMVNGVLKQYQIKGLEWLVSLYNNNLNGILADEMGLGKTIQTIALITYLMEHKRINGPFLIIVPLSTLSNWAYEFDKWAPSVVKVSYKGSPAARRAFVPQLRSGKFNVLLTTYEYIIKDKHILAKIRWKYMIVDEGHRMKNHHCKLTQVLNTHYVAPRRLLLTGTPLQNKLPELWALLNFLLPTIFKSCSTFEQWFNAPFAMTGEKVDLNEEETILIIRRLHKVLRPFLLRRLKKEVEAQLPEKVEYVIKCDMSALQRVLYRHMQAKGVLLTDGSEKDKKGKGGTKTLMNTIMQLRKICNHPYMFQHIEESFSEHLGFTGGIVQGLDLYRASGKFELLDRILPKLRATNHKVLLFCQMTSLMTIMEDYFAYRGFKYLRLDGTTKAEDRGMLLKTFNEPGSEYFIFLLSTRAGGLGLNLQSADTVIIFDSDWNPHQDLQAQDRAHRIGQQNEVRVLRLCTVNSVEEKILAAAKYKLNVDQKVIQAGMFDQKSSSHERRAFLQAILEHEEQDESRHCSTGSGSASFAHTAPPPAGVNPDLEEPPLKEEDEVPDDETVNQMIARHEEEFDLFMRMDLDRRREEARNPKRKPRLMEEDELPSWIIKDDAEVERLTCEEEEEKMFGRGSRHRKEVDYSDSLTEKQWLKKITGKDIHDTASSVARGLQFQRGLQFCTRASKAIEEGTLEEIEEEVRQKKSSRKRKRDSDAGSSTPTTSTRSRDKDDESKKQKKRGRPPAEKLSPNPPNLTKKMKKIVDAVIKYKDSSSGRQLSEVFIQLPSRKELPEYYELIRKPVDFKKIKERIRNHKYRSLNDLEKDVMLLCQNAQTFNLEGSLIYEDSIVLQSVFTSVRQKIEKEDDSEGEESEEEEEGEEEGSESESRSVKVKIKLGRKEKAQDRLKGGRRRPSRGSRAKPVVSDDDSEEEQEEDRSGSGSEED

SEQ ID NO: 65971 - protein, 1617 aa, Homo sapiens
MSTPDPPLGGTPRPGPSPGPGPSPGAMLGPSPGPSPGSAHSMMGPSPGPPSAGHPIPTQGPGGYPQDNMHQMHKPMESMHEKGMSDDPRYNQMKGMGMRSGGHAGMGPPPSPMDQHSQGYPSPLGGSEHASSPVPASGPSSGPQMSSGPGGAPLDGADPQALGQQNRGPTPFNQNQLHQLRAQIMAYKMLARGQPLPDHLQMAVQGKRPMPGMQQQMPTLPPPSVSATGPGPGPGPGPGPGPGPAPPNYSRPHGMGGPNMPPPGPSGVPPGMPGQPPGGPPKPWPEGPMANAAAPTSTPQKLIPPQPTGRPSPAPPAVPPAASPVMPPQTQSPGQPAQPAPMVPLHQKQSRITPIQKPRGLDPVEILQEREYRLQARIAHRIQELENLPGSLAGDLRTKATIELKALRLLNFQRQLRQEVVVCMRRDTALETALNAKAYKRSKRQSLREARITEKLEKQQKIEQERKRRQKHQEYLNSILQHAKDFKEYHRSVTGKIQKLTKAVATYHANTEREQKKENERIEKERMRRLMAEDEEGYRKLIDQKKDKRLAYLLQQTDEYVANLTELVRQHKAAQVAKEKKKKKKKKKAENAEGQTPAIGPDGEPLDETSQMSDLPVKVIHVESGKILTGTDAPKAGQLEAWLEMNPGYEVAPRSDSEESGSEEEEEEEEEEQPQAAQPPTLPVEEKKKIPDPDSDDVSEVDARHIIENAKQDVDDEYGVSQALARGLQSYYAVAHAVTERVDKQSALMVNGVLKQYQIKGLEWLVSLYNNNLNGILADEMGLGKTIQTIALITYLMEHKRINGPFLIIVPLSTLSNWAYEFDKWAPSVVKVSYKGSPAARRAFVPQLRSGKFNVLLTTYEYIIKDKHILAKIRWKYMIVDEGHRMKNHHCKLTQVLNTHYVAPRRLLLTGTPLQNKLPELWALLNFLLPTIFKSCSTFEQWFNAPFAMTGEKVDLNEEETILIIRRLHKVLRPFLLRRLKKEVEAQLPEKVEYVIKCDMSALQRVLYRHMQAKGVLLTDGSEKDKKGKGGTKTLMNTIMQLRKICNHPYMFQHIEESFSEHLGFTGGIVQGLDLYRASGKFELLDRILPKLRATNHKVLLFCQMTSLMTIMEDYFAYRGFKYLRLDGTTKAEDRGMLLKTFNEPGSEYFIFLLSTRAGGLGLNLQSADTVIIFDSDWNPHQDLQAQDRAHRIGQQNEVRVLRLCTVNSVEEKILAAAKYKLNVDQKVIQAGMFDQKSSSHERRAFLQAILEHEEQDEEEDEVPDDETVNQMIARHEEEFDLFMRMDLDRRREEARNPKRKPRLMEEDELPSWIIKDDAEVERLTCEEEEEKMFGRGSRHRKEVDYSDSLTEKQWLKTLKAIEEGTLEEIEEEVRQKKSSRKRKRDSDAGSSTPTTSTRSRDKDDESKKQKKRGRPPAEKLSPNPPNLTKKMKKIVDAVIKYKDSSSGRQLSEVFIQLPSRKELPEYYELIRKPVDFKKIKERIRNHKYRSLNDLEKDVMLLCQNAQTFNLEGSLIYEDSIVLQSVFTSVRQKIEKEDDSEGEESEEEEEGEEEGSESESRSVKVKIKLGRKEKAQDRLKGGRRRPSRGSRAKPVVSDDDSEEEQEEDRSGSGSEED

SEQ ID NO: 65972 - protein, 1681 aa, Homo sapiens [sequence omitted]

SEQ ID NO: 65973 - protein, 1647 aa, Homo sapiens; identical to SEQ ID NO: 65969

SEQ ID NO: 65974 - protein, 1613 aa, Homo sapiens
MSTPDPPLGGTPRPGPSPGPGPSPGAMLGPSPGPSPGSAHSMMGPSPGPPSAGHPIPTQGPGGYPQDNMHQMHKPMESMHEKGMSDDPRYNQMKGMGMRSGGHAGMGPPPSPMDQHSQGYPSPLGGSEHASSPVPASGPSSGPQMSSGPGGAPLDGADPQALGQQNRGPTPFNQNQLHQLRAQIMAYKMLARGQPLPDHLQMAVQGKRPMPGMQQQMPTLPPPSVSATGPGPGPGPGPGPGPGPAPPNYSRPHGMGGPNMPPPGPSGVPPGMPGQPPGGPPKPWPEGPMANAAAPTSTPQKLIPPQPTGRPSPAPPAVPPAASPVMPPQTQSPGQPAQPAPMVPLHQKQSRITPIQKPRGLDPVEILQEREYRLQARIAHRIQELENLPGSLAGDLRTKATIELKALRLLNFQRQLRQEVVVCMRRDTALETALNAKAYKRSKRQSLREARITEKLEKQQKIEQERKRRQKHQEYLNSILQHAKDFKEYHRSVTGKIQKLTKAVATYHANTEREQKKENERIEKERMRRLMAEDEEGYRKLIDQKKDKRLAYLLQQTDEYVANLTELVRQHKAAQVAKEKKKKKKKKKAENAEGQTPAIGPDGEPLDETSQMSDLPVKVIHVESGKILTGTDAPKAGQLEAWLEMNPGYEVAPRSDSEESGSEEEEEEEEEEQPQAAQPPTLPVEEKKKIPDPDSDDVSEVDARHIIENAKQDVDDEYGVSQALARGLQSYYAVAHAVTERVDKQSALMVNGVLKQYQIKGLEWLVSLYNNNLNGILADEMGLGKTIQTIALITYLMEHKRINGPFLIIVPLSTLSNWAYEFDKWAPSVVKVSYKGSPAARRAFVPQLRSGKFNVLLTTYEYIIKDKHILAKIRWKYMIVDEGHRMKNHHCKLTQVLNTHYVAPRRLLLTGTPLQNKLPELWALLNFLLPTIFKSCSTFEQWFNAPFAMTGEKVDLNEEETILIIRRLHKVLRPFLLRRLKKEVEAQLPEKVEYVIKCDMSALQRVLYRHMQAKGVLLTDGSEKDKKGKGGTKTLMNTIMQLRKICNHPYMFQHIEESFSEHLGFTGGIVQGLDLYRASGKFELLDRILPKLRATNHKVLLFCQMTSLMTIMEDYFAYRGFKYLRLDGTTKAEDRGMLLKTFNEPGSEYFIFLLSTRAGGLGLNLQSADTVIIFDSDWNPHQDLQAQDRAHRIGQQNEVRVLRLCTVNSVEEKILAAAKYKLNVDQKVIQAGMFDQKSSSHERRAFLQAILEHEEQDEEEDEVPDDETVNQMIARHEEEFDLFMRMDLDRRREEARNPKRKPRLMEEDELPSWIIKDDAEVERLTCEEEEEKMFGRGSRHRKEVDYSDSLTEKQWLKAIEEGTLEEIEEEVRQKKSSRKRKRDSDAGSSTPTTSTRSRDKDDESKKQKKRGRPPAEKLSPNPPNLTKKMKKIVDAVIKYKDSSGRQLSEVFIQLPSRKELPEYYELIRKPVDFKKIKERIRNHKYRSLNDLEKDVMLLCQNAQTFNLEGSLIYEDSIVLQSVFTSVRQKIEKEDDSEGEESEEEEEGEEEGSESESRSVKVKIKLGRKEKAQDRLKGGRRRPSRGSRAKPVVSDDDSEEEQEEDRSGSGSEED

SEQ ID NO: 65975 - protein, 1616 aa, Homo sapiens
MSTPDPPLGGTPRPGPSPGPGPSPGAMLGPSPGPSPGSAHSMMGPSPGPPSAGHPIPTQGPGGYPQDNMHQMHKPMESMHEKGMSDDPRYNQMKGMGMRSGGHAGMGPPPSPMDQHSQGYPSPLGGSEHASSPVPASGPSSGPQMSSGPGGAPLDGADPQALGQQNRGPTPFNQNQLHQLRAQIMAYKMLARGQPLPDHLQMAVQGKRPMPGMQQQMPTLPPPSVSATGPGPGPGPGPGPGPGPAPPNYSRPHGMGGPNMPPPGPSGVPPGMPGQPPGGPPKPWPEGPMANAAAPTSTPQKLIPPQPTGRPSPAPPAVPPAASPVMPPQTQSPGQPAQPAPMVPLHQKQSRITPIQKPRGLDPVEILQEREYRLQARIAHRIQELENLPGSLAGDLRTKATIELKALRLLNFQRQLRQEVVVCMRRDTALETALNAKAYKRSKRQSLREARITEKLEKQQKIEQERKRRQKHQEYLNSILQHAKDFKEYHRSVTGKIQKLTKAVATYHANTEREQKKENERIEKERMRRLMAEDEEGYRKLIDQKKDKRLAYLLQQTDEYVANLTELVRQHKAAQVAKEKKKKKKKKKAENAEGQTPAIGPDGEPLDETSQMSDLPVKVIHVESGKILTGTDAPKAGQLEAWLEMNPGYEVAPRSDSEESGSEEEEEEEEEEQPQAAQPPTLPVEEKKKIPDPDSDDVSEVDARHIIENAKQDVDDEYGVSQALARGLQSYYAVAHAVTERVDKQSALMVNGVLKQYQIKGLEWLVSLYNNNLNGILADEMGLGKTIQTIALITYLMEHKRINGPFLIIVPLSTLSNWAYEFDKWAPSVVKVSYKGSPAARRAFVPQLRSGKFNVLLTTYEYIIKDKHILAKIRWKYMIVDEGHRMKNHHCKLTQVLNTHYVAPRRLLLTGTPLQNKLPELWALLNFLLPTIFKSCSTFEQWFNAPFAMTGEKVDLNEEETILIIRRLHKVLRPFLLRRLKKEVEAQLPEKVEYVIKCDMSALQRVLYRHMQAKGVLLTDGSEKDKKGKGGTKTLMNTIMQLRKICNHPYMFQHIEESFSEHLGFTGGIVQGLDLYRASGKFELLDRILPKLRATNHKVLLFCQMTSLMTIMEDYFAYRGFKYLRLDGTTKAEDRGMLLKTFNEPGSEYFIFLLSTRAGGLGLNLQSADTVIIFDSDWNPHQDLQAQDRAHRIGQQNEVRVLRLCTVNSVEEKILAAAKYKLNVDQKVIQAGMFDQKSSSHERRAFLQAILEHEEQDEEEDEVPDDETVNQMIARHEEEFDLFMRMDLDRRREEARNPKRKPRLMEEDELPSWIIKDDAEVERLTCEEEEEKMFGRGSRHRKEVDYSDSLTEKQWLKTLKAIEEGTLEEIEEEVRQKKSSRKRKRDSDAGSSTPTTSTRSRDKDDESKKQKKRGRPPAEKLSPNPPNLTKKMKKIVDAVIKYKDSSGRQLSEVFIQLPSRKELPEYYELIRKPVDFKKIKERIRNHKYRSLNDLEKDVMLLCQNAQTFNLEGSLIYEDSIVLQSVFTSVRQKIEKEDDSEGEESEEEEEGEEEGSESESRSVKVKIKLGRKEKAQDRLKGGRRRPSRGSRAKPVVSDDDSEEEQEEDRSGSGSEED

SEQ ID NO: 65976 - protein, 1614 aa, Homo sapiens
MSTPDPPLGGTPRPGPSPGPGPSPGAMLGPSPGPSPGSAHSMMGPSPGPPSAGHPIPTQGPGGYPQDNMHQMHKPMESMHEKGMSDDPRYNQMKGMGMRSGGHAGMGPPPSPMDQHSQGYPSPLGGSEHASSPVPASGPSSGPQMSSGPGGAPLDGADPQALGQQNRGPTPFNQNQLHQLRAQIMAYKMLARGQPLPDHLQMAVQGKRPMPGMQQQMPTLPPPSVSATGPGPGPGPGPGPGPGPAPPNYSRPHGMGGPNMPPPGPSGVPPGMPGQPPGGPPKPWPEGPMANAAAPTSTPQKLIPPQPTGRPSPAPPAVPPAASPVMPPQTQSPGQPAQPAPMVPLHQKQSRITPIQKPRGLDPVEILQEREYRLQARIAHRIQELENLPGSLAGDLRTKATIELKALRLLNFQRQLRQEVVVCMRRDTALETALNAKAYKRSKRQSLREARITEKLEKQQKIEQERKRRQKHQEYLNSILQHAKDFKEYHRSVTGKIQKLTKAVATYHANTEREQKKENERIEKERMRRLMAEDEEGYRKLIDQKKDKRLAYLLQQTDEYVANLTELVRQHKAAQVAKEKKKKKKKKKAENAEGQTPAIGPDGEPLDETSQMSDLPVKVIHVESGKILTGTDAPKAGQLEAWLEMNPGYEVAPRSDSEESGSEEEEEEEEEEQPQAAQPPTLPVEEKKKIPDPDSDDVSEVDARHIIENAKQDVDDEYGVSQALARGLQSYYAVAHAVTERVDKQSALMVNGVLKQYQIKGLEWLVSLYNNNLNGILADEMGLGKTIQTIALITYLMEHKRINGPFLIIVPLSTLSNWAYEFDKWAPSVVKVSYKGSPAARRAFVPQLRSGKFNVLLTTYEYIIKDKHILAKIRWKYMIVDEGHRMKNHHCKLTQVLNTHYVAPRRLLLTGTPLQNKLPELWALLNFLLPTIFKSCSTFEQWFNAPFAMTGEKVDLNEEETILIIRRLHKVLRPFLLRRLKKEVEAQLPEKVEYVIKCDMSALQRVLYRHMQAKGVLLTDGSEKDKKGKGGTKTLMNTIMQLRKICNHPYMFQHIEESFSEHLGFTGGIVQGLDLYRASGKFELLDRILPKLRATNHKVLLFCQMTSLMTIMEDYFAYRGFKYLRLDGTTKAEDRGMLLKTFNEPGSEYFIFLLSTRAGGLGLNLQSADTVIIFDSDWNPHQDLQAQDRAHRIGQQNEVRVLRLCTVNSVEEKILAAAKYKLNVDQKVIQAGMFDQKSSSHERRAFLQAILEHEEQDEEEDEVPDDETVNQMIARHEEEFDLFMRMDLDRRREEARNPKRKPRLMEEDELPSWIIKDDAEVERLTCEEEEEKMFGRGSRHRKEVDYSDSLTEKQWLKAIEEGTLEEIEEEVRQKKSSRKRKRDSDAGSSTPTTSTRSRDKDDESKKQKKRGRPPAEKLSPNPPNLTKKMKKIVDAVIKYKDSSSGRQLSEVFIQLPSRKELPEYYELIRKPVDFKKIKERIRNHKYRSLNDLEKDVMLLCQNAQTFNLEGSLIYEDSIVLQSVFTSVRQKIEKEDDSEGEESEEEEEGEEEGSESESRSVKVKIKLGRKEKAQDRLKGGRRRPSRGSRAKPVVSDDDSEEEQEEDRSGSGSEED

SEQ ID NO: 65977 - protein, 1052 aa, Homo sapiens
MSSAAEPPPPPPPESAPSKPAASIASGGSNSSNKGGPEGVAAQAVASAASAGPADAEMEEIFDDASPGKQKEIQEPDPTYEEKMQTDRANRFEYLLKQTELFAHFIQPAAQKTPTSPLKMKPGRPRIKKDEKQNLLSVGDYRHRRTEQEEDEELLTESSKATNVCTRFEDSPSYVKWGKLRDYQVRGLNWLISLYENGINGILADEMGLGKTLQTISLLGYMKHYRNIPGPHMVLVPKSTLHNWMSEFKRWVPTLRSVCLIGDKEQRAAFVRDVLLPGEWDVCVTSYEMLIKEKSVFKKFNWRYLVIDEAHRIKNEKSKLSEIVREFKTTNRLLLTGTPLQNNLHELWSLLNFLLPDVFNSADDFDSWFDTNNCLGDQKLVERLHMVLRPFLLRRIKADVEKSLPPKKEVKIYVGLSKMQREWYTRILMKDIDILNSAGKMDKMRLLNILMQLRKCCNHPYLFDGAEPGPPYTTDMHLVTNSGKMVVLDKLLPKLKEQGSRVLIFSQMTRVLDILEDYCMWRNYEYCRLDGQTPHDERQDSINAYNEPNSTKFVFMLSTRAGGLGINLATADVVILYDSDWNPQVDLQAMDRAHRIGQTKTVRVFRFITDNTVEERIVERAEMKLRLDSIVIQQGRLVDQNLNKIGKDEMLQMIRHGATHVFASKESEITDEDIDGILERGAKKTAEMNEKLSKMGESSLRNFTMDTESSVYNFEGEDYREKQKIAFTEWIEPPKRERKANYAVDAYFREALRVSEPKAPKAPRPPKQPNVQDFQFFPPRLFELLEKEILFYRKTIGYKVPRNPELPNAAQAQKEEQLKIDEAESLNDEELEEKEKLLTQGFTNWNKRDFNQFIKANEKWGRDDIENIAREVEGKTPEEVIEYSAVFWERCNELQDIEKIMAQIERGEARIQRRISIKKALDTKIGRYKAPFHQLRISYGTNKGKNYTEEEDRFLICMLHKLGFDKENVYDELRQCIRNSPQFRFDWFLKSRTAMELQRRCNTLITLIERENMELEEKEKAEKKKRGPKPSTQKRKMDGAPDGRGRKKKLKL

SEQ ID NO: 65978 - protein, 995 aa, Homo sapiens [sequence omitted]

SEQ ID NO: 65979 - protein, 995 aa, Homo sapiens [sequence omitted]

SEQ ID NO: 65980 - protein, 954 aa, Homo sapiens
MSLPLTEEQRKKIEENRQKALARRAEKLLAEQHQRTSSGTSIAGNPFQAKQGPSQNFPRESCKPVSHGVIFKQQNLSSSSNADQRPHDSHSFQAKGIWKKPEEMPTACPGHSPRSQMALTGISPPLAQSPPEVPKQQLLSYELGQGHAQASPEIRFTPFANPTHKPLAKPKSSQETPAHSSGQPPRDAKLEAKTAKASPSGQNISYIHSSSESVTPRTEGRLQQKSGSSVQKGVNSQKGKCVRNGDRFQVLIGYNAELIAVFKTLPSKNYDPDTKTWNFSMNDYSALMKAAQSLPTVNLQPLEWAYGSSESPSTSSEGQAGLPSAPSLSFVKGRCMLISRAYFEADISYSQDLIALFKQMDSRRYDVKTRKWSFLLEEHSKLIAKVRCLPQVQLDPLPTTLTLAFASQLKKTSLSLTPDVPEADLSEVDPKLVSNLMPFQRAGVNFAIAKGGRLLLADDMGLGKTIQAICIAAFYRKEWPLLVVVPSSVRFTWEQAFLRWLPSLSPDCINVVVTGKDRLTAGLINIVSFDLLSKLEKQLKTPFKVVIIDESHFLKNSRTARCRAAMPVLKVAKRVILLSGTPAMSRPAELYTQIIAVKPTFFPQFHAFGLRYCDAKRMPWGWDYSGSSNLGELKLLLEEAVMLRRLKSDVLSQLPAKQRKIVVIAPGRINARTRAALDAAAKEMTTKDKTKQQQKDALILFFNRTAEAKIPSVIEYILDLLESGREKFLVFAHHKVVLDAITQELERKHVQHIRIDGSTSSAEREDLCQQFQLSERHAVAVLSITAANMGLTFSSADLVVFAELFWNPGVLIQAEDRVHRIGQTSSVGIHYLVAKGTADDYLWPLIQEKIKVLAEAGLSETNFSEMTESTDYLYKDPKQQKIYDLFQKSFEKEGSDMELLEAAESFDPGSASGTSGSSSQNMGDTLDESSLTASPQKKRRFEFFDNWDSFTSPL

SEQ ID NO: 65981 - protein, 954 aa, Homo sapiens; identical to SEQ ID NO: 65980

SEQ ID NO: 65982 - protein, 19 aa, Homo sapiens
MSLPLTEEQRKKIEENRQK

SEQ ID NO: 65983 - protein, 146 aa, Homo sapiens
MSLPLTEEQRKKIEENRQKALARRAEKLLAEQHQRTSSGTSIAGNPFQAKQGPSQNFPRESCKPVSHGVIFKQQNLSSSSNADQRPHDSHSFQAKGIWKKPEEMPTACPGHSPRSQMALTGISPPLAQSPPEVPKQQLLSYELGQG

SEQ ID NO: 65984 - protein, 92 aa, Homo sapiens
MSLPLTEEQRKKIEENRQKALARRAEKLLAEQHQRTSSGTSIAGNPFQAKQGPSQNFPRESCKPVSHGVIFKQQNLSSSSNADQRPHDSHSF

SEQ ID NO: 65985 - protein, 130 aa, Homo sapiens
MSLPLTEEQRKKIEENRQKALARRAEKLLAEQHQRTSSGTSIAGNPFQAKQGPSQNFPRESCKPVSHGVIFKQQNLSSSSNADQRPHDSHSFQAKGIWKKPEEMPTACPGHSPRSQMALTGISPPLAQSP

SEQ ID NO: 65986 - protein, 1105 aa, Homo sapiens
MAAAAGGGGPGTAVGATGSGIAAAAAGLAVYRRKDGGPATKFWESPETVSQLDSVRVWLGKHYKKYVHADAPTNKTLAGLVVQLLQFQEDAFGKHVTNPAFTKLPAKCFMDFKAGGALCHILGAAYKYKNEQGWRRFDLQNPSRMDRNVEMFMNIEKTLVQNNCLTRPNIYLIPDIDLKLANKLKDIIKRHQGTFTDEKSKASHHIYPYSSSQDDEEWLRPVMRKEKQVLVHWGFYPDSYDTWVHSNDVDAEIEDPPIPEKPWKVHVKWILDTDIFNEWMNEEDYEVDENRKPVSFRQRISTKNEEPVRSPERRDRKASANARKRKHSPSPPPPTPTESRKKSGKKGQASLYGKRRSQKEEDEQEDLTKDMEDPTPVPNIEEVVLPKNVNLKKDSENTPVKGGTVADLDEQDEETVTAGGKEDEDPAKGDQSRSVDLGEDNVTEQTNHIIIPSYASWFDYNCIHVIERRALPEFFNGKNKSKTPEIYLAYRNFMIDTYRLNPQEYLTSTACRRNLTGDVCAVMRVHAFLEQWGLVNYQVDPESRPMAMGPPPTPHFNVLADTPSGLVPLHLRSPQVPAAQQMLNFPEKNKEKPVDLQNFGLRTDIYSKKTLAKSKGASAGREWTEQETLLLLEALEMYKDDWNKVSEHVGSRTQDECILHFLRLPIEDPYLENSDASLGPLAYQPVPFSQSGNPVMSTVAFLASVVDPRVASAAAKAALEEFSRVREEVPLELVEAHVKKVQEAARASGKVDPTYGLESSCIAGTGPDEPEKLEGAEEEKMEADPDGQQPEKAENKVENETDEGDKAQDGENEKNSEKEQDSEVSEDTKSEEKETEENKELTDTCKERESDTGKKKVEHEISEGNVATAAAAALASAATKAKHLAAVEERKIKSLVALLVETQMKKLEIKLRHFEELETIMDREKEALEQQRQQLLTERQNFHMEQLKYAELRARQQMEQQQHGQNPQQAHQHSGGPGLAPLGAAGHPGMMPHQQPPPYPLMHHQMPPPHPPQPGQIPGPGSMMPGQHMPGRMIPTVAANIHPSGSGPTPPGMPPMPGNILGPRVPLTAPNGMYPPPPQQQPPPPPPADGVPPPPAPGPPASAAP

SEQ ID NO: 65987 - protein, 1214 aa, Homo sapiens
MAVRKKDGGPNVKYYEAADTVTQFDNVRLWLGKNYKKYIQAEPPTNKSLSSLVVQLLQFQEEVFGKHVSNAPLTKLPIKCFLDFKAGGSLCHILAAAYKFKSDQGWRRYDFQNPSRMDRNVEMFMTIEKSLVQNNCLSRPNIFLCPEIEPKLLGKLKDIIKRHQGTVTEDKNNASHVVYPVPGNLEEEEWVRPVMKRDKQVLLHWGYYPDSYDTWIPASEIEASVEDAPTPEKPRKVHAKWILDTDTFNEWMNEEDYEVNDDKNPVSRRKKISAKTLTDEVNSPDSDRRDKKGGNYKKRKRSPSPSPTPEAKKKNAKKGPSTPYTKSKRGHREEEQEDLTKDMDEPSPVPNVEEVTLPKTVNTKKDSESAPVKGGTMTDLDEQEDESMETTGKDEDENSTGNKGEQTKNPDLHEDNVTEQTHHIIIPSYAAWFDYNSVHAIERRALPEFFNGKNKSKTPEIYLAYRNFMIDTYRLNPQEYLTSTACRRNLAGDVCAIMRVHAFLEQWGLINYQVDAESRPTPMGPPPTSHFHVLADTPSGLVPLQPKTPQQTSASQQMLNFPDKGKEKPTDMQNFGLRTDMYTKKNVPSKSKAAASATREWTEQETLLLLEALEMYKDDWNKVSEHVGSRTQDECILHFLRLPIEDPYLEDSEASLGPLAYQPIPFSQSGNPVMSTVAFLASVVDPRVASAAAKSALEEFSKMKEEVPTALVEAHVRKVEEAAKVTGKADPAFGLESSGIAGTTSDEPERIEESGNDEARVEGQATDEKKEPKEPREGGGAIEEEAKEKTSEAPKKDEEKGKEGDSEKESEKSDGDPIVDPEKEKEPKEGQEEVLKEVVESEGERKTKVERDIGEGNLSTAAAAALAAAAVKAKHLAAVEERKIKSLVALLVETQMKKLEIKLRHFEELETIMDREREALEYQRQQLLADRQAFHMEQLKYAEMRARQQHFQQMHQQQQQPPPALPPGSQPIPPTGAAGPPAVHGLAVAPASVVPAPAGSGAPPGSLGPSEQIGQAGSTAGPQQQQPAGAPQPGAVPPGVPPPGPHGPSPFPNQQTPPSMMPGAVPGSGHPGVAGNAPLGLPFGMPPPPPPPAPSIIPFGSLADSISINLPAPPNLHGHHHHLPFAPGTLPPPNLPVSMANPLHPNLPATTTMPSSLPLGPGLGSAAAQSPAIVAAVQGNLLPSASPLPDPGTPLPPDPTAPSPGTVTPVPPPQ

SEQ ID NO: 65988 - protein, 1130 aa, Homo sapiens
MAVRKKDGGPNVKYYEAADTVTQFDNVRLWLGKNYKKYIQAEPPTNKSLSSLVVQLLQFQEEVFGKHVSNAPLTKLPIKCFLDFKAGGSLCHILAAAYKFKSDQGWRRYDFQNPSRMDRNVEMFMTIEKSLVQNNCLSRPNIFLCPEIEPKLLGKLKDIIKRHQGTVTEDKNNASHVVYPVPGNLEEEEWVRPVMKRDKQVLLHWGYYPDSYDTWIPASEIEASVEDAPTPEKPRKVHAKWILDTDTFNEWMNEEDYEVNDDKNPVSRRKKISAKTLTDEVNSPDSDRRDKKGGNYKKRKRSPSPSPTPEAKKKNAKKGPSTPYTKSKRGHREEEQEDLTKDMDEPSPVPNVEEVTLPKTVNTKKDSESAPVKGGTMTDLDEQEDESMETTGKDEDENSTGNKGEQTKNPDLHEDNVTEQTHHIIIPSYAAWFDYNSVHAIERRALPEFFNGKNKSKTPEIYLAYRNFMIDTYRLNPQEYLTSTACRRNLAGDVCAIMRVHAFLEQWGLINYQVDAESRPTPMGPPPTSHFHVLADTPSGLVPLQPKTPQGRQVDADTKAGRKGKELDDLVPETAKGKPELQTSASQQMLNFPDKGKEKPTDMQNFGLRTDMYTKKNVPSKSKAAASATREWTEQETLLLLEALEMYKDDWNKVSEHVGSRTQDECILHFLRLPIEDPYLEDSEASLGPLAYQPIPFSQSGNPVMSTVAFLASVVDPRVASAAAKSALEEFSKMKEEVPTALVEAHVRKVEEAAKVTGKADPAFGLESSGIAGTTSDEPERIEESGNDEARVEGQATDEKKEPKEPREGGGAIEEEAKEKTSEAPKKDEEKGKEGDSEKESEKSDGDPIVDPEKEKEPKEGQEEVLKEVVESEGERKTKVERDIGEGNLSTAAAAALAAAAVKAKHLAAVEERKIKSLVALLVETQMKKLEIKLRHFEELETIMDREREALEYQRQQLLADRQAFHMEQLKYAEMRARQQHFQQMHQQQQQPPPALPPGSQPIPPTGAAGPPAVHGLAVAPASVVPAPAGSGAPPGSLGPSEQIGQAGSTAGPQQQQPAGAPQPGAVPPGVPPPGPHGPSPFPNQQTPPSMMPGAVPGSGHPGVADPGTPLPPDPTAPSPGTVTPVPPPQ

SEQ ID NO: 65989 - protein, 1152 aa, Homo sapiens
MAVRKKDGGPNVKYYEAADTVTQFDNVRLWLGKNYKKYIQAEPPTNKSLSSLVVQLLQFQEEVFGKHVSNAPLTKLPIKCFLDFKAGGSLCHILAAAYKFKSDQGWRRYDFQNPSRMDRNVEMFMTIEKSLVQNNCLSRPNIFLCPEIEPKLLGKLKDIIKRHQGTVTEDKNNASHVVYPVPGNLEEEEWVRPVMKRDKQVLLHWGYYPDSYDTWIPASEIEASVEDAPTPEKPRKVHAKWILDTDTFNEWMNEEDYEVNDDKNPVSRRKKISAKTLTDEVNSPDSDRRDKKGGNYKKRKRSPSPSPTPEAKKKNAKKGPSTPYTKSKRGHREEEQEDLTKDMDEPSPVPNVEEVTLPKTVNTKKDSESAPVKGGTMTDLDEQEDESMETTGKDEDENSTGNKGEQTKNPDLHEDNVTEQTHHIIIPSYAAWFDYNSVHAIERRALPEFFNGKNKSKTPEIYLAYRNFMIDTYRLNPQEYLTSTACRRNLAGDVCAIMRVHAFLEQWGLINYQVDAESRPTPMGPPPTSHFHVLADTPSGLVPLQPKTPQGRQVDADTKAGRKGKELDDLVPETAKGKPELQTSASQQMLNFPDKGKEKPTDMQNFGLRTDMYTKKNVPSKSKAAASATREWTEQETLLLLEALEMYKDDWNKVSEHVGSRTQDECILHFLRLPIEDPYLEDSEASLGPLAYQPIPFSQSGNPVMSTVAFLASVVDPRVASAAAKSALEEFSKMKEEVPTALVEAHVRKVEEAAKVTGKADPAFGLESSGIAGTTSDEPERIEESGNDEARVEGQATDEKKEPKEPREGGGAIEEEAKEKTSEAPKKDEEKGKEGDSEKESEKSDGDPIVDPEKEKEPKEGQEEVLKEVVESEGERKTKVERDIGEGNLSTAAAAALAAAAVKAKHLAAVEERKIKSLVALLVETQMKKLEIKLRHFEELETIMDREREALEYQRQQLLADRQAFHMEQLKYAEMRARQQHFQQMHQQQQQPPPALPPGSQPIPPTGAAGPPAVHGLAVAPASVVPAPAGSGAPPGSLGPSEQIGQAGSTAGPQQQQPAGAPQPGAVPPGVPPPGPHGPSPFPNQQTPPSMMPGAVPGSGHPGVAAQSPAIVAAVQGNLLPSASPLPDPGTPLPPDPTAPSPGTVTPVPPPQ

SEQ ID NO: 65990 - protein, 474 aa, Homo sapiens
MAARAGFQSVAPSGGAGASGGAGAAAALGPGGTPGPPVRMGPAPGQGLYRSPMPGAAYPRPGMLPGSRMTPQGPSMGPPGYGGNPSVRPGLAQSGMDQSRKRPAPQQIQQVQQQAVQNRNHNAKKKKMADKILPQRIRELVPESQAYMDLLAFERKLDQTIMRKRLDIQEALKRPIKQKRKLRIFISNTFNPAKSDAEDGEGTVASWELRVEGRLLEDSALSKYDATKQKRKFSSFFKSLVIELDKDLYGPDNHLVEWHRTATTQETDGFQVKRPGDVNVRCTVLLMLDYQPPQFKLDPRLARLLGIHTQTRPVIIQALWQYIKTHKLQDPHEREFVICDKYLQQIFESQRMKFSEIPQRLHALLMPPEPIIINHVISVDPNDQKKTACYDIDVEVDDTLKTQMNSFLLSTASQQEIATLDNKTMTDVVGNPEEERRAEFYFQPWAQEAVCRYFYSKVQQRRQELEQALGIRNT

SEQ ID NO: 65991 - protein, 515 aa, Homo sapiens
MAARAGFQSVAPSGGAGASGGAGAAAALGPGGTPGPPVRMGPAPGQGLYRSPMPGAAYPRPGMLPGSRMTPQGPSMGPPGYGGNPSVRPGLAQSGMDQSRKRPAPQQIQQVQQQAVQNRNHNAKKKKMADKILPQRIRELVPESQAYMDLLAFERKLDQTIMRKRLDIQEALKRPIKQKRKLRIFISNTFNPAKSDAEDGEGTVASWELRVEGRLLEDSALSKYDATKQKRKFSSFFKSLVIELDKDLYGPDNHLVEWHRTATTQETDGFQVKRPGDVNVRCTVLLMLDYQPPQFKLDPRLARLLGIHTQTRPVIIQALWQYIKTHKLQDPHEREFVICDKYLQQIFESQRMKFSEIPQRLHALLMPPEPIIINHVISVDPNDQKKTACYDIDVEVDDTLKTQMNSFLLSTASQQEIATLDNKIHETIETINQLKTQREFMLSFARDPQGFINDWLQSQCRDLKTMTDVVGNPEEERRAEFYFQPWAQEAVCRYFYSKVQQRRQELEQALGIRNT

SEQ ID NO: 65992 - protein, 291 aa, Homo sapiens
MMPLNKRGSSLPFKSLVIELDKDLYGPDNHLVEWHRTATTQETDGFQVKRPGDVNVRCTVLLMLDYQPPQFKLDPRLARLLGIHTQTRPVIIQALWQYIKTHKLQDPHEREFVICDKYLQQIFESQRMKFSEIPQRLHALLMPPEPIIINHVISVDPNDQKKTACYDIDVEVDDTLKTQMNSFLLSTASQQEIATLDNKIHETIETINQLKTQREFMLSFARDPQGFINDWLQSQCRDLKTMTDVVGNPEEERRAEFYFQPWAQEAVCRYFYSKVQQRRQELEQALGIRNT

SEQ ID NO: 65993 - protein, 473 aa, Homo sapiens
MLPGPALRGPGPAQYQRPGMSPGNRMPMALAGGTPCWLPIWCSSSASTWHATHHDGSIPKTPACAPQPPMPAQRRGLKRRKMADKVLPQRIRELVPESQAYMDLLAFERKLDQTIARKRMEIQEAIKKPLTQKRKLRIYISNTFSPSKAEGDSAGTAGTPGGTPAGDKVASWELRVEGKLLDDPSKQKRKFSSFFKSLVIELDKELYGPDNHLVEWHRMPTTQETDGFQVKRPGDLNVKCTLLLMLDHQPPQYKLDPRLARLLGVHTQTRAAIMQALWLYIKHNQLQDGHEREYINCNRYFRQIFSCGRLRFSEIPMKLAGLLQHPDPIVINHVISVDPNDQKKTACYDIDVEVDDPLKAQMSNFLASTTNQQEIASLDVKIHETIESINQLKTQRDFMLSFSTDPQDFIQEWLRSQRRDLKIITDVIGNPEEERRAAFYHQPWAQEAVGRHIFAKVQQRRQELEQVLGIRLT

SEQ ID NO: 65994 - protein, 483 aa, Homo sapiens
MGRRVGVEVTPRWAPQKCQGARPQRPGMSPGNRMPMAGLQVGPPAGSPFGAAAPLRPGMPPTMMDPFRKRLLVPQAQPPMPAQRRGLKRRKMADKVLPQRIRELVPESQAYMDLLAFERKLDQTIARKRMEIQEAIKKPLTQKRKLRIYISNTFSPSKAEGDSAGTAGTPGGTPAGDKVASWELRVEGKLLDDPSKQKRKFSSFFKSLVIELDKELYGPDNHLVEWHRMPTTQETDGFQVKRPGDLNVKCTLLLMLDHQPPQYKLDPRLARLLGVHTQTRAAIMQALWLYIKHNQLQDGHEREYINCNRYFRQIFSCGRLRFSEIPMKLAGLLQHPDPIVINHVISVDPNDQKKTACYDIDVEVDDPLKAQMSNFLASTTNQQEIASLDVKIHETIESINQLKTQRDFMLSFSTDPQDFIQEWLRSQRRDLKIITDVIGNPEEERRAAFYHQPWAQEAVGRHIFAKVQQRRQELEQVLGIRLT

SEQ ID NO: 65995 - protein, 531 aa, Homo sapiens
MSGRGAGGFPLPPLSPGGGAVAAALGAPPPPAGPGMLPGPALRGPGPAGGVGGPGAAAFRPMGPAGPAAQYQRPGMSPGNRMPMAGLQVGPPAGSPFGAAAPLRPGMPPTMMDPFRKRLLVPQAQPPMPAQRRGLKRRKMADKVLPQRIRELVPESQAYMDLLAFERKLDQTIARKRMEIQEAIKKPLTQKRKLRIYISNTFSPSKAEGDSAGTAGTPGGTPAGDKVASWELRVEGKLLDDPSKQKRKFSSFFKSLVIELDKELYGPDNHLVEWHRMPTTQETDGFQVKRPGDLNVKCTLLLMLDHQPPQYKLDPRLARLLGVHTQTRAAIMQALWLYIKHNQLQDGHEREYINCNRYFRQIFSCGRLRFSEIPMKLAGLLQHPDPIVINHVISVDPNDQKKTACYDIDVEVDDPLKAQMSNFLASTTNQQEIASLDVKIHETIESINQLKTQRDFMLSFSTDPQDFIQEWLRSQRRDLKIITDVIGNPEEERRAAFYHQPWAQEAVGRHIFAKVQQRRQELEQVLGIRLT

SEQ ID NO: 65996 - protein, 494 aa, Homo sapiens
MSGRGAGGFPLPPLSPGGGAAFRPMGPAGPAAQYQRPGMSPGNRMPMAGLQVGPPAGSPFGAAAPLRPGMPPTMMDPFRKRLLVPQAQPPMPAQRRGLKRRKMADKVLPQRIRELVPESQAYMDLLAFERKLDQTIARKRMEIQEAIKKPLTQKRKLRIYISNTFSPSKAEGDSAGTAGTPGGTPAGDKVASWELRVEGKLLDDPSKQKRKFSSFFKSLVIELDKELYGPDNHLVEWHRMPTTQETDGFQVKRPGDLNVKCTLLLMLDHQPPQYKLDPRLARLLGVHTQTRAAIMQALWLYIKHNQLQDGHEREYINCNRYFRQIFSCGRLRFSEIPMKLAGLLQHPDPIVINHVISVDPNDQKKTACYDIDVEVDDPLKAQMSNFLASTTNQQEIASLDVKIHETIESINQLKTQRDFMLSFSTDPQDFIQEWLRSQRRDLKIITDVIGNPEEERRAAFYHQPWAQEAVGRHIFAKVQQRRQELEQVLGIRLT

SEQ ID NO: 65997 - protein, 483 aa, Homo sapiens
MAADEVAGGARKATKSKLFEFLVHGVRPGMPSGARMPHQGAPMGPPGSPYMGSPAVRPGLAPAGMEPARKRAAPPPGQSQAQSQGQPVPTAPARSRSAKRRKMADKILPQRIRELVPESQAYMDLLAFERKLDQTIMRKRVDIQEALKRPMKQKRKLRLYISNTFNPAKPDAEDSDGSIASWELRVEGKLLDDPSKQKRKFSSFFKSLVIELDKDLYGPDNHLVEWHRTPTTQETDGFQVKRPGDLSVRCTLLLMLDYQPPQFKLDPRLARLLGLHTQSRSAIVQALWQYVKTNRLQDSHDKEYINGDKYFQQIFDCPRLKFSEIPQRLTALLLPPDPIVINHVISVDPSDQKKTACYDIDVEVEEPLKGQMSSFLLSTANQQEISALDSKIHETIESINQLKIQRDFMLSFSRDPKGYVQDLLRSQSRDLKVMTDVAGNPEEERRAEFYHQPWSQEAVSRYFYCKIQQRRQELEQSLVVRNT

SEQ ID NO: 65998 - protein, 435 aa, Homo sapiens
MTPGLQHPPTVVQRPGMPSGARMPHQGAPMGPPGSPYMGSPAAPARSRSAKRRKMADKILPQRIRELVPESQAYMDLLAFERKLDQTIMRKRVDIQEALKRPMKQKRKLRLYISNTFNPAKPDAEDSDGSIASWELRVEGKLLDDPSKQKRKFSSFFKSLVIELDKDLYGPDNHLVEWHRTPTTQETDGFQVKRPGDLSVRCTLLLMLDYQPPQFKLDPRLARLLGLHTQSRSAIVQALWQYVKTNRLQDSHDKEYINGDKYFQQIFDCPRLKFSEIPQRLTALLLPPDPIVINHVISVDPSDQKKTACYDIDVEVEEPLKGQMSSFLLSTANQQEISALDSKIHETIESINQLKIQRDFMLSFSRDPKGYVQDLLRSQSRDLKVMTDVAGNPEEERRAEFYHQPWSQEAVSRYFYCKIQQRRQELEQSLVVRNT

SEQ ID NO: 65999 - protein, 470 aa, Homo sapiens
MTPGLQHPPTVVQRPGMPSGARMPHQGAPMGPPGSPYMGSPAVRPGLAPAGMEPARKRAAPPPGQSQAQSQGQPVPTAPARSRSAKRRKMADKILPQRIRELVPESQAYMDLLAFERKLDQTIMRKRVDIQEALKRPMKQKRKLRLYISNTFNPAKPDAEDSDGSIASWELRVEGKLLDDPSKQKRKFSSFFKSLVIELDKDLYGPDNHLVEWHRTPTTQETDGFQVKRPGDLSVRCTLLLMLDYQPPQFKLDPRLARLLGLHTQSRSAIVQALWQYVKTNRLQDSHDKEYINGDKYFQQIFDCPRLKFSEIPQRLTALLLPPDPIVINHVISVDPSDQKKTACYDIDVEVEEPLKGQMSSFLLSTANQQEISALDSKIHETIESINQLKIQRDFMLSFSRDPKGYVQDLLRSQSRDLKVMTDVAGNPEEERRAEFYHQPWSQEAVSRYFYCKIQQRRQELEQSLVVRNT

SEQ ID NO: 66000 - protein, 470 aa, Homo sapiens; identical to SEQ ID NO: 65999

SEQ ID NO: 66001 - protein, 139 aa, Homo sapiens
MTPGLQHPPTVVQRPGMPSGARMPHQGAPMGPPGSPYMGSPAVRPGLAPAGMEPARKRAAPPPGQSQAQSQGQPVPTAPARSRSAKRRKMADKILPQRIRELVPESQAYMDLLAFERKLDQTIMRKRVDIQEALKRPMK

SEQ ID NO: 66002 - protein, 1026 aa, Homo sapiens
MNLFNLDRFRFEKRNKIEEAPEATPQPSQPGPSSPISLSAEEENAEGEVSRANTPDSDITEKTEDSSVPETPDNERKASISYFKNQRGIQYIDLSSDSEDVVSPNCSNTVQEKTFNKDTVIIVSEPSEDEESQGLPTMARRNDDISELEDLSELEDLKDAKLQTLKELFPQRSDNDLLKLIESTSTMDGAIAAALLMFGDAGGGPRKRKLSSSSEPYEEDEFNDDQSIKKTRLDHGEESNESAESSSNWEKQESIVLKLQKEFPNFDKQELREVLKEHEWMYTEALESLKVFAEDQDMQYVSQSEVPNGKEVSSRSQNYPKNATKTKLKQKFSMKAQNGFNKKRKKNVFNPKRVVEDSEYDSGSDVGSSLDEDYSSGEEVMEDGYKGKILHFLQDASIGELTLIPQCSQKKAQKITELRPFNSWEALFTKMSKTNGLSEDLIWHCKTLIQERDVVIRLMNKCEDISNKLTKQVTMLTGNGGGWNIEQPSILNQSLSLKPYQKVGLNWLALVHKHGLNGILADEMGLGKTIQAIAFLAYLYQEGNNGPHLIVVPASTIDNWLREVNLWCPTLKVLCYYGSQEERKQIRFNIHSRYEDYNVIVTTYNCAISSSDDRSLFRRLKLNYAIFDEGHMLKNMGSIRYQHLMTINANNRLLLTGTPVQNNLLELMSLLNFVMPHMFSSSTSEIRRMFSSKTKSADEQSIYEKERIAHAKQIIKPFILRRVKEEVLKQLPPKKDRIELCAMSEKQEQLYLGLFNRLKKSINNLEKNTEMCNVMMQLRKMANHPLLHRQYYTAEKLKEMSQLMLKEPTHCEANPDLIFEDMEVMTDFELHVLCKQYRHINNFQLDMDLILDSGKFRVLGCILSELKQKGDRVVLFSQFTMMLDILEVLLKHHQHRYLRLDGKTQISERIHLIDEFNTDMDIFVFLLSTKAGGLGINLTSANVVILHDIDCNPYNDKQAEDRCHRVGQTKEVLVIKLISQGTIEESMLKINQQKLKLEQDMTTVDEGDEGSMPADIATLLKTSMGL

SEQ ID NO: 66003 - protein, 1028 aa, Homo sapiens
MNLFNLDRFRFEKRNKIEEAPEATPQPSQPGPSSPISLSAEEENAEGEVSRANTPDSDITEKTEDSSVPETPDNERKASISYFKNQRGIQYIDLSSDSEDVVSPNCSNTVQEKTFNKDTVIIVSEPSEDEESQGLPTMARRNDDISELEDLSELEDLKDAKLQTLKELFPQRSDNDLLKLIESTSTMDGAIAAALLMFGDAGGGPRKRKLSSSSEPYEEDEFNDDQSIKKTRLDHGEESNESAESSSNWEKQESIVLKLQKEFPNFDKQELREVLKEHEWMYTEALESLKVFAEDQDMQYVSQSEVPNGKEVSSRSQNYPKNATKTKLKQKFSMKAQNGFNKKRKKNVFNPKRVVEDSEYDSGSDVGSSLDEDYSSGEEVMEDGYKGKILHFLQDASIGELTLIPQCSQKKAQKITELRPFNSWEALFTKMSKTNGLSEDLIWHCKTLIQERDVVIRLMNKCEDISNKLTKQVTMLTGNGGGWNIEQPSILNQSLSLKPYQKVGLNWLALVHKHGLNGILADEMGLGKTIQAIAFLAYLYQEGNNGPHLIVVPASTIDNWLREVNLWCPTLKVLCYYGSQEERKQIRFNIHSRYEDYNVIVTTYNCAISSSDDRSLFRRLKLNYAIFDEGHMLKNMGSIRYQHLMTINANNRLLLTGTPVQNNLLELMSLLNFVMPHMFSSSTSEIRRMFSSKTKSADEQSIYEKERIAHAKQIIKPFILRRVKEEVLKQLPPKKDRIELCAMSEKQEQLYLGLFNRLKKSINNLVTEKNTEMCNVMMQLRKMANHPLLHRQYYTAEKLKEMSQLMLKEPTHCEANPDLIFEDMEVMTDFELHVLCKQYRHINNFQLDMDLILDSGKFRVLGCILSELKQKGDRVVLFSQFTMMLDILEVLLKHHQHRYLRLDGKTQISERIHLIDEFNTDMDIFVFLLSTKAGGLGINLTSANVVILHDIDCNPYNDKQAEDRCHRVGQTKEVLVIKLISQGTIEESMLKINQQKLKLEQDMTTVDEGDEGSMPADIATLLKTSMGL

SEQ ID NO: 66004 - protein, 1028 aa, Homo sapiens; identical to SEQ ID NO: 66003

SEQ ID NO: 66005 - protein, 318 aa, Homo sapiens
MNLFNLDRFRFEKRNKIEEAPEATPQPSQPGPSSPISLSAEEENAEGEVSRANTPDSDITEKTEDSSVPETPDNERKASISYFKNQRGIQYIDLSSDSEDVVSPNCSNTVQEKTFNKDTVIIVSEPSEDEESQGLPTMARRNDDISELEDLSELEDLKDAKLQTLKELFPQRSDNDLLKLIESTSTMDGAIAAALLMFGDAGGGPRKRKLSSSSEPYEEDEFNDDQSIKKTRLDHGEESNESAESSSNWEKQESIVLKLQKEFPNFDKQELREVLKEHEWMYTEALESLKVFAEDQDMQYVSQSEVPNGKKKAQKKKK

SEQ ID NO: 66006 - protein, 243 aa, Homo sapiens
MAAIAASEVLVDSAEEGSLAAAAELAAQKREQRLRKFRELHLMRNEARKLNHQEVVEEDKRLKLPANWEAKKARLEWELKEEEKKKECAARGEDYEKVKLLEISAEDAERWERKKKRKNPDLGFSDYAAAQLRQYHRLTKQIKPDMETYERLREKHGEEFFPTSNSLLHGTHVPSTEEIDRMVIDLEKQIEKRDKYSRRRPYNDDADIDYINERNAKFNKKAERFYGKYTAEIKQNLERGTAV

SEQ ID NO: 66007 - protein, 201 aa, Homo sapiens
MAAIAASEVLVDSAEEGSLAAAAELAAQKREQRLRKFRELHLMRECAARGEDYEKVKLLEISAEDAERWERKKKRKNPDLGFSDYAAAQLRQYHRLTKQIKPDMETYERLREKHGEEFFPTSNSLLHGTHVPSTEEIDRMVIDLEKQIEKRDKYSRRRPYNDDADIDYINERNAKFNKKAERFYGKYTAEIKQNLERGTAV

SEQ ID NO: 66008 - protein, 258 aa, Homo sapiens
MDGIIEQKSMLVHSKISDAGKRNGLINTRNLMAESRDGLVSVYPAPQYQSHRVGASTVPASLDSSRSEPMQQLLDPNTLQQSVESRYRPNIILYSEGVLRSWGDGVAADCCETTFIEDRSPTKDSLEYPDGKFIDLSADDIKIHTLSYDVEEEEEFQELESDYSSDTESEDNFLMMPPRDHLGLSVFSMLCCFWPLGIAAFYLSHETNKAVAKGDLHQASTSSRRALFLAVLSITIGTGVYVGVAVALIAYLSKNNHL

SEQ ID NO: 66009 - protein, 238 aa, Homo sapiens
MESLSELQNPLLPRSPAHLHGPYPYPETPPSWSCQEKLYSYLLGGAGPAGAHQLLDPGSLQLAVEAWYRPSCLLGRDKVKEPRAGSCETSFTEDREPQEGPPEQPTGPGQAAENVTIQTVSYGVQEELRDQEDDQEEEESDATSTESESEDNFLTLPPRDHLGLTLFSMLCCFWPLGIAAFYFSQGTSKAISKGDFRLASTTSRRALFLATLAIAVGAGLYVAVVVALAAYMSQNGHG

SEQ ID NO: 66010 - protein, 238 aa, Homo sapiens; identical to SEQ ID NO: 66009

SEQ ID NO: 66011 - protein, 80 aa, Homo sapiens
MESLSELQNPLLPRSPAHLHGPYPYPETPPSWSCQEKLYSYLLGGAGPAGAHQLLDPGSLQLAVEAWYRPSCLLGRDKVK

SEQ ID NO: 66012 - protein, 705 aa, Homo sapiens
MNYLRRRLSDSNFMANLPNGYMTDLQRPQPPPPPPGAHSPGATPGPGTATAERSSGVAPAASPAAPSPGSSGGGGFFSSLSNAVKQTTAAAAATFSEQVGGGSGGAGRGGAASRVLLVIDEPHTDWAKYFKGKKIHGEIDIKVEQAEFSDLNLVAHANGGFSVDMEVLRNGVKVVRSLKPDFVLIRQHAFSMARNGDYRSLVIGLQYAGIPSVNSLHSVYNFCDKPWVFAQMVRLHKKLGTEEFPLIDQTFYPNHKEMLSSTTYPVVVKMGHAHSGMGKVKVDNQHDFQDIASVVALTKTYATAEPFIDAKYDVRVQKIGQNYKAYMRTSVSGNWKTNTGSAMLEQIAMSDRYKLWVDTCSEIFGGLDICAVEALHGKDGRDHIIEVVGSSMPLIGDHQDEDKQLIVELVVNKMAQALPRQRQRDASPGRGSHGQTPSPGALPLGRQTSQQPAGPPAQQRPPPQGGPPQPGPGPQRQGPPLQQRPPPQGQQHLSGLGPPAGSPLPQRLPSPTSAPQQPASQAAPPTQGQGRQSRPVAGGPGAPPAARPPASPSPQRQAGPPQATRQTSVSGPAPPKASGAPPGGQQRQGPPQKPPGPAGPTRQASQAGPVPRTGPPTTQQPRPSGPGPAGRPKPQLAQKPSQDVPPPATAAAGGPPHPQLNKSQSLTNAFNLPEPAPPRPSLSQDEVKAETIRSLRKSFASLFSD

SEQ ID NO: 66013 - protein, 669 aa, Homo sapiens
MNYLRRRLSDSNFMANLPNGYMTDLQRPQPPPPPPGAHSPGATPGPGTATAERSSGVAPAASPAAPSPGSSGGGGFFSSLSNAVKQTTAAAAATFSEQVGGGSGGAGRGGAASRVLLVIDEPHTDWAKYFKGKKIHGEIDIKVEQAEFSDLNLVAHANGGFSVDMEVLRNGVKVVRSLKPDFVLIRQHAFSMARNGDYRSLVIGLQYAGIPSVNSLHSVYNFCDKPWVFAQMVRLHKKLGTEEFPLIDQTFYPNHKEMLSSTTYPVVVKMGHAHSGMGKVKVDNQHDFQDIASVVALTKTYATAEPFIDAKYDVRVQKIGQNYKAYMRTSVSGNWKTNTGSAMLEQIAMSDRYKLWVDTCSEIFGGLDICAVEALHGKDGRDHIIEVVGSSMPLIGDHQDEDKQLIVELVVNKMAQALPRQRQRDASPGRGSHGQTPSPGALPLGRQTSQQPAGPPAQQRPPPQGGPPQPGPGPQRQGPPLQQRPPPQGQQHLSGLGPPAGSPLPQRLPSPTSAPQQPASQAAPPTQGQGRQSRPVAGGPGAPPAARPPASPSPQRQAGPPQATRQTSVSGPAPPKASGAPPGGQQRQGPPQKPPGPAGPTRQASQAGPVPRTGPPTTQQPRPSGPGPAGRPKPQLAQKPSQDVPPPATAAAGGPPHPQLKASPAQAQP

SEQ ID NO: 66014 - protein, 580 aa, Homo sapiens
MNFLRRRLSDSSFMANLPNGYMTDLQRPDSSTSSPASPAMERRHPQPLAASFSSPGSSLFSSLSSAMKQAPQATSGLMEPPGPSTPIVQRPRILLVIDDAHTDWSKYFHGKKVNGEIEIRVEQAEFSELNLAAYVTGGCMVDMQVVRNGTKVVSRSFKPDFILVRQHAYSMALGEDYRSLVIGLQYGGLPAVNSLYSVYNFCSKPWVFSQLIKIFHSLGPEKFPLVEQTFFPNHKPMVTAPHFPVVVKLGHAHAGMGKIKVENQLDFQDITSVVAMAKTYATTEAFIDSKYDIRIQKIGSNYKAYMRTSISGNWKANTGSAMLEQVAMTERYRLWVDSCSEMFGGLDICAVKAVHSKDGRDYIIEVMDSSMPLIGEHVEEDRQLMADLVVSKMSQLPMPGGTAPSPLRPWAPQIKSAKSPGQAQLGPQLGQPQPRPPPQGGPRQAQSPQPQRSGSPSQQRLSPQGQQPLSPQSGSPQQQRSPGSPQLSRASSGSSPNQASKPGATLASQPRPPVQGRSTSQQGEESKKPAPPHPHLNKSQSLTNSLSTSDTSQRGTPSEDEAKAETIRNLRKSFASLFSD

SEQ ID NO: 66015 - protein, 580 aa, Homo sapiens; identical to SEQ ID NO: 66014

SEQ ID NO: 66016 - protein, 444 aa, Homo sapiens
MNFLRRRLSDSSFMANLPNGYMTDLQRPDSSTSSPASPAMERRHPQPLAASFSSPGSSLFSSLSSAMKQAPQATSGLMEPPGPSTPIVQRPRILLVIDDAHTDWSKYFHGKKVNGEIEIRVEQAEFSELNLAAYVTGGCMVDMQVVRNGTKVVSRSFKPDFILVRQHAYSMALGEDYRSLVIGLQYGGLPAVNSLYSVYNFCSKPWVFSQLIKIFHSLGPEKFPLVEQTFFPNHKPMVTAPHFPVVVKLGHAHAGMGKIKVENQLDFQDITSVVAMAKTYATTEAFIDSKYDIRIQKIGSNYKAYMRTSISGNWKANTGSAMLEQVAMTERYRLWVDSCSEMFGGLDICAVKAVHSKDGRDYIIEVMDSSMPLIGEHVEEDRQLMADLVVSKMSQLPMPGGTAPSPLRPWAPQIKSAKSPGQAQLGPQLGQPQPRPPPQVSFSP

SEQ ID NO: 66017 - protein, 113 aa, Homo sapiens
MNFLRRRLSDSSFMANLPNGYMTDLQRPDSSTSSPASPAMERRHPQPLAASFSSPGSSLFSSLSSAMKQAPQATSGLMEPPGPSTPIVQRPRILLVIDDAHTDWSKYFHGKKV

SEQ ID NO: 66018 - protein, 123 aa, Homo sapiens
MNFLRRRLSDSSFMANLPNGYMTDLQRPDSSTSSPASPAMERRHPQPLAASFSSPGSSLFSSLSSAMKQAPQATSGLMEPPGPSTPIVQRPRILLVIDDAHTDWSKYFHGKKVNGEIEIRVEQ

SEQ ID NO: 66019 - protein, 186 aa, Homo sapiens
MDSSMPLIGEHVEEDRQLMADLVVSKMSQLPMPGGTAPSPLRPWAPQIKSAKSPGQAQLGPQLGQPQPRPPPQGGPRQAQSPQQQRSPGSPQLSRASSGSSPNQASKPGATLASQPRPPVQGRSTSQQGEESKKPAPPHPHLNKSQSLTNSLSTSDTSQRGTPSEDEAKAETIRNLRKSFASLFSD

SEQ ID NO: 66020 - protein, 118 aa, Homo sapiens
MEGGAYGAGKAGGAFDPYTLVRQPHTILRVVSWLFSIVVFGSIVNEGYLNSASEGEEFCIYNRNPNACSYGVAVGVLAFLTCLLYLALDVYFPQISSVKDRKKAVLSDIGVSAWEMHS

SEQ ID NO: 66021 - protein, 191 aa, Homo sapiens
MEGGAYGAGKAGGAFDPYTLVRQPHTILRVVSWLFSIVVFGSIVNEGYLNSASEGEEFCIYNRNPNACSYGVAVGVLAFLTCLLYLALDVYFPQISSVKDRKKAVLSDIGVSAFWAFLWFVGFCYLANQWQVSKPKDNPLNEGTDAARAAIAFSFFSIFTWSLTAALAVRRFKDLSFQEEYSTLFPASAQP

SEQ ID NO: 66022 - protein, 233 aa, Homo sapiens
MEGGAYGAGKAGGAFDPYTLVRQPHTILRVVSWLFSIVVFGSIVNEGYLNSASEGEEFCIYNRNPNACSYGVAVGVLAFLTCLLYLALDVYFPQISSVKDRKKAVLSDIGVSAFWAFLWFVGFCYLANQWQVSKPKDNPLNEGTDAARAAIAFSFFSIFTWAGQAVLAFQRYQIGADSALFSQDYMDPSQDSSMPYAPYVEPTGPDPAGMGGTYQQPANTFDTEPQGYQSQGY

SEQ ID NO: 66023 - protein, 192 aa, Homo sapiens
MLTLEFGILEFDPSWIGSWTQRSWVSWRSRPGCELFSIVVFGSIVNEGYLNSASEGEEFCIYNRNPNACSYGVAVGVLAFLTCLLYLALDVYFPQISSVKDRKKAVLSDIGVSAFWAFLWFVGFCYLANQWQVSKPKDNPLNEGTDAARAAIAFSFFSIFTWSLTAALAVRRFKDLSFQEEYSTLFPASAQP

SEQ ID NO: 66024 - protein, 169 aa, Homo sapiens
MEGGAYGAGKAGGAFDPYTLVRQPHTILRVVSWLFSIVVFGSIVNEGYLNSASEGEEFCIYNRNPNACSYGVAVGVLAFLTCLLYLALDVYFPQISSVKDRKKAVLSDIGVSAFWAFLWFVGFCYLANQWQVSKPKDNPLNEGTDAARAAIAFSFFSIFTWRSGATSPP

SEQ ID NO: 66025 - protein, 224 aa, Homo sapiens
MESGAYGAAKAGGSFDLRRFLTQPQVVARAVCLVFALIVFSCIYGEGYSNAHESKQMYCVFNRNEDACRYGSAIGVLAFLASAFFLVVDAYFPQISNATDRKYLVIGDLLFSALWTFLWFVGFCFLTNQWAVTNPKDVLVGADSVRAAITFSFFSIFSWGVLASLAYQRYKAGVDDFIQNYVDPTPDPNTAYASYPGASVDNYQQPPFTQNAETTEGYQPPPVY

SEQ ID NO: 66026 - protein, 229 aa, Homo sapiens
MEGASFGAGRAGAALDPVSFARRPQTLLRVASWVFSIAVFGPIVNEGYVNTDSGPELRCVFNGNAGACRFGVALGLGAFLACAAFLLLDVRFQQISSVRDRRRAVLLDLGFSGLWSFLWFVGFCFLTNQWQRTAPGPATTQAGDAARAAIAFSFFSILSWVALTVKALQRFRLGTDMSLFATEQLSTGASQAYPGYPVGSGVEGTETYQSPPFTETLDTSPKGYQVPAY

SEQ ID NO: 66027 - protein, 145 aa, Homo sapiens
MEGASFGAGRAGAALDPVSFARRPQTLLRVASWVFSIAVFGPIVNEGYVNTDSGPELRCVFNGNAGACRFGVALGLGAFLACAAFLLLDVRFQQSGGRGKTPPSPQDWGSWPLFPSHVPVGSDCLVSVMVVRPVRSHSPLSLTGC

SEQ ID NO: 66028 - protein, 234 aa, Homo sapiens
MHIPKSLQELANSEAVQFLRRPKTITRVFEGVFSLIVFSSLLTDGYQNKMESPQLHCILNSNSVACSFAVGAGFLAFLSCLAFLVLDTQETRIAGTRFKTAFQLLDFILAVLWAVVWFMGFCFLANQWQHSPPKEFLLGSSSAQAAIAFTFFSILVWIFQAYLAFQDLRNDAPVPYKRFLDEGGMVLTTLPLPSANSPVNMPTTGPNSLSYASSALSPCLTAPKSPRLAMMPDN

SEQ ID NO: 66029 - protein, 1573 aa, Homo sapiens
MAFSKGFRIYHKLDPPPFSLIVETRHKEECLMFESGAVAVLSSAEKEAIKGTYSKVLDAYGLLGVLRLNLGDTMLHYLVLVTGCMSVGKIQESEVFRVTSTEFISLRIDSSDEDRISEVRKVLNSGNFYFAWSASGISLDLSLNAHRSMQEQTTDNRFFWNQSLHLHLKHYGVNCDDWLLRLMCGGVEIRTIYAAHKQAKACLISRLSCERAGTRFNVRGTNDDGHVANFVETEQVVYLDDSVSSFIQIRGSVPLFWEQPGLQVGSHRVRMSRGFEANAPAFDRHFRTLKNLYGKQIIVNLLGSKEGEHMLSKAFQSHLKASEHAADIQMVNFDYHQMVKGGKAEKLHSVLKPQVQKFLDYGFFYFNGSEVQRCQSGTVRTNCLDCLDRTNSVQAFLGLEMLAKQLEALGLAEKPQLVTRFQEVFRSMWSVNGDSISKIYAGTGALEGKAKLKDGARSVTRTIQNNFFDSSKQEAIDVLLLGNTLNSDLADKARALLTTGSLRVSEQTLQSASSKVLKSMCENFYKYSKPKKIRVCVGTWNVNGGKQFRSIAFKNQTLTDWLLDAPKLAGIQEFQDKRSKPTDIFAIGFEEMVELNAGNIVSASTTNQKLWAVELQKTISRDNKYVLLASEQLVGVCLFVFIRPQHAPFIRDVAVDTVKTGMGGATGNKGAVAIRMLFHTTSLCFVCSHFAAGQSQVKERNEDFIEIARKLSFPMGRMLFSHDYVFWCGDFNYRIDLPNEEVKELIRQQNWDSLIAGDQLINQKNAGQVFRGFLEGKVTFAPTYKYDLFSDDYDTSEKCRTPAWTDRVLWRRRKWPFDRSAEDLDLLNASFQDESKILYTWTPGTLLHYGRAELKTSDHRPVVALIDIDIFEVEAEERQNIYKEVIAVQGPPDGTVLVSIKSSLPENNFFDDALIDELLQQFASFGEVILIRFVEDKMWVTFLEGSSALNVLSLNGKELLNRTITIALKSPDWIKNLEEEMSLEKISIALPSSTSSTLLGEDAEVAADFDMEGDVDDYSAEVEELLPQHLQPSSSSGLGTSPSSSPRTSPCQSPTISEGPVPSLPIRPSRAPSRTPGPPSAQSSPIDAQPATPLPQKDPAQPLEPKRPPPPRPVAPPTRPAPPQRPPPPSGARSPAPTRKEFGGIGAPPSPGVARREMEAPKSPGTTRKDNIGRSQPSPQAGLAGPGPAGYSTARPTIPPRAGVISAPQSHARASAGRLTPESQSKTSETSKGSTFLPEPLKPQAAFPPQSSLPPPAQRLQEPLVPVAAPMPQSGPQPNLETPPQPPPRSRSSHSLPSEASSQPQVKTNGISDGKRESPLKIDPFEDLSFNLLAVSKAQLSVQTSPVPTPDPKRLIQLPSATQSNVLSSVSCMPTMPPIPARSQSQENMRSSPNPFITGLTRTNPFSDRTAAPGNPFRAKSEESEATSWFSKEEPVTISPFPSLQPLGHNKSRASSSLDGFKDSFDLQGQSTLKISNPKGWVTFEEEEDFGVKGKSKSACSDLLGNQPSSFSGSNLTLNDDWNKGTNVSFCVLPSRRPPPPPVPLLPPGTSPPVDPFTTLASKASPTLDFTER

SEQ ID NO: 66030 - protein, 1295 aa, Homo sapiens
MAFSKGFRIYHKLDPPPFSLIVETRHKEECLMFESGAVAVLSSAEKEAIKGTYSKVLDAYGLLGVLRLNLGDTMLHYLVLVTGCMSVGKIQESEVFRVTSTEFISLRIDSSDEDRISEVRKVLNSGNFYFAWSASGISLDLSLNAHRSMQEQTTDNRFFWNQSLHLHLKHYGVNCDDWLLRLMCGGVEIRTIYAAHKQAKACLISRLSCERAGTRFNVRGTNDDGHVANFVETEQVVYLDDSVSSFIQIRGSVPLFWEQPGLQVGSHRVRMSRGFEANAPAFDRHFRTLKNLYGKQIIVNLLGSKEGEHMLSKAFQSHLKASEHAADIQMVNFDYHQMVKGGKAEKLHSVLKPQVQKFLDYGFFYFNGSEVQRCQSGTVRTNCLDCLDRTNSVQAFLGLEMLAKQLEALGLAEKPQLVTRFQEVFRSMWSVNGDSISKIYAGTGALEGKAKLKDGARSVTRTIQNNFFDSSKQEAIDVLLLGNTLNSDLADKARALLTTGSLRVSEQTLQSASSKVLKSMCENFYKYSKPKKIRVCVGTWNVNGGKQFRSIAFKNQTLTDWLLDAPKLAGIQEFQDKRSKPTDIFAIGFEEMVELNAGNIVSASTTNQKLWAVELQKTISRDNKYVLLASEQLVGVCLFVFIRPQHAPFIRDVAVDTVKTGMGGATGNKGAVAIRMLFHTTSLCFVCSHFAAGQSQVKERNEDFIEIARKLSFPMGRMLFSHDYVFWCGDFNYRIDLPNEEVKELIRQQNWDSLIAGDQLINQKNAGQVFRGFLEGKVTFAPTYKYDLFSDDYDTSEKCRTPAWTDRVLWRRRKWPFDRSAEDLDLLNASFQDESKILYTWTPGTLLHYGRAELKTSDHRPVVALIDIDIFEVEAEERQNIYKEVIAVQGPPDGTVLVSIKSSLPENNFFDDALIDELLQQFASFGEVILIRFVEDKMWVTFLEGSSALNVLSLNGKELLNRTITIALKSPDWIKNLEEEMSLEKISIALPSSTSSTLLGEDAEVAADFDMEGDVDDYSAEVEELLPQHLQPSSSSGLGTSPSSSPRTSPCQSPTISEGPVPSLPIRPSRAPSRTPGPPSAQSSPIDAQPATPLPQKDPAQPLEPKRPPPPRPVAPPTRPAPPQRPPPPSGARSPAPTRKEFGAPKSPGTTRKDNIGRSQPSPQAGLAGPGPAGYSTARPTIPPRAGVISAPQSHARASAGRLTPESQSKTSETSKGSTFLPEPLKPQAAFPPQSSLPPPAQRLQEPLVPVAAPMPQSGPQPNLETPPQPPPRSRSSHSLPSEASSQPQQEQPSG

SEQ ID NO: 66031 - protein, 1526 aa, Homo sapiens
MAFSKGFRIYHKLDPPPFSLIVETRHKEECLMFESGAVAVLSSAEKEAIKGTYSKVLDAYGLLGVLRLNLGDTMLHYLVLVTGCMSVGKIQESEVFRVTSTEFISLRIDSSDEDRISEVRKVLNSGNFYFAWSASGISLDLSLNAHRSMQEQTTDNRFFWNQSLHLHLKHYGVNCDDWLLRLMCGGVEIRTIYAAHKQAKACLISRLSCERAGTRFNVRGTNDDGHVANFVETEQVVYLDDSVSSFIQIRGSVPLFWEQPGLQVGSHRVRMSRGFEANAPAFDRHFRTLKNLYGKQIIVNLLGSKEGEHMLSKAFQSHLKASEHAADIQMVNFDYHQMVKGGKAEKLHSVLKPQVQKFLDYGFFYFNGSEVQRCQSGTVRTNCLDCLDRTNSVQAFLGLEMLAKQLEALGLAEKPQLVTRFQEVFRSMWSVNGDSISKIYAGTGALEGKAKAGKLKDGARSVTRTIQNNFFDSSKQEAIDVLLLGNTLNSDLADKARALLTTGSLRASSKVLKSMCENFYKYSKPKKIRVCVGTWNVNGGKQFRSIAFKNQTLTDWLLDAPKLAGIQEFQDKRSKPTDIFAIGFEEMVELNAGNIVSASTTNQKLWAVELQKTISRDNKYVLLASEQLVGVCLFVFIRPQHAPFIRDVAVDTVKTGMGGATGNKGAVAIRMLFHTTSLCFVCSHFAAGQSQVKERNEDFIEIARKLSFPMGRMLFSHDYVFWCGDFNYRIDLPNEEVKELIRQQNWDSLIAGDQLINQKNAGQVFRGFLEGKVTFAPTYKYDLFSDDYDTSEKCRTPAWTDRVLWRRRKWPFDRSAEDLDLLNASFQDESKILYTWTPGTLLHYGRAELKTSDHRPVVALIDIDIFEVEAEERQNIYKEVIAVQGPPDGTVLVSIKSSLPENNFFDDALIDELLQQFASFGEVILIRFVEDKMWVTFLEGSSALNVLSLNGKELLNRTITIALKSPDWIKNLEEEMSLEKISIALPSSTSSTLLGEDAEVAADFDMEGDVDDYSAEVEELLPQHLQPSSSSGLGTSPSSSPRTSPCQSPTISEGPVPSLPIRPSRAPSRTPGPPSAQSSPIDAQPATPLPQKDPAQPLEPKRPPPPRPVAPPTRPAPPQRPPPPSGRSQPSPQAGLAGPGPAGYSTARPTIPPRAGVISAPQSHARASAGRLTPESQSKTSETSKGSTFLPEPLKPQAAFPPQSSLPPPAQRLQEPLVPVAAPMPQSGPQPNLETPPQPPPRSRSSHSLPSEASSQPQVKTNGISDGKRESPLKIDPFEDLSFNLLAVSKAQLSVQTSPVPTPDPKRLIQLPSATQSNVLSSVSCMPTMPPIPARSQSQENMRSSPNPFITGLTRTNPFSDRTAAPGNPFRAKSEESEATSWFSKEEPVTISPFPSLQPLGHNKSRASSSLDGFKDSFDLQGQSTLKISNPKGWVTFEEEEDFGVKGKSKSACSDLLGNQPSSFSGSNLTLNDDWNKGTNVSFCVLPSRRPPPPPVPLLPPGTSPPVDPFTTLASKASPTLDFTER

SEQ ID NO: 66032 - protein, 1350 aa, Homo sapiens
MRKRWACWSGSDAPGGCGGGCGRRRRRSRRKRAASEERRMAFSKGFRIYHKLDPPPFSLIVETRHKEECLMFESGAVAVLSSAEKEAIKGTYSKVLDAYGLLGVLRLNLGDTMLHYLVLVTGCMSVGKIQESEVFRVTSTEFISLRIDSSDEDRISEVRKVLNSGNFYFAWSASGISLDLSLNAHRSMQEQTTDNRFFWNQSLHLHLKHYGVNCDDWLLRLMCGGVEIRTIYAAHKQAKACLISRLSCERAGTRFNVRGTNDDGHVANFVETEQVVYLDDSVSSFIQIRGSVPLFWEQPGLQVGSHRVRMSRGFEANAPAFDRHFRTLKNLYGKQIIVNLLGSKEGEHMLSKAFQSHLKASEHAADIQMVNFDYHQMVKGGKAEKLHSVLKPQVQKFLDYGFFYFNGSEVQRCQSGTVRTNCLDCLDRTNSVQAFLGLEMLAKQLEALGLAEKPQLVTRFQEVFRSMWSVNGDSISKIYAGTGALEGKAKLKDGARSVTRTIQNNFFDSSKQEAIDVLLLGNTLNSDLADKARALLTTGSLRVSEQTLQSASSKVLKSMCENFYKYSKPKKIRVCVGTWNVNGGKQFRSIAFKNQTLTDWLLDAPKLAGIQEFQDKRSKPTDIFAIGFEEMVELNAGNIVSASTTNQKLWAVELQKTISRDNKYVLLASEQLVGVCLFVFIRPQHAPFIRDVAVDTVKTGMGGATGNKGAVAIRMLFHTTSLCFVCSHFAAGQSQVKERNEDFIEIARKLSFPMGRMLFSHDYVFWCGDFNYRIDLPNEEVKELIRQQNWDSLIAGDQLINQKNAGQVFRGFLEGKVTFAPTYKYDLFSDDYDTSEKCRTPAWTDRVLWRRRKWPFDRSAEDLDLLNASFQDESKILYTWTPGTLLHYGRAELKTSDHRPVVALIDIDIFEVEAEERQNIYKEVIAVQGPPDGTVLVSIKSSLPENNFFDDALIDELLQQFASFGEVILIRFVEDKMWVTFLEGSSALNVLSLNGKELLNRTITIALKSPDWIKNLEEEMSLEKISIALPSSTSSTLLGEDAEVAADFDMEGDVDDYSAEVEELLPQHLQPSSSSGLGTSPSSSPRTSPCQSPTISEGPVPSLPIRPSRAPSRTPGPPSAQSSPIDAQPATPLPQKDPAQPLEPKRPPPPRPVAPPTRPAPPQRPPPPSGARSPAPTRKEFGGIGAPPSPGVARREMEAPKSPGTTRKDNIGRSQPSPQAGLAGPGPAGYSTARPTIPPRAGVISAPQSHARASAGRLTPESQSKTSETSKGSTFLPEPLKPQAAFPPQSSLPPPAQRLQEPLVPVAAPMPQSGPQPNLETPPQPPPRSRSSHSLPSEASSQPQQEQPSG

SEQ ID NO: 66033 - protein, 1612 aa, Homo sapiens
MRKRWACWSGSDAPGGCGGGCGRRRRRSRRKRAASEERRMAFSKGFRIYHKLDPPPFSLIVETRHKEECLMFESGAVAVLSSAEKEAIKGTYSKVLDAYGLLGVLRLNLGDTMLHYLVLVTGCMSVGKIQESEVFRVTSTEFISLRIDSSDEDRISEVRKVLNSGNFYFAWSASGISLDLSLNAHRSMQEQTTDNRFFWNQSLHLHLKHYGVNCDDWLLRLMCGGVEIRTIYAAHKQAKACLISRLSCERAGTRFNVRGTNDDGHVANFVETEQVVYLDDSVSSFIQIRGSVPLFWEQPGLQVGSHRVRMSRGFEANAPAFDRHFRTLKNLYGKQIIVNLLGSKEGEHMLSKAFQSHLKASEHAADIQMVNFDYHQMVKGGKAEKLHSVLKPQVQKFLDYGFFYFNGSEVQRCQSGTVRTNCLDCLDRTNSVQAFLGLEMLAKQLEALGLAEKPQLVTRFQEVFRSMWSVNGDSISKIYAGTGALEGKAKLKDGARSVTRTIQNNFFDSSKQEAIDVLLLGNTLNSDLADKARALLTTGSLRVSEQTLQSASSKVLKSMCENFYKYSKPKKIRVCVGTWNVNGGKQFRSIAFKNQTLTDWLLDAPKLAGIQEFQDKRSKPTDIFAIGFEEMVELNAGNIVSASTTNQKLWAVELQKTISRDNKYVLLASEQLVGVCLFVFIRPQHAPFIRDVAVDTVKTGMGGATGNKGAVAIRMLFHTTSLCFVCSHFAAGQSQVKERNEDFIEIARKLSFPMGRMLFSHDYVFWCGDFNYRIDLPNEEVKELIRQQNWDSLIAGDQLINQKNAGQVFRGFLEGKVTFAPTYKYDLFSDDYDTSEKCRTPAWTDRVLWRRRKWPFDRSAEDLDLLNASFQDESKILYTWTPGTLLHYGRAELKTSDHRPVVALIDIDIFEVEAEERQNIYKEVIAVQGPPDGTVLVSIKSSLPENNFFDDALIDELLQQFASFGEVILIRFVEDKMWVTFLEGSSALNVLSLNGKELLNRTITIALKSPDWIKNLEEEMSLEKISIALPSSTSSTLLGEDAEVAADFDMEGDVDDYSAEVEELLPQHLQPSSSSGLGTSPSSSPRTSPCQSPTISEGPVPSLPIRPSRAPSRTPGPPSAQSSPIDAQPATPLPQKDPAQPLEPKRPPPPRPVAPPTRPAPPQRPPPPSGARSPAPTRKEFGGIGAPPSPGVARREMEAPKSPGTTRKDNIGRSQPSPQAGLAGPGPAGYSTARPTIPPRAGVISAPQSHARASAGRLTPESQSKTSETSKGSTFLPEPLKPQAAFPPQSSLPPPAQRLQEPLVPVAAPMPQSGPQPNLETPPQPPPRSRSSHSLPSEASSQPQVKTNGISDGKRESPLKIDPFEDLSFNLLAVSKAQLSVQTSPVPTPDPKRLIQLPSATQSNVLSSVSCMPTMPPIPARSQSQENMRSSPNPFITGLTRTNPFSDRTAAPGNPFRAKSEESEATSWFSKEEPVTISPFPSLQPLGHNKSRASSSLDGFKDSFDLQGQSTLKISNPKGWVTFEEEEDFGVKGKSKSACSDLLGNQPSSFSGSNLTLNDDWNKGTNVSFCVLPSRRPPPPPVPLLPPGTSPPVDPFTTLASKASPTLDFTER

SEQ ID NO: 66034 - protein, 1496 aa, Homo sapiens
MALSKGLRLLGRLGAEGDCSVLLEARGRDDCLLFEAGTVATLAPEEKEVIKGQYGKLTDAYGCLGELRLKSGGTSLSFLVLVTGCTSVGRIPDAEIYKITATDFYPLQEEAKEEERLIALKKILSSGVFYFSWPNDGSRFDLTVRTQKQGDDSSEWGNSFFWNQLLHVPLRQHQVSCCDWLLKIICGVVTIRTVYASHKQAKACLVSRVSCERTGTRFHTRGVNDDGHVSNFVETEQMIYMDDGVSSFVQIRGSVPLFWEQPGLQVGSHHLRLHRGLEANAPAFDRHMVLLKEQYGQQVVVNLLGSRGGEEVLNRAFKKLLWASCHAGDTPMINFDFHQFAKGGKLEKLETLLRPQLKLHWEDFDVFTKGENVSPRFQKGTLRMNCLDCLDRTNTVQSFIALEVLHLQLKTLGLSSKPIVDRFVESFKAMWSLNGHSLSKVFTGSRALEGKAKVGKLKDGARSMSRTIQSNFFDGVKQEAIKLLLVGDVYGEEVADKGGMLLDSTALLVTPRILKAMTERQSEFTNFKRIRIAMGTWNVNGGKQFRSNVLRTAELTDWLLDSPQLSGATDSQDDSSPADIFAVGFEEMVELSAGNIVNASTTNKKMWGEQLQKAISRSHRYILLTSAQLVGVCLYIFVRPYHVPFIRDVAIDTVKTGMGGKAGNKGAVGIRFQFHSTSFCFICSHLTAGQSQVKERNEDYKEITQKLCFPMGRNVFSHDYVFWCGDFNYRIDLTYEEVFYFVKRQDWKKLLEFDQLQLQKSSGKIFKDFHEGAINFGPTYKYDVGSAAYDTSDKCRTPAWTDRVLWWRKKHPFDKTAGELNLLDSDLDVDTKVRHTWSPGALQYYGRAELQASDHRPVLAIVEVEVQEVDVGARERVFQEVSSFQGPLDATVVVNLQSPTLEEKNEFPEDLRTELMQTLGSYGTIVLVRINQGQMLVTFADSHSALSVLDVDGMKVKGRAVKIRPKTKDWLKGLREEIIRKRDSMAPVSPTANSCLLEENFDFTSLDYESEGDILEDDEDYLVDEFNQPGVSDSELGGDDLSDVPGPTALAPPSKSPALTKKKQHPTYKDDADLVELKRELEAVGEFRHRSPSRSLSVPNRPRPPQPPQRPPPPTGLMVKKSASDASISSGTHGQYSILQTARLLPGAPQQPPKARTGISKPYNVKQIKTTNAQEAEAAIRCLLEARGGASEEALSAVAPRDLEASSEPEPTPGAAKPETPQAPPLLPRRPPPRVPAIKKPTLRRTGKPLSPEEQFEQQTVHFTIGPPETSVEAPPVVTAPRVPPVPKPRTFQPGKAAERPSHRKPASDEAPPGAGASVPPPLEAPPLVPKVPPRRKKSAPAAFHLQVLQSNSQLLQGLTYNSSDSPSGHPPAAGTVFPQGDFLSTSSATSPDSDGTKAMKPEAAPLLGDYQDPFWNLLHHPKLLNNTWLSKSSDPLDSGTRSPKRDPIDPVSAGASAAKAELPPDHEHKTLGHWVTISDQEKRTALQVFDPLAKT

SEQ ID NO: 66035 - protein, 581 aa, Homo sapiens
MQTLGSYGTIVLVRINQGQMLVTFADSHSALSVLDVDGMKVKGRAVKIRPKTKDWLKGLREEIIRKRDSMAPVSPTANSCLLEENFDFTSLDYESEGDILEDDEDYLVDEFNQPGVSDSELGGDDLSDVPGPTALAPPSKSPALTKKKQHPTYKDDADLVELKRELEAVGEFRHRSPSRSLSVPNRPRPPQPPQRPPPPTGLMVKKSASDASISSGTHGQYSILQTARLLPGAPQQPPKARTGISKPYNVKQIKTTNAQEAEAAIRCLLEARGGASEEALSAVAPRDLEASSEPEPTPGAAKPETPQAPPLLPRRPPPRVPAIKKPTLRRTGKPLSPEEQFEQQTVHFTIGPPETSVEAPPVVTAPRVPPVPKPRTFQPGKAAERPSHRKPASDEAPPGAGASVPPPLEAPPLVPKVPPRRKKSAPAAFHLQVLQSNSQLLQGLTYNSSDSPSGHPPAAGTVFPQGDFLSTSSATSPDSDGTKAMKPEAAPLLGDYQDPFWNLLHHPKLLNNTWLSKSSDPLDSGTRSPKRDPIDPVSAGASAAKAELPPDHEHKTLGHWVTISDQEKRTALQVFDPLAKT

SEQ ID NO: 66036 - protein, 136 aa, Homo sapiens
  VARIANT 1: note = MOD_RES - Any amino acid
XGRDDCLLFEAGTVATLAPEEKEVIKGQYGKLTDAYGCLGELRLKSGGTSLSFLVLVTGCTSVGRIPDAEIYKITATDFYPLQEEAKEEERLIALKKILSSGVFYFSWPNDGSRFDLTVRTQKQGDDSSEWGNSFF

SEQ ID NO: 66037 - protein, 1288 aa, Homo sapiens
MALSKGLRLLGRLGAEGDCSVLLEARGRDDCLLFEAGTVATLAPEEKEVIKGQYGKLTDAYGCLGELRLKSGGTSLSFLVLVTGCTSVGRIPDAEIYKITATDFYPLQEEAKEEERLIALKKILSSGVFYFSWPNDGSRFDLTVRTQKQGDDSSEWGNSFFWNQLLHVPLRQHQVSCCDWLLKIICGVVTIRTVYASHKQAKACLVSRVSCERTGTRFHTRGVNDDGHVSNFVETEQMIYMDDGVSSFVQIRGSVPLFWEQPGLQVGSHHLRLHRGLEANAPAFDRHMVLLKEQYGQQVVVNLLGSRGGEEVLNRAFKKLLWASCHAGDTPMINFDFHQFAKGGKLEKLETLLRPQLKLHWEDFDVFTKGENVSPRFQKGTLRMNCLDCLDRTNTVQSFIALEVLHLQLKTLGLSSKPIVDRFVESFKAMWSLNGHSLSKVFTGSRALEGKAKVGKLKDGARSMSRTIQSNFFDGVKQEAIKLLLVGDVYGEEVADKGGMLLDSTALLVTPRILKAMTERQSEFTNFKRIRIAMGTWNVNGGKQFRSNVLRTAELTDWLLDSPQLSGATDSQDDSSPADIFAVGFEEMVELSAGNIVNASTTNKKMWGEQLQKAISRSHRYILLTSAQLVGVCLYIFVRPYHVPFIRDVAIDTVKTGMGGKAGNKGAVGIRFQFHSTSFCFICSHLTAGQSQVKERNEDYKEITQKLCFPMGRNVFSHDYVFWCGDFNYRIDLTYEEVFYFVKRQDWKKLLEFDQLQLQKSSGKIFKDFHEGAINFGPTYKYDVGSAAYDTSDKCRTPAWTDRVLWWRKKHPFDKTAGELNLLDSDLDVDTKVRHTWSPGALQYYGRAELQASDHRPVLAIVEVEVQEVDVGARERVFQEVSSFQGPLDATVVVNLQSPTLEEKNEFPEDLRTELMQTLGSYGTIVLVRINQGQMLVTFADSHSALSVLDVDGMKVKGRAVKIRPKTKDWLKGLREEIIRKRDSMAPVSPTANSCLLEENFDFTSLDYESEGDILEDDEDYLVDEFNQPGVSDSELGGDDLSDVPGPTALAPPSKSPALTKKKQHPTYKDDADLVELKRELEAVGEFRHRSPSRSLSVPNRPRPPQPPQRPPPPTGLMVKKSASDASISSGTHGQYSILQTARLLPGAPQQPPKARTGISKPYNVKQIKTTNAQEAEAAIRCLLEARGGASEEALSAVAPRDLEASSEPEPTPGAAKPETPQAPPLLPRRPPPRVPAIKKPTLRRTGKIVFCSRSQASQPCLLLQRHEFVRTVAAQRLASVDTSGSSV

SEQ ID NO: 66038 - protein, 1451 aa, Homo sapiens
MALSKGLRLLGRLGAEGDCSVLLEARGRDDCLLFEAGTVATLAPEEKEVIKGQYGKLTDAYGCLGELRLKSGGTSLSFLVLVTGCTSVGRIPDAEIYKITATDFYPLQEEAKEEERLIALKKILSSGVFYFSWPNDGSRFDLTVRTQKQGDDSSEWGNSFFWNQLLHVPLRQHQVSCCDWLLKIICGVVTIRTVYASHKQAKACLVSRVSCERTGTRFHTRGVNDDGHVSNFVETEQMIYMDDGVSSFVQIRGSVPLFWEQPGLQVGSHHLRLHRGLEANAPAFDRHMVLLKEQYGQQVVVNLLGSRGGEEVLNRAFKKLLWASCHAGDTPMINFDFHQFAKGGKLEKLETLLRPQLKLHWEDFDVFTKGENVSPRFQKGTLRMNCLDCLDRTNTVQSFIALEVLHLQLKTLGLSSKPIVDRFVESFKAMWSLNGHSLSKVFTGSRALEGKAKVGKLKDGARSMSRTIQSNFFDGVKQEAIKLLLVGDVYGEEVADKGGMLLDSTALLVTPRILKAMTERQSEFTNFKRIRIAMGTWNVNGGKQFRSNVLRTAELTDWLLDSPQLSGATDSQDDSSPADIFAVGFEEMVELSAGNIVNASTTNKKMWGEQLQKAISRSHRYILLTSAQLVGVCLYIFVRPYHVPFIRDVAIDTVKTGMGGKAGNKGAVGIRFQFHSTSFCFICSHLTAGQSQVKERNEDYKEITQKLCFPMGRNVFSHDYVFWCGDFNYRIDLTYEEVFYFVKRQDWKKLLEFDQLQLQKSSGKIFKDFHEGAINFGPTYKYDVGSAAYDTSDKCRTPAWTDRVLWWRKKHPFDKTAGELNLLDSDLDVDTKVRHTWSPGALQYYGRAELQASDHRPVLAIVEVEVQEVDVGARERVFQEVSSFQGPLDATVVVNLQSPTLEEKNEFPEDLRTELMQTLGSYGTIVLVRINQGQMLVTFADSHSALSVLDVDGMKVKGRAVKIRPKTKDWLKGLREEIIRKRDSMAPVSPTANSCLLEENFDFTSLDYESEGDILEDDEDYLVDEFNQPGVSDSELGGDDLSDVPGPTALAPPSKSPALTKKKQHPTYKAGLMVKKSASDASISSGTHGQYSILQTARLLPGAPQQPPKARTGISKPYNVKQIKTTNAQEAEAAIRCLLEARGGASEEALSAVAPRDLEASSEPEPTPGAAKPETPQAPPLLPRRPPPRVPAIKKPTLRRTGKPLSPEEQFEQQTVHFTIGPPETSVEAPPVVTAPRVPPVPKPRTFQPGKAAERPSHRKPASDEAPPGAGASVPPPLEAPPLVPKVPPRRKKSAPAAFHLQVLQSNSQLLQGLTYNSSDSPSGHPPAAGTVFPQGDFLSTSSATSPDSDGTKAMKPEAAPLLGDYQDPFWNLLHHPKLLNNTWLSKSSDPLDSGTRSPKRDPIDPVSAGASAAKAELPPDHEHKTLGHWVTISDQEKRTALQVFDPLAKT

SEQ ID NO: 66039 - protein, 92 aa, Homo sapiens
MFLYASGPAPPAGTCRWGGQGGTSLSFLVLVTGCTSVGRIPDAEIYKITATDFYPLQEEAKEEERLIALKKILSSGVFYFSWPNDGSRFDLT

SEQ ID NO: 66040 - protein, 516 aa, Homo sapiens
MFLYASGPAPPAGTCRWGGQGGTSLSFLVLVTGCTSVGRIPDAEIYKITATDFYPLQEEAKEEERLIALKKILSSGVFYFSWPNDGSRFDLTVRTQKQGDDSSEWGNSFFWNQLLHVPLRQHQVSCCDWLLKIICGVVTIRTVYASHKQAKACLVSRVSCERTGTRFHTRGVNDDGHVSNFVETEQMIYMDDGVSSFVQIRGSVPLFWEQPGLQVGSHHLRLHRGLEANAPAFDRHMVLLKEQYGQQVVVNLLGSRGGEEVLNRAFKFAKGGKLEKLETLLRPQLKLHWEDFDVFTKGENVSPRFQKGTLRMNCLDCLDRTNTVQSFIALEVLHLQLKTLGLSSKPIVDRFVESFKAMWSLNGHSLSKVFTGSRALEGKAKVGKLKDGARSMSRTIQSNFFDGVKQEAIKLLLVGDVYGEEVADKGGMLLDSTALLVTPRILKAMTERQSEFTNFKRIRIAMGTWNVNGGKQFRSNVLRTAELTDWLLDSPQLSGATDSQGEGSDFGGDKIQLHLT

SEQ ID NO: 66041 - protein, 145 aa, Homo sapiens
MNGRVDYLVTEEEINLTRGPSGLGFNIVGGTDQQYVSNDSGIYVSRIKENGAAALDGRLQEGDKILSVNGQDLKNLLHQDAVDLFRNAGYAVSLRVQHRLQVQNGPIGHRGEGDPSGIPIFMVLVPVFALTMVAAWAFMRYRQQL

SEQ ID NO: 66042 - protein, 318 aa, Homo sapiens
MAGRSLTSKAEPTAGAVDRAEKAGGQDTSSQKIEDLMEMVQKLQKVGSLEPRVEVLINRINEVQQAKKKANKDLGEARTICEALQKELDSLHGEKVHLKEILSKKQETLRILRLHCQEKESEAHRKHTMLQECKERISALNLQIEEEKNKQRQLRLAFEEQLEDLMGQHKDLWDFHMPERLAKEICALDSSKEQLLKEEKLVKATLEDVKHQLCSLCGAEGPSTLDEGLFLRSQEAAATVQLFQEEHRKAEELLAAAAQRHQQLQQKCQQQQQKRQRLKEELEKHGMQVPAQAQSTQEEEAGPGDVAPRPGRPVTWWS

SEQ ID NO: 66043 - protein, 351 aa, Homo sapiens
MAGRSLTSKAEPTAGAVDRAEKAGGQDTSSQKIEDLMEMVQKLQKVGSLEPRVEVLINRINEVQQAKKKANKDLGEARTICEALQKELDSLHGEKVHLKEILSKKQETLRILRLHCQEKESEAHRKHTMLQECKERISALNLQIEEEKNKQRQLRLAFEEQLEDLMGQHKDLWDFHMPERLAKEICALDSSKEQLLKEEKLVKATLEDVKHQLCSLCGAEGPSTLDEGLFLRSQEAAATVQLFQEEHRKAEELLAAAAQRHQQLQQKCQQQQQKRQRLKEELEKHGMQVPAQAQSTQEEEAGPGDVASPKPLKGERPGAAHQAGPDVLIGQEDTLHPDLSPRGFQEIKELF

SEQ ID NO: 66044 - protein, 282 aa, Homo sapiens
MEMVQKLQKVGSLEPRVEVLINRINEVQQAKKKANKDLGEARTICEALQKELDSLHGEKVHLKEILSKKQETLRILRLHCQEKESEAHRKHTMLQECKERISALNLQIEEEKNKQRQLRLAFEEQLEDLMGQHKDLWDFHMPERLAKEICALDSSKEQLLKEEKLVKATLEDVKHQLCSLCGAEGPSTLDEGLFLRSQEAAATVQLFQEEHRKAEELLAAAAQRHQQLQQKCQQQQQKRQRLKEELEKHGMQVPAQAQSTQEEEAGPGDVAPRPGRPVTWWS

SEQ ID NO: 66045 - protein, 282 aa, Homo sapiens; identical to SEQ ID NO: 66044

SEQ ID NO: 66046 - protein, 218 aa, Homo sapiens
MERQGVDVPHVKCKDQEPQPLGESKEHPRWEENCEEEAGGGPASASCQLTVLEGKSGLYFSSLDSSIDILQKRAQELIENINKSRQKDHALMTNFRNSLKTKVSDLTEKLEERIYQIYNDHNKIIQEKLQEFTQKMAKISHLETELKQVCHSVETVYKDLCLQPEQSLRLRWGPDHSRGKSPPRPGNSQPPDVFVSSVAETTSQATASEVQTNRDGEC

SEQ ID NO: 66047 - protein, 976 aa, Homo sapiens
MEKQKPFALFVPPRSSSSQVSAVKPQTLGGDSTFFKSFNKCTEDDFEFPFAKTNLSKNGENIDSDPALQKVNFLPVLEQVGNSDCHYQEGLKDSDLENSEGLSRVYSKLYKEAEKIKKWKVSTEAELRQKESKLQENRKIIEAQRKAIQELQFGNEKVSLKLEEGIQENKDLIKENNATRHLCNLLKETCARSAEKTKKYEYEREETRQVYMDLNNNIEKMITAFEELRVQAENSRLEMHFKLKEDYEKIQHLEQEYKKEINDKEKQVSLLLIQITEKENKMKDLTFLLEESRDKVNQLEEKTKLQSENLKQSIEKQHHLTKELEDIKVSLQRSVSTQKALEEDLQIATKTICQLTEEKETQMEESNKARAAHSFVVTEFETTVCSLEELLRTEQQRLEKNEDQLKILTMELQKKSSELEEMTKLTNNKEVELEELKKVLGEKETLLYENKQFEKIAEELKGTEQELIGLLQAREKEVHDLEIQLTAITTSEQYYSKEVKDLKTELENEKLKNTELTSHCNKLSLENKELTQETSDMTLELKNQQEDINNNKKQEERMLKQIENLQETETQLRNELEYVREELKQKRDEVKCKLDKSEENCNNLRKQVENKNKYIEELQQENKALKKKGTAESKQLNVYEIKVNKLELELESAKQKFGEITDTYQKEIEDKKISEENLLEEVEKAKVIADEAVKLQKEIDKRCQHKIAEMVALMEKHKHQYDKIIEERDSELGLYKSKEQEQSSLRASLEIELSNLKAELLSVKKQLEIEREEKEKLKREAKENTATLKEKKDKKTQTFLLETPEIYWKLDSKAVPSQTVSRNFTSVDHGISKDKRDYLWTSAKNTLSTPLPKAYTVKTPTKPKLQQRENLNIPIEESKKKRKMAFEFDINSDSSETTDLLSMVSEEETLKTLYRNNNPPASHLCVKTPKKAPSSLTTPGSTLKFGAIRKMREDRWAVIAKMDRKKKLKEAEKLFV

SEQ ID NO: 66048 - protein, 976 aa, Homo sapiens; identical to SEQ ID NO: 66047

SEQ ID NO: 66049 - protein, 792 aa, Homo sapiens
MEKQKPFALFVPPRSSSSQVSAVKPQTLGGDSTFFKSFNKCTEDDFEFPFAKTNLSKNGENIDSDPALQKVNFLPVLEQVGNSDCHYQEGLKDSDLENSEGLSRVYSKLYKEAEKIKKWKVSTEAELRQKESKLQENRKIIEAQRKAIQELQFGNEKVSLKLEEGIQENKDLIKENNATRHLCNLLKETCARSAEKTKKYEYEREETRQVYMDLNNNIEKMITAFEELRVQAENSRLEMHFKLKEDYEKIQHLEQEYKKEINDKEKQVSLLLIQITEKENKMKDLTFLLEESRDKVNQLEEKTKLQSENLKQSIEKQHHLTKELEDIKVSLQRSVSTQKALEEDLQIATKTICQLTEEKETQMEESNKARAAHSFVVTEFETTVCSLEELLRTEQQRLEKNEDQLKILTMELQKKSSELEEMTKLTNNKEVELEELKKVLGEKETLLYENKQFEKIAEELKGTEQELIGLLQAREKEVHDLEIQLTAITTSEQYYSKEVKDLKTELENEKLKNTELTSHCNKLSLENKELTQETSDMTLELKNQQEDINNNKKQEERMLKQIENLQETETQLRNELEYVREELKQKRDEVKCKLDKSEENCNNLRKQVENKNKYIEELQQENKALKKKGTAESKQLNVYEIKVNKLELELESAKQKFGEITDTYQKEIEDKKISEENLLEEVEKAKVIADEAVKLQKEIDKRCQHKIAEMVALMEKHKHQYDKIIEERDSELGLYKSKEQEQSSLRASLEIELSNLKAELLSVKKQLEIEREEKEKLKREAKENTATLKEKK

SEQ ID NO: 66050 - protein, 795 aa, Homo sapiens
MEKQKPFALFVPPRSSSSQVSAVKPQTLGGDSTFFKSFNKCTEDDFEFPFAKTNLSKNGENIDSDPALQKVNFLPVLEQVGNSDCHYQEGLKDSDLENSEGLSRVYSKLYKEAEKIKKWKVSTEAELRQKESKLQENRKIIEAQRKAIQELQFGNEKVSLKLEEGIQENKDLIKENNATRHLCNLLKETCARSAEKTKKYEYEREETRQVYMDLNNNIEKMITAFEELRVQAENSRLEMHFKLKEDYEKIQHLEQEYKKEINDKEKQVSLLLIQITEKENKMKDLTFLLEESRDKVNQLEEKTKLQSENLKQSIEKQHHLTKELEDIKVSLQRSVSTQKALEEDLQIATKTICQLTEEKETQMEESNKARAAHSFVVTEFETTVCSLEELLRTEQQRLEKNEDQLKILTMELQKKSSELEEMTKLTNNKEVELEELKKVLGEKETLLYENKQFEKIAEELKGTEQELIGLLQAREKEVHDLEIQLTAITTSEQYYSKEVKDLKTELENEKLKNTELTSHCNKLSLENKELTQETSDMTLELKNQQEDINNNKKQEERMLKQIENLQETETQLRNELEYVREELKQKRDEVKCKLDKSEENCNNLRKQVENKNKYIEELQQENKALKKKGTAESKQLNVYEIKVNKLELELESAKQKFGEITDTYQKEIEDKKISEENLLEEVEKAKVIADEAVKLQKEIDKRCQHKIAEMVALMEKHKHQYDKIIEERDSELGLYKSKEQEQSSLRASLEIELSNLKAELLSVKKQLEIEREEKEKLKREAKENTATLKEKKDKK

SEQ ID NO: 66051 - protein, 1530 aa, Homo sapiens
MPIRPDLQQLEKCIDDALRKNDFKPLKTLLQIDICEDVKIKCSKQFFHKVDNLICRELNKEDIHNVSAILVSVGRCGKNISVLGQAGLLTMIKQGLIQKMVAWFEKSKDIIQSQGNSKDEAVLNMIEDLVDLLLVIHDVSDEGKKQVVESFVPRICSLVIDSRVNICIQQEIIKKMNAMLDKMPQDARKILSNQEMLILMSSMGERILDAGDYDLQVGIVEALCRMTTEKQRQELAHQWFSMDFIAKAFKRIKDSEFETDCRIFLNLVNGMLGDKRRVFTFPCLSAFLDKYELQIPSDEKLEEFWIDFNLGSQTLSFYIAGDNDDHQWEAVTVPEEKVQIYSIEVRESKKLLTIILKNTVKISKREGKELLLYFDASLEITNVTQKIFGATKHRESIRKQGISVAKTSLHILFDASGSQILVPESQISPVGEELVSLKEKSKSPKEFAKPSKYIKNSDKGNRNNSQLEKTTPSKRKMSEASMIVSGADRYTMRSPVLFSNTSIPPRRRRIKPPLQMTSSAEKPSVSQTSENRVDNAASLKSRSSEGRHRRDNIDKHIKTAKCVENTENKNVEFPNQNFSELQDVIPDSQAAEKRDHTILPGVLDNICGNKIHSKWACWTPVTNIELCNNQRASTSSGDTLNQDIVINKKLTKQKSSSSISDHNSEGTGKVKYKKEQTDHIKIDKAEVEVCKKHNQQQNHPKYSGQKNTENAKQSDWPVESETTFKSVLLNKTIEESLIYRKKYILSKDVNTATCDKNPSASKNVQSHRKAEKELTSELNSWDSKQKKMREKSKGKEFTNVAESLISQINKRYKTKDDIKSTRKLKESLINSGFSNKPVVQLSKEKVQKKSYRKLKTTFVNVTSECPVNDVYNFNLNGADDPIIKLGIQEFQATAKEACADRSIRLVGPRNHDELKSSVKTKDKKIITNHQKKNLFSDTETEYRCDDSKTDISWLREPKSKPQLIDYSRNKNVKNHKSGKSRSSLEKGQPSSKMTPSKNITKKMDKTIPEGRIRLPRKATKTKKNYKDLSNSESECEQEFSHSFKENIPVKEENIHSRMKTVKLPKKQQKVFCAETEKELSKQWKNSSLLKDAIRDNCLDLSPRSLSGSPSSIEVTRCIEKITEKDFTQDYDCITKSISPYPKTSSLESLNSNSGVGGTIKSPKNNEKNFLCASESCSPIPRPLFLPRHTPTKSNTIVNRKKISSLVLTQETQNSNSYSDVSSYSSEERFMEIESPHINENYIQSKREESHLASSLSKSSEGREKTWFDMPCDATHVSGPTQHLSRKRIYIEDNLSNSNEVEMEEKGERRANLLPKKLCKIEDADHHIHKMSESVSSLSTNDFSIPWETWQNEFAGIEMTYETYERLNSEFKRRNNIRHKMLSYFTTQSWKTAQQHLRTMNHQSQDSRIKKLDKFQFIIIEELENFEKDSQSLKDLEKEFVDFWEKIFQKFSAYQKSEQQRLHLLKTSLAKSVFCNTDSEETVFTSEMCLMKEDMKVLQDRLLKDMLEEELLNVRRELMSVFMSHERNANV

SEQ ID NO: 66052 - protein, 1530 aa, Homo sapiens; identical to SEQ ID NO: 66051

SEQ ID NO: 66053 - protein, 1023 aa, Homo sapiens
MPIRPDLQQLEKCIDDALRKNDFKPLKTLLQIDICEDVKIKCSKQFFHKVDNLICRELNKEDIHNVSAILVSVGRCGKNISVLGQAGLLTMIKQGLIQKMVAWFEKSKDIIQSQGNSKDEAVLNMIEDLVDLLLVIHDVSDEGKKQVVESFVPRICSLVIDSRVNICIQQEIIKKMNAMLDKMPQDARKILSNQEMLILMSSMGERILDAGDYDLQVGIVEALCRMTTEKQRQELAHQWFSMDFIAKAFKRIKDSEFETDCRIFLNLVNGMLGDKRRVFTFPCLSAFLDKYELQIPSDEKLEEFWIDFNLGSQTLSFYIAGDNDDHQWEAVTVPEEKVQIYSIEVRESKKLLTIILKNTVKISKREGKELLLYFDASLEITNVTQKIFGATKHRESIRKQGISVAKTSLHILFDASGSQILVPESQISPVGEELVSLKEKSKSPKEFAKPSKYIKNSDKGNRNNSQLEKTTPSKRKMSEASMIVSGADRYTMRSPVLFSNTSIPPRRRRIKPPLQMTSSAEKPSVSQTSENRVDNAASLKSRSSEGRHRRDNIDKHIKTAKCVENTENKNVEFPNQNFSELQDVIPDSQAAEKRDHTILPGVLDNICGNKIHSKWACWTPVTNIELCNNQRASTSSGDTLNQDIVINKKLTKQKSSSSISDHNSEGTGKVKYKKEQTDHIKIDKAEVEVCKKHNQQQNHPKYSGQKNTENAKQSDWPVESETTFKSVLLNKTIEESLIYRKKYILSKDVNTATCDKNPSASKNVQSHRKAEKELTSELNSWDSKQKKMREKSKGKEFTNVAESLISQINKRYKTKDDIKSTRKLKESLINSGFSNKPVVQLSKEKVQKKSYRKLKTTFVNVTSECPVNDVYNFNLNGADDPIIKLGIQEFQATAKEACADRSIRLVGPRNHDELKSSVKTKDKKIITNHQKKNLFSDTETEYRCDDSKTDISWLREPKSKPQLIDYSRNKNVKNHKSGKSRSSLEKGQPSSKMTPSKNITKKMDKTIPEGRIRLPRKATKTKK

SEQ ID NO: 66054 - protein, 236 aa, Homo sapiens
MVSSGKKYSRKSGKPSVEDQFTRAYDFETEDKKDLSGSEEDVIEGKTAVIEKRRKKRSSAGVVEDMGGEVQNMLEGVGVDINKALLAKRKRLEMYTKASLKTSNQKIEHVWKTQQDQRQKLNQEYSQQFLTLFQQWDLDMQKAEEQEEKILNMFRQQQKILQQSRIVQSQRLKTIKQLYEQFIKSMEELEKNHDNLLTGAQNEFKKEMAMLQKKIMMETQQQEIASVRKSLQSMLF

SEQ ID NO: 66055 - protein, 236 aa, Homo sapiens; identical to SEQ ID NO: 66054

SEQ ID NO: 66056 - protein, 236 aa, Homo sapiens; identical to SEQ ID NO: 66054

SEQ ID NO: 66057 - protein, 313 aa, Homo sapiens
MLLLADMDVVNQLVAGGQFRVVKEPLGFVKVLQWVFAIFAFATCGSYSGELQLSVDCANKTESDLSIEVEFEYPFRLHQVYFDAPTCRGGTTKVFLVGDYSSSAEFFVTVAVFAFLYSMGALATYIFLQNKYRENNKGPMLDFLATAVFAFMWLVSSSAWAKGLSDVKMATDPENIIKEMPVCRQTGNTCKELRDPVTSGLNTSVVFGFLNLVLWVGNLWFVFKETGWAAPFLRAPPGAPEKQPAPGDAYGDAGYGQGPGGYGPQDSYGPQGGYQPDYGQPAGSGGSGYGPQGDYGQQGYGPQGAPTSFSNQM

SEQ ID NO: 66058 - protein, 313 aa, Homo sapiens; identical to SEQ ID NO: 66057

SEQ ID NO: 66059 - protein, 195 aa, Homo sapiens
MGALATYIFLQNKYRENNKGPMLDFLATAVFAFMWLVSSSAWAKGLSDVKMATDPENIIKEMPVCRQTGNTCKELRDPVTSGLNTSVVFGFLNLVLWVGNLWFVFKETGWAAPFLRAPPGAPEKQPAPGDAYGDAGYGQGPGGYGPQDSYGPQGGYQPDYGQPAGSGGSGYGPQGDYGQQGYGPQGAPTSFSNQM

SEQ ID NO: 66060 - protein, 903 aa, Homo sapiens
MEGYSEEASLLRHLEKVASEEEEVPLVVYLKENAALLTANGLHLSQNREAQQSSPAPPPAEVHSPAADVNQNLASPSATLTTPTSNSSHNPPATDVNQNPPATVVPQSLPLSSIQQNSSEAQLPSNGTGPASKPSTLCADGQPQAPAEEVRCSTLLIDKVSTPATTTSTFSREATLIPSSRPPASDFMSSSLLIDIQPNTLVVSADQEMSGRAAATTPTKVYSEVHFTLAKPPSVVNRTARPFGIQAPGGTSQMERSPMLERRHFGEKAPAPQPPSLPDRSPRPQRHIMSRSPMVERRMMGQRSPASERRPLGNFTAPPTYTETLSTAPLASWVRSPPSYSVLYPSSDPKSSHLKGQAVPASKTGILEESMARRGSRKSMFTFVEKPKVTPNPDLLDLVQTADEKRRQRDQGEVGVEEEPFALGAEASNFQQEPAPRDRASPAAAEEVVPEWASCLKSPRIQAKPKPKPNQNLSEASGKGAELYARRQSRMEKYVIESSSHTPELARCPSPTMSLPSSWKYPTNAPGAFRVASRSPARTPPASLYHGYLPENGVLRPEPTKQPPYQLRPSLFVLSPIKEPAKVSPRAASPAKPSSLDLVPNLPKGALPPSPALPRPSRSSPGLYTSPGQDSLQPTAVSPPYGGDISPVSPSRAWSPRAKQAPRPSFSTRNAGIEAQDRRESLPTSPPWTPGASRPPSSLDGWVSPGPWEPGRGSSMSSPPPLPPPPPMSPSWSERSVSPLRPETEARPPSRQLQALLARNIINAARRKSASPRSAGAENPRPFSPPRAPPPPPPPPPPPPRMRSPQPARPGSAAVPGAAFAPIPRSPLPAGPSSCTSPRSPLPAPPRPFLYRRSPTDSDVSLDSEDSGAKSPGILGYNICPRGWNGSLRLKRGSLPAEASCTT

SEQ ID NO: 66061 - protein, 929 aa, Homo sapiens
MLGPHLPPPPLAPSEGRPTPCAFQIPDGSYRCLALEAEESSGEEGLQGEVGPTDLEEDEGVSRSGDDSACRVTQGTPQLPKALGIQPPSCSREEQGASQHDDRASQDWDVVKAGQMMTASPSPGPGPRVAQKPALGRSTSLTEKDLKEAKARSQQIAAQLTTPPSSNSRGVQLFNRRRQRVNEFTLESHGQRGQKPSQESLRVLPSSLPGHAPGLSLSSTSLPEPGPPRHPSPQSPDRGVPGHSMEGYSEEASLLRHLEKVASEEEEVPLVVYLKENAALLTANGLHLSQNREAQQSSPAPPPAEVHSPAADVNQNLASPSATLTTPTSNSSHNPPATDVNQNPPATVVPQSLPLSSIQQNSSEAQLPSNGTGPASKPSTLCADGQPQAPAEEVRCSTLLIDKVSTPATTTSTFSREATLIPSSRPPASDFMSSSLLIDIQPNTLVVSADQEMSGRAAATTPTKVYSEVHFTLAKPPSVVNRTARPFGIQAPGGTSQMERSPMLERRHFGEKAPAPQPPSLPDRSPRPQRHIMSRSPMVERRMMGQRSPASERRPLGNFTAPPTYTETLSTAPLASWVRSPPSYSVLYPSSDPKSSHLKGQAVPASKTGILEESMARRGSRKSMFTFVEKPKVTPNPDLLDLVQTADEKRRQRDQGEVGVEEEPFALGAEASNFQQEPAPRDRASPAAAEEVVPEWASCLKSPRIQAKPKPKPNQNLSEASGKGAELYARRQSRMEKYVIESSSHTPELARCPSPTMSLPSSWKYPTNAPGAFRVASRSPARTPPASLYHGYLPENGVLRPEPTKQPPYQLRPSLFVLSPIKEPAKVSPRAASPAKPSSLDLVPNLPKGALPPSPALPRPSRSSPGLYTSPGQDSLQPTAVSPPYGGDISPVSPSRAWSPRAKQAPRPSFSTRNAGIEAQVWKPSFCFK

SEQ ID NO: 66062 - protein, 685 aa, Homo sapiens
MEGYSEEASLLRHLEKVASEEEEVPLVVYLKENAALLTANGLHLSQNREAQQSSPAPPPAEVHSPAADVNQNLASPSATLTTPTSNSSHNPPATDVNQNPPATVVPQSLPLSSIQQNSSEAQLPSNGTGPASKPSTLCADGQPQAPAEEVRCSTLLIDKVSTPATTTSTFSREATLIPSSRPPASDFMSSSLLIDIQPNTLVVSADQEMSGRAAATTPTKVYSEVHFTLAKPPSVVNRTARPFGIQAPGGTSQMERSPMLERRHFGEKAPAPQPPSLPDRSPRPQRHIMSRSPMVERRMMGQRSPASERRPLGNFTAPPTYTETLSTAPLASWVRSPPSYSVLYPSSDPKSSHLKGQAVPASKTGILEESMARRGSRKSMFTFVEKPKVTPNPDLLDLVQTADEKRRQRDQGEVGVEEEPFALGAEASNFQQEPAPRDRASPAAAEEVVPEWASCLKSPRIQAKPKPKPNQNLSEASGKGAELYARRQSRMEKYVIESSSHTPELARCPSPTMSLPSSWKYPTNAPGAFRVASRSPARTPPASLYHGYLPENGVLRPEPTKQPPYQLRPSLFVLSPIKEPAKVSPRAASPAKPSSLDLVPNLPKGALPPSPALPRPSRSSPGLYTSPGQDSLQPTAVSPPYGGDISPVSPSRAWSPRAKQAPRPSFSTRNAGIEAQVWKPSFCFK

SEQ ID NO: 66063 - protein, 929 aa, Homo sapiens; identical to SEQ ID NO: 66061

SEQ ID NO: 66064 - protein, 211 aa, Homo sapiens
MDNLSSEEIQQRAHQITDESLESTRRILGLAIESQDAGIKTITMLDEQKEQLNRIEEGLDQINKDMRETEKTLTELNKCCGLCVCPCNRTKNFESGKAYKTTWGDGGENSPCNVVSKQPGPVTNGQLQQPTTGAASGGYIKRITNDAREDEMEENLTQVGSILGNLKDMALNIGNEIDAQNPQIKRITDKADTNRDRIDIANARAKKLIDS

SEQ ID NO: 66065 - protein, 158 aa, Homo sapiens
MDNLSSEEIQQRAHQITDESLESTRRILGLAIESQDAGIKTITMLDEQKEQLNRIEEGLDQINKDMRETEKTLTELNKCCGLCVCPCNSITNDAREDEMEENLTQVGSILGNLKDMALNIGNEIDAQNPQIKRITDKADTNRDRIDIANARAKKLIDS

SEQ ID NO: 66066 - protein, 158 aa, Homo sapiens; identical to SEQ ID NO: 66065

SEQ ID NO: 66067 - protein, 206 aa, Homo sapiens
MAEDADMRNELEEMQRRADQLADESLESTRRMLQLVEESKDAGIRTLVMLDEQGEQLERIEEGMDQINKDMKEAEKNLTDLGKFCGLCVCPCNKLKSSDAYKKAWGNNQDGVVASQPARVVDEREQMAISGGFIRRVTNDARENEMDENLEQVSGIIGNLRHMALDMGNEIDTQNRQIDRIMEKADSNKTRIDEANQRATKMLGSG

SEQ ID NO: 66068 - protein, 206 aa, Homo sapiens
MAEDADMRNELEEMQRRADQLADESLESTRRMLQLVEESKDAGIRTLVMLDEQGEQLDRVEEGMNHINQDMKEAEKNLKDLGKCCGLFICPCNKLKSSDAYKKAWGNNQDGVVASQPARVVDEREQMAISGGFIRRVTNDARENEMDENLEQVSGIIGNLRHMALDMGNEIDTQNRQIDRIMEKADSNKTRIDEANQRATKMLGSG

SEQ ID NO: 66069 - protein, 93 aa, Homo sapiens
MAEDADMRNELEEMQRRADQLADESLESTRRMLQLVEESKDAGIRTLVMLDEQGEQLERIEEGMDQINKDMKEAEKNLTDLGKFCGLCVCPCN

SEQ ID NO: 66070 - protein, 258 aa, Homo sapiens
MSAYPKSYNPFDDDGEDEGARPAPWRDARDLPDGPDAPADRQQYLRQEVLRRAEATAASTSRSLALMYESEKVGVASSEELARQRGVLERTEKMVDKMDQDLKISQKHINSIKSVFGGLVNYFKSKPVETPPEQNGTLTSQPNNRLKEAISTSKEQEAKYQASHPNLRKLDDTDPVPRGAGSAMSTDAYPKNPHLRAYHQKIDSNLDELSMGLGRLKDIALGMQTEIEEQDDILDRLTTKVDKLDVNIKSTERKVRQL

SEQ ID NO: 66071 - protein, 422 aa, Homo sapiens
MVSESHHEALAAPPVTTVATVLPSNATEPASPGEGKEDAFSKLKEKFMNELHKIPLPPWALIAIAIVAVLLVLTCCFCICKKCLFKKKNKKKGKEKGGKNAINMKDVKDLGKTMKDQALKDDDAETGLTDGEEKEEPKEEEKLGKLQYSLDYDFQNNQLLVGIIQAAELPALDMGGTSDPYVKVFLLPDKKKKFETKVHRKTLNPVFNEQFTFKVPYSELGGKTLVMAVYDFDRFSKHDIIGEFKVPMNTVDFGHVTEEWRDLQSAEKEEQEKLGDICFSLRYVPTAGKLTVVILEAKNLKKMDVGGLSDPYVKIHLMQNGKRLKKKKTTIKKNTLNPYYNESFSFEVPFEQIQKVQVVVTVLDYDKIGKNDAIGKVFVGYNSTGAELRHWSDMLANPRRPIAQWHTLQVEEEVDAMLAVKK

SEQ ID NO: 66072 - protein, 422 aa, Homo sapiens; identical to SEQ ID NO: 66071

SEQ ID NO: 66073 - protein, 182 aa, Homo sapiens
MVSESHHEALAAPPVTTVATVLPSNATEPASPGEGKEDAFSKLKEKFMNELHKIPLPPWALIAIAIVAVLLVLTCCFCICKKCLFKKKNKKKGKEKGGKNAINMKDVKDLGKTMKDQALKDDDAETGLTDGEEKEEPKEEEKLGKLQYSLDYDFQNNQLLVGIIQAAELPALDMGGTSDPYV

SEQ ID NO: 66074 - protein, 58 aa, Homo sapiens
MVSESHHEALAAPPVTTVATVLPSNATEPASPGEGKEDAFSKLKEKFMNELHKIPLPP

SEQ ID NO: 66075 - protein, 72 aa, Homo sapiens
MVSESHHEALAAPPVTTVATVLPSNATEPASPGEGKEDAFSKLKEKFMNELHKIPLPPWALIAIAIVAVLLV

SEQ ID NO: 66076 - protein, 73 aa, Homo sapiens
MVSESHHEALAAPPVTTVATVLPSNATEPASPGEGKEDAFSKLKEKFMNELHKIPLPPWALIAIAIVAVLLVL

SEQ ID NO: 66077 - protein, 94 aa, Homo sapiens
MVSESHHEALAAPPVTTVATVLPSNATEPASPGEGKEDAFSKLKEKFMNELHKIPLPPWALIAIAIVAVLLVLTCCFCICKKCLFKKKNKKKGK

SEQ ID NO: 66078 - protein, 422 aa, Homo sapiens; identical to SEQ ID NO: 66071

SEQ ID NO: 66079 - protein, 590 aa, Homo sapiens
MSGDYEDDLCRRALILVSDLCARVRDADTNDRCQEFNDRIRGYPRGPDADISVSLLSVIVTFCGIVLLGVSLFVSWKLCWVPWRDKGGSAVGGGPLRKDLGPGVGLAGLVGGGGHHLAAGLGGHPLLGGPHHHAHAAHHPPFAELLEPGSLGGSDTPEPSYLDMDSYPEAAAAAVAAGVKPSQTSPELPSEGGAGSGLLLLPPSGGGLPSAQSHQQVTSLAPTTRYPALPRPLTQQTLTSQPDPSSEERPPALPLPLPGGEEKAKLIGQIKPELYQGTGPGGRRSGGGPGSGEAGTGAPCGRISFALRYLYGSDQLVVRILQALDLPAKDSNGFSDPYVKIYLLPDRKKKFQTKVHRKTLNPVFNETFQFSVPLAELAQRKLHFSVYDFDRFSRHDLIGQVVLDNLLELAEQPPDRPLWRDIVEGGSEKADLGELNFSLCYLPTAGRLTVTIIKASNLKAMDLTGFSDPYVKASLISEGRRLKKRKTSIKKNTLNPTYNEALVFDVAPESVENVGLSIAVVDYDCIGHNEVIGVCRVGPDAADPHGREHWAEMLANPRKPVEHWHQLVEEKTVTSFTKGSKGLSEKENSE

SEQ ID NO: 66080 - protein, 590 aa, Homo sapiens; identical to SEQ ID NO: 66079

SEQ ID NO: 66081 - protein, 590 aa, Homo sapiens; identical to SEQ ID NO: 66079

SEQ ID NO: 66082 - protein, 590 aa, Homo sapiens; identical to SEQ ID NO: 66079

SEQ ID NO: 66083 - protein, 425 aa, Homo sapiens
MAPITTSREEFDEIPTVVGIFSAFGLVFTVSLFAWICCQRKSSKSNKTPPYKFVHVLKGVDIYPENLNSKKKFGADDKNEVKNKPAVPKNSLHLDLEKRDLNGNFPKTNLKPGSPSDLENATPKLFLEGEKESVSPESLKSSTSLTSEEKQEKLGTLFFSLEYNFERKAFVVNIKEARGLPAMDEQSMTSDPYIKMTILPEKKHKVKTRVLRKTLDPAFDETFTFYGIPYTQIQELALHFTILSFDRFSRDDIIGEVLIPLSGIELSEGKMLMNREIIKRNVRKSSGRGELLISLCYQSTTNTLTVVVLKARHLPKSDVSGLSDPYVKVNLYHAKKRISKKKTHVKKCTPNAVFNELFVFDIPCEGLEDISVEFLVLDSERGSRNEVIGQLVLGAAAEGTGGEHWKEICDYPRRQIAKWHVLCDG

SEQ ID NO: 66084 - protein, 230 aa, Homo sapiens
MDLLSEKKHKVKTRVLRKTLDPAFDETFTFYGIPYTQIQELALHFTILSFDRFSRDDIIGEVLIPLSGIELSEGKMLMNREIIKRNVRKSSGRGELLISLCYQSTTNTLTVVVLKARHLPKSDVSGLSDPYVKVNLYHAKKRISKKKTHVKKCTPNAVFNELFVFDIPCEGLEDISVEFLVLDSERGSRNEVIGQLVLGAAAEGTGGEHWKEICDYPRRQIAKWHVLCDG

SEQ ID NO: 66085 - protein, 491 aa, Homo sapiens
MPGARDALCHQALQLLAELCARGALEHDSCQDFIYHLRDRARPRLRDPDISVSLLTLVVTACGLALFGVSLFVSWKLCWVPWRERGLPSGSKDNNQEPLNYMDTETNEQENSEDFLDPPTPCPDSSMKISHTSPDIPLSTQTGIQENCAHGVRVQRQVTEPTSSARHNSIRRQLNLSNPDFNIQQLQKQEQLTGIGRIKPELYKQRSLDNDDGRRSNSKACGKLNFILKYDCDLEQLIVKIHKAVNLPAKDFSGTSDPYVKIYLLPDRKTKHQTKVHRKTLNPVFDEVFLFPVPYNDLEARKLHFSVYDFDRFSRHDLIGQVVVDHFLDLADFPRECILWKDIEYVTNDNVDLGELMFSLCYLPTAGRLTITIIKARNLKAMDITGASDPYVKVSLMCDGRRLKKRKTSTKRNTLNPVYNEAIVFDVPPENIDQIHLSIAVMDYDRVGHNEIIGVCQVGNEAERLGRDHWSEMLSYPRKPIAHWHSLVEKR

SEQ ID NO: 66086 - protein, 319 aa, Homo sapiens
MLAKVVEGDLAFKGGRDISVSLLTLVVTACGLALFGVSLFVSWKLCWVPWRERGLPSGSKDNNQEPLNYMDTETNEQENSEDFLDPPTPCPDSSMKISHTSPDIPLSTQTGIQENCAHGVRVQRQVTEPTSSARHNSIRRQLNLSNPDFNIQQLQKQEQLTGIGRIKPELYKQRSLDNDDGRRSNSKACGKLNFILKYDCDLEQLIVKIHKAVNLPAKDFSGTSDPYVKIYLLPDRKTKHQTKVHRKTLNPVFDEVFLFPVPYNDLEARKLHFSVYDFDRFSRHDLIGQVVVDHFLDLADFPRECILWKDIEYVTNILS

SEQ ID NO: 66087 - protein, 386 aa, Homo sapiens
MFPEPPTPGPPSPDTPPDSSRISHGPVPPWALATIVLVSGLLIFSCCFCLYRKSCRRRTGKKSQAQAQVHLQEVKGLGQSYIDKVQPEVEELEPAPSGPGQQVADKHELGRLQYSLDYDFQSGQLLVGILQAMGLAALDLGGSSDPYVRVYLLPDKRRRYETKVHRQTLNPHFGETFAFKVPYVELGGRVLVMAVYDFDRFSRNDAIGEVRVPMSSVDLGRPVQAWRELQAAPREEQEKLGDICFSLRYVPTAGKLTVIVLEAKNLKKMDVGGLSDPYVKVHLLQGGKKVRKKKTTIKKNTLNPYYNEAFSFEVPCDQVQKVQVELTVLDYDKLGKNEAIGRVAVGAAAGGAGLRHWADMLANPRRPIAQWHSLRPPDRVRLLPAP

SEQ ID NO: 66088 - protein, 386 aa, Homo sapiens; identical to SEQ ID NO: 66087

SEQ ID NO: 66089 - protein, 382 aa, Homo sapiens
MTRGGCPVSARLFAQRPHGSWSSLLCVGLKGRLGWEWGTRVLECLCRKDSRTPPPCSRSPQPRGLHRPTRLPTPVASATAQVQPEVEELEPAPSGPGQQVADKHELGRLQYSLDYDFQSGQLLVGILQAMGLAALDLGGSSDPYVRVYLLPDKRRRYETKVHRQTLNPHFGETFAFKVPYVELGGRVLVMAVYDFDRFSRNDAIGEVRVPMSSVDLGRPVQAWRELQAAPREEEKLGDICFSLRYVPTAGKLTVIVLEAKNLKKMDVGGLSDPYVKVHLLQGGKKVRKKKTTIKKNTLNPYYNEAFSFEVPCDQVQKVQVELTVLDYDKLGKNEAIGRVAVGAAAGGAGLRHWADMLANPRRPIAQWHSLRPPDRVRLLPAP

SEQ ID NO: 66090 - protein, 510 aa, Homo sapiens
MSGVWGAGGPRCQEALAVLASLCRARPPPLGLDVETCRSFELQPPERSPSAAGAGTSVSLLAVVVIVCGVALVAVFLFLFWKLCWMPWRNKEASSPSSANPPLEALQSPSFRGNMADKLKDPSTLGFLEAAVKISHTSPDIPAEVQMSVKEHIMRHTRLQRQTTEPASSTRHTSFKRHLPRQMHVSSVDYGNELPPAAEQPTSIGRIKPELYKQKSVDGEDAKSEATKSCGKINFSLRYDYETETLIVRILKAFDLPAKDFCGSSDPYVKIYLLPDRKCKLQTRVHRKTLNPTFDENFHFPVPYEELADRKLHLSVFDFDRFSRHDMIGEVILDNLFEASDLSRETSIWKDIQYATSESVDLGEIMFSLCYLPTAGRLTLTVIKCRNLKAMDITGYSDPYVKVSLLCDGRRLKKKKTTIKKNTLNPVYNEAIIFDIPPENMDQVSLLISVMDYDRVGHNEIIGVCRVGITAEGLGRDHWNEMLAYPRKPIAHWHSLVEVKKSFKEGNPRL

SEQ ID NO: 66091 - protein, 425 aa, Homo sapiens
MPWRNKEASSPSSANPPLEALQSPSFRGNMADKLKDPSTLGFLEAAVKISHTSPDIPAEVQMSVKEHIMRHTRLQRQTTEPASSTRHTSFKRHLPRQMHVSSVDYGNELPPAAEQPTSIGRIKPELYKQKSVDGEDAKSEATKSCGKINFSLRYDYETETLIVRILKAFDLPAKDFCGSSDPYVKIYLLPDRKCKLQTRVHRKTLNPTFDENFHFPVPYEELADRKLHLSVFDFDRFSRHDMIGEVILDNLFEASDLSRETSIWKDIQYATSESVDLGEIMFSLCYLPTAGRLTLTVIKCRNLKAMDITGYSDPYVKVSLLCDGRRLKKKKTTIKKNTLNPVYNEAIIFDIPPENMDQVSLLISVMDYDRVGHNEIIGVCRVGITAEGLGRDHWNEMLAYPRKPIAHWHSLVEVKKSFKEGNPRL

SEQ ID NO: 66092 - protein, 425 aa, Homo sapiens; identical to SEQ ID NO: 66091

SEQ ID NO: 66093 - protein, 510 aa, Homo sapiens; identical to SEQ ID NO: 66090

SEQ ID NO: 66094 - protein, 95 aa, Homo sapiens
MPWRNKEASSPSSANPPLEALQSPSFRGNMADKLKDPSTLGFLEAAVKISHTSPDIPAEVQMSVKEHIMRHTRLQRQTTEPASSTRHTSFKRHLP

SEQ ID NO: 66095 - protein, 86 aa, Homo sapiens [sequence omitted]

SEQ ID NO: 66096 - protein, 403 aa, Homo sapiens
MYRDPEAASPGAPSRDVLLVSAIITVSLSVTVVLCGLCHWCQRKLGKRYKNSLETVGTPDSGRGRSEKKAIKLPAGGKAVNTAPVPGQTPHDESDRRTEPRSSVSDLVNSLTSEMLMLSPGSEEDEAHEGCSRENLGRIQFSVGYNFQESTLTVKIMKAQELPAKDFSGTSDPFVKIYLLPDKKHKLETKVKRKNLNPHWNETFLFEGFPYEKVVQRILYLQVLDYDRFSRNDPIGEVSIPLNKVDLTQMQTFWKDLKPCSDGSGSRGELLLSLCYNPSANSIIVNIIKARNLKAMDIGGTSDPYVKVWLMYKDKRVEKKKTVTMKRNLNPIFNESFAFDIPTEKLRETTIIITVMDKDKLSRNDVIGKIYLSWKSGPGEVKHWKDMIARPRQPVAQWHQLKA

SEQ ID NO: 66097 - protein, 421 aa, Homo sapiens
MAVDVAEYHLSVIKSPPGWEVGVYAAGALALLGIAAVSLWKLWTSGSFPSPSPFPNYDYRYLQQKYGESCAEAREKRVPAWNAQRASTRGPPSRKGSLSIEDTFESISELGPLELMGRELDLAPYGTLRKSQSADSLNSISSVSNTFGQDFTLGQVEVSMEYDTASHTLNVAVMQGKDLLEREEASFESCFMRVSLLPDEQIVGISRIQRNAYSIFFDEKFSIPLDPTALEEKSLRFSVFGIDEDERNVSTGVVELKLSVLDLPLQPFSGWLYLQDQNKAADAVGEILLSLSYLPTAERLTVVVVKAKNLIWTNDKTTADPFVKVYLLQDGRKMSKKKTAVKRDDPNPVFNEAMIFSVPAIVLQDLSLRVTVAESSSDGRGDNVGHVIIGPSASGMGTTHWNQMLATLRRPVSMWHAVRRN

SEQ ID NO: 66098 - protein, 421 aa, Homo sapiens; identical to SEQ ID NO: 66097

SEQ ID NO: 66099 - protein, 421 aa, Homo sapiens; identical to SEQ ID NO: 66097

SEQ ID NO: 66100 - protein, 426 aa, Homo sapiens
MVLSVPVIALGATLGTATSILALCGVTCLCRHMHPKKGLLPRDQDPDLEKAKPSLLGSAQQFNVKKSTEPVQPRALLKFPDIYGPRPAVTAPEVINYADYSLRSTEEPTAPASPQPPNDSRLKRQVTEELFILPQNGVVEDVCVMETWNPEKAASWNQAPKLHYCLDYDCQKAELFVTRLEAVTSNHDGGCDCYVQGSVANRTGSVEAQTALKKRQLHTTWEEGLVLPLAEEELPTATLTLTLRTCDRFSRHSVAGELRLGLDGTSVPLGAAQWGELKTSAKEPSAGAGEVLLSISYLPAANRLLVVLIKAKNLHSNQSKELLGKDVSVKVTLKHQARKLKKKQTKRAKHKINPVWNEMIMFELPDDLLQASSVELEVLGQDDSGQSCALGHCSLGLHTSGSERSHWEEMLKNPRRQIAMWHQLHL

SEQ ID NO: 66101 - protein, 517 aa, Homo sapiens
MLLLFLYINKKFCFENVGGFPDLGSEYSTRKNSQDKIYNSYMDKDEHGSSSESEDEALGKYHEALSRTHNSRLPLADSRQRNYAWETRQKYSPLSAEYDGYSSEASIDEGNCIQRMRRTPPLDELQPPPYQDDSGSPHLSCTPSEIGDSKCEFSHCSNSPRCSYNKCPSEGSTGHEIESFHNKGYEEDVPSDSTAVLSPEDMSAQGSSSQLPKPFDPEPEAKYGTLDVTFDYDSQEQKLLVTVTAVTDIPTYNRTGGNSWQVHLVLLPIKKQRAKTSIQRGPCPVFTETFKFNHVESEMIGNYAVRFRLYGVHRMKKEKIVGEKIFYLTKLNLQGKMSLPVILEPSYNHSGCDSQMSVSEMSCSESTSSCQSLEHGSVPEILIGLLYNATTGRLSAEVIKGSHFKNLAANRPPNTYVKLTLLNSMGQEMSKCKTSIRRGQPNPVYKETFVFQVALFQLSDVTLILSVYNKRSMKRKEMIGWISLGLNSSGEEELNHWTEMKESKGQQVCRWHALLES

SEQ ID NO: 66102 - protein, 574 aa, Homo sapiens
MAIEGGERTCGVHELICIRKVSPEAVGFLSAVGVFIILMLLLFLYINKKFCFENVGGFPDLGSEYSTRKNSQDKIYNSYMDKDEHGSSSESEDEALGKYHEALSRTHNSRLPLADSRQRNYAWETRQKYSPLSAEYDGYSSEASIDEGNCIQRMRRTPPLDELQPPPYQDDSGSPHLSCTPSEIGDSKCEFSHCSNSPRCSYNKCPSEGSTGHEIESFHNKGYEEDVPSDSTAVLSPEDMSAQGSSSQLPKPFDPEPEAKYGTLDVTFDYDSQEQKLLVTVTAVTDIPTYNRTGGNSWQVHLVLLPIKKQRAKTSIQRGPCPVFTETFKFNHVESEMIGNYAVRFRLYGVHRMKKEKIVGEKIFYLTKLNLQGKMSLPVILEPSYNHSGCDSQMSVSEMSCSESTSSCQSLEHGSVPEILIGLLYNATTGRLSAEVIKGSHFKNLAANRPPNGLFCCLKHLIGGQVYIIRDTYVKLTLLNSMGQEMSKCKTSIRRGQPNPVYKETFVFQVALFQLSDVTLILSVYNKRSMKRKEMIGWISLGLNSSGEEELNHWTEMKESKGQQVCRWHALLES

SEQ ID NO: 66103 - protein, 458 aa, Homo sapiens
MAIEGGERTCGVHELICIRKVSPEAVGFLSAVGVFIILMLLLFLYINKKFCFENVGGFPDLGSEYSTRKNSQDKIYNSYMDKDEHGSSSESEDEALGKYHEALSRTHNSRLPLADSRQRNYAWETRQKYSPLSAEYDGYSSEASIDEGNCIQRMRRTPPLDELQPPPYQDDSGSPHLSCTPSEIGDSKCEFSHCSNSPRCSYNKCPSEGSTGHEIESFHNKGYEEDVPSDSTAVLSPEDMSAQGSSSQLPKPFDPEPEAKYGTLDVTFDYDSQEQKLLVTVTAVTDIPTYNRTGGNSWQVHLVLLPIKKQRAKTSIQRGPCPVFTETFKFNHVESEMIGNYAVRFRLYGVHRMKKEKIVGEKIFYLTKLNLQGKMSLPVILEPSYNHSGCDSQMSVSEMSCSESTSSCQSLEHGSVPEILIGLLYNATTGRLSAEVIKGSHFKNLAANRPPKMDCSVV

SEQ ID NO: 66104 - protein, 619 aa, Homo sapiens
MASASWRLKVEREPVEYMNLSVLEKIGYFSVARLEYSGTILAHCNFRLLGSNDSSASASQVTGTTVSPEAVGFLSAVGVFIILMLLLFLYINKKFCFENVGGFPDLGSEYSTRKNSQDKIYNSYMDKDEHGSSSESEDEALGKYHEALSRTHNSRLPLADSRQRNYAWETRQKYSPLSAEYDGYSSEASIDEGNCIQRMRRTPPLDELQPPPYQDDSGSPHLSCTPSEIGDSKCEFSHCSNSPRCSYNKCPSEGSTGHEIESFHNKGYEEDVPSDSTAVLSPEDMSAQGSSSQLPKPFDPEPEAKYGTLDVTFDYDSQEQKLLVTVTAVTDIPTYNRTGGNSWQVHLVLLPIKKQRAKTSIQRGPCPVFTETFKFNHVESEMIGNYAVRFRLYGVHRMKKEKIVGEKIFYLTKLNLQGKMSLPVILEPSYNHSGCDSQMSVSEMSCSESTSSCQSLEHGSVPEILIGLLYNATTGRLSAEVIKGSHFKNLAANRPPNGLFCCLKHLIGGQVYIIRDTYVKLTLLNSMGQEMSKCKTSIRRGQPNPVYKETFVFQVALFQLSDVTLILSVYNKRSMKRKEMIGWISLGLNSSGEEELNHWTEMKESKGQQVCRWHALLES

SEQ ID NO: 66105 - protein, 555 aa, Homo sapiens
MAIEGGERTCGVHELICIRKVSPEAVGFLSAVGVFIILMLLLFLYINKKFCFENVGGFPDLGSEYSTRKNSQDKIYNSYMDKDEHGSSSESEDEALGKYHEALSRTHNSRLPLADSRQRNYAWETRQKYSPLSAEYDGYSSEASIDEGNCIQRMRRTPPLDELQPPPYQDDSGSPHLSCTPSEIGDSKCEFSHCSNSPRCSYNKCPSEGSTGHEIESFHNKGYEEDVPSDSTAVLSPEDMSAQGSSSQLPKPFDPEPEAKYGTLDVTFDYDSQEQKLLVTVTAVTDIPTYNRTGGNSWQVHLVLLPIKKQRAKTSIQRGPCPVFTETFKFNHVESEMIGNYAVRFRLYGVHRMKKEKIVGEKIFYLTKLNLQGKMSLPVILEPSYNHSGCDSQMSVSEMSCSESTSSCQSLEHGSVPEILIGLLYNATTGRLSAEVIKGSHFKNLAANRPPNTYVKLTLLNSMGQEMSKCKTSIRRGQPNPVYKETFVFQVALFQLSDVTLILSVYNKRSMKRKEMIGWISLGLNSSGEEELNHWTEMKESKGQQVCRWHALLES

SEQ ID NO: 66106 - protein, 581 aa, Homo sapiens
MAIEGGERTCGVHELICIRKVSPEAVGFLSAVGVFIILMLLLFLYINKKFCFENVGGFPDLGSEYSTRKNSQDKIYNSYMDKDEHGSSSESEDEALGKYHEALSRTHNSRLPLADSRQRNYAWETRQKYSPLSAEYDGYSSEASIDEGNCIQRMRRTPPLDELQPPPYQDDSGSPHLSCTPSEIGDSKCEFSHCSNSPRCSYNKCPSEGSTGHEIESFHNKGYEEDVPSDSTAVLSPEDMSAQGSSSQLPKPFDPEPEAKYGTLDVTFDYDSQEQKLLVTVTAVTDIPTYNRTGGNSWQVHLVLLPIKKQRAKTSIQRGPCPVFTETFKFNHVESEMIGNYAVRFRLYGVHRMKKEKIVGEKIFYLTKLNLQGKMSLPVILEPSYNHSGCDSQMSVSEMSCSESTSSCQSLEHGSVPEILIGLLYNATTGRLSAEVIKGSHFKNLAANRPPTFHPLLSDGLFCCLKHLIGGQVYIIRDTYVKLTLLNSMGQEMSKCKTSIRRGQPNPVYKETFVFQVALFQLSDVTLILSVYNKRSMKRKEMIGWISLGLNSSGEEELNHWTEMKESKGQQVCRWHALLES

SEQ ID NO: 66107 - protein, 517 aa, Homo sapiens; identical to SEQ ID NO: 66101

SEQ ID NO: 66108 - protein, 421 aa, Homo sapiens
MAEQLALVIGGTIGGLLLLLLIGASCCLWRRFCATLTYEELPGTPAMATTAASSGQRDRPCQPHARTQLSRPPAVPFVVPPTLQGRDWVPLHSGEWADAPWDPCPASELLPHTSSGGLGDACMVGAINPELYKFPEDKSETDFPDGCLGRLWFSVEYEQEAERLLVGLIKAQHLQAPSETCSPLVKLYLLPDERRFLQSKTKRKTSNPQFDEHFIFQVSSKTITQRVLKFSVYHVDRQRKHQLLGQVLFPLKNETLVGDCRRVIWRDLEAESLEPPSEFGDLQFCLSYNDYLSRLTVVVLRAKGLRLQEDRGIVSVFVKVSLMNHNKFVKCKKTSAVLGSINPVYNETFSFKADATELDTASLSLTVVQNMEGDKSQQLGRVVVGPYMYTRGRELEHWDEMLSKPKELVKRWHALCRTTEP

SEQ ID NO: 66109 - protein, 474 aa, Homo sapiens
MGVVLSPHPAPSRREPLAPLAPGTRPGWSPAVSGSSRSALRPSTAGPGPGPGTGWGGTAASGRWVPAPAVHCAAPRAAAGHQQHHGPPLCSPDGAPRRFKRRPGSPAPAAQTGETSLREQPHGGPPAVPFVVPPTLQGRDWVPLHSGEWADAPWDPCPASELLPHTSSGGLGDACMVGAINPELYKFPEDKSETDFPDGCLGRLWFSVEYEQEAERLLVGLIKAQHLQAPSETCSPLVKLYLLPDERRFLQSKTKRKTSNPQFDEHFIFQVSSKTITQRVLKFSVYHVDRQRKHQLLGQVLFPLKNETLVGDCRRVIWRDLEAESLEPPSEFGDLQFCLSYNDYLSRLTVVVLRAKGLRLQEDRGIVSVFVKVSLMNHNKFVKCKKTSAVLGSINPVYNETFSFKADATELDTASLSLTVVQNMEGDKSQQLGRVVVGPYMYTRGRELEHWDEMLSKPKELVKRWHALCRTTEP

SEQ ID NO: 66110 - protein, 390 aa, Homo sapiens
MAEQLALVIGGTIGGLLLLLLIGASCCLWRRFCATLTYEELPGTPAMATTAASSGQRDRPCQPHARTQLSRPPAVPFVVPPTLQGRDWVPLHSGEWADAPWDPCPASELLPHTSSGGLGDACMVGAINPELYKFPEDKSETDFPDGCLGRLWFSVEYEQEAERLLVGLIKAQHLQAPSETCSPLVKLYLLPDERRFLQSKTKRKTSNPQFDEHFIFQVSSKTITQRVLKFSVYHVDRQRKHQLLGQVLFPLKNETLVGDCRRVIWRDLEAESLEPPSEFGDLQFCLSYNDYLSRLTVVVLRAKGLRLQEDRGIVSVFVKVSLMNHNKFVKCKKTSAVLGSINPVYNETFSFKADATELDTASLSLTVVQNMEGDKQATTVELFLFHLTSG

SEQ ID NO: 66111 - protein, 180 aa, Homo sapiens
DEHFIFQVSSKTITQRVLKFSVYHVDRQRKHQLLGQVLFPLKNETLVGDCRRVIWRDLEAESLEPPSEFGDLQFCLSYNDYLSRLTVVVLRAKGLRLQEDRGIVSVFVKVSLMNHNKFVKCKKTSAVLGSINPVYNETFSFKADATELDTASLSLTVVQNMEGDKQATTVELFLFHLTSG

SEQ ID NO: 66112 - protein, 260 aa, Homo sapiens
MVGAINPELYKFPEDKSETCSPLVKLYLLPDERRFLQSKTKRKTSNPQFDEHFIFQVSSKTITQRVLKFSVYHVDRQRKHQLLGQVLFPLKNETLVGDCRRVIWRDLEAESLEPPSEFGDLQFCLSYNDYLSRLTVVVLRAKGLRLQEDRGIVSVFVKVSLMNHNKFVKCKKTSAVLGSINPVYNETFSFKADATELDTASLSLTVVQNMEGDKSQQLGRVVVGPYMYTRGRELEHWDEMLSKPKELVKRWHALCRTTEP

SEQ ID NO: 66113 - protein, 348 aa, Homo sapiens
MAEQLALVIGGTIGGLLLLLLIGASCCLWRRFCATLTYEELPGTPAMATTAASSGQRDRPCQPHARTQLSRPPAVPFVVPPTLQGRDWVPLHSGEWADAPWDPCPASELLPHTSSGGLGDACMVGAINPELYKFPEDKSETDFPDGCLGRLWFSVEYEQEAERLLVGLIKAQHLQAPSETCSPLVKLYLLPDERRFLQSKTKRKTSNPQFDEHFIFQVSSKTITQRVLKFSVYHVDRQRKHQLLGQVLFPLKNETLVGDCRRVIWRDLEAESLEPPSEFGDLQFCLSYNDYLSRLTVVVLRAKGLRLQEDRGIVSVFVKVSLMNHNKFAKCKPGPDLGEESRGSLNLK

SEQ ID NO: 66114 - protein, 390 aa, Homo sapiens; identical to SEQ ID NO: 66110

SEQ ID NO: 66115 - protein, 383 aa, Homo sapiens
MVLAMASQDVQNFFQPFSSWISRVYEALQQAGDMLSASLVNISKQDSKLSDKLDQDLDNIQIQETYFEDEEQDNDWSQEDANSLFLEVDHFSCCNSDLQDSAQNSSPSLSQHAKDSCSTMSQWPNWASDDRKLPHVLSSIAEEEHHLEKQRSGLQHGFDSQLPGTLETVNGKKQVNSFGDDEELSTSSDSDEEVIKQFEISVSRSQSFRSVTSEKGKQTGLEQKPKFSRSLLTHGEDGTEVSACEDLDGASQRRYSENLSYGEDDHIPAHSQSPCERGDAKHHGTSHQESSVVQSLRRQSTEGSLEMETAFNSRGFEDSYATDSSSMWSPEANLNLKRKGYLLDVYCLSSPLLFTTSLHRRNRTGPICRCHPGSQSPSQSVVT

SEQ ID NO: 66116 - protein, 645 aa, Homo sapiens
MVLAMASQDVQNFFQPFSSWISRVYEALQQAGDMLSASLVNISKQDSKLSDKLDQDLDNIQIQETYFEDEEQDNDWSQEDANSLFLEVDHFSCCNSDLQDSAQNSSPSLSQHAKDSCSTMSQWPNWASDDRKLPHVLSSIAEEEHHLEKQRSGLQHGFDSQLPGTLETVNGKKQVNSFGDDEELSTSSDSDEEVIKQFEISVSRSQSFRSVTSEKGKQTGLEQKPKFSRSLLTHGEDGTEVSACEDLDGASQRRYSENLSYGEDDHIPAHSQSPCERGDAKHHGTSHQESSVVQSLRRQSTEGSLEMETAFNSRGFEDSYATDSSSMWSPEEQDRTNLQVPSGVSEPISKCGDLDVIFEYRAASQKLTVTIVRAQGLPDKDRSGVNSWQVHVVLLPGKKHRGRTNIQRGPNPVFREKVTFAKLEPRDVAACAVRFRLYAARKMTRERMMGEKLFYLSHLHPEGEMKVTLVLEPRSNISSGGSPLSPSAVSHSDSTSSTQSLSHGGAPELLVGLSYNATTGRLSVEMIKGSHFRNLAVNRAPDTYGKLFLLNSVGQEMSRCKTSIRRGQPNPVYKETFVFQVALFQLSDVTLMISVYNRRTMKRKEMIGWIALGQNSSGEEEQDHWEEMKETKGQQICRWHTLLES

SEQ ID NO: 66117 - protein, 550 aa, Homo sapiens
MPQRGHPSQEGLWALPSLPMAHGPKPETEGLLDLSFLTEEEQEAIAGVLQRDARLRQLEEGRVSKLRASVADPGQLKILTGDWFQEARSQRHHNAHFGSDLVRASMRRKKSTRGDQAPGHDREAEAAVKEKEEGPEPRLTIDEAPQERLRETEASDPEEASQAQEDPGQGDQQVCAEEADPELEPASGGEQEPRPQQAQTKAASQILENGEEAPGPDPSLDRMLSSSSSVSSLNSSTLSGSQMSLSGDAEAVQVRGSVHFALHYEPGAAELRVHVIQCQGLAAARRRRSDPYVKSYLLPDKQSKRKTAVKKRNLNPVFNETLRYSVPQAELQGRVLSLSVWHRESLGRNIFLGEVEVPLDTWDWGSEPTWLPLQPRVPPSPDDLPSRGLLALSLKYVPAGSEGAGLPPSGELHFWVKEARDLLPLRAGSLDTYVQCFVLPDDSQASRQRTRVVRRSLSPVFNHTMVYDGFGPADLRQACAELSLWDHGALANRQLGGTRLSLGTGSSYGLQVPWMDSTPEEKQLWQALLEQPCEWVDGLLPLRTNLAPRT

SEQ ID NO: 66118 - protein, 76 aa, Homo sapiens
MPQRGHPSQEGLWALPSLPMAHGPKPETEGLLDLSFLTEEEQEAIAGVLQRDARLRQLEEGRVSKLRASVADPGQL

SEQ ID NO: 66119 - protein, 354 aa, Homo sapiens
MPQRGHPSQEGLWALPSLPMAHGPKPETEGLLDLSFLTEEEQEAIAGVLQRDARLRQLEEGRVSKLRASVADPGQLKILTGDWFQEARSQRHHNAHFGSDLVRASMRRKKSTRGDQAPGHDREAEAAVKEKEEGPEPRLTIDEAPQERLRETEGPDFPSPSVPLKASDPEEASQAQEDPGQGDQQVCAEEADPELEPASGGEQEPRPQQAQVGGSGPWLLSTSGADSGRGALLPRAASRPRPRALGAGVGKEGAPRHLPPLQTKAASQILENGEEAPGPDPSLDRMLSSSSSVSSLNSSTLSGSQMSLSGDAEAVQVRGSVHFALHYEPGAAELRVHVIQCQGLAAARRRRSDP

SEQ ID NO: 66120 - protein, 201 aa, Homo sapiens
MGTTALLGGVRLSETIPVKRLARGLARVRDGGWGSPQAGEKALGGPLLTSGSHLPSYVKSYLLPDKQSKRKTAVKKRNLNPVFNETLRYSVPQAELQGRVLSLSVWHRESLGRNIFLGEVEVPLDTWDWGSEPTWLPLQPRVPPSPDDLPSRGLLALSLKYVPAGSEGAGLPPSGELHFWVKEARDLLPLRAGSLDTYVQW

SEQ ID NO: 66121 - protein, 360 aa, Homo sapiens
MPQRGHPSQEGLWALPSLPMAHGPKPETEGLLDLSFLTEEEQEAIAGVLQRDARLRQLEEGRVSKLRASVADPGQLKILTGDWFQEARSQRHHNAHFGSDLVRASMRRKKSTRGDQAPGHDREAEAAVKEKEEGPEPRLTIDEAPQERLRETEGPDFPSPSVPLKASDPEEASQAQEDPGQGDQQVCAEEADPELEPASGGEQEPRPQQAQVGGSGPWLLSTSGADSGRGALLPRAASRPRPRALGAGVGKEGAPRHLPPLQTKAASQILENGEEAPGPDPSLDRMLSSSSSVSSLNSSTVRREGGDPGGRGVDPFRCVAPACPSLAAGPTAAAPQPATYDPGLKPPRCPRPRREPCERP

SEQ ID NO: 66122 - protein, 292 aa, Homo sapiens
  VARIANT 1: note = MOD_RES - Any amino acid
XPRPQQAQVGGSGPWLLSTSGADSGRGALLPRAASRPRPRALGAGVGKEGAPRHLPPLQTKAASQILENGEEAPGPDPSLDRMLSSSSSVSSLNSSTLSGSQMSLSGDAEAVQVRGSVHFALHYEPGAAELRVHVIQCQGLAAARRRRSDPYVKSYLLPDKQSKRKTAVKKRNLNPVFNETLRYSVPQAELQGRVLSLSVWHRESLGRNIFLGEVEVPLDTWDWGSEPTWLPLQPRVPPSPDDLPSRGLLALSLKYVPAGSEGAGLPPSGELHFWVKEARDLLPLRAGSLDT

SEQ ID NO: 66123 - protein, 562 aa, Homo sapiens
MPQRGHPSQEGLWALPSLPMAHGPKPETEGLLDLSFLTEEEQEAIAGVLQRDARLRQLEEGRVSKLRASVADPGQLKILTGDWFQEARSQRHHNAHFGSDLVRASMRRKKSTRGDQAPGHDREAEAAVKEKEEGPEPRLTIDEAPQERLRETEGPDFPSPSVPLKASDPEEASQAQEDPGQGDQQVCAEEADPELEPASGGEQEPRPQQAQTKAASQILENGEEAPGPDPSLDRMLSSSSSVSSLNSSTLSGSQMSLSGDAEAVQVRGSVHFALHYEPGAAELRVHVIQCQGLAAARRRRSDPYVKSYLLPDKQSKRKTAVKKRNLNPVFNETLRYSVPQAELQGRVLSLSVWHRESLGRNIFLGEVEVPLDTWDWGSEPTWLPLQPRVPPSPDDLPSRGLLALSLKYVPAGSEGAGLPPSGELHFWVKEARDLLPLRAGSLDTYVQCFVLPDDSQASRQRTRVVRRSLSPVFNHTMVYDGFGPADLRQACAELSLWDHGALANRQLGGTRLSLGTGSSYGLQVPWMDSTPEEKQLWQALLEQPCEWVDGLLPLRTNLAPRT

SEQ ID NO: 66124 - protein, 935 aa, Homo sapiens
MIDLSFLTEEEQEAIMKVLQRDAALKRAEEERVRHLPEKIKDDQQLKNMSGQWFYEAKAKRHRDKIHGADIIRASMRKKRPQIAAEQSKDRENGAKESWVNNVNKDAFLPPELAGVVEEPEEDAAPASPSSSVVNPASSVIDMSQENTRKPNVSPEKQRKNPFNSSKLPEGHSSQQTKNEQSKNGRTGLFQTSKEDELSESKEKSTVADTSIQKLEKSKQTLPGLSNGSQIKAPIPKARKMIYKSTDLNKDDNQSFPRQRTDSLKARGAPRGILKRNSSSSSTDSETLRYNHNFEPKSKIVSPGLTIHERISEKEHSLEDNSSPNSLEPLKHVRFSAVKDELPQSPGLIHGREVGEFSVLESDRLKNGMEDAGDTEEFQSDPKPSQYRKPSLFHQSTSSPYVSKSETHQPMTSGSFPINGLHSHSEVLTARPQSMENSPTINEPKDKSSELTRLESVLPRSPADELSHCVEPEPSQVPGGSSRDRQQGSEEEPSPVLKTLERSAARKMPSKSLEDISSDSSNQAKVDNQPEELVRSAEDVSTVPTQPDNPFSHPDKLKRMSKSVPAFLQDESDDRETDTASESSYQLSRHKKSPSSLTNLSSSSGMTSLSSVSGSVMSVYSGDFGNLEVKGNIQFAIEYVESLKELHVFVAQCKDLAAADVKKQRSDPYVKAYLLPDKGKMGKKKTLVVKKTLNPVYNEILRYKIEKQILKTQKLNLSIWHRDTFKRNSFLGEVELDLETWDWDNKQNKQLRWYPLKRKTAPVALEAENRGEMKLALQYVPEPVPGKKLPTTGEVHIWVKECLDLPLLRGSHLNSFVKCTILPDTSRKSRQKTRAVGKTTNPIFNHTMVYDGFRPEDLMEACVELTVWDHYKLTNQFLGGLRIGFGTGKSYGTEVDWMDSTSEEVALWEKMVNSPNTWIEATLPLRMLLIAKISK

SEQ ID NO: 66125 - protein, 1272 aa, Homo sapiens
MDEPNAEQVYNPSQFENLRKFWDLEANSNSKDNDKNITTTSQKNSAPFNRQKHKEFSDIKLSGKNTHEAEVLLSPKKVMAREEMEKLNSKGILQVLPDEITFPLSPLRKYTYQLPGNESSKENVEKNTEGIVTPVFKEEKDYSEQEIQESIIKTNVLSKDCKDTFNDSLQKLLSETSTPAIQPSGGKVHGKQVLEPSVSENRTWPQKTDFADTEEEVKGPEKIINEHVDKTVVHPKVKRNSLTASLDKLLKEATGTSPSPLQAKLAPVITGTNSKLEEGRFFGKGIEQSHNTSADKREILAPFPVRDETFGNTALLKKAESGECQLSTQNLIQMAAEDSHPLDPTSQLSRKGSFGDVASPPQDMLFPQDAHLVPQARVHPSQTEISETVEKVILPPRPVLNDVSAALQKLCGEVWLSYPAGREVGPGEVNPEFPEAVQPVCSPLNPPGVISPWATMDTIVPDRKDFYSSNVVPDKTHEVGSYLAAQMSPSDQTLSSFASIVAQYGKGLPQEVEEIVRETIVQPKSEFLEFSAGLEKLLKEETETFPSKYESDTGNLSPSKLIGSTEEPRRATSECHPEELKETVEKAEAPLITESAFDAGFEKLLKEITEAPPYQPQVSVREETHEKESSQSEQTRFLGTVPHFYRAASQTSEMKDKSNGLESQVNQCDKMLGGDALVTDLLVDFCGSRSGVEIPRTPQLYVAHEIGTIKTVTPPEDRDSESGVAGGQGTLQEPGFGEASEAISVSRNRQPIPLLMNKENSTKTSKVELTLASPYMKQEKEEEKEGFSESDFSDGNTSSNAESWRNPSSSEEEPSPVLKTLERSAARKMPSKSLEDISSDSSNQAKVDNQPEELVRSAEDDEKPDQKPVTNECVPRISTVPTQPDNPFSHPDKLKRMSKSVPAFLQDESDDRETDTASESSYQLSRHKKSPSSLTNLSSSSGMTSLSSVSGSVMSVYSGDFGNLEVKGNIQFAIEYVESLKELHVFVAQCKDLAAADVKKQRSDPYVKAYLLPDKGKMGKKKTLVVKKTLNPVYNEILRYKIEKQILKTQKLNLSIWHRDTFKRNSFLGEVELDLETWDWDNKQNKQLRWYPLKRKTAPVALEAENRGEMKLALQYVPEPVPGKKLPTTGEVHIWVKECLDLPLLRGSHLNSFVKCTILPDTSRKSRQKTRAVGKTTNPIFNHTMVYDGFRPEDLMEACVELTVWDHYKLTNQFLGGLRIGFGTGKSYGTEVDWMDSTSEEVALWEKMVNSPNTWIEATLPLRMLLIAKISK

SEQ ID NO: 66126 - protein, 1780 aa, Homo sapiens
MINSSLSMLFSYLEKYFYVADELSHCVEPEPSQVPGGSSRDRQQGKPPPLPALKAKTSSRSGPYATEIKKSTDDSIFKVLDWFNRSSYSDDNKSFLQHPRGIESKEKTDSKSQVAVDLVTDDTTLRENGSKTLSPSKIELKPVRSDSPFQAEGDMLVSESCQDNNVNIKSKFMNLSQKGTPKEGPGILQPFESYGTPSQGSKNMDYSQDSKSPGKGNGASPSNSNYSYSVLKESDAENQVPCNTNNIGNLGEEEPKFHAHEENRGHSEVNFDSSTVVKEPGLKDNMNAERKSKVGNTYILKASLEPENIKSTPGVANNGSPWKKPEVQFQQEAGEVPKNQVQREKYKRVSDRISFWEGEKAGAKITHEKPTSSCSQEQPSAKAYQPVKKSQGVSSMDSLSTDQSEYNQAIPKRVVLDEDDQASQLSNSYSSNKSKETKPQIAGPSRYYLSAEQSDKVSLFQNKKNEPIKRSQVADSLPSRRNITLPALQPPSNVGSERHAPLEKDRPLVRESNANFKVMSLKERMDEPNAEQVYNPSQFENLRKFWDLEANSNSKDNDKNITTTSQKNSAPFNRQKHKEFSDIKLSGKNTHEAEVLLSPKKVMAREEMEKLNSKGILQVLPDEITFPLSPLRKYTYQLPGNESSKENVEKNTEGIVTPVFKEEKDYSEQEIQESIIKTNVLSKDCKDTFNDSLQKLLSETSTPAIQPSGGKVHGKQVLEPSVSENRTWPQKTDFADTEEEVKGPEKIINEHVDKTVVHPKVKRNSLTASLDKLLKEATGTSPSPLQAKLAPVITGTNSKLEEGRFFGKGIEQSHNTSADKREILAPFPVRDETFGNTALLKKAESGECQLSTQNLIQMAAEDSHPLDPTSQLSRKGSFGDVASPPQDMLFPQDAHLVPQARVHPSQTEISETVEKVILPPRPVLNDVSAALQKLCGEVWLSYPAGREVGPGEVNPEFPEAVQPVCSPLNPPGVISPWATMDTIVPDRKDFYSSNVVPDKTHEVGSYLAAQMSPSDQTLSSFASIVAQYGKGLPQEVEEIVRETIVQPKSEFLEFSAGLEKLLKEETETFPSKYESDTGNLSPSKLIGSTEEPRRATSECHPEELKETVEKAEAPLITESAFDAGFEKLLKEITEAPPYQPQVSVREETHEKESSQSEQTRFLGTVPHFYRAASQTSEMKDKSNGLESQVNQCDKMLGGDALVTDLLVDFCGSRSGVEIPRTPQLYVAHEIGTIKTVTPPEDRDSESGVAGGQGTLQEPGFGEASEAISVSRNRQPIPLLMNKENSTKTSKVELTLASPYMKQEKEEEKEGFSESDFSDGNTSSNAESWRNPSSSEEEPSPVLKTLERSAARKMPSKSLEDISSDSSNQAKVDNQPEELVRSAEDVSTVPTQPDNPFSHPDKLKRMSKSVPAFLQDESDDRETDTASESSYQLSRHKKSPSSLTNLSSSSGMTSLSSVSGSVMSVYSGDFGNLEVKGNIQFAIEYVESLKELHVFVAQCKDLAAADVKKQRSDPYVKAYLLPDKGKMGKKKTLVVKKTLNPVYNEILRYKIEKQILKTQKLNLSIWHRDTFKRNSFLGEVELDLETWDWDNKQNKQLRWYPLKRKTAPVALEAENRGEMKLALQYVPEPVPGKKLPTTGEVHIWVKECLDLPLLRGSHLNSFVKCTILPDTSRKSRQKTRAVGKTTNPIFNHTMVYDGFRPEDLMEACVELTVWDHYKLTNQFLGGLRIGFGTGKSYGTEVDWMDSTSEEVALWEKMVNSPNTWIEATLPLRMLLIAKISK

SEQ ID NO: 66127 - protein, 365 aa, Homo sapiens
MSDDRETDTASESSYQLSRHKKSPSSLTNLSSSSGMTSLSSVSGSVMSVYSGDFGNLEVKGNIQFAIEYVESLKELHVFVAQCKDLAAADVKKQRSDPYVKAYLLPDKGKMGKKKTLVVKKTLNPVYNEILRYKIEKQILKTQKLNLSIWHRDTFKRNSFLGEVELDLETWDWDNKQNKQLRWYPLKRKTAPVALEAENRGEMKLALQYVPEPVPGKKLPTTGEVHIWVKECLDLPLLRGSHLNSFVKCTILPDTSRKSRQKTRAVGKTTNPIFNHTMVYDGFRPEDLMEACVELTVWDHYKLTNQFLGGLRIGFGTGKSYGTEVDWMDSTSEEVALWEKMVNSPNTWIEATLPLRMLLIAKISK

SEQ ID NO: 66128 - protein, 910 aa, Homo sapiens
MIDLSFLTEEEQEAIMKVLQRDAALKRAEEERVRHLPEKIKDDQQLKNMSGQWFYEAKAKRHRDKIHGADIIRASMRKKRPQIAAEQSKDRENGAKESWVNNVNKDAFLPPELAGVVEEPEEDAAPASPSSSVVNPASSVIDMSQENTRKPNVSPEKRKNPFNSSKLPEGHSSQQTKNEQSKNGRTGLFQTSKEDELSESKEKSTVADTSIQKLEKSKQTLPGLSNGSQIKAPIPKARKMIYKSTDLNKDDNQSFPRQRTDSLKARGAPRGILKRNSSSSSTDSETLRYNHNFEPKSKIVSPGLTIHERISEKEHSLEDNSSPNSLEPLKHVRFSAVKDELPQSPGLIHGREVGEFSVLESDRLKNGMEDAGDTEEFQSDPKPSQYRKPSLFHQSTSSPYVSKSETHQPMTSGSFPINGLHSHSEVLTARPQSMENSPTINEPKDKSSELTRLESVLPRSPADELSHCVEPEPSQVPGGSSRDRQQGSEEEPSPVLKTLERSAARKMPSKSLEDISSDSSNQAKVDNQPEELVRSAEDDEKPDQKPVTNECVPRISTVPTQPDNPFSHPDKLKRMSKSVPAFLQDEVSGSVMSVYSGDFGNLEVKGNIQFAIEYVESLKELHVFVAQCKDLAAADVKKQRSDPYVKAYLLPDKGKMGKKKTLVVKKTLNPVYNEILRYKIEKQILKTQKLNLSIWHRDTFKRNSFLGEVELDLETWDWDNKQNKQLRWYPLKRKTAPVALEAENRGEMKLALQYVPEPVPGKKLPTTGEVHIWVKECLDLPLLRGSHLNSFVKCTILPDTSRKSRQKTRAVGKTTNPIFNHTMVYDGFRPEDLMEACVELTVWDHYKLTNQFLGGLRIGFGTGKSYGTEVDWMDSTSEEVALWEKMVNSPNTWIEATLPLRMLLIAKISK

SEQ ID NO: 66129 - protein, 910 aa, Homo sapiens; identical to SEQ ID NO: 66128

SEQ ID NO: 66130 - protein, 63 aa, Homo sapiens
MSKSVPAFLQDESDDRETDTASESSYQLSRHKKSPSSLTNLSSSSGMTSLSSVSGSVMSVYSG

SEQ ID NO: 66131 - protein, 1256 aa, Homo sapiens
MDEPNAEQVYNPSQFENLRKFWDLEANSNSKDNDKNITTTSQKNSAPFNRQKHKEFSDIKLSGKNTHEAEVLLSPKKVMAREEMEKLNSKGILQVLPDEITFPLSPLRKYTYQLPGNESSKENVEKNTEGIVTPVFKEEKDYSEQEIQESIIKTNVLSKDCKDTFNDSLQKLLSETSTPAIQPSGGKVHGKQVLEPSVSENRTWPQKTDFADTEEEVKGPEKIINEHVDKTVVHPKVKRNSLTASLDKLLKEATGTSPSPLQAKLAPVITGTNSKLEEGRFFGKGIEQSHNTSADKREILAPFPVRDETFGNTALLKKAESGECQLSTQNLIQMAAEDSHPLDPTSQLSRKGSFGDVASPPQDMLFPQDAHLVPQARVHPSQTEISETVEKVILPPRPVLNDVSAALQKLCGEVWLSYPAGREVGPGEVNPEFPEAVQPVCSPLNPPGVISPWATMDTIVPDRKDFYSSNVVPDKTHEVGSYLAAQMSPSDQTLSSFASIVAQYGKGLPQEVEEIVRETIVQPKSEFLEFSAGLEKLLKEETETFPSKYESDTGNLSPSKLIGSTEEPRRATSECHPEELKETVEKAEAPLITESAFDAGFEKLLKEITEAPPYQPQVSVREETHEKESSQSEQTRFLGTVPHFYRAASQTSEMKDKSNGLESQVNQCDKMLGGDALVTDLLVDFCGSRSGVEIPRTPQLYVAHEIGTIKTVTPPEDRDSESGVAGGQGTLQEPGFGEASEAISVSRNRQPIPLLMNKENSTKTSKVELTLASPYMKQEKEEEKEGFSESDFSDGNTSSNAESWRNPSSSEEEPSPVLKTLERSAARKMPSKSLEDISSDSSNQAKVDNQPEELVRSAEDVSTVPTQPDNPFSHPDKLKRMSKSVPAFLQDESDDRETDTASESSYQLSRHKKSPSSLTNLSSSSGMTSLSSVSGSVMSVYSGDFGNLEVKGNIQFAIEYVESLKELHVFVAQCKDLAAADVKKQRSDPYVKAYLLPDKGKMGKKKTLVVKKTLNPVYNEILRYKIEKQILKTQKLNLSIWHRDTFKRNSFLGEVELDLETWDWDNKQNKQLRWYPLKRKTAPVALEAENRGEMKLALQYVPEPVPGKKLPTTGEVHIWVKECLDLPLLRGSHLNSFVKCTILPDTSRKSRQKTRAVGKTTNPIFNHTMVYDGFRPEDLMEACVELTVWDHYKLTNQFLGGLRIGFGTGKSYGTEVDWMDSTSEEVALWEKMVNSPNTWIEATLPLRMLLIAKISK

SEQ ID NO: 66132 - protein, 376 aa, Homo sapiens
MSKSVPAFLQDESDDRETDTASESSYQLSRHKKSPSSLTNLSSSSGMTSLSSVSGSVMSVYSGDFGNLEVKGNIQFAIEYVESLKELHVFVAQCKDLAAADVKKQRSDPYVKAYLLPDKGKMGKKKTLVVKKTLNPVYNEILRYKIEKQILKTQKLNLSIWHRDTFKRNSFLGEVELDLETWDWDNKQNKQLRWYPLKRKTAPVALEAENRGEMKLALQYVPEPVPGKKLPTTGEVHIWVKECLDLPLLRGSHLNSFVKCTILPDTSRKSRQKTRAVGKTTNPIFNHTMVYDGFRPEDLMEACVELTVWDHYKLTNQFLGGLRIGFGTGKSYGTEVDWMDSTSEEVALWEKMVNSPNTWIEATLPLRMLLIAKISK

SEQ ID NO: 66133 - protein, 103 aa, Homo sapiens
MSKSVPAFLQDESDDRETDTASESSYQLSRHKKSPSSLTNLSSSSGMTSLSSVSGSVMSVYSGDFGNLEVKGNIQFAIEYVESLKELHVFVAQCKDLAAADVK

SEQ ID NO: 66134 - protein, 902 aa, Homo sapiens
MSGQWFYEAKAKRHRDKIHGADIIRASMRKKRPQIAAEQSKDRENGAKESWVNNVNKDAFLPPELAGVVEEPEEDAAPASPSSSVVNPASSVIDMSQENTRKPNVSPEKRKNPFNSSKLPEGHSSQQTKNEQSKNGRTGLFQTSKEDELSESKEKSTVADTSIQKLEKSKQTLPGLSNGSQIKAPIPKARKMIYKSTDLNKDDNQSFPRQRTDSLKARGAPRGILKRNSSSSSTDSETLRYNHNFEPKSKIVSPGLTIHERISEKEHSLEDNSSPNSLEPLKHVRFSAVKDELPQSPGLIHGREVGEFSVLESDRLKNGMEDAGDTEEFQSDPKPSQYRKPSLFHQSTSSPYVSKSETHQPMTSGSFPINGLHSHSEVLTARPQSMENSPTINEPKDKSSELTRLESVLPRSPADELSHCVEPEPSQVPGGSSRDRQQGSEEEPSPVLKTLERSAARKMPSKSLEDISSDSSNQAKVDNQPEELVRSAEDDEKPDQKPVTNECVPRISTVPTQPDNPFSHPDKLKRMSKSVPAFLQDESDDRETDTASESSYQLSRHKKSPSSLTNLSSSSGMTSLSSVSGSVMSVYSGDFGNLEVKGNIQFAIEYVESLKELHVFVAQCKDLAAADVKKQRSDPYVKAYLLPDKGKMGKKKTLVVKKTLNPVYNEILRYKIEKQILKTQKLNLSIWHRDTFKRNSFLGEVELDLETWDWDNKQNKQLRWYPLKRKTAPVALEAENRGEMKLALQYVPEPVPGKKLPTTGEVHIWVKECLDLPLLRGSHLNSFVKCTILPDTSRKSRQKTRAVGKTTNPIFNHTMVYDGFRPEDLMEACVELTVWDHYKLTNQFLGGLRIGFGTGKSYGTEVDWMDSTSEEVALWEKMVNSPNTWIEATLPLRMLLIAKISK

SEQ ID NO: 66135 - protein, 160 aa, Homo sapiens
MSKSVPAFLQDEVSGSVMSVYSGDFGNLEVKGNIQFAIEYVESLKELHVFVAQCKDLAAADVKKQRSDPYVKAYLLPDKGKMGKKKTLVVKKTLNPVYNEILRYKIEKQILKTQKLNLSIWHRDTFKRNSFLGEVELDLETWDWDNKQNKQLRWYPLKRK

SEQ ID NO: 66136 - protein, 934 aa, Homo sapiens
MIDLSFLTEEEQEAIMKVLQRDAALKRAEEERVRHLPEKIKDDQQLKNMSGQWFYEAKAKRHRDKIHGADIIRASMRKKRPQIAAEQSKDRENGAKESWVNNVNKDAFLPPELAGVVEEPEEDAAPASPSSSVVNPASSVIDMSQENTRKPNVSPEKRKNPFNSSKLPEGHSSQQTKNEQSKNGRTGLFQTSKEDELSESKEKSTVADTSIQKLEKSKQTLPGLSNGSQIKAPIPKARKMIYKSTDLNKDDNQSFPRQRTDSLKARGAPRGILKRNSSSSSTDSETLRYNHNFEPKSKIVSPGLTIHERISEKEHSLEDNSSPNSLEPLKHVRFSAVKDELPQSPGLIHGREVGEFSVLESDRLKNGMEDAGDTEEFQSDPKPSQYRKPSLFHQSTSSPYVSKSETHQPMTSGSFPINGLHSHSEVLTARPQSMENSPTINEPKDKSSELTRLESVLPRSPADELSHCVEPEPSQVPGGSSRDRQQGSEEEPSPVLKTLERSAARKMPSKSLEDISSDSSNQAKVDNQPEELVRSAEDVSTVPTQPDNPFSHPDKLKRMSKSVPAFLQDESDDRETDTASESSYQLSRHKKSPSSLTNLSSSSGMTSLSSVSGSVMSVYSGDFGNLEVKGNIQFAIEYVESLKELHVFVAQCKDLAAADVKKQRSDPYVKAYLLPDKGKMGKKKTLVVKKTLNPVYNEILRYKIEKQILKTQKLNLSIWHRDTFKRNSFLGEVELDLETWDWDNKQNKQLRWYPLKRKTAPVALEAENRGEMKLALQYVPEPVPGKKLPTTGEVHIWVKECLDLPLLRGSHLNSFVKCTILPDTSRKSRQKTRAVGKTTNPIFNHTMVYDGFRPEDLMEACVELTVWDHYKLTNQFLGGLRIGFGTGKSYGTEVDWMDSTSEEVALWEKMVNSPNTWIEATLPLRMLLIAKISK

SEQ ID NO: 66137 - protein, 155 aa, Homo sapiens
MSKSVPAFLQDESDDRETDTASESSYQLSRHKKSPSSLTNLSSSSGMTSLSSVSGSVMSVYSGDFGNLEVKGNIQFAIEYVESLKELHVFVAQCKDLAAADVKKQRSDPYVKAYLLPDKGKMGKKKTLVVKKTLNPVYNEILRYKIEKQILKTQK

SEQ ID NO: 66138 - protein, 376 aa, Homo sapiens; identical to SEQ ID NO: 66132

SEQ ID NO: 66139 - protein, 651 aa, Homo sapiens
ETVEKAEAPLITESAFDAGFEKLLKEITEAPPYQPQVSVREETHEKESSQSEQTRFLGTVPHFYRAASQTSEMKDKSNGLESQVNQCDKMLGGDALVTDLLVDFCGSRSGVEIPRTPQLYVAHEIGTIKTVTPPEDRDSESGVAGGQGTLQEPGFGEASEAISVSRNRQPIPLLMNKENSTKTSKVELTLASPYMKQEKEEEKEGFSESDFSDGNTSSNAESWRNPSSSEEEPSPVLKTLERSAARKMPSKSLEDISSDSSNQAKVDNQPEELVRSAEDDEKPDQKPVTNECVPRISTVPTQPDNPFSHPDKLKRMSKSVPAFLQDEVSGSVMSVYSGDFGNLEVKGNIQFAIEYVESLKELHVFVAQCKDLAAADVKKQRSDPYVKAYLLPDKGKMGKKKTLVVKKTLNPVYNEILRYKIEKQILKTQKLNLSIWHRDTFKRNSFLGEVELDLETWDWDNKQNKQLRWYPLKRKTAPVALEAENRGEMKLALQYVPEPVPGKKLPTTGEVHIWVKECLDLPLLRGSHLNSFVKCTILPDTSRKSRQKTRAVGKTTNPIFNHTMVYDGFRPEDLMEACVELTVWDHYKLTNQFLGGLRIGFGTGKSYGTEVDWMDSTSEEVALWEKMVNSPNTWIEATLPLRMLLIAKISK

SEQ ID NO: 66140 - protein, 70 aa, Homo sapiens
MSKSVPAFLQDESDDRETDTASESSYQLSRHKKSPSSLTNLSSSSGMTSLSSVSGSVMSVYSGDFGNLEV

SEQ ID NO: 66141 - protein, 336 aa, Homo sapiens
MSKSVPAFLQDEVSGSVMSVYSGDFGNLEVKGNIQFAIEYVESLKELHVFVAQCKDLAAADVKKQRSDPYVKAYLLPDKGKMGKKKTLVVKKTLNPVYNEILRYKIEKQILKTQKLNLSIWHRDTFKRNSFLGEVELDLETWDWDNKQNKQLRWYPLKRKTAPVALEAENRGEMKLALQYVPEPVPGKKLPTTGEVHIWVKECLDLPLLRGSHLNSFVKCTILPDTSRKSRQKTRAVGKTTNPIFNHTMVYDGFRPEDLMEACVELTVWDHYKLTNQFLGGLRIGFGTGKSYGTEVDWMDSTSEEVALWEKMVNSPNTWIEATLPLRMLLIAKISK

SEQ ID NO: 66142 - protein, 671 aa, Homo sapiens
MSELLDLSFLSEEEKDLILSVLQRDEEVRKADEKRIRRLKNELLEIKRKGAKRGSQHYSDRTCARCQESLGRLSPKTNTCRGCNHLVCRDCRIQESNGTWRCKVCAKEIELKKATGDWFYDQKVNRFAYRTGSEIIRMSLRHKPAVSKRETVGQSLLHQTQMGDIWPGRKIIQERQKEPSVLFEVPKLKSGKSALEAESESLDSFTADSDSTSRRDSLDKSGLFPEWKKMSAPKSQVEKETQPGGQNVVFVDEGEMIFKKNTRKILRPSEYTKSVIDLRPEDVVHESGSLGDRSKSVPGLNVDMEEEEEEEDIDHLVKLHRQKLARSSMQSGSSMSTIGSMMSIYSEAGDFGNIFVTGRIAFSLKYEQQTQSLVVHVKECHQLAYADEAKKRSNPYVKTYLLPDKSRQGKRKTSIKRDTINPLYDETLRYEIPESLLAQRTLQFSVWHHGRFGRNTFLGEAEIQMDSWKLDKKLDHCLPLHGKISAESPTGLPSHKGELVVSLKYIPASKTPVGGDRKKSKGGEGGELQVWIKEAKNLTAAKAGGTSDSFVKGYLLPMRNKASKRKTPVMKKTLNPHYNHTFVYNGVRLEDLQHMCLELTVWDREPLASNDFLGGVRLGVGTGISNGEVVDWMDSTGEEVSLWQKMRQYPGSWAEGTLQLRSSMAKQKLGL

SEQ ID NO: 66143 - protein, 671 aa, Homo sapiens; identical to SEQ ID NO: 66142

SEQ ID NO: 66144 - protein, 349 aa, Homo sapiens
MSELLDLSFLSEEEKDLILSVLQRDEEVRKADEKRIRRLKNELLEIKRKGAKRGSQHYSDRTCARCQESLGRLSPKTNTCRGCNHLVCRDCRIQESNGTWRCKVCAKEIELKKATGDWFYDQKVNRFAYRTGSEIIRMSLRHKPAVSKRETVGQSLLHQTQMGDIWPGRKIIQERQKEPSVLFEVPKLKSGKSALEAESESLDSFTADSDSTSRRDSLDKSGLFPEWKKMSAPKSQVEKETQPGGQNVVFVDEGEMIFKKNTRKILRPSEYTKSVIDLRPEDVVHESGSLGDRSKSVPGLNVDMEEEEEEEDIDHLVKLHRQKLARSSMQSGSSMVSSIRSVVTGMLGY

SEQ ID NO: 66145 - protein, 671 aa, Homo sapiens; identical to SEQ ID NO: 66142

SEQ ID NO: 66146 - protein, 673 aa, Homo sapiens
MSELLDLSFLSEEEKDLILSVLQRDEEVRKADEKRIRRLKNELLEIKRKGAKRGSQHYSDRTCARCQESLGRLSPKTNTCRGCNHLVCRDCRIQESNGTWRCKVCAKEIELKKATGDWFYDQKVNRFAYRTGSEIIRMSLRHKPAVSKRETVGQSLLHQTQMGDIWPGRKIIQERQKEPSSVLFEVPKLKSGKSALEAESESLDSFTADSDSTSRRDSLDKSGLFPEWKKMSAPKSQVEKETQPGGQNVVFVDEGEMIFKKNTRKILRPSEYTKSVIDLRPEDVVHESGSLGDRSKSVPGLNVDMVEEEEEEEDIDHLVKLHRQKLARSSMQSGSSMSTIGSMMSIYSEAGDFGNIFVTGRIAFSLKYEQQTQSLVVHVKECHQLAYADEAKKRSNPYVKTYLLPDKSRQGKRKTSIKRDTINPLYDETLRYEIPESLLAQRTLQFSVWHHGRFGRNTFLGEAEIQMDSWKLDKKLDHCLPLHGKISAESPTGLPSHKGELVVSLKYIPASKTPVGGDRKKSKGGEGGELQVWIKEAKNLTAAKAGGTSDSFVKGYLLPMRNKASKRKTPVMKKTLNPHYNHTFVYNGVRLEDLQHMCLELTVWDREPLASNDFLGGVRLGVGTGISNGEVVDWMDSTGEEVSLWQKMRQYPGSWAEGTLQLRSSMAKQKLGL

SEQ ID NO: 66147 - protein, 671 aa, Homo sapiens; identical to SEQ ID NO: 66142

SEQ ID NO: 66148 - protein, 310 aa, Homo sapiens
MRRAALWLWLCALALSLQPALPQIVATNLPPEDQDGSGDDSDNFSGSGAGALQDITLSQQTPSTWKDTQLLTAIPTSPEPTGLEATAASTSTLPAGEGPKEGEAVVLPEVEPGLTAREQEATPRPRETTQLPTTHLASTTTATTAQEPATSHPHRDMQPGHHETSTPAGPSQADLHTPHTEDGGPSATERAAEDGASSQLPAAEGSGEQDFTFETSGENTAVVAVEPDRRNQSPVDQGATGASQGLLDRKEVLGGVIAGGLVGLIFAVCLVGFMLYRMKKKDEGSYSLEEPKQANGGAYQKPTKQEEFYA

SEQ ID NO: 66149 - protein, 310 aa, Homo sapiens; identical to SEQ ID NO: 66148

SEQ ID NO: 66150 - protein, 201 aa, Homo sapiens
MRRAWILLTLGLVACVSAESRAELTSDKDMYLDNSSIEEASGVYPIDDDDYASASGSGADEDVESPELTTSRPLPKILLTSAAPKVETTTLNIQNKIPAQTKSPEETDKEKVHLSDSERKMDPAEEDTNVYTEKHSDSLFKRTEVLAAVIAGGVIGFLFAIFLILLLVYRMRKKDEGSYDLGERKPSSAAYQKAPTKEFYA

SEQ ID NO: 66151 - protein, 165 aa, Homo sapiens
MRRAWILLTLGLVACVSAESVRADEDVESPELTTSRPLPKILLTSAAPKVETTTLNIQNKIPAQTKSPEETDKEKVHLSDSERKMDPAEEDTNVYTEKHSDSLFKRTEVLAAVIAGGVIGFLFAIFLILLLVYRMRKKDEGSYDLGERKPSSAAYQKAPTKEFYA

SEQ ID NO: 66152 - protein, 172 aa, Homo sapiens
MYLDNSSIEEASGVYPIDDDDYASASGSGADEDVESPELTTSRPLPKILLTSAAPKVETTTLNIQNKIPAQTKSPEETDKEKVHLSDSERKMDPAEEDTNVYTEKHSDSLFKRTEVLAAVIAGGVIGFLFAIFLILLLVYRMRKKDEGSYDLGERKPSSAAYQKAPTKEFYA

SEQ ID NO: 66153 - protein, 172 aa, Homo sapiens; identical to SEQ ID NO: 66152

SEQ ID NO: 66154 - protein, 201 aa, Homo sapiens; identical to SEQ ID NO: 66150

SEQ ID NO: 66155 - protein, 191 aa, Homo sapiens
MRVACVSAESRAELTSDKDMYLDNSSIEEASGVYPIDDDDYASASGSGADEDVESPELTTSRPLPKILLTSAAPKVETTTLNIQNKIPAQTKSPEETDKEKVHLSDSERKMDPAEEDTNVYTEKHSDSLFKRTEVLAAVIAGGVIGFLFAIFLILLLVYRMRKKDEGSYDLGERKPSSAAYQKAPTKEFYA

SEQ ID NO: 66156 - protein, 384 aa, Homo sapiens
MAIAYLGSSCPSQPPSSLALSLSPTPSDFEQESGIETAMRFSPDVALAVSTTPAVLPTTNIQPVGTPFEELPSERPTLEPATSPLVVTEVPEEPSQRATTVSTTMATTAATSTGDPTVATVPATVATATPSTPAAPPFTATTAVIRTTGVRRLLPLPLTTVATARATTPEAPSPPTTAAVLDTEAPTPRLVSTATSRPRALPRPATTQEPDIPERSTLPLGTTAPGPTEVAQTPTPETFLTTIRDEPEVPVSGGPSGDFELPEEETTQPDTANEVVAVGGAAAKASSPPGTLPKGARPGPGLLDNAIDSGSSAAQLPQKSILERKEVLVAVIVGGVVGALFAAFLVTLLIYRMKKKDEGSYTLEEPKQASVTYQKPDKQEEFYA

SEQ ID NO: 66157 - protein, 442 aa, Homo sapiens
MKPGPPHRAGAAHGAGAGAGAAAGPGARGLLLPPLLLLLLAGRAAGAQRWRSENFERPVDLEGSGDDDSFPDDELDDLYSGSGSGYFEQESGIETAMRFSPDVALAVSTTPAVLPTTNIQPVGTPFEELPSERPTLEPATSPLVVTEVPEEPSQRATTVSTTMATTAATSTGDPTVATVPATVATATPSTPAAPPFTATTAVIRTTGVRRLLPLPLTTVATARATTPEAPSPPTTAAVLDTEAPTPRLVSTATSRPRALPRPATTQEPDIPERSTLPLGTTAPGPTEVAQTPTPETFLTTIRDEPEVPVSGGPSGDFELPEEETTQPDTANEVVAVGGAAAKASSPPGTLPKGARPGPGLLDNAIDSGSSAAQLPQKSILERKEVLVAVIVGGVVGALFAAFLVTLLIYRMKKKDEGSYTLEEPKQASVTYQKPDKQEEFYA

SEQ ID NO: 66158 - protein, 198 aa, Homo sapiens
MAPARLFALLLFFVGGVAESIRETEVIDPQDLLEGRYFSGALPDDEDVVGPGQESDDFELSGSGDLDDLEDSMIGPEVVHPLVPLDNHIPERAGSGSQVPTEPKKLEENEVIPKRISPVEESEDVSNKVSMSSTVQGSNIFERTEVLAALIVGGIVGILFAVFLILLLMYRMKKKDEGSYDLGKKPIYKKAPTNEFYA

SEQ ID NO: 66159 - protein, 126 aa, Homo sapiens
MIGPEVVHPLVPLDNHIPERAGSGSQVPTEPKKLEENEVIPKRISPVEESEDVSNKVSMSSTVQGSNIFERTEVLAALIVGGIVGILFAVFLILLLMYRMKKKDEGSYDLGKKPIYKKAPTNEFYA

SEQ ID NO: 66160 - protein, 616 aa, Homo sapiens
MFRTAVMMAASLALTGAVVAHAYYLKHQFYPTVVYLTKSSPSMAVLYIQAFVLVFLLGKVMGKVFFGQLRAAEMEHLLERSWYAVTETCLAFTVFRDDFSPRFVALFTLLLFLKCFHWLAEDRVDFMERSPNISWLFHCRIVSLMFLLGILDFLFVSHAYHSILTRGASVQLVFGFEYAILMTMVLTIFIKYVLHSVDLQSENPWDNKAVYMLYTELFTGFIKVLLYMAFMTIMIKVHTFPLFAIRPMYLAMRQFKKAVTDAIMSRRAIRNMNTLYPDATPEELQAMDNVCIICREEMVTGAKRLPCNHIFHTSCLRSWFQRQQTCPTCRMDVLRASLPAQSPPPPEPADQGPPPAPHPPPLLPQPPNFPQGLLPPFPPGMFPLWPPMGPFPPVPPPPSSGEAVAPPSTSAALSRPSGAATTTAAGTSATAASATASGPGSGSAPEAGPAPGFPFPPPWMGMPLPPPFAFPPMPVPPAGFAGLTPEELRALEGHERQHLEARLQSLRNIHTLLDAAMLQINQYLTVLASLGPPRPATSVNSTEETATTVVAAASSTSIPSSEATTPTPGASPPAPEMERPPAPESVGTEEMPEDGEPDAAELRRRRLQKLESPVAH

SEQ ID NO: 66161 - protein, 565 aa, Homo sapiens
MFRTAVMMAASLALTGAVVAHAYYLKHQFYPTVVYLTKSSPSMAVLYIQAFVLVFLLGKVMGKVFFGQLRAAEMEHLLERSWYAVTETCLAFTVFRDDFSPRFVALFTLLLFLKCFHWLAEDRVDFYAILMTMVLTIFIKYVLHSVDLQSENPWDNKAVYMLYTELFTGFIKVLLYMAFMTIMIKVHTFPLFAIRPMYLAMRQFKKAVTDAIMSRRAIRNMNTLYPDATPEELQAMDNVCIICREEMVTGAKRLPCNHIFHTSCLRSWFQRQQTCPTCRMDVLRASLPAQSPPPPEPADQGPPPAPHPPPLLPQPPNFPQGLLPPFPPGMFPLWPPMGPFPPVPPPPSSGEAVAPPSTSAALSRPSGAATTTAAGTSATAASATASGPGSGSAPEAGPAPGFPFPPPWMGMPLPPPFAFPPMPVPPAGFAGLTPEELRALEGHERQHLEARLQSLRNIHTLLDAAMLQINQYLTVLASLGPPRPATSVNSTEETATTVVAAASSTSIPSSEATTPTPGASPPAPEMERPPAPESVGTEEMPEDGEPDAAELRRRRLQKLESPVAH

SEQ ID NO: 66162 - protein, 617 aa, Homo sapiens
MFRTAVMMAASLALTGAVVAHAYYLKHQFYPTVVYLTKSSPSMAVLYIQAFVLVFLLGKVMGKVFFGQLRAAEMEHLLERSWYAVTETCLAFTVFRDDFSPRFVALFTLLLFLKCFHWLAEDRVDFMERSPNISWLFHCRIVSLMFLLGILDFLFVSHAYHSILTRGASVQLVFGFEYAILMTMVLTIFIKYVLHSVDLQSENPWDNKAVYMLYTELFTGFIKVLLYMAFMTIMIKVHTFPLFAIRPMYLAMRQFKKAVTDAIMSRRAIRNMNTLYPDATPEELQAMDNVCIICREEMVTGAKRLPCNHIFHTSCLRSWFQRQQTCPTCRMDVLRASLPAQSPPPPEPADQGPPPAPHPPPLLPQPPNFPQGLLPPFPPGMFPLWPPMGPFPPVPPPPSSGEAVAPPSTSAAALSRPSGAATTTAAGTSATAASATASGPGSGSAPEAGPAPGFPFPPPWMGMPLPPPFAFPPMPVPPAGFAGLTPEELRALEGHERQHLEARLQSLRNIHTLLDAAMLQINQYLTVLASLGPPRPATSVNSTEETATTVVAAASSTSIPSSEATTPTPGASPPAPEMERPPAPESVGTEEMPEDGEPDAAELRRRRLQKLESPVAH

SEQ ID NO: 66163 - protein, 629 aa, Homo sapiens
MFRTAVMMAASLALTGAVVAHAYYLKHQFYPTVVYLTKSSPSMAVLYIQAFVLVFLLGKVMGKVFFGQLRAAEMEHLLERSWYAVTETCLAFTVFRDDFSPRFVALFTLLLFLKCFHWLAEDRVDFMERSPNISWLFHCRIVSLMFLLGILDFLFVSHAYHSILTRGASVQLVFGFEYAILMTMVLTIFIKYVLHSVDLQSENPWDNKAVYMLYTELFTGFIKVLLYMAFMTIMIKVHTFPLFAIRPMYLAMRQFKKAVTDAIMSRRAIRNMNTLYPDATPEELQAMDNVCIICREEMVTGAKRLPCNHIFHTSCLRSWFQRQQTCPTCRMDVLRASLPAQSPPPPEPADQGPPPAPHPPPLLPQPPNFPQGLLPPFPPGMFPLWPPMGPFPPVPPPPSSGEAVAPPSTSAAALSRPSGAATTTAAGTSATAASATASGPGSGSAPEAGPAPGFPFPPPWMGMPLPPPFAFPPMPVPPAGFAGLTPEELRALEGHERQHLEARLQSLRNIHTLLDAAMLQINQYLTVLASLGPPGLPLQSTPLRRLPLQLLLLPPPPASLAQRPRPQPQEPPHQPLKWKGLQLLSQWAQRRCLRMESPMQQSSAGAACRSWSLLLPTDTAPAQPQPLLF

SEQ ID NO: 66164 - protein, 616 aa, Homo sapiens; identical to SEQ ID NO: 66160

SEQ ID NO: 66165 - protein, 396 aa, Homo sapiens
MSVAFASARPRGKGEVTQQTIQKMLDENHHLIQCILEYQSKGKTAECTQYQQILHRNLVYLATIADSNQNMQSLLPAPPTQNMNLGPGALTQSGSSQGLHSQGSLSDAISTGLPPSSLLQGQIGNGPSHVSMQQTAPNTLPTTSMSISGPGYSHAGPASQGVPMQGQGTIGNYVSRTNINMQSNPVSMMQQQAATSHYSSAQGGSQHYQGQSSIAMMGQGSQGSSMMGQRPMAPYRPSQQGSSQQYLGQEEYYGEQYSHSQGAAEPMGQQYYPDGHGDYAYQQSSYTEQSYDRSFEESTQHYYEGGNSQYSQQQAGYQQGAAQQQTYSQQQYPSQQSYPGQQQGYGSAQGAPSQYPGYQQGQGQQYGSYRAPQTAPSAQQQRPYGYEQGQYGNYQQ

SEQ ID NO: 66166 - protein, 399 aa, Homo sapiens
MQSLSTEARYVPRVPQHRDQISPRSPQHGGQICPRSPLHRGQICPRSPPARRYQQILHRNLVYLATIADSNQNMQSLLPAPPTQNMNLGPGALTQSGSSQGLHSQGSLSDAISTGLPPSSLLQGQIGNGPSHVSMQQTAPNTLPTTSMSISGPGYSHAGPASQGVPMQGQGTIGNYVSRTNINMQSNPVSMMQQQAATSHYSSAQGGSQHYQGQSSIAMMGQGSQGSSMMGQRPMAPYRPSQQGSSQQYLGQEEYYGEQYSHSQGAAEPMGQQYYPDGHGDYAYQQSSYTEQSYDRSFEESTQHYYEGGNSQYSQQQAGYQQGAAQQQTYSQQQYPSQQSYPGQQQGYGSAQGAPSQYPGYQQGQGQQYGSYRAPQTAPSAQQQRPYGYEQGQYGNYQQ

SEQ ID NO: 66167 - protein, 396 aa, Homo sapiens; identical to SEQ ID NO: 66165

SEQ ID NO: 66168 - protein, 128 aa, Homo sapiens
MQSLSTEARYVPRVPQHRDQISPRSPQHGGQICPRSPLHRGQICPRSPPARRYQQILHRNLVYLATIADSNQNMQSLLPAPPTQNMNLGPGALTQSGSSQGLHSQGSLSDAISTGLPPSSLLQGQIGN

SEQ ID NO: 66169 - protein, 77 aa, Homo sapiens
MSVAFVPDWLRGKAEVNQETIQRLLEENDQLIRCIVEYQNKGRGNECVQYQHVLHRNLIYLATIADASPTSTSKAME

SEQ ID NO: 66170 - protein, 77 aa, Homo sapiens; identical to SEQ ID NO: 66169

SEQ ID NO: 66171 - protein, 387 aa, Homo sapiens
MSVAFAAPRQRGKGEITPAAIQKMLDDNNHLIQCIMDSQNKGKTSECSQYQQMLHTNLVYLATIADSNQNMQSLLPAPPTQNMPMGPGGMNQSGPPPPPRSHNMPSDGMVGGGPPAPHMQNQMNGQMPGPNHMPMQGPGPNQLNMTNSSMNMPSSSHGSMGGYNHSVPSSQSMPVQNQMTMSQGQPMGNYGPRPNMSMQPNQGPMMHQQPPSQQYNMPQGGGQHYQGQQPPMGMMGQVNQGNHMMGQRQIPPYRPPQQGPPQQYSGQEDYYGDQYSHGGQGPPEGMNQQYYPDGNSQYGQQQDAYQGPPPQQGYPPQQQQYPGQQGYPGQQQGYGPSQGGPGPQYPNYPQGQGQQYGGYRPTQPGPPQPPQQRPYGYDQGQYGNYQQ

SEQ ID NO: 66172 - protein, 418 aa, Homo sapiens
MSVAFAAPRQRGKGEITPAAIQKMLDDNNHLIQCIMDSQNKGKTSECSQYQQMLHTNLVYLATIADSNQNMQSLLPAPPTQNMPMGPGGMNQSGPPPPPRSHNMPSDGMVGGGPPAPHMQNQMNGQMPGPNHMPMQGPGPNQLNMTNSSMNMPSSSHGSMGGYNHSVPSSQSMPVQNQMTMSQGQPMGNYGPRPNMSMQPNQGPMMHQQPPSQQYNMPQGGGQHYQGQQPPMGMMGQVNQGNHMMGQRQIPPYRPPQQGPPQQYSGQEDYYGDQYSHGGQGPPEGMNQQYYPDGHNDYGYQQPSYPEQGYDRPYEDSSQHYYEGGNSQYGQQQDAYQGPPPQQGYPPQQQQYPGQQGYPGQQQGYGPSQGGPGPQYPNYPQGQGQQYGGYRPTQPGPPQPPQQRPYGYDQGQYGNYQQ

SEQ ID NO: 66173 - protein, 421 aa, Homo sapiens
GGNMSVAFAAPRQRGKGEITPAAIQKMLDDNNHLIQCIMDSQNKGKTSECSQYQQMLHTNLVYLATIADSNQNMQSLLPAPPTQNMPMGPGGMNQSGPPPPPRSHNMPSDGMVGGGPPAPHMQNQMNGQMPGPNHMPMQGPGPNQLNMTNSSMNMPSSSHGSMGGYNHSVPSSQSMPVQNQMTMSQGQPMGNYGPRPNMSMQPNQGPMMHQQPPSQQYNMPQGGGQHYQGQQPPMGMMGQVNQGNHMMGQRQIPPYRPPQQGPPQQYSGQEDYYGDQYSHGGQGPPEGMNQQYYPDGHNDYGYQQPSYPEQGYDRPYEDSSQHYYEGGNSQYGQQQDAYQGPPPQQGYPPQQQQYPGQQGYPGQQQGYGPSQGGPGPQYPNYPQGQGQQYGGYRPTQPGPPQPPQQRPYGYDQGQYGNYQQ

SEQ ID NO: 66174 - protein, 132 aa, Homo sapiens
MNQQYYPDGHNDYGYQQPSYPEQGYDRPYEDSSQHYYEGGNSQYGQQQDAYQGPPPQQGYPPQQQQYPGQQGYPGQQQGYGPSQGGPGPQYPNYPQGQGQQYGGYRPTQPGPPQPPQQRPYGYDQNSRWTVC

SEQ ID NO: 66175 - protein, 336 aa, Homo sapiens
MPMGPGGMNQSGPPPPPRSHNMPSDGMVGGGPPAPHMQNQMNGQMPGPNHMPMQGPGPNQLNMTNSSMNMPSSSHGSMGGYNHSVPSSQSMPVQNQMTMSQGQPMGNYGPRPNMSMQPNQGPMMHQQPPSQQYNMPQGGGQHYQGQQPPMGMMGQVNQGNHMMGQRQIPPYRPPQQGPPQQYSGQEDYYGDQYSHGGQGPPEGMNQQYYPDGHNDYGYQQPSYPEQGYDRPYEDSSQHYYEGGNSQYGQQQDAYQGPPPQQGYPPQQQQYPGQQGYPGQQQGYGPSQGGPGPQYPNYPQGQGQQYGGYRPTQPGPPQPPQQRPYGYDQGQYGNYQQ

SEQ ID NO: 66176 - protein, 395 aa, Homo sapiens
MLDDNNHLIQCIMDSQNKGKTSECSQYQQMLHTNLVYLATIADSNQNMQSLLPAPPTQNMPMGPGGMNQSGPPPPPRSHNMPSDGMVGGGPPAPHMQNQMNGQMPGPNHMPMQGPGPNQLNMTNSSMNMPSSSHGSMGGYNHSVPSSQSMPVQNQMTMSQGQPMGNYGPRPNMSMQPNQGPMMHQQPPSQQYNMPQGGGQHYQGQQPPMGMMGQVNQGNHMMGQRQIPPYRPPQQGPPQQYSGQEDYYGDQYSHGGQGPPEGMNQQYYPDGHNDYGYQQPSYPEQGYDRPYEDSSQHYYEGGNSQYGQQQDAYQGPPPQQGYPPQQQQYPGQQGYPGQQQGYGPSQGGPGPQYPNYPQGQGQQYGGYRPTQPGPPQPPQQRPYGYDQGQYGNYQQ

SEQ ID NO: 66177 - protein, 335 aa, Homo sapiens [sequence omitted]

SEQ ID NO: 66178 - protein, 335 aa, Homo sapiens [sequence omitted]

SEQ ID NO: 66179 - protein, 188 aa, Homo sapiens
MNGDDTFAKRPRDDAKASEKRSKAFDDIATYFSKKEWKKMKYSEKISYVYMKRNYKAMTKLGFKVTLPPFMCNKQATDFQGNDFDNDHNRRIQVEHPQMTFGRLHRIIPKIMPKKPAEDENDSKGVSEASGPQNDGKQLHPPGKANISEKINKRSGPKRGKHAWTHRLRERKQLVIYEEISDPEEDDE

SEQ ID NO: 66180 - protein, 223 aa, Homo sapiens
MNGDDAFARRPTVGAQIPEKIQKAFDDIAKYFSKEEWEKMKASEKIFYVYMKRKYEAMTKLGFKATLPPFMCNKRAEDFQGNDLDNDPNRGNQVERPQMTFGRLQGISPKIMPKKPAEEGNDSEEVPEASGPQNDGKELCPPGKPTTSEKIHERSGNREAQEKEERRGTAHRWSSQNTHNIGRFSLSTSMGAVHGTPKTITHNRDPKGGNMPGPTDCVRENSW

SEQ ID NO: 66181 - protein, 188 aa, Homo sapiens
MNGDDAFARRPTVGAQIPEKIQKAFDDIAKYFSKEEWEKMKASEKIFYVYMKRKYEAMTKLGFKATLPPFMCNKRAEDFQGNDLDNDPNRGNQVERPQMTFGRLQGISPKIMPKKPAEEGNDSEEVPEASGPQNDGKELCPPGKPTTSEKIHERSGPKRGEHAWTHRLRERKQLVIYEEISDPEEDDE

SEQ ID NO: 66182 - protein, 188 aa, Homo sapiens
MNGDDTFARRPTVGAQIPEKIQKAFDDIAKYFSKEEWEKMKVSEKIVYVYMKRKYEAMTKLGFKAILPSFMRNKRVTDFQGNDFDNDPNRGNQVQRPQMTFGRLQGIFPKIMPKKPAEEGNVSKEVPEASGPQNDGKQLCPPGKPTTSEKINMISGPKRGEHAWTHRLRERKQLVIYEEISDPEEDDE

SEQ ID NO: 66183 - protein, 170 aa, Homo sapiens
MNGDDTFARRPTVGAQIPEKIQKAFDDIAKYFSKEEWEKMKVSEKIVYVYMKRKYEAMTKLGFKAILPSFMRNKRVTDFQGNDFDNDPNRGNQVQRPQMTFGRLQGIFPKIMPKKPAEEGNVSKEVPEASGPQNDGKQLCPPGKPTTSEKINMISGVLQRYCRFGSRPLQ

SEQ ID NO: 66184 - protein, 100 aa, Homo sapiens
MYSLSVQRPQMTFGRLQGIFPKIMPKKPAEEGNVSKEVPEASGPQNDGKQLCPPGKPTTSEKINMISGPKRGEHAWTHRLRERKQLVIYEEISDPEEDDE

SEQ ID NO: 66185 - protein, 153 aa, Homo sapiens
MNGDDAFARRPRDDAQISEKLRKAFDDIAKYFSKKEWEKMKSSEKIVYVYMKLNYEVMTKLGFKVTLPPFMRSKRAADFHGNDFGNDRNHRNQVERPQMTFGSLQRIFPKDPKGGNMPGPTDCVRESSWWFMKRSATLRKMTSNSPRGYDTCP

SEQ ID NO: 66186 - protein, 188 aa, Homo sapiens
MNGDDAFARRPRDDAQISEKLRKAFDDIAKYFSKKEWEKMKSSEKIVYVYMKLNYEVMTKLGFKVTLPPFMRSKRAADFHGNDFGNDRNHRNQVERPQMTFGSLQRIFPKIMPKKPAEEENGLKEVPEASGPQNDGKQLCPPGNPSTLEKINKTSGPKRGKHAWTHRLRERKQLVVYEEISDPEEDDE

SEQ ID NO: 66187 - protein, 663 aa, Homo sapiens
MGPLRESKKEHRVQHHDKEISRSRIPRLILRPHMPQQQHKVSPASESPFSEEESREFNPSSSGRSARTVSSNSFCSDDTGCPSSQSVSPVKTPSDAGNSPIGFCPGSDEGFTRKKCTIGMVGEGSIQSSRYKKESKSGLVKPGSEADFSSSSSTGSISAPEVHMSTAGSKRSSSSRNRGPHGRSNGASSHKPGSSPSSPREKDLLSMLCRNQLSPVNIHPSYAPSSPSSSNSGSYKGSDCSPIMRRSGRYMSCGENHGVRPPNPEQYLTPLQQKEVTVRHLKTKLKESERRLHERESEIVELKSQLARMREDWIEEECHRVEAQLALKEARKEIKQLKQVIETMRSSLADKDKGIQKYFVDINIQNKKLESLLQSMEMAHSGSLRDELCLDFPCDSPEKSLTLNPPLDTMADGLSLEEQVTGEGADRELLVGDSIANSTDLFDEIVTATTTESGDLELVHSTPGANVLELLPIVMGQEEGSVVVERAVQTDVVPYSPAISELIQSVLQKLQDPCPSSLASPDESEPDSMESFPESLSALVVDLTPRNPNSAILLSPVETPYANVDAEVHANRLMRELDFAACVEERLDGVIPLARGGVVRQYWSSSFLVDLLAVAAPVVPTVLWAFSTQRGGTDPVYNIGALLRGCCVVALHSLRRTAFRIKT

SEQ ID NO: 66188 - protein, 660 aa, Homo sapiens
MSNFEKEHRVQHHDKEISRSRIPRLILRPHMPQQQHKVSPASESPFSEEESREFNPSSSGRSARTVSSNSFCSDDTGCPSSQSVSPVKTPSDAGNSPIGFCPGSDEGFTRKKCTIGMVGEGSIQSSRYKKESKSGLVKPGSEADFSSSSSTGSISAPEVHMSTAGSKRSSSSRNRGPHGRSNGASSHKPGSSPSSPREKDLLSMLCRNQLSPVNIHPSYAPSSPSSSNSGSYKGSDCSPIMRRSGRYMSCGENHGVRPPNPEQYLTPLQQKEVTVRHLKTKLKESERRLHERESEIVELKSQLARMREDWIEEECHRVEAQLALKEARKEIKQLKQVIETMRSSLADKDKGIQKYFVDINIQNKKLESLLQSMEMAHSGSLRDELCLDFPCDSPEKSLTLNPPLDTMADGLSLEEQVTGEGADRELLVGDSIANSTDLFDEIVTATTTESGDLELVHSTPGANVLELLPIVMGQEEGSVVVERAVQTDVVPYSPAISELIQSVLQKLQDPCPSSLASPDESEPDSMESFPESLSALVVDLTPRNPNSAILLSPVETPYANVDAEVHANRLMRELDFAACVEERLDGVIPLARGGVVRQYWSSSFLVDLLAVAAPVVPTVLWAFSTQRGGTDPVYNIGALLRGCCVVALHSLRRTAFRIKT

SEQ ID NO: 66189 - protein, 544 aa, Homo sapiens
MVGEGSIQSSRYKKESKSGLVKPGSEADFSSSSSTGSISAPEVHMSTAGSKRSSSSRNRGPHGRSNGASSHKPGSSPSSPREKDLLSMLCRNQLSPVNIHPSYAPSSPSSSNSGSYKGSDCSPIMRRSGRYMSCGENHGVRPPNPEQYLTPLQQKEVTVRHLKTKLKESERRLHERESEIVELKSQLARMREDWIEEECHRVEAQLALKEARKEIKQLKQVIETMRSSLADKDKGIQKYFVDINIQNKKLESLLQSMEMAHSGSLRDELCLDFPCDSPEKSLTLNPPLDTMADGLSLEEQVTGEGADRELLVGDSIANSTDLFDEIVTATTTESGDLELVHSTPGANVLELLPIVMGQEEGSVVVERAVQTDVVPYSPAISELIQSVLQKLQDPCPSSLASPDESEPDSMESFPESLSALVVDLTPRNPNSAILLSPVETPYANVDAEVHANRLMRELDFAACVEERLDGVIPLARGGVVRQYWSSSFLVDLLAVAAPVVPTVLWAFSTQRGGTDPVYNIGALLRGCCVVALHSLRRTAFRIKT

SEQ ID NO: 66190 - protein, 663 aa, Homo sapiens; identical to SEQ ID NO: 66187

SEQ ID NO: 66191 - protein, 662 aa, Homo sapiens
MGPLRESKEHRVQHHDKEISRSRIPRLILRPHMPQQQHKVSPASESPFSEEESREFNPSSSGRSARTVSSNSFCSDDTGCPSSQSVSPVKTPSDAGNSPIGFCPGSDEGFTRKKCTIGMVGEGSIQSSRYKKESKSGLVKPGSEADFSSSSSTGSISAPEVHMSTAGSKRSSSSRNRGPHGRSNGASSHKPGSSPSSPREKDLLSMLCRNQLSPVNIHPSYAPSSPSSSNSGSYKGSDCSPIMRRSGRYMSCGENHGVRPPNPEQYLTPLQQKEVTVRHLKTKLKESERRLHERESEIVELKSQLARMREDWIEEECHRVEAQLALKEARKEIKQLKQVIETMRSSLADKDKGIQKYFVDINIQNKKLESLLQSMEMAHSGSLRDELCLDFPCDSPEKSLTLNPPLDTMADGLSLEEQVTGEGADRELLVGDSIANSTDLFDEIVTATTTESGDLELVHSTPGANVLELLPIVMGQEEGSVVVERAVQTDVVPYSPAISELIQSVLQKLQDPCPSSLASPDESEPDSMESFPESLSALVVDLTPRNPNSAILLSPVETPYANVDAEVHANRLMRELDFAACVEERLDGVIPLARGGVVRQYWSSSFLVDLLAVAAPVVPTVLWAFSTQRGGTDPVYNIGALLRGCCVVALHSLRRTAFRIKT

SEQ ID NO: 66192 - protein, 663 aa, Homo sapiens; identical to SEQ ID NO: 66187

SEQ ID NO: 66193 - protein, 663 aa, Homo sapiens; identical to SEQ ID NO: 66187

SEQ ID NO: 66194 - protein, 663 aa, Homo sapiens; identical to SEQ ID NO: 66187

SEQ ID NO: 66195 - protein, 662 aa, Homo sapiens; identical to SEQ ID NO: 66191

SEQ ID NO: 66196 - protein, 137 aa, Homo sapiens
MGPLRESKKEHRVQHHDKEISRSRIPRLILRPHMPQQQHKVSPASESPFSEEESREFNPSSSGRSARTVSSNSFCSDDTGCPSSQSVSPVKTPSDAGNSPIGFCPGSDEGFTRKKCTIGMVGEGSIQSSRYKKESKS

SEQ ID NO: 66197 - protein, 76 aa, Homo sapiens
MGPLRESKKEHRVQHHDKEISRSRIPRLILRPHMPQQQHKVSPASESPFSEEESREFNPSSSGRSARTVSSNSFCS

SEQ ID NO: 66198 - protein, 73 aa, Homo sapiens
MGPLRESKKEHRVQHHDKEISRSRIPRLILRPHMPQQQHKVSPASESPFSEEESREFNPSSSGRSARTVSSNS

SEQ ID NO: 66199 - protein, 125 aa, Homo sapiens
MVGEGSIQSSRYKKESKSGLVKPGSEADFSSSSSTGSISAPEVHMSTAGSKRSSSSRNRGPHGRSNGASSHKPGSSPSSPREKDLLSMLCRNQLSPVNIHPSYAPSSPSSSNSGSYKGSDCSPIM

SEQ ID NO: 66200 - protein, 544 aa, Homo sapiens; identical to SEQ ID NO: 66189

SEQ ID NO: 66201 - protein, 80 aa, Homo sapiens
MVGEGSIQSSRYKKESKSGLVKPGSEADFSSSSSTGSISAPEVHMSTAGSKRSSSSRNRGPHGRSNGASSHKPGSSPSSP

SEQ ID NO: 66202 - protein, 662 aa, Homo sapiens; identical to SEQ ID NO: 66191

SEQ ID NO: 66203 - protein, 95 aa, Homo sapiens
MGPLRESKKEHRVQHHDKEISRSRIPRLILRPHMPQQQHKVSPASESPFSEEESREFNPSSSGRSARTVSSNSFCSDDTGCPSSQSVSPVKTPSD

SEQ ID NO: 66204 - protein, 204 aa, Homo sapiens
MGPLRESKEHRVQHHDKEISRSRIPRLILRPHMPQQQHKVSPASESPFSEEESREFNPSSSGRSARTVSSNSFCSDDTGCPSSQSVSPVKTPSDAGNSPIGFCPGSDEGFTRKKCTIGMVGEGSIQSSRYKKESKSGLVKPGSEADFSSSSSTGSISAPEVHMSTAGSKRSSSSRNRGPHGRSNGASSHKPGSSPSSPREKDLL

SEQ ID NO: 66205 - protein, 35 aa, Homo sapiens
MVGEGSIQSSRYKKESKSGLVKPGSEADFSSSSST

SEQ ID NO: 66206 - protein, 34 aa, Homo sapiens
MVGEGSIQSSRYKKESKSGLVKPGSEADFSSSSS

SEQ ID NO: 66207 - protein, 80 aa, Homo sapiens; identical to SEQ ID NO: 66201

SEQ ID NO: 66208 - protein, 595 aa, Homo sapiens
MGPFWARKDDTGCPSSQSVSPVKTPSDAGNSPIGFCPGSDEGFTRKKCTIGMVGEGSIQSSRYKKESKSGLVKPGSEADFSSSSSTGSISAPEVHMSTAGSKRSSSSRNRGPHGRSNGASSHKPGSSPSSPREKDLLSMLCRNQLSPVNIHPSYAPSSPSSSNSGSYKGSDCSPIMRRSGRYMSCGENHGVRPPNPEQYLTPLQQKEVTVRHLKTKLKESERRLHERESEIVELKSQLARMREDWIEEECHRVEAQLALKEARKEIKQLKQVIETMRSSLADKDKGIQKYFVDINIQNKKLESLLQSMEMAHSGSLRDELCLDFPCDSPEKSLTLNPPLDTMADGLSLEEQVTGEGADRELLVGDSIANSTDLFDEIVTATTTESGDLELVHSTPGANVLELLPIVMGQEEGSVVVERAVQTDVVPYSPAISELIQSVLQKLQDPCPSSLASPDESEPDSMESFPESLSALVVDLTPRNPNSAILLSPVETPYANVDAEVHANRLMRELDFAACVEERLDGVIPLARGGVVRQYWSSSFLVDLLAVAAPVVPTVLWAFSTQRGGTDPVYNIGALLRGCCVVALHSLRRTAFRIKT

SEQ ID NO: 66209 - protein, 544 aa, Homo sapiens; identical to SEQ ID NO: 66189

SEQ ID NO: 66210 - protein, 663 aa, Homo sapiens; identical to SEQ ID NO: 66187

SEQ ID NO: 66211 - protein, 162 aa, Homo sapiens
MGPLRESKEHRVQHHDKEISRSRIPRLILRPHMPQQQHKVSPASESPFSEEESREFNPSSSGRSARTVSSNSFCSDDTGCPSSQSVSPVKTPSDAGNSPIGFCPGSDEGFTRKKCTIGMVGEGSIQSSRYKKESKSGLVKPGSEADFSSSSSTGSISAPEVH

SEQ ID NO: 66212 - protein, 662 aa, Homo sapiens; identical to SEQ ID NO: 66191

SEQ ID NO: 66213 - protein, 104 aa, Homo sapiens
MGPLRESKEHRVQHHDKEISRSRIPRLILRPHMPQQQHKVSPASESPFSEEESREFNPSSSGRSARTVSSNSFCSDDTGCPSSQSVSPVKTPSDAGNSPIGFCP

SEQ ID NO: 66214 - protein, 151 aa, Homo sapiens
MGPLRESKKEHRVQHHDKEISRSRIPRLILRPHMPQQQHKVSPASESPFSEEESREFNPSSSGRSARTVSSNSFCSDDTGCPSSQSVSPVKTPSDAGNSPIGFCPGSDEGFTRKKCTIGMVGEGSIQSSRYKKESKSGLVKPGSEADFSSS

SEQ ID NO: 66215 - protein, 76 aa, Homo sapiens; identical to SEQ ID NO: 66197

SEQ ID NO: 66216 - protein, 538 aa, Homo sapiens
MPGSGPSERMTWPGPALSAGPPTRPLSSAPGIPPIPPLTRTHSLMAMSLPGSRRTSAGSRRRTSPPVSVRDAYGTSSLSSSSNSGSYKGSDSSPTPRRSMKYTLCSDNHGIKPPTPEQYLTPLQQKEVCIRHLKARLKDTQDRLQDRDTEIDDLKTQLSRMQEDWIEEECHRVEAQLALKEARKEIKQLKQVIDTVKNNLIDKDKGLQKYFVDINIQNKKLETLLHSMEVAQNGMAKEDGTGESAGGSPARSLTRSSTYTKLSDPAVCGDRQPGDPSSGSAEDGADSGFAAADDTLSRTDALEASSLLSSGVDCGTEETSLHSSFGLGPRFPASNTYEKLLCGMEAGVQASCMQERAIQTDFVQYQPDLDTILEKVTQAQVCGTDPESGDRCPELDAHPSGPRDPNSAVVVTVGDELEAPEPITRGPTPQRPGANPNPGQSVSVVCPMEEEEEAAVAEKEPKSYWSRHYIVDLLAVVVPAVPTVAWLCRSQRRQGQPIYNISSLLRGCCTVALHSIRRISCRSLSQPSPSPAGGGSQL

SEQ ID NO: 66217 - protein, 494 aa, Homo sapiens
MAMSLPGSRRTSAGSRRRTSPPVSVRDAYGTSSLSSSSNSGSYKGSDSSPTPRRSMKYTLCSDNHGIKPPTPEQYLTPLQQKEVCIRHLKARLKDTQDRLQDRDTEIDDLKTQLSRMQEDWIEEECHRVEAQLALKEARKEIKQLKQVIDTVKNNLIDKDKGLQKYFVDINIQNKKLETLLHSMEVAQNGMAKEDGTGESAGGSPARSLTRSSTYTKLSDPAVCGDRQPGDPSSGSAEDGADSGFAAADDTLSRTDALEASSLLSSGVDCGTEETSLHSSFGLGPRFPASNTYEKLLCGMEAGVQASCMQERAIQTDFVQYQPDLDTILEKVTQAQVCGTDPESGDRCPELDAHPSGPRDPNSAVVVTVGDELEAPEPITRGPTPQRPGANPNPGQSVSVVCPMEEEEEAAVAEKEPKSYWSRHYIVDLLAVVVPAVPTVAWLCRSQRRQGQPIYNISSLLRGCCTVALHSIRRISCRSLSQPSPSPAGGGSQL

SEQ ID NO: 66218 - protein, 287 aa, Homo sapiens
MKDRLAELLDLSKQYDQQFPDGDDEFDSPHEDIVFETDHILESLYRDIRDIQDENQLLVADVKRLGKQNARFLTSMRRLSSIKRDTNSIAKAIKARGEVIHCKLRAMKELSEAAEAQHGPHSAVARISRAQYNALTLTFQRAMHDYNQAEMKQRDNCKIRIQRQLEIMGKEVSGDQIEDMFEQGKWDVFSENLLADVKGARAALNEIESRHRELLRLESRIRDVHELFLQMAVLVEKQADTLNVIELNVQKTVDYTGQAKAQVRKAVQYEEKNPCRTLCCFCCPCLK

SEQ ID NO: 66219 - protein, 204 aa, Homo sapiens
MALVSGISLDPEAAIGVTKRPPPKWVDGVDEIQYDVGRIKQKMKELASLHDKHLNRPTLDDSSEEEHAIEITTQEITQLFHRCQRAVQALPSRARACSEQEGRLLGNVVASLAQALQELSTSFRHAQSGYLKRMKNREERSQHFFDTSVPLMDDGDDNTLYHRGFTEDQLVLVEQNTLMVEEREREIRQIVQSISDLNEIFRDL

SEQ ID NO: 66220 - protein, 308 aa, Homo sapiens
MATRRLTDAFLLLRNNSIQNRQLLAEQELDELADDRMALVSGISLDPEAAIGVTKRPPPKWVDGVDEIQYDVGRIKQKMKELASLHDKHLNRPTLDDSSEEEHAIEITTQEITQLFHRCQRAVQALPSRARACSEQEGRLLGNVVASLAQALQELSTSFRHAQSGYLKRMKNREERSQHFFDTSVPLMDDGDDNTLYHRGFTEDQLVLVEQNTLMVEEREREIRQIVQSISDLNEIFRDLGAMIVEQGTVLDRIDYNVEQSCIKTEDGLKQLHKAEQYQKKNRKMLVILILFVIIIVLIVVLVGVKSR

SEQ ID NO: 66221 - protein, 321 aa, Homo sapiens
MATRRLTDAFLLLRNNSIQNRQLLAEQVSSHITSSPLHSRSIAALADDRMALVSGISLDPEAAIGVTKRPPPKWVDGVDEIQYDVGRIKQKMKELASLHDKHLNRPTLDDSSEEEHAIEITTQEITQLFHRCQRAVQALPSRARACSEQEGRLLGNVVASLAQALQELSTSFRHAQSGYLKRMKNREERSQHFFDTSVPLMDDGDDNTLYHRGFTEDQLVLVEQNTLMVEEREREIRQIVQSISDLNEIFRDLGAMIVEQGTVLDRIDYNVEQSCIKTEDGLKQLHKAEQYQKKNRKMLVILILFVIIIVLIVVLVGVKSR

SEQ ID NO: 66222 - protein, 251 aa, Homo sapiens
MALVSGISLDPEAAIGVTKRPPPKWVDGVDEIQYDVGRIKQKMKELASLHDKHLNRPTLDDSSEEEHAIEITTQEITQLFHRCQRAVQALPSRARACSEQEGRLLGNVVASLAQALQELSTSFRHAQSGYLKRMKNREERSQHFFDTSVPLMDDGDDNTLYHRGFTEDQLVLVEQNTLMVEEREREIRQIVQSISDLNEIFRDLGAMIVEQGTVLDRIDYNVEQSCIKTEDGLKQLHKAEQYQKKNRKMLV

SEQ ID NO: 66223 - protein, 308 aa, Homo sapiens
MATRRLTDAFLLLRNNSIQNRQLLAEQQLSKLADDRMALVSGISLDPEAAIGVTKRPPPKWVDGVDEIQYDVGRIKQKMKELASLHDKHLNRPTLDDSSEEEHAIEITTQEITQLFHRCQRAVQALPSRARACSEQEGRLLGNVVASLAQALQELSTSFRHAQSGYLKRMKNREERSQHFFDTSVPLMDDGDDNTLYHRGFTEDQLVLVEQNTLMVEEREREIRQIVQSISDLNEIFRDLGAMIVEQGTVLDRIDYNVEQSCIKTEDGLKQLHKAEQYQKKNRKMLVILILFVIIIVLIVVLVGVKSR

SEQ ID NO: 66224 - protein, 325 aa, Homo sapiens
MATRRLTDAFLLLRNNSIQNRQLLAEQVSSHITSSPLHSRSIAAALDELADDRMALVSGISLDPEAAIGVTKRPPPKWVDGVDEIQYDVGRIKQKMKELASLHDKHLNRPTLDDSSEEEHAIEITTQEITQLFHRCQRAVQALPSRARACSEQEGRLLGNVVASLAQALQELSTSFRHAQSGYLKRMKNREERSQHFFDTSVPLMDDGDDNTLYHRGFTEDQLVLVEQNTLMVEEREREIRQIVQSISDLNEIFRDLGAMIVEQGTVLDRIDYNVEQSCIKTEDGLKQLHKAEQYQKKNRKMLVILILFVIIIVLIVVLVGVKSR

SEQ ID NO: 66225 - protein, 304 aa, Homo sapiens
MATRRLTDAFLLLRNNSIQNRQLLAEQLADDRMALVSGISLDPEAAIGVTKRPPPKWVDGVDEIQYDVGRIKQKMKELASLHDKHLNRPTLDDSSEEEHAIEITTQEITQLFHRCQRAVQALPSRARACSEQEGRLLGNVVASLAQALQELSTSFRHAQSGYLKRMKNREERSQHFFDTSVPLMDDGDDNTLYHRGFTEDQLVLVEQNTLMVEEREREIRQIVQSISDLNEIFRDLGAMIVEQGTVLDRIDYNVEQSCIKTEDGLKQLHKAEQYQKKNRKMLVILILFVIIIVLIVVLVGVKSR

SEQ ID NO: 66226 - protein, 272 aa, Homo sapiens
MALVSGISLDPEAAIGVTKRPPPKWVDGVDEIQYDVGRIKQKMKELASLHDKHLNRPTLDDSSEEEHAIEITTQEITQLFHRCQRAVQALPSRARACSEQEGRLLGNVVASLAQALQELSTSFRHAQSGYLKRMKNREERSQHFFDTSVPLMDDGDDNTLYHRGFTEDQLVLVEQNTLMVEEREREIRQIVQSISDLNEIFRDLGAMIVEQGTVLDRIDYNVEQSCIKTEDGLKQLHKAEQYQKKNRKMLVILILFVIIIVLIVVLVGVKSR

SEQ ID NO: 66227 - protein, 325 aa, Homo sapiens
MATRRLTDAFLLLRNNSIQNRQLLAEQVSSHITSSPLHSRSIAAELDELADDRMALVSGISLDPEAAIGVTKRPPPKWVDGVDEIQYDVGRIKQKMKELASLHDKHLNRPTLDDSSEEEHAIEITTQEITQLFHRCQRAVQALPSRARACSEQEGRLLGNVVASLAQALQELSTSFRHAQSGYLKRMKNREERSQHFFDTSVPLMDDGDDNTLYHRGFTEDQLVLVEQNTLMVEEREREIRQIVQSISDLNEIFRDLGAMIVEQGTVLDRIDYNVEQSCIKTEDGLKQLHKAEQYQKKNRKMLVILILFVIIIVLIVVLVGVKSR

SEQ ID NO: 66228 - protein, 121 aa, Homo sapiens
MALVSGISLDPEAAIGVTKRPPPKWVDGVDEIQYDVGRIKQKMKELASLHDKHLNRPTLDDSSEEEHAIEITTQEITQLFHRCQRAVQALPSRARACSEQEGRLLGNVVASLAQALQELST

SEQ ID NO: 66229 - protein, 139 aa, Homo sapiens
MKNREERSQHFFDTSVPLMDDGDDNTLYHRGFTEDQLVLVEQNTLMVEEREREIRQIVQSISDLNEIFRDLGAMIVEQGTVLDRIDYNVEQSCIKTEDGLKQLHKAEQYQKKNRKMLVILILFVIIIVLIVVLVGVKSR

SEQ ID NO: 66230 - protein, 219 aa, Homo sapiens
GISLDPEAAIGVTKRPPPKWVDGVDEIQYDVGRIKQKMKELASLHDKHLNRPTLDDSSEEEHAIEITTQEITQLFHRCQRAVQALPSRARACSEQEGRLLGNVVASLAQALQELSTSFRHAQSGYLKRMKNREERSQHFFDTSVPLMDDGDDNTLYHRGTVLDRIDYNVEQSCIKTEDGLKQLHKAEQYQKKNRKMLVILILFVIIIVLIVVLVGVKSR

SEQ ID NO: 66231 - protein, 122 aa, Homo sapiens
MALVSGISLDPEAAIGVTKRPPPKWVDGVDEIQYDVGRIKQKMKELASLHDKHLNRPTLDDSSEEEHAIEITTQEITQLFHRCQRAVQALPSRARACSEQEGRLLGNVVASLAQALQELSTS

SEQ ID NO: 66232 - protein, 202 aa, Homo sapiens
MATRRLTDAFLLLRNNSIQNRQLLAEQELDELADDRMALVSGISLDPEAAIGVTKRPPPKWVDGVDEIQYDVGRIKQKMKELASLHDKHLNRPTLDDSSEEEHAIEITTQEITQLFHRCQRAVQALPSRARACSEQEGRLLGNVVASLAQALQELSTSFRHAQSGYLKRMKNREERSQHFFDTSVPLMDDGDDNTLYHRRTS

SEQ ID NO: 66233 - protein, 302 aa, Homo sapiens
MSEDEEKVKLRRLEPAIQKFIKIVIPTDLERLRKHQINIEKYQRCRIWDKLHEEHINAGRTVQQLRSNIREIEKLCLKVRKDDLVLLKRMIDPVKEEASAATAEFLQLHLESVEELKKQFNDEETLLQPPLTRSMTVGGAFHTTEAEASSQSLTQIYALPEIPQDQNAAESWETLEADLIELSQLVTDFSLLVNSQQEKIDSIADHVNSAAVNVEEGTKNLGKAAKYKLAALPVAGALIGGMVGGPIGLLAGFKVAGIAAALGGGVLGFTGGKLIQRKKQKMMEKLTSSCPDLPSQTDKKCS

SEQ ID NO: 66234 - protein, 302 aa, Homo sapiens; identical to SEQ ID NO: 66233

SEQ ID NO: 66235 - protein, 41 aa, Homo sapiens
MSEDEEKVKLRRLEPAIQKFIKIVIPTDLERLRKHQINIEK

SEQ ID NO: 66236 - protein, 41 aa, Homo sapiens; identical to SEQ ID NO: 66235

SEQ ID NO: 66237 - protein, 302 aa, Homo sapiens; identical to SEQ ID NO: 66233

SEQ ID NO: 66238 - protein, 288 aa, Homo sapiens
MKDRTQELRTAKDSDDDDDVAVTVDRDRFMDEFFEQVEEIRGFIDKIAENVEEVKRKHSAILASPNPDEKTKEELEELMSDIKKTANKVRSKLKSIEQSIEQEEGLNRSSADLRIRKTQHSTLSRKFVEVMSEYNATQSDYRERCKGRIQRQLEITGRTTTSEELEDMLESGNPAIFASGIIMDSSISKQALSEIETRHSEIIKLENSIRELHDMFMDMAMLVESQGEMIDRIEYNVEHAVDYVERAVSDTKKAVKYQSKARRKKIMIIICCVILGIVIASTVGGIFA

SEQ ID NO: 66239 - protein, 260 aa, Homo sapiens
MKDRTQELRTAKDSDDDDDVAVTVDRDRFMDEFFEQVEEIRGFIDKIAENVEEVKRKHSAILASPNPDEKTKEELEELMSDIKKTANKVRSKLKSIEQSIEQEEGLNRSSADLRIRKTQHSTLSRKFVEVMSEYNATQSDYRERCKGRIQRQLEITGRTTTSEELEDMLESGNPAIFASGIIMDSSISKQALSEIETRHSEIIKLENSIRELHDMFMDMAMLVESQPQGAFLKSCPEPQPNPEEGALWSSGAPGPAGRDD

SEQ ID NO: 66240 - protein, 171 aa, Homo sapiens
MKDRTQELRTAKDSDDDDDVAVTVDRDRFMDEFFEQVEVMSEYNATQSDYRERCKGRIQRQLEITGRTTTSEELEDMLESGNPAIFASGIIMDSSISKQALSEIETRHSEIIKLEIEYNVEHAVDYVERAVSDTKKAVKYQSKARRKKIMIIICCVILGIVIASTVGGIFA

SEQ ID NO: 66241 - protein, 251 aa, Homo sapiens
MKDRTQELRTAKDSDDDDDVAVTVDRDRFMDEFFEQVEEIRGFIDKIAENVEEVKRKHSAILASPNPDEKTKEELEELMSDIKKTANKVRSKLKSIEQSIEQEEGLNRSSADLRIRKTQHSTLSRKFVEVMSEYNATQSDYRERCKGRIQRQLEITGRTTTSEELEDMLESGNPAIFASGIIMDSSISKQALSEIETRHSEIIKLENSIRELHDMFMDMAMLVESQTMWRGPCLTPRRPSSTRARRAGRKS

SEQ ID NO: 66242 - protein, 288 aa, Homo sapiens
MKDRTQELRSAKDSDDEEEVVHVDRDHFMDEFFEQVEEIRGCIEKLSEDVEQVKKQHSAILAAPNPDEKTKQELEDLTADIKKTANKVRSKLKAIEQSIEQEEGLNRSSADLRIRKTQHSTLSRKFVEVMTEYNATQSKYRDRCKDRIQRQLEITGRTTTNEELEDMLESGKLAIFTDDIKMDSQMTKQALNEIETRHNEIIKLETSIRELHDMFVDMAMLVESQGEMIDRIEYNVEHSVDYVERAVSDTKKAVKYQSKARRKKIMIIICCVVLGVVLASSIGGTLGL

SEQ ID NO: 66243 - protein, 287 aa, Homo sapiens
MRDRLPDLTACRKNDDGDTVVVVEKDHFMDDFFHQVEEIRNSIDKITQYVEEVKKNHSIILSAPNPEGKIKEELEDLNKEIKKTANKIRAKLKAIEQSFDQDESGNRTSVDLRIRRTQHSVLSRKFVEAMAEYNEAQTLFRERSKGRIQRQLEITGRTTTDDELEEMLESGKPSIFTSDIISDSQITRQALNEIESRHKDIMKLETSIRELHEMFMDMAMFVETQGEMINNIERNVMNATDYVEHAKEETKKAIKYQSKARRKLMFIIICVIVLLVILGIILATTLS

SEQ ID NO: 66244 - protein, 288 aa, Homo sapiens
MRDRLPDLTACRKNDDGDTVVVVEKDHFMDDFFHQVEEIRNSIDKITQYVEEVKKNHSIILSAPNPEGKIKEELEDLNKEIKKTANKIRAKLKAIEQSFDQDESGNRTSVDLRIRRTQHSVLSRKFVEAMAEYNEAQTLFRERSKGRIQRQLEITGRTTTDDELEEMLESGKPSIFTSDIISDSQITRQALNEIESRHKDIMKLETSIRELHEMFMDMAMFVETQGEMINNIERNVMNATDYVEHAKEETKKAIKYQSKARRKKWIIIAVSVVLVAIIALIIGLSVGK

SEQ ID NO: 66245 - protein, 258 aa, Homo sapiens
MDEFFSEIEETRLNIDKISEHVEEAKKLYSIILSAPIPEPKTKDDLEQLTTEIKKRANNVRNKLKSMEKHIEEDEVRSSADLRIRKSQHSVLSRKFVEVMTKYNEAQVDFRERSKGRIQRQLEITGKKTTDEELEEMLESGNPAIFTSGIIDSQISKQALSEIEGRHKDIVRLESSIKELHDMFMDIAMLVENQGEMLDNIELNVMHTVDHVEKARDETKKAVKYQSQARKKLIIIIVLVVVLLGILALIIGLSVGLN

SEQ ID NO: 66246 - protein, 289 aa, Homo sapiens
MKDRLEQLKAKQLTQDDDTDAVEIAIDNTAFMDEFFSEIEETRLNIDKISEHVEEAKKLYSIILSAPIPEPKTKDDLEQLTTEIKKRANNVRNKLKSMEKHIEEDEVRSSADLRIRKSQHSVLSRKFVEVMTKYNEAQVDFRERSKGRIQRQLEITGKKTTDEELEEMLESGNPAIFTSGIIDSQISKQALSEIEGRHKDIVRLESSIKELHDMFMDIAMLVENQGEMLDNIELNVMHTVDHVEKARDETKKAVKYQSQARKKLIIIIVLVVVLLGILALIIGLSVGLN

SEQ ID NO: 66247 - protein, 180 aa, Homo sapiens
MEKHIEEDEVRSSADLRIRKSQHSVLSRKFVEVMTKYNEAQVDFRERSKGRIQRQLEITGKKTTDEELEEMLESGNPAIFTSGIIDSQISKQALSEIEGRHKDIVRLESSIKELHDMFMDIAMLVENQGSMIDRIENNMDQSVGFVERAVADTKKAVKYQSEARRKLISLQTGVATLVFR

SEQ ID NO: 66248 - protein, 277 aa, Homo sapiens
MKDRLEQLKAKQLTQDDDTDAVEIAIDNTAFMDEFFSEIEETRLNIDKISEHVEEAKKLYSIILSAPIPEPKTKDDLEQLTTEIKKRANNVRNKLKSMEKHIEEDEVRSSADLRIRKSQHSVLSRKFVEVMTKYNEAQVDFRERSKGRIQRQLEITGKKTTDEELEEMLESGNPAIFTSGIIDSQISKQALSEIEGRHKDIVRLESSIKELHDMFMDIAMLVENQGEMLDNIELNVMHTVDHVEKARDETKKAVKYQSQARKKLISLQTGVATLVFR

SEQ ID NO: 66249 - protein, 76 aa, Homo sapiens
MFMDIAMLVENQGEMLDNIELNVMHTVDHVEKARDETKKAVKYQSQARKKLIIIIVLVVVLLGILALIIGLSVGLN

SEQ ID NO: 66250 - protein, 252 aa, Homo sapiens
MKDRLEQLKAKQLTQDDDTDAVEIAIDNTAFMDEFFSEIEETRLNIDKISEHVEEAKKLYSIILSAPIPEPKTKDDLEQLTTEIKKRANNVRNKLKSMEKHIEEDEVRSSADLRIRKSQHSVLSRKFVEVMTKYNEAQVDFRERSKGRIQRQLEITGKKTTDEELEEMLESGNPAIFTSGIIDSQISKQALSEIEGRHKDIVRLESSIKELHDMFMDIAMLVENQKLIIIIVLVVVLLGILALIIGLSVGLN

SEQ ID NO: 66251 - protein, 297 aa, Homo sapiens
MRDRTHELRQGDDSSDEEDKERVALVVHPGTARLGSPDEEFFHKVRTIRQTIVKLGNKVQELEKQQVTILATPLPEESMKQELQNLRDEIKQLGREIRLQLKAIEPQKEEADENYNSVNTRMRKTQHGVLSQQFVELINKCNSMQSEYREKNVERIRRQLKITNAGMVSDEELEQMLDSGQSEVFVSNILKDTQVTRQALNEISARHSEIQQLERSIRELHDIFTFLATEVEMQGEMINRIEKNILSSADYVERGQEHVKTALENQKKARKKKVLIAICVSITVVLLAVIIGVTVVG

SEQ ID NO: 66252 - protein, 295 aa, Homo sapiens
MGMTARTKRTRSGSRWWCTRARHGWGARTRSSSTSPLGHPPQVRTIRQTIVKLGNKVQELEKQQVTILATPLPEESMKQELQNLRDEIKQLGREIRLQLKAIEPQKEEADENYNSVNTRMRKTQHGVLSQQFVELINKCNSMQSEYREKNVERIRRQLKITNAGMVSDEELEQMLDSGQSEVFVSNILKDTQVTRQALNEISARHSEIQQLERSIRELHDIFTFLATEVEMQGEMINRIEKNILSSADYVERGQEHVKTALENQKKARKKKVLIAICVSITVVLLAVIIGVTVVG

SEQ ID NO: 66253 - protein, 355 aa, Homo sapiens
MIPRKRYGSKNTDQGVYLGLSKTQVLSPATAGSSSSDIAPLPPPVTLVPPPPDTMSCRDRTQEFLSACKSLQTRQNGIQTNKPALRAVRQRSEFTLMAKRIGKDLSNTFAKLEKLTILAKRKSLFDDKAVEIEELTYIIKQDINSLNKQIAQLQDFVRAKGSQSGRHLQTHSNTIVVSLQSKLASMSNDFKSVLEVRTENLKQQRSRREQFSRAPVSALPLAPNHLGGGAVVLGAESHASKDVAIDMMDSRTSQQLQLIDEQDSYIQSRADTMQNIESTIVELGSIFQQLAHMVKEQEETIQRIDENVLGAQLDVEAAHSEILKYFQSVTSNRWLMVKIFLILIVFFIIFVVFLA

SEQ ID NO: 66254 - protein, 321 aa, Homo sapiens
MIPRKRYGSKNTDQGVYLGLSKTQVLSPATAGSSSSDIAPLPPPVTLVPPPPDTMSCRDRTQEFLSACKSLQTRQNGIQTNKPALRAVRQRSEFTLMAKRIGKDLSNTFAKLEKLTILAKRKSLFDDKAVEIEELTYIIKQDINSLNKQIAQLQDFVRAKGSQSGRHLQTHSNTIVVSLQSKLASMSNDFKSVLEVRTENLKQQRSRREQFSRAPVSALPLAPNHLGGGAVVLGAESHASKDVAIDMMDSRTSQQLQLIDEQDSYIQSRADTMQNIESTIVELGSIFQQLAHMVKEQEETIQSVLLFPLLPALSPGSTRTC

SEQ ID NO: 66255 - protein, 301 aa, Homo sapiens
MSCRDRTQEFLSACKSLQTRQNGIQTNKPALRAVRQRSEFTLMAKRIGKDLSNTFAKLEKLTILAKRKSLFDDKAVEIEELTYIIKQDINSLNKQIAQLQDFVRAKGSQSGRHLQTHSNTIVVSLQSKLASMSNDFKSVLEVRTENLKQQRSRREQFSRAPVSALPLAPNHLGGGAVVLGAESHASKDVAIDMMDSRTSQQLQLIDEQDSYIQSRADTMQNIESTIVELGSIFQQLAHMVKEQEETIQRIDENVLGAQLDVEAAHSEILKYFQSVTSNRWLMVKIFLILIVFFIIFVVFLA

SEQ ID NO: 66256 - protein, 259 aa, Homo sapiens
MAKRIGKDLSNTFAKLEKLTILAKRKSLFDDKAVEIEELTYIIKQDINSLNKQIAQLQDFVRAKGSQSGRHLQTHSNTIVVSLQSKLASMSNDFKSVLEVRTENLKQQRSRREQFSRAPVSALPLAPNHLGGGAVVLGAESHASKDVAIDMMDSRTSQQLQLIDEQDSYIQSRADTMQNIESTIVELGSIFQQLAHMVKEQEETIQRIDENVLGAQLDVEAAHSEILKYFQSVTSNRWLMVKIFLILIVFFIIFVVFLA

SEQ ID NO: 66257 - protein, 239 aa, Homo sapiens
MSYTPGVGGDPAQLAQRISSNIQKITQCSVEIQRTLNQLGTPQDSPELRQQLQQKQQYTNQLAKETDKYIKEFGSLPTTPSEQRQRKIQKDRLVAEFTTSLTNFQKVQRQAAEREKEFVARVRASSRVSGSFPEDSSKERNLVSWESQTQPQVQVQDEEITEDDLRLIHERESSIRQLEADIMDINEIFKDLGMMIHEQGDVIDSIEANVENAEVHVQQANQQLSRAADYQKKDSCMLM

SEQ ID NO: 66258 - protein, 261 aa, Homo sapiens
MSYTPGVGGDPAQLAQRISSNIQKITQCSVEIQRTLNQLGTPQDSPELRQQLQQKQQYTNQLAKETDKYIKEFGSLPTTPSEQRQRKIQKDRLVAEFTTSLTNFQKVQRQAAEREKEFVARVRASSRVSGSFPEDSSKERNLVSWESQTQPQVQVQDEEITEDDLRLIHERESSIRQLEADIMDINEIFKDLGMMIHEQGDVIDSIEANVENAEVHVQQANQQLSRAADYQRKSRKTLCIIILILVIGVAIISLIIWGLNH

SEQ ID NO: 66259 - protein, 261 aa, Homo sapiens; identical to SEQ ID NO: 66258

SEQ ID NO: 66260 - protein, 236 aa, Homo sapiens
MAPDPWFSTYDSTCQIAQEIAEKIQQRNQYERKGEKAPKLTVTIRALLQNLKEKIALLKDLLLRAVSTHQITQLEGDRRQNLLDDLVTRERLLLASFKNEGAEPDLIRSSLMSEEAKRGAPNPWLFEEPEETRGLGFDEIRQQQQKIIQEQDAGLDALSSIISRQKQMGQEIGNELDEQNEIIDDLANLVENTDEKLRNETRRVNMVDRKSASCGMIMVILLLLVAIVVVAVWPTN

SEQ ID NO: 66261 - protein, 594 aa, Homo sapiens
MAPIGLKAVVGEKIMHDVIKKVKKKGEWKVLVVDQLSMRMLSSCCKMTDIMTEGITIVEDINKRREPLPSLEAVYLITPSEKSVHSLISDFKDPPTAKYRAAHVFFTDSCPDALFNELVKSRAAKVIKTLTEINIAFLPYESQVYSLDSADSFQSFYSPHKAQMKNPILERLAEQIATLCATLKEYPAVRYRGEYKDNALLAQLIQDKLDAYKADDPTMGEGPDKARSQLLILDRGFDPSSPVLHELTFQAMSYDLLPIENDVYKYETSGIGEARVKEVLLDEDDDLWIALRHKHIAEVSQEVTRSLKDFSSSKRMNTGEKTTMRDLSQMLKKMPQYQKELSKYSTHLHLAEDCMKHYQGTVDKLCRVEQDLAMGTDAEGEKIKDPMRAIVPILLDANVSTYDKIRIILLYIFLKNGITEENLNKLIQHAQIPPEDSEIITNMAHLGVPIVTDSTLRRRSKPERKERISEQTYQLSRWTPIIKDIMEDTIEDKLDTKHYPYISTRSSASFSTTAVSARYGHWHKNKAPGEYRSGPRLIIFILGGVSLNEMRCAYEVTQANGKWEVLIGSTHILTPQKLLDTLKKLNKTDEEISS

SEQ ID NO: 66262 - protein, 557 aa, Homo sapiens
MTDIMTEGITIVEDINKRREPLPSLEAVYLITPSEKSVHSLISDFKDPPTAKYRAAHVFFTDSCPDALFNELVKSRAAKVIKTLTEINIAFLPYESQVYSLDSADSFQSFYSPHKAQMKNPILERLAEQIATLCATLKEYPAVRYRGEYKDNALLAQLIQDKLDAYKADDPTMGEGPDKARSQLLILDRGFDPSSPVLHELTFQAMSYDLLPIENDVYKYETSGIGEARVKEVLLDEDDDLWIALRHKHIAEVSQEVTRSLKDFSSSKRMNTGEKTTMRDLSQMLKKMPQYQKELSKYSTHLHLAEDCMKHYQGTVDKLCRVEQDLAMGTDAEGEKIKDPMRAIVPILLDANVSTYDKIRIILLYIFLKNGITEENLNKLIQHAQIPPEDSEIITNMAHLGVPIVTDSTLRRRSKPERKERISEQTYQLSRWTPIIKDIMEDTIEDKLDTKHYPYISTRSSASFSTTAVSARYGHWHKNKAPGEYRSGPRLIIFILGGVSLNEMRCAYEVTQANGKWEVLIGSTHILTPTKFLMDLRHPDFRESSRVSFEDQAPTME

SEQ ID NO: 66263 - protein, 435 aa, Homo sapiens
MAPIGLKAVVGEKIMHDVIKKVKKKGEWKVLVVDQLSMRMLSSCCKMTDIMTEGPDKARSQLLILDRGFDPSSPVLHELTFQAMSYDLLPIENDVYKYETSGIGEARVKEVLLDEDDDLWIALRHKHIAEVSQEVTRSLKDFSSSKRMNTGEKTTMRDLSQMLKKMPQYQKELSKYSTHLHLAEDCMKHYQGTVDKLCRVEQDLAMGTDAEGEKIKDPMRAIVPILLDANVSTYDKIRIILLYIFLKNGITEENLNKLIQHAQIPPEDSEIITNMAHLGVPIVTDSTLRRRSKPERKERISEQTYQLSRWTPIIKDIMEDTIEDKLDTKHYPYISTRSSASFSTTAVSARYGHWHKNKAPGEYRSGPRLIIFILGGVSLNEMRCAYEVTQANGKWEVLIGSTHILTPTKFLMDLRHPDFRESSRVSFEDQAPTME

SEQ ID NO: 66264 - protein, 603 aa, Homo sapiens [sequence omitted]

SEQ ID NO: 66265 - protein, 593 aa, Homo sapiens
MAPSGLKAVVGEKILSGVIRSVKKDGEWKVLIMDHPSMRILSSCCKMSDILAEGITIVEDINKRREPIPSLEAIYLLSPTEKSVQALIKDFQGTPTFTYKAAHIFFTDTCPEPLFSELGRSRLAKVVKTLKEIHLAFLPYEAQVFSLDAPHSTYNLYCPFRAEERTRQLEVLAQQIATLCATLQEYPAIRYRKGPEDTAQLAHAVLAKLNAFKADTPSLGEGPEKTRSQLLIMDRAADPVSPLLHELTFQAMAYDLLDIEQDTYRYETTGLSEAREKAVLLDEDDDLWVELRHMHIADVSKKVTELLRTFCESKRLTTDKANIKDLSQILKKMPQYQKELNKYSTHLHLADDCMKHFKGSVEKLCSVEQDLAMGSDAEGEKIKDSMKLIVPVLLDAAVPAYDKIRVLLLYILLRNGVSEENLAKLIQHANVQAHSSLIRNLEQLGGTVTNPGGSGTSSRLEPRERMEPTYQLSRWTPVIKDVMEDAVEDRLDRNLWPFVSDPAPTASSQAAVSARFGHWHKNKAGIEARAGPRLIVYVMGGVAMSEMRAAYEVTRATEGKWEVLIGSSHILTPTRFLDDLKALDKKLEDIALP

SEQ ID NO: 66266 - protein, 398 aa, Homo sapiens
MCIRVHVSMCMCMCVHVCVHLCMHVCAVCMCVYVCVCVHVHVCASVCAFVCMCVCVCVCGSVCAFVSVHVCMRVYVCVCICVHLYVCVCVCLCACVYACVCMCLRLCVRLCVSVCACVYACICMCICVHVSMYVCASVCACVCVCVCVCVCMRVCAHQCLHVCICVYVCARICVCACVYVCVCISVCACVYVCVHLCVCACVHACVCVCACVHLCVCACAHVGATLVCICTYTCPRPSMFAHGGRWGVAGRPRQPMSLGVQAQAQRVIHLPQSVQALIKDFQGTPTFTYKAAHIFFTDTCPEPLFSELGRSRLAKVVKTLKEIHLAFLPYEAQVRPGLILGRGWGFVTKCPLFPQKQTLRLGAVAHTCNPSAVGGQGRRITWGQEFETSLGTEQDPVS

SEQ ID NO: 66267 - protein, 590 aa, Homo sapiens
MAPSGLKAVVGEKILSGVIRSVKKDGEWKVLIMDHPSMRILSSCCKMSDILAEGITIVEDINKRREPIPSLEAIYLLSPTEKALIKDFQGTPTFTYKAAHIFFTDTCPEPLFSELGRSRLAKVVKTLKEIHLAFLPYEAQVFSLDAPHSTYNLYCPFRAEERTRQLEVLAQQIATLCATLQEYPAIRYRKGPEDTAQLAHAVLAKLNAFKADTPSLGEGPEKTRSQLLIMDRAADPVSPLLHELTFQAMAYDLLDIEQDTYRYETTGLSEAREKAVLLDEDDDLWVELRHMHIADVSKKVTELLRTFCESKRLTTDKANIKDLSQILKKMPQYQKELNKYSTHLHLADDCMKHFKGSVEKLCSVEQDLAMGSDAEGEKIKDSMKLIVPVLLDAAVPAYDKIRVLLLYILLRNGVSEENLAKLIQHANVQAHSSLIRNLEQLGGTVTNPGGSGTSSRLEPRERMEPTYQLSRWTPVIKDVMEDAVEDRLDRNLWPFVSDPAPTASSQAAVSARFGHWHKNKAGIEARAGPRLIVYVMGGVAMSEMRAAYEVTRATEGKWEVLIGSSHILTPTRFLDDLKALDKKLEDIALP

SEQ ID NO: 66268 - protein, 604 aa, Homo sapiens
MAPSGLKAVVGEKILSGVIRSVKKDGEWKVLIMDHPSMRILSSCCKMSDILAEGITIVEDINKRREPIPSLEAIYLLSPTEKAQAQRVIHLPQSVQALIKDFQGTPTFTYKAAHIFFTDTCPEPLFSELGRSRLAKVVKTLKEIHLAFLPYEAQVFSLDAPHSTYNLYCPFRAEERTRQLEVLAQQIATLCATLQEYPAIRYRKGPEDTAQLAHAVLAKLNAFKADTPSLGEGPEKTRSQLLIMDRAADPVSPLLHELTFQAMAYDLLDIEQDTYRYETTGLSEAREKAVLLDEDDDLWVELRHMHIADVSKKVTELLRTFCESKRLTTDKANIKDLSQILKKMPQYQKELNKYSTHLHLADDCMKHFKGSVEKLCSVEQDLAMGSDAEGEKIKDSMKLIVPVLLDAAVPAYDKIRVLLLYILLRNGVSEENLAKLIQHANVQAHSSLIRNLEQLGGTVTNPGGSGTSSRLEPRERMEPTYQLSRWTPVIKDVMEDAVEDRLDRNLWPFVSDPAPTASSQAAVSARFGHWHKNKAGIEARAGPRLIVYVMGGVAMSEMRAAYEVTRATEGKWEVLIGSSHILTPTRFLDDLKALDKKLEDIALP

SEQ ID NO: 66269 - protein, 579 aa, Homo sapiens
MAPSGLKAVVGEKILSGVIRSVKKDGEWKVLIMDHPSMRILSSCCKMSDILAEGITIVEDINKRREPIPSLEAIYLLSPTEKSVQALIKDFQGTPTFTYKAAHIFFTDTCPEPLFSELGRSRLAKVVKTLKEIHLAFLPYEAQVFSLDAPHSTYNLYCPFRAEERTRQLEVLAQQIATLCATLQEYPAIRYRKGPEDTAQLAHAVLAKLNAFKADTPSLGEGPEKTRSQLLIMDRAADPVSPLLHELTFQAMAYDLLDIEQDTYRYETTGLSEAREKAVLLDEDDDLWVELRHMHIADVSKKVTELLRTFCESKRLTTDKANIKDLSQILKKMPQYQKELNKYSTHLHLADDCMKHFKGSVEKLCSVEQDLAMGSDAEGEKIKDSMKLIVPVLLDAAVPAYDKIRVLLLYILLRNGVSEENLAKLIQHANVQAHSSLIRNLEQLGGTVTNPGGSGTSSRLEPRERMEPTYQLSRWTPVIKDVMEDAVEDRLDRNLWPFVSDPAPTASSQAAVSARFGHWHKNKAGIEARAGPRLIVYVMGGVAMSEMRAAYEVTRATEGSGRCSLAPHTSSPRPASWMT

SEQ ID NO: 66270 - protein, 806 aa, Homo sapiens
MHGKSTAVLEMDYSIVDFLTLCETPYPNDFQEPYAVVVLLEKDLVLIDLAQNGYPIFENPYPLSIHESPVTCCEYFADCPVDLIPALYSVGARQKRQGYSKKEWPINGGNWGLGAQSYPEIIITGHADGSVKFWDASAITLQVLYKLKTSKVFEKSRNKDDRPNTDIVDEDPYAIQIISWCPESRMLCIAGVSAHVIIYRFSKQEVITEVIPMLEVRLLYEINDVETPEGEQPPPLPTPVGGSNPQPIPPQSHPSTSSSSSDGLRDNVPCLKVKNSPLKQSPGYQTELVIQLVWVGGEPPQQITSLAVNSSYGLVVFGNCNGIAMVDYLQKAVLLNLGTIELYGSNDPYRREPRSPRKSRQPSGAGLCDISEGTVVPEDRCKSPTSGSSSPHNSDDEQKMNNFIEKAKMSRKLSLPTDLKPDLDVKDNSFSRSRSSSVTSIDKESREAISALHFCETFTRKTDSSPSPCLWVGTTLGTVLVIALNLPPGGEQRLLQPVIVSPSGTILRLKGAILRMAFLDTTGCLIPPAYEPWREHNVPEEKDEKEKLKKRRPVSVSPSSSQEISENQYAVICSEKQAKVISLPTQNCAYKQNITETSFVLRGDIVALSNSICLACFCANGHIMTFSLPSLRPLLDVYYLPLTNMRIARTFCFTNNGQALYLVSPTEIQRLTYSQETCENLQEMLGELFTPVETPEAPNRGFFKGLFGGGAQSLDREELFGESSSGKASRSLAQHIPGPGGIEGVKGAASGVVGELARARLALDERGQKLGDLEERTAAMLSSAESFSKHAHEIMLKYKDKKWYQF

SEQ ID NO: 66271 - protein, 1151 aa, Homo sapiens
MRKFNIRKVLDGLTAGSSSASQQQQQQHPPGNREPEIQETLQSEHFQLCKTVRHGFPYQPSALAFDPVQKILAVGTQTGALRLFGRPGVECYCQHDSGAAVIQLQFLINEGALVSALADDTLHLWNLRQKRPAILHSLKFCRERVTFCHLPFQSKWLYVGTERGNIHIVNVESFTLSGYVIMWNKAIELSSKSHPGPVVHISDNPMDEGKLLIGFESGTVVLWDLKSKKADYRYTYDEAIHSVAWHHEGKQFICSHSDGTLTIWNVRSPAKPVQTITPHGKQLKDGKKPEPCKPILKVEFKTTRSGEPFIILSGGLSYDTVGRRPCLTVMHGKSTAVLEMDYSIVDFLTLCETPYPNDFQEPYAVVVLLEKDLVLIDLAQNGYPIFENPYPLSIHESPVTCCEYFADCPVDLIPALYSVGARQKRQGYSKKEWPINGGNWGLGAQSYPEIIITGHADGSVKFWDASAITLQVLYKLKTSKVFEKSRNKDDRPNTDIVDEDPYAIQIISWCPESRMLCIAGVSAHVIIYRFSKQEVITEVIPMLEVRLLYEINDVETPEGEQPPPLPTPVGGSNPQPIPPQSHPSTSSSSSDGLRDNVPCLKVKNSPLKQSPGYQTELVIQLVWVGGEPPQQITSLAVNSSYGLVVFGNCNGIAMVDYLQKAVLLNLGTIELYGSNDPYRREPRSPRKSRQPSGAGLCDISEGTVVPEDRCKSPTSGSSSPHNSDDEQKMNNFIEKVKTKSRKFSKMVANDIAKMSRKLSLPTDLKPDLDVKDNSFSRSRSSSVTSIDKESREAISALHFCETFTRKTDSSPSPCLWVGTTLGTVLVIALNLPPGGEQRLLQPVIVSPSGTILRLKGAILRMAFLDTTGCLIPPAYEPWREHNVPEEKDEKEKLKKRRPVSVSPSSSQEISENQYAVICSEKQAKVISLPTQNCAYKQNITETSFVLRGDIVALSNSICLACFCANGHIMTFSLPSLRPLLDVYYLPLTNMRIARTFCFTNNGQALYLVSPTEIQRLTYSQETCENLQEMLGELFTPVETPEAPNRGFFKGLFGGGAQSLDREELFGESSSGKASRSLAQHIPGPGGIEGVKGAASGVVGELARARLALDERGQKLGDLEERTAAMLSSAESFSKHAHEIMLKYKDKKWYQF

SEQ ID NO: 66272 - protein, 174 aa, Homo sapiens
  VARIANT 1: note = MOD_RES - Any amino acid
XKAVLLNLGTIELYGSNDPYRREPRSPRKSRQPSGAGLCDISEGTVVPEDRCKSPTSGSSSPHNSDDEQKMNNFIEKAKMSRKLSLPTDLKPDLDVKDNSFSRSRSSSVTSIDKESREAISALHFCETFTRKTDSSPSPCLWVGTTLGTVLVIALNLPPGGEQRLLQPVIVSPS

SEQ ID NO: 66273 - protein, 279 aa, Homo sapiens
MVDYLQKAVLLNLGTIELYGSNDPYRREPRSPRKSRQPSGGVLIVTSCMCGLSSLYSESMKKLRSSFLTGLCDISEGTVVPEDRCKSPTSAKMSRKLSLPTDLKPDLDVKDNSFSRSRSSSVTSIDKESREAISALHFCETFTRKTDSSPSPCLWVGTTLGTVLVIALNLPPGGEQRLLQPVIVSPSGTILRLKGAILRMAFLDTTGCLIPPAYEPWREHNVPEEKDEKEKLKKRRPVSVSPSSSQEISENQYAVICSEKQAKVISLPTQNCAYKQNIT

SEQ ID NO: 66274 - protein, 1098 aa, Homo sapiens
MRKFNIRKVLDGLTAGSSSASQQQQQQHPPGNREPEIQETLQSEHFQLCKTVRHGFPYQPSALAFDPVQKILAVGTQTGALRLFGRPGVECYCQHDSGAAVIQLQFLINEGALVSALADDTLHLWNLRQKRPAILHSLKFCRERVTFCHLPFQSKWLYVGTERGNIHIVNVESFTLSGYVIMWNKAIELSSKSHPGPVVHISDNPMDEGKLLIGFESGTVVLWDLKSKKADYRYTYDEAIHSVAWHHEGKQFICSHSDGTLTIWNVRSPAKPVQTITPHGKQLKDGKKPEPCKPILKVEFKTTRSGEPFIILSGGLSYDTVGRRPCLTVMHGKSTAVLEMDYSIVDFLTLCETPYPNDFQEPYAVVVLLEKDLVLIDLAQNGYPIFENPYPLSIHESPVTCCEYFADCPVDLIPALYSVGARQKRQGYSKKEWPINGGNWGLGAQSYPEIIITGHADGSVKFWDASAITLQVLYKLKTSKVFEKSRNKDDRPNTDIVDEDPYAIQIISWCPESRMLCIAGVSAHVIIYRFSKQEVITEVIPMLEVRLLYEINDVETPEGEQPPPLPTPVGGSNPQPIPPQSHPSTSSSSSDGLRDNVPCLKVKNSPLKQSPGYQTELVIQLVWVGGEPPQQITSLAVNSSYGLVVFGNCNGIAMVDYLQKAVLLNLGTIELYGSNDPYRREPRSPRKSRQPSGAGLCDISEGTVVPEDRCKSPTSDVKDNSFSRSRSSSVTSIDKESREAISALHFCETFTRKTDSSPSPCLWVGTTLGTVLVIALNLPPGGEQRLLQPVIVSPSGTILRLKGAILRMAFLDTTGCLIPPAYEPWREHNVPEEKDEKEKLKKRRPVSVSPSSSQEISENQYAVICSEKQAKVISLPTQNCAYKQNITETSFVLRGDIVALSNSICLACFCANGHIMTFSLPSLRPLLDVYYLPLTNMRIARTFCFTNNGQALYLVSPTEIQRLTYSQETCENLQEMLGELFTPVETPEAPNRGFFKGLFGGGAQSLDREELFGESSSGKASRSLAQHIPGPGGIEGVKGAASGVVGELARARLALDERGQKLGDLEERTAAMLSSAESFSKHAHEIMLKYKDKKWYQF

SEQ ID NO: 66275 - protein, 1115 aa, Homo sapiens
MRKFNIRKVLDGLTAGSSSASQQQQQQHPPGNREPEIQETLQSEHFQLCKTVRHGFPYQPSALAFDPVQKILAVGTQTGALRLFGRPGVECYCQHDSGAAVIQLQFLINEGALVSALADDTLHLWNLRQKRPAILHSLKFCRERVTFCHLPFQSKWLYVGTERGNIHIVNVESFTLSGYVIMWNKAIELSSKSHPGPVVHISDNPMDEGKLLIGFESGTVVLWDLKSKKADYRYTYDEAIHSVAWHHEGKQFICSHSDGTLTIWNVRSPAKPVQTITPHGKQLKDGKKPEPCKPILKVEFKTTRSGEPFIILSGGLSYDTVGRRPCLTVMHGKSTAVLEMDYSIVDFLTLCETPYPNDFQEPYAVVVLLEKDLVLIDLAQNGYPIFENPYPLSIHESPVTCCEYFADCPVDLIPALYSVGARQKRQGYSKKEWPINGGNWGLGAQSYPEIIITGHADGSVKFWDASAITLQVLYKLKTSKVFEKSRNKDDRPNTDIVDEDPYAIQIISWCPESRMLCIAGVSAHVIIYRFSKQEVITEVIPMLEVRLLYEINDVETPEGEQPPPLPTPVGGSNPQPIPPQSHPSTSSSSSDGLRDNVPCLKVKNSPLKQSPGYQTELVIQLVWVGGEPPQQITSLAVNSSYGLVVFGNCNGIAMVDYLQKAVLLNLGTIELYGSNDPYRREPRSPRKSRQPSGAGLCDISEGTVVPEDRCKSPTSAKMSRKLSLPTDLKPDLDVKDNSFSRSRSSSVTSIDKESREAISALHFCETFTRKTDSSPSPCLWVGTTLGTVLVIALNLPPGGEQRLLQPVIVSPSGTILRLKGAILRMAFLDTTGCLIPPAYEPWREHNVPEEKDEKEKLKKRRPVSVSPSSSQEISENQYAVICSEKQAKVISLPTQNCAYKQNITETSFVLRGDIVALSNSICLACFCANGHIMTFSLPSLRPLLDVYYLPLTNMRIARTFCFTNNGQALYLVSPTEIQRLTYSQETCENLQEMLGELFTPVETPEAPNRGFFKGLFGGGAQSLDREELFGESSSGKASRSLAQHIPGPGGIEGVKGAASGVVGELARARLALDERGQKLGDLEERTAAMLSSAESFSKHAHEIMLKYKDKKWYQF

SEQ ID NO: 66276 - protein, 264 aa, Homo sapiens
IELYGSNDPYRREPRSPRKSRQPSGGVLIVTSCMCGLSSLYSESMKKLRSSFLTGLCDISEGTVVPEDRCKSPTSAKMSRKLSLPTDLKPDLDVKDNSFSRSRSSSVTSIDKESREAISALHFCETFTRKTDSSPSPCLWVGTTLGTVLVIALNLPPGGEQRLLQPVIVSPSGTILRLKGAILRMAFLDTTGCLIPPAYEPWREHNVPEEKDEKEKLKKRRPVSVSPSSSQEISENQYAVICSEKQAKVISLPTQNCAYKQNIT

SEQ ID NO: 66277 - protein, 308 aa, Homo sapiens
MRKFNIRKVLDGLTAGSSSASQQQQQQHPPGNREPEIQETLQSEHFQLCKTVRHGFPYQPSALAFDPVQKILAVGTQTGALRLFGRPGVECYCQHDSGAAVIQLQFLINEGALVSALADDTLHLWNLRQKRPAILHSLKFCRERVTFCHLPFQSKWLYVGTERGNIHIVNVESFTLSGYVIMWNKAIELSSKSHPGPVVHISDNPMDEGKLLIGFESGTVVLWDLKSKKADYRYTYDEAIHSVAWHHEGKQFICSHSDGTLTIWNVRSPAKPVQTITPHGKQLKDGKKPEPCKPILKVEFKTTRSGVC

SEQ ID NO: 66278 - protein, 1186 aa, Homo sapiens
MKKFNFRKVLDGLTASSPGSGSSSGSNSGGGAGSGSVHPAGTAGVLREEIQETLTSEYFQICKTVRHGFPHQPTALAFDPVQKILAIGTRTGAIRILGRPGVDCYCQHESGAAVLQLQFLINEGALVSASSDDTLHLWNLRQKRPAILHSLKFNRERITYCHLPFQSKWLYVGTERGNTHIVNIESFILSGYVIMWNKAIELSTKTHPGPVVHLSDSPRDEGKLLIGYENGTVVFWDLKSKRAELRVYYDEAIHSIDWHHEGKQFMCSHSDGSLTLWNLKSPSRPFQTTIPHGKSQREGRKSESCKPILKVEYKTCKNSEPFIIFSGGLSYDKACRRPSLTIMHGKAITVLEMDHPIVEFLTLCETPYPNEFQEPYAVVVLLEKDLIVVDLTQSNFPIFENPYPMDIHESPVTCTAYFADCPPDLILVLYSIGVKHKKQGYSNKEWPISGGAWNLGAQTYPEIIITGHADGSIKFWDASAITLQMLYKLKTSKVFEKQKVGEGKQTCEIVEEDPFAIQMIYWCPESRIFCVSGVSAYVIIYKFSRHEITTEIVSLEVRLQYDVEDIITPEPETSPPFPDLSAQLPSSRSLSGSTNTVASEGVTKDSIPCLNVKTRPVRMPPGYQAELVIQLVWVDGEPPQQITSLAVSSAYGIVAFGNCNGLAVVDFIQKTVLLSMGTIDLYRSSDLYQRQPRSPRKNKQFIADNFCMRGLSNFYPDLTKRIRTSYQSLTELNDSPVPLELERCKSPTSDHVNGHCTSPTSQSCSSGKRLSSADVSKVNRWGPGRPPFRKAQSAACMEISLPVTTEENRENSYNRSRSSSISSIDKDSKEAITALYFMDSFARKNDSTISPCLFVGTSLGMVLIISLNLPLADEQRFTEPVMVLPSGTFLSLKGAVLTFSCMDRMGGLMQPPYEVWRDPNNIDENEKSWRRKVVMNSSSASQEIGDHQYTIICSEKQAKVFSLPSQTCLYVHNITETSFILQANVVVMCSSACLACFCANGHIMIMSLPSLRPMLDVNYLPLTDMRIARTFCFTNEGQALYLVSPTEIQRLTYSQEMCDNLQDMLGDLFTPIETPEAQNRGFLKGLFGGSGQTFDREELFGEASAGKASRSLAQHIPGPGSIEGMKGAAGGVMGELTRARIALDERGQRLGELEEKTAGMMTSAEAFSKHAHELMLKYKDKKWYQF

SEQ ID NO: 66279 - protein, 127 aa, Homo sapiens
MKKFNFRKVLDGLTASSPGSGSSSGSNSGGGAGSGSVHPAGTAGVLREEIQETLTSEYFQICKTVRHGFPHQPTALAFDPVQKILAIGTRTGAIRILGRPGVDCYCQHESGAAVLQLQFLINEGALV

SEQ ID NO: 66280 - protein, 210 aa, Homo sapiens
MSAKSAISKEIFAPLDERMLGAVQVKRRTKKKIPFLATGGQGEYLTYICLSVTNKKPTQASITKVKQFEGSTSFVRRSQWMLEQLRQVNGIDPNGDSAEFDLLFENAFDQWVASTASEKCTFFQILHHTCQRYLTDRKPEFINCQSKIMGGNSILHSAADSVTSAVQKASQALNERGERLGRAEEKTEDLKNSAQQFAETAHKLAMKHKC

SEQ ID NO: 66281 - protein, 210 aa, Homo sapiens
MSAKSAISKEIFAPLDERMLGAVQVKRRTKKKIPFLATGGQGEYLTYICLSVTNKKPTQASITKVKQFEGSTSFVRRSQWMLEQLRQVNGIDPNGDSAEFDLLFENAFDQWVASTASEKCTFFQILHHTCQRYLTDRKPEFINCQSKIMGGNSILHSAADSVTSAVQKASQALNERGERLGRAEEKTEDLKNSAQQFAETAHKVTFRGRK

SEQ ID NO: 66282 - protein, 210 aa, Homo sapiens; identical to SEQ ID NO: 66280

SEQ ID NO: 66283 - protein, 210 aa, Homo sapiens; identical to SEQ ID NO: 66280

SEQ ID NO: 66284 - protein, 210 aa, Homo sapiens; identical to SEQ ID NO: 66280

SEQ ID NO: 66285 - protein, 108 aa, Homo sapiens
MSACFLDTRRAAFLQCDLPSSYRILTLPESGHCGSAEPVSDAPALLLSGNSILHSAADSVTSAVQKASQALNERGERLGRAEEKTEDLKNSAQQFAETAHKLAMKHKC

SEQ ID NO: 66286 - protein, 210 aa, Homo sapiens; identical to SEQ ID NO: 66280

SEQ ID NO: 66287 - protein, 210 aa, Homo sapiens; identical to SEQ ID NO: 66280

SEQ ID NO: 66288 - protein, 538 aa, Homo sapiens [sequence omitted]

SEQ ID NO: 66289 - protein, 538 aa, Homo sapiens [sequence omitted]

SEQ ID NO: 66290 - protein, 28 aa, Homo sapiens
MAVAAAAAAAGPAGAGGGRAQRSGLLEV

SEQ ID NO: 66291 - protein, 540 aa, Homo sapiens
MRVAAATAAAGAGPAMAVWTRATKAGLVELLLRERWVRVVAELSGESLSLTGDAAAAELEPALGPAAAAFNGLPNGGGAGDSLPGSPSRGLGPPSPPAPPRGPAGEAGASPPVRRVRVVKQEAGGLGISIKGGRENRMPILISKIFPGLAADQSRALRLGDAILSVNGTDLRQATHDQAVQALKRAGKEVLLEVKFIREVTPYIKKPSLVSDLPWEGAAPQSPSFSGSEDSGSPKHQNSTKDRKIIPLKMCFAARNLSMPDLENRLIELHSPDSRNTLILRCKDTATAHSWFVAIHTNIMALLPQVLAELNAMLGATSTAGGSKEVKHIAWLAEQAKLDGGRQQWRPVLMAVTEKDLLLYDCMPWTRDAWASPCHSYPLVATRLVHSGSGCRSPSLGSDLTFATRTGSRQGIEMHLFRVETHRDLSSWTRILVQGCHAAAELIKEVSLGCMLNGQEVRLTIHYENGFTISRENGGSSSILYRYPFERLKMSADDGIRNLYLDFGGPEGELTMDLHSCPKPIVFVLHTFLSAKVTRMGLLV

SEQ ID NO: 66292 - protein, 480 aa, Homo sapiens
MDFRTACEETKTGICLLQDGNQEPFKVRLHLAKDILMIQEQDVICVSGEPFYSGERTVTIRRQTVGGFGLSIKGGAEHNIPVVVSKISKEQRAELSGLLFIGDAILQINGINVRKCRHEEVVQVLRNAGEEVTLTVSFLKRAPAFLKLPLNEDCACAPSDQSSGTSSPLCDSGLHLNYHPNNTDTLSCSSWPTSPGLRWEKRWCDLRLIPLLHSRFSQYVPGTDLSRQNAFQVIAVDGVCTGIIQCLSAEDCVDWLQAIATNISNLTKHNIKKINRNFPVNQQIVYMGWCEAREQDPLQDRVYSPTFLALRGSCLYKFLAPPVTTWDWTRAEKTFSVYEIMCKILKDSDLLDRRKQCFTVQSESGEDLYFSVELESDLAQWERAFQTATFLEVERIQCKTYACVLESHLMGLTIDFSTGFICFDAATKELEFSNLFAVLHCIHSFFAAKVACLDPLFLGNQATASTAASSATTSKAKYTT

SEQ ID NO: 66293 - protein, 480 aa, Homo sapiens; identical to SEQ ID NO: 66292

SEQ ID NO: 66294 - protein, 517 aa, Homo sapiens
MDFRTACEETKTGICLLQDGNQEPFKVRLHLAKDILMIQEQDVICVSGEPFYSGERTVTIRRQTVGGFGLSIKGGAEHNIPVVVSKISKEQRAELSGLLFIGDAILQINGINVRKCRHEEVVQVLRNAGEEVTLTVSFLKRAPAFLKLPLNEDCACAPSDQSSGTSSPLCDSGLHLNYHPNNTDTLSCSSWPTSPGLRWEKRWCDLRLIPLLHSRFSQYVPGTDLSRQNAFQVIAVDGVCTGIIQCLSAEDCVDWLQAIATNISNLTKHNIKKINRNFPVNQQIVYMGWCEAREQDPLQDRVYSPTFLALRGSCLYKFLAPPVTTWDWTRAEKTFSVYEIMCKILKDSDLLDRRKQCFTVQSESGEDLYFSVELESDLAQWERAFQTATFLEVERIQCKTYACVLESHLMGLTIDFSTGFICFDAATKAVLWRYKFSQLKGSSDDGKSKIKFLFQNPDTKQIEAKELEFSNLFAVLHCIHSFFAAKVACLDPLFLGNQATASTAASSATTSKAKYTT

SEQ ID NO: 66295 - protein, 517 aa, Homo sapiens; identical to SEQ ID NO: 66294

SEQ ID NO: 66296 - protein, 92 aa, Homo sapiens
MDFRTACEETKTGICLLQDGNQEPFKVRLHLAKDILMIQEQDVICVSGEPFYSGERTVTIRRQTVGGFGLSIKGGAEHNIPVVVSKISKEQR

SEQ ID NO: 66297 - protein, 140 aa, Homo sapiens
MDVFMKGLSKAKEGVVAAAEKTKQGVAEAAGKTKEGVLYVGSKTKEGVVHGVATVAEKTKEQVTNVGGAVVTGVTAVAQKTVEGAGSIAAATGFVKKDQLGKNEEGAPQEGILEDMPVDPDNEAYEMPSEEGYQDYEPEA

SEQ ID NO: 66298 - protein, 112 aa, Homo sapiens
MDVFMKGLSKAKEGVVAAAEKTKQGVAEAAGKTKEGVLYVGSKTKEGVVHGVATVAEKTKEQVTNVGGAVVTGVTAVAQKTVEGAGSIAAATGFVKKDQLGKEGYQDYEPEA

SEQ ID NO: 66299 - protein, 140 aa, Homo sapiens; identical to SEQ ID NO: 66297

SEQ ID NO: 66300 - protein, 126 aa, Homo sapiens
MDVFMKGLSKAKEGVVAAAEKTKQGVAEAAGKTKEGVLYVVAEKTKEQVTNVGGAVVTGVTAVAQKTVEGAGSIAAATGFVKKDQLGKNEEGAPQEGILEDMPVDPDNEAYEMPSEEGYQDYEPEA

SEQ ID NO: 66301 - protein, 140 aa, Homo sapiens; identical to SEQ ID NO: 66297

SEQ ID NO: 66302 - protein, 112 aa, Homo sapiens; identical to SEQ ID NO: 66298

SEQ ID NO: 66303 - protein, 115 aa, Homo sapiens
MDVFMKGLSKAKEGVVAAAEKTKQGVAEAAGKTKEGVLYVGSKTKEGVVHGVATVAEKTKEQVTNVGGAVVTGVTAVAQKTVEGAGSIAAATGFVKKDQLGKVWLCTFCVTFISW

SEQ ID NO: 66304 - protein, 126 aa, Homo sapiens; identical to SEQ ID NO: 66300

SEQ ID NO: 66305 - protein, 140 aa, Homo sapiens; identical to SEQ ID NO: 66297

SEQ ID NO: 66306 - protein, 67 aa, Homo sapiens
MDVFMKGLSKAKEGVVAAAEKTKQGVAEAAGKTKEGVLYVGSKTKEGVVHGVATVAEKTKEQVTNVG

SEQ ID NO: 66307 - protein, 140 aa, Homo sapiens; identical to SEQ ID NO: 66297

SEQ ID NO: 66308 - protein, 919 aa, Homo sapiens
MEAPEYLDLDEIDFSDDISYSVTSLKTIPELCRRCDTQNEDRSVSSSSWNCGISTLITNTQKPTGIADVYSKFRPVKRVSPLKHQPETLENNESDDQKNQKVVEYQKGGESDLGPQPQELGPGDGVGGPPGKSSEPSTSLGELEHYDLDMDEILDVPYIKSSQQLASFTKVTSEKRILGLCTTINGLSGKACSTGSSESSSSNMAPFCVLSPVKSPHLRKASAVIHDQHKLSTEETEISPPLVKCGSAYEPENQSKDFLNKTFSDPHGRKVEKTTPDCQLRAFHLQSSAAESKPEEQVSGLNRTSSQGPEERSEYLKKVKSILNIVKEGQISLLPHLAADNLDKIHDENGNNLLHIAASQGHAECLQHLTSLMGEDCLNERNTEKLTPAGLAIKNGQLECVRWMVSETEAIAELSCSKDFPSLIHYAGCYGQEKILLWLLQFMQEQGISLDEVDQDGNSAVHVASQHGYLGCIQTLVEYGANVTMQNHAGEKPSQSAERQGHTLCSRYLVVVETCMSLASQVVKLTKQLKEQTVERVTLQNQLQQFLEAQKSEGKSLPSSPSSPSSPASRKSQWKSPDADDDSVAKSKPGVQEGIQVLGSLSASSRARPKAKDEDSDKILRQLLGKEISENVCTQEKLSLEFQDAQASSRNSKKIPLEKRELKLARLRQLMQRSLSESDTDSNNSEDPKTTPVRKADRPRPQPIVESVESMDSAESLHLMIKKHTLASGGRRFPFSIKASKSLDGHSPSPTSESSEPDLESQYPGSGSIPPNQPSGDPQQPSPDSTAAQKVATSPKSALKSPSSKRRTSQNLKLRVTFEEPVVQMEQPSLELNGEKDKDKGRTLQRTSTSNESGDQLKRPFGAFRSIMETLSGNQNNNNNYQAANQLKTSTLPLTSLGRKTDAKGNPASSASKGKNKAA

SEQ ID NO: 66309 - protein, 1016 aa, Homo sapiens
MEAPEYLDLDEIDFSDDISDNRSQGNRLQKLGLEDTDREDAMGFGSHRAKLTVVAALGACHCPENEYSVTSLKTIPELCRRCDTQNEDRSVSSSSWNCGISTLITNTQKPTGIADVYSKFRPVKRVSPLKHQPETLENNESDDQKNQKVVEYQKGGESDLGPQPQELGPGDGVGGPPGKSSEPSTSLGELEHYDLDMDEILDVPYIKSSQQLASFTKVTSEKRILGLCTTINGLSGKACSTGSSESSSSNMAPFCVLSPVKSPHLRKASAVIHDQHKLSTEETEISPPLVKCGSAYEPENQSKDFLNKTFSDPHGRKVEKTTPDCQLRAFHLQSSAAESKPEEQVSGLNRTSSQGPEERSEYLKKVKSILNIVKEGQISLLPHLAADNLDKIHDENGNNLLHIAASQGHAECLQHLTSLMGEDCLNERNTEKLTPAGLAIKNGQLECVRWMVSETEAIAELSCSKDFPSLIHYAGCYGQEKILLWLLQFMQEQGISLDEVDQDGNSAVHVASQHGYLGCIQTLVEYGANVTMQNHAGEKPSQSAERQGHTLCSRYLVVVETCMSLASQVVKLTKQLKEQTVERVTLQNQLQQFLEAQKSEGKSLPSSPSSPSSPASRKSQWKSPDADDDSVAKSKPGVQEGIQVLGSLSASSRARPKAKDEDSDKILRQLLGKEISENVCTQEKLSLEFQDAQASSRNSKKIPLEKRELKLARLRQLMQRSLSESDTDSNNSEDPKTTPVRKADRPRPQPIVESVESMDSAESLHLMIKKHTLASGGRRFPFSIKASKSLDGHSPSPTSESSEPDLESQYPGSGSIPPNQPSGDPQQPSPDSTAAQKVATSPKSALKSPSSKRRTSQNLKLRVTFEEPVVQMEQPSLELNGEKDKDKGRTLQRTSTSNESGDQLKRPFGAFRSIMETLSGNQNNNNNYQAANQLKTSTLPLTSLGRKTDAKGNPASSASKGKNKAEMYSSCINLSSNMLIEEHLCNDTRHNDINRKMKKSYSIKHIAEPESKELFL

SEQ ID NO: 66310 - protein, 859 aa, Homo sapiens
MEAPEYLDLDEIDFSDDISYSVTSLKTIPELCRRCDTQNEDRSVSSSSWNCGISTLITNTQKPTGIADVYSKFRPVKRVSPLKHQPETLENNESDDQKNQKVVEYQKGGESDLGPQPQELGPGDGVGGPPGKSSEPSTSLGELEHYDLDMDEILDVPYIKSSQQLASFTKVTSEKRILGLCTTINGLSGKACSTGSSESSSSNMAPFCVLSPVKSPHLRKASAVIHDQHKLSTEETEISPPLVKCGSAYEPENQSKDFLNKTFSDPHGRKVEKTTPDCQLRAFHLQSSAAESKPEEQVSGLNRTSSQGPEERSEYLKKVKSILNIVKEGQISLLNGQLECVRWMVSETEAIAELSCSKDFPSLIHYAGCYGQEKILLWLLQFMQEQGISLDEVDQDGNSAVHVASQHGYLGCIQTLVEYGANVTMQNHAGEKPSQSAERQGHTLCSRYLVVVETCMSLASQVVKLTKQLKEQTVERVTLQNQLQQFLEAQKSEGKSLPSSPSSPSSPASRKSQWKSPDADDDSVAKSKPGVQEGIQVLGSLSASSRARPKAKDEDSDKILRQLLGKEISENVCTQEKLSLEFQDAQASSRNSKKIPLEKRELKLARLRQLMQRSLSESDTDSNNSEDPKTTPVRKADRPRPQPIVESVESMDSAESLHLMIKKHTLASGGRRFPFSIKASKSLDGHSPSPTSESSEPDLESQYPGSGSIPPNQPSGDPQQPSPDSTAAQKVATSPKSALKSPSSKRRTSQNLKLRVTFEEPVVQMEQPSLELNGEKDKDKGRTLQRTSTSNESGDQLKRPFGAFRSIMETLSGNQNNNNNYQAANQLKTSTLPLTSLGRKTDAKGNPASSASKGKNKAA

SEQ ID NO: 66311 - protein, 603 aa, Homo sapiens
MTYLIQSHHSRRSQNCAEDVIRKTKTDQNGQLECVRWMVSETEAIAELSCSKDFPSLIHYAGCYGQEKILLWLLQFMQEQGISLDEVDQDGNSAVHVASQHGYLGCIQTLVEYGANVTMQNHAGEKPSQSAERQGHTLCSRYLVVVETCMSLASQVVKLTKQLKEQTVERVTLQNQLQQFLEAQKSEGKSLPSSPSSPSSPASRKSQWKSPDADDDSVAKSKPGVQEGIQVLGSLSASSRARPKAKDEDSDKILRQLLGKEISENVCTQEKLSLEFQDAQASSRNSKKIPLEKRELKLARLRQLMQRSLSESDTDSNNSEDPKTTPVRKADRPRPQPIVESVESMDSAESLHLMIKKHTLASGGRRFPFSIKASKSLDGHSPSPTSESSEPDLESQYPGSGSIPPNQPSGDPQQPSPDSTAAQKVATSPKSALKSPSSKRRTSQNLKLRVTFEEPVVQMEQPSLELNGEKDKDKGRTLQRTSTSNESGDQLKRPFGAFRSIMETLSGNQNNNNNYQAANQLKTSTLPLTSLGRKTDAKGNPASSASKGKNKAEMYSSCINLSSNMLIEEHLCNDTRHNDINRKMKKSYSIKHIAEPESKELFL

SEQ ID NO: 66312 - protein, 521 aa, Homo sapiens
MKLTLVMTYLIQSHHSRRSQNCAEDVIRKTKTDQEKILLWLLQFMQEQGISLDEVDQDGNSAVHVASQHGYLGCIQTLVEYGANVTMQNHAGEKPSQSAERQGHTLCSRYLVVVETCMSLASQVVKLTKQLKEQTVERVTLQNQLQQFLEAQKSEGKSLPSSPSSPSSPASRKSQWKSPDADDDSVAKSKPGVQEGIQVLGSLSASSRARPKAKDEDSDKILRQLLGKEISENVCTQEKLSLEFQDAQASSRNSKKIPLEKRELKLARLRQLMQRSLSESDTDSNNSEDPKTTPVRKADRPRPQPIVESVESMDSAESLHLMIKKHTLASGGRRFPFSIKASKSLDGHSPSPTSESSEPDLESQYPGSGSIPPNQPSGDPQQPSPDSTAAQKVATSPKSALKSPSSKRRTSQNLKLRVTFEEPVVQMEQPSLELNGEKDKDKGRTLQRTSTSNESGDQLKRPFGAFRSIMETLSGNQNNNNNYQAANQLKTSTLPLTSLGRKTDAKGNPASSASKGKNKAA

SEQ ID NO: 66313 - protein, 381 aa, Homo sapiens
MKLTLVMTYLIQSHHSRRSQNCAEDVIRKTKTDQNGQLECVRWMVSETEAIAELSCSKDFPSLIHYAGCYGQEKILLWLLQFMQEQGISLDEVDQDGNSAVHVASQHGYLGCIQTLVEYGANVTMQNHAGEKPSQSAERQGHTLCSRYLVVVETCMSLASQVVKLTKQLKEQTVERVTLQNQLQQFLEAQKSEGKSLPSSPSSPSSPASRKSQWKSPDADDDSVAKSKPGVQEGIQVLGSLSASSRARPKAKDEDSDKILRQLLGKEISENVCTQEKLSLEFQDAQASSRNSKKIPLEKRELKLARLRQLMQRSLSESDTDSNNSEDPKTTPVRKADRPRPQPIVESVESMDSAGFLSASRPPNPWMATAHLPPQRAANQT

SEQ ID NO: 66314 - protein, 588 aa, Homo sapiens
MEAPEYLDLDEIDFSDDISDNRSQGNRLQKLGLEDTDREDAMGFGSHRAKLTVVAALGACHCPENEYSVTSLKTIPELCRRCDTQNEDRSVSSSSWNCGISTLITNTQKPTGIADVYSKFRPVKRVSPLKHQPETLENNESDDQKNQKVVEYQKGGESDLGPQPQELGPGDGVGGPPGKSSEPSTSLGELEHYDLDMDEILDVPYIKSSQQLASFTKVTSEKRILGLCTTINGLSGKACSTGSSESSSSNMAPFCVLSPVKSPHLRKASAVIHDQHKLSTEETEISPPLVKCGSAYEPENQSKDFLNKTFSDPHGRKVEKTTPDCQLRAFHLQSSAAESKPEEQVSGLNRTSSQGPEERSEYLKKVKSILNIVKEGQISLLPHLAADNLDKIHDENGNNLLHIAASQGHAECLQHLTSLMGEDCLNERNTEKLTPAGLAIKNGQLECVRWMVSETEAIAELSCSKDFPSLIHYAGCYGQEKILLWLLQFMQEQGISLDEVDQDGNSAVHVASQHGYLGCIQTRLKIQGTWNGSETCLFTHHFSSYPPISSGLQCQGQEGVLFIPDQVGAATNKQVLFQNQLPETKSSY

SEQ ID NO: 66315 - protein, 88 aa, Homo sapiens
MEAPEYLDLDEIDFSDDISYSVTSLKTIPELCRRCDTQNEDRSATPSCRQSRQNSRRKWKQSITYCGVTGTRRVSTAPHFFDGRRLPQ

SEQ ID NO: 66316 - protein, 98 aa, Homo sapiens
MEAPEYLDLDEIDFSDDISYSVTSLKTIPELCRRCDTQNEDRSVSSSSWNCGISTLITNTQKPTGIADVYSKFRPVKRVSPLKHQPETLENNESDDQK

SEQ ID NO: 66317 - protein, 14 aa, Homo sapiens
MEAPEYLDLDEIDF

SEQ ID NO: 66318 - protein, 135 aa, Homo sapiens
MEAPEYLDLDEIDFSDDISYSVTSLKTIPELCRRCDTQNEDRSVSSSSWNCGISTLITNTQKPTGIADVYSKFRPVKRVSPLKHQPETLENNESDDQKNQKVVEYQKGGESDLGPQPQELGPGDGVGGPPGKSSE

SEQ ID NO: 66319 - protein, 477 aa, Homo sapiens
MQEQGISLDEVDQDGNSAVHVASQHGYLGCIQTLVEYGANVTMQNHAGEKPSQSAERQGHTLCSRYLVVVETCMSLASQVVKLTKQLKEQTVERVTLQNQLQQFLEAQKSEGKSLPSSPSSPSSPASRKSQWKSPDADDDSVAKSKPGVQEGIQVLGSLSASSRARPKAKDEDSDKILRQLLGKEISENVCTQEKLSLEFQDAQASSRNSKKIPLEKRELKLARLRQLMQRSLSESDTDSNNSEDPKTTPVRKADRPRPQPIVESVESMDSAESLHLMIKKHTLASGGRRFPFSIKASKSLDGHSPSPTSESSEPDLESQYPGSGSIPPNQPSGDPQQPSPDSTAAQKVATSPKSALKSPSSKRRTSQNLKLRVTFEEPVVQMEQPSLELNGEKDKDKGRTLQRTSTSNESGDQLKRPFGAFRSIMETLSGNQNNNNNYQAANQLKTSTLPLTSLGRKTDAKGNPASSASKGKNKAA

SEQ ID NO: 66320 - protein, 134 aa, Homo sapiens
MDVFMKGLSMAKEGVVAAAEKTKQGVTEAAEKTKEGVLYVGSKTREGVVQGVASVAEKTKEQASHLGGAVFSGAGNIAAATGLVKREEFPTDLKPEEVAQEAAEEPLIEPLMEPEGESYEDPPQEEYQEYEPEA

SEQ ID NO: 66321 - protein, 134 aa, Homo sapiens; identical to SEQ ID NO: 66320

SEQ ID NO: 66322 - protein, 134 aa, Homo sapiens; identical to SEQ ID NO: 66320

SEQ ID NO: 66323 - protein, 134 aa, Homo sapiens; identical to SEQ ID NO: 66320

SEQ ID NO: 66324 - protein, 126 aa, Homo sapiens
MDVFKKGFSIAKEGVVGAVEKTKQGVTEAAEKTKEGVMYVGAKTKENVVQSVTSGLPWGWGWGGGQPVSSHSGREDQGAGQRRERGCGEQRQHCGHQDRGGGGEHRGHLRGGAQGGLEAICPPTGG

SEQ ID NO: 66325 - protein, 127 aa, Homo sapiens
MDVFKKGFSIAKEGVVGAVEKTKQGVTEAAEKTKEGVMYVGAKTKENVVQSVTSVAEKTKEQANAVSEAVVSSVNTVATKTVEEAENIAVTSGVVRKEDLRPSAPQQEGEASKEKEEVAEEAQSGGD

SEQ ID NO: 66326 - protein, 156 aa, Homo sapiens
MAGQFRSYVWDPLLILSQIVLMQTVYYGSLGLWLALVDGLVRSSPSLDQMFDAEILGFSTPPGRLSMMSFILNALTCALGLLYFIRRGKQCLDFTVTVHFFHLLGCWFYSSRFPSALTWWLVQAVCIALMAVIGEYLCMRTELKEIPLNSAPKSNV

SEQ ID NO: 66327 - protein, 156 aa, Homo sapiens; identical to SEQ ID NO: 66326

SEQ ID NO: 66328 - protein, 118 aa, Homo sapiens
MAGQFRSYVWDPLLILSQIVLMQTVYYGSLGLWLALVDGLVRSSPSLDQMFDAEILGFSTPPGRLSMMSFILNALTCALGLLYFIRRGKQCLDFTVTVHFFHLLGCWFYSSRFPSALT

SEQ ID NO: 66329 - protein, 76 aa, Homo sapiens
MAGQFRSYVWDPLLILSQIVLMQTVYYGSLGLWLALVDGLVRSSPSLDQMFDAEILGFSTPPGRLSMMSFILNALT

SEQ ID NO: 66330 - protein, 377 aa, Homo sapiens
MSSPGTESAGKSLQYRVDHLLSAVENELQAGSEKGDPTERELRVGLEESELWLRFKELTNEMIVTKNGRRMFPVLKVNVSGLDPNAMYSFLLDFVAADNHRWKYVNGEWVPGGKPEPQAPSCVYIHPDSPNFGAHWMKAPVSFSKVKLTNKLNGGGQIMLNSLHKYEPRIHIVRVGGPQRMITSHCFPETQFIAVTAYQNEEITALKIKYNPFAKAFLDAKERSDHKEMMEEPGDSQQPGYSQSYSDNSPACLSMLQSHDNWSSLGMPAHPSMLPVSHNASPPTSSSQYPSLWSVSNGAVTPGSQAAAVSNGLGAQFFRGSPAHYTPLTHPVSAPSSSGSPLYEGAAAATDIVDSQYDAAAQGRLIASWTPVSPPSM

SEQ ID NO: 66331 - protein, 244 aa, Homo sapiens
MRWCLLLIWAQGLRQAPLASGMMTGTIETTGNISAEKGGSIILQCHLSSTTAQVTQVNWEQQDQLLAICNADLGWHISPSFKDRVAPGPGLGLTLQSLTVNDTGEYFCIYHTYPDGTYTGRIFLEVLESSVAEHGARFQIPLLGAMAATLVVICTAVIVVVALTRKKKALRIHSVEGDLRRKSAGQEEWSPSAPSPPGSCVQAEAAPAGLCGEQRGEDCAELHDYFNVLSYRSLGNCSFFTETG

SEQ ID NO: 66332 - protein, 311 aa, Homo sapiens
MAFLVAHPMQFVYLLTTLCVFNMVFAKLGFSETVFSQRLSFTVLSAVGYFQWQKRPHLLPVGPLGRSMRWCLLLIWAQGLRQAPLASGMMTGTIETTGNISAEKGGSIILQCHLSSTTAQVTQVNWEQQDQLLAICNADLGWHISPSFKDRVAPGPGLGLTLQSLTVNDTGEYFCIYHTYPDGTYTGRIFLEVLESSVAEHGARFQIPLLGAMAATLVVICTAVIVVVALTRKKKALRIHSVEGDLRRKSAGQEEWSPSAPSPPGSCVQAEAAPAGLCGEQRGEDCAELHDYFNVLSYRSLGNCSFFTETG

SEQ ID NO: 66333 - protein, 244 aa, Homo sapiens; identical to SEQ ID NO: 66331

SEQ ID NO: 66334 - protein, 186 aa, Homo sapiens
MSGISGCPFFLWGLLALLGLALVISLIFNISHYVEKQRQDKMYSYSSDHTRVDEYYIEDTPIYGNLDDMISEPMDENCYEQMKARPEKSVNKMQEATPSAQATNETQMCYASLDHSVKGKRRKPRKQNTHFSDKDGDEQLHAIDASVSKTTLVDSFSPESQAVEENIHDDPIRLFGLIRAKREPIN

SEQ ID NO: 66335 - protein, 435 aa, Homo sapiens
MSSPGTESAGKSLQYRVDHLLSAVENELQAGSEKGDPTERELRVGLEESELWLRFKELTNEMIVTKNGRRMFPVLKVNVSGLDPNAMYSFLLDFVAADNHRWKYVNGEWVPGGKPEPQAPSCVYIHPDSPNFGAHWMKAPVSFSKVKLTNKLNGGGQIMLNSLHKYEPRIHIVRVGGPQRMITSHCFPETQFIAVTAYQNEEITALKIKYNPFAKAFLDAKERSDHKEMMEEPGDSQQPGYSQWGWLLPGTSTLCPPANPHPQFGGALSLPSTHSCDRYPTLRSHRSSPYPSPYAHRNNSPTYSDNSPACLSMLQSHDNWSSLGMPAHPSMLPVSHNASPPTSSSQYPSLWSVSNGAVTPGSQAAAVSNGLGAQFFRGSPAHYTPLTHPVSAPSSSGSPLYEGAAAATDIVDSQYDAAAQGRLIASWTPVSPPSM

SEQ ID NO: 66336 - protein, 243 aa, Homo sapiens
MSSPGTESAGKSLQYRVDHLLSAVENELQAGSEKGDPTERELRVGLEESELWLRFKELTNEMIVTKNGRRMFPVLKVNVSGLDPNAMYSFLLDFVAADNHRWKYVNGEWVPGGKPEPQAPSCVYIHPDSPNFGAHWMKAPVSFSKVKLTNKLNGGGQIMLNSLHKYEPRIHIVRVGGPQRMITSHCFPETQFIAVTAYQNEEITALKIKYNPFAKAFLDAKERSDHKEMMEEPGDSQQPGYSQ

SEQ ID NO: 66337 - protein, 121 aa, Homo sapiens
MRIMLLFTAILAFSLAQSFGAVCKEPQEEVVPGGGRSKRDPDLYQLLQRLFKSHSSLEGLLKALSQASTDPKESTSPEKRDMHDFFVGLMGKRSVQPDSPTDVNQENVPSFGILKYPPRAE

SEQ ID NO: 66338 - protein, 121 aa, Homo sapiens; identical to SEQ ID NO: 66337

SEQ ID NO: 66339 - protein, 103 aa, Homo sapiens
MRIMLLFTAILAFSLAQSFGAVCKEPQEEVVPGGGRSKRDPDLYQLLQRLFKSHSSLEGLLKALSQASTDPKESTSPEKHSPTDVNQENVPSFGILKYPPRAE

SEQ ID NO: 66340 - protein, 121 aa, Homo sapiens; identical to SEQ ID NO: 66337

SEQ ID NO: 66341 - protein, 407 aa, Homo sapiens
MDNVLPVDSDLSPNISTNTSEPNQFVQPAWQIVLWAAAYTVIVVTSVVGNVVVMWIILAHKRMRTVTNYFLVNLAFAEASMAAFNTVVNFTYAVHNEWYYGLFYCKFHNFFPIAAVFASIYSMTAVAFDRYMAIIHPLQPRLSATATKVVICVIWVLALLLAFPQGYYSTTETMPSRVVCMIEWPEHPNKIYEKVYHICVTVLIYFLPLLVIGYAYTVVGITLWASEIPGDSSDRYHEQVSAKRKVVKMMIVVVCTFAICWLPFHIFFLLPYINPDLYLKKFIQQVYLAIMWLAMSSTMYNPIIYCCLNDRFRLGFKHAFRCCPFISAGDYEGLEMKSTRYLQTQGSVYKVSRLETTISTVVGAHEEEPEDGPKATPSSLDLTSNCSSRSDSKTMTESFSFSSNVLS

SEQ ID NO: 66342 - protein, 311 aa, Homo sapiens
MDNVLPVDSDLSPNISTNTSEPNQFVQPAWQIVLWAAAYTVIVVTSVVGNVVVMWIILAHKRMRTVTNYFLVNLAFAEASMAAFNTVVNFTYAVHNEWYYGLFYCKFHNFFPIAAVFASIYSMTAVAFDRYMAIIHPLQPRLSATATKVVICVIWVLALLLAFPQGYYSTTETMPSRVVCMIEWPEHPNKIYEKVYHICVTVLIYFLPLLVIGYAYTVVGITLWASEIPGDSSDRYHEQVSAKRKVVKMMIVVVCTFAICWLPFHIFFLLPYINPDLYLKKFIQQVYLAIMWLAMSSTMYNPIIYCCLNDR

SEQ ID NO: 66343 - protein, 398 aa, Homo sapiens
MGTCDIVTEANISSGPESNTTGITAFSMPSWQLALWATAYLALVLVAVTGNAIVIWIILAHRRMRTVTNYFIVNLALADLCMAAFNAAFNFVYASHNIWYFGRAFCYFQNLFPITAMFVSIYSMTAIAADRYMAIVHPFQPRLSAPSTKAVIAGIWLVALALASPQCFYSTVTMDQGATKCVVAWPEDSGGKTLLLYHLVVIALIYFLPLAVMFVAYSVIGLTLWRRAVPGHQAHGANLRHLQAMKKFVKTMVLVVLTFAICWLPYHLYFILGSFQEDIYCHKFIQQVYLALFWLAMSSTMYNPIIYCCLNHRFRSGFRLAFRCCPWVTPTKEDKLELTPTTSLSTRVNRCHTKETLFMAGDTAPSEATSGEAGRPQDGSGLWFGYGLLAPTKTHVEI

SEQ ID NO: 66344 - protein, 186 aa, Homo sapiens
MFVAYSVIGLTLWRRAVPGHQAHGANLRHLQAMKKFVKTMVLVVLTFAICWLPYHLYFILGSFQEDIYCHKFIQQVYLALFWLAMSSTMYNPIIYCCLNHRFRSGFRLAFRCCPWVTPTKEDKLELTPTTSLSTRVNRCHTKETLFMAGDTAPSEATSGEAGRPQDGSGLWFGYGLLAPTKTHVEI

SEQ ID NO: 66345 - protein, 465 aa, Homo sapiens
MATLPAAETWIDGGGGVGADAVNLTASLAAGAATGAVETGWLQLLDQAGNLSSSPSALGLPVASPAPSQPWANLTNQFVQPSWRIALWSLAYGVVVAVAVLGNLIVIWIILAHKRMRTVTNYFLVNLAFSDASMAAFNTLVNFIYALHSEWYFGANYCRFQNFFPITAVFASIYSMTAIAVDRYMAIIDPLKPRLSATATKIVIGSIWILAFLLAFPQCLYSKTKVMPGRTLCFVQWPEGPKQHFTYHIIVIILVYCFPLLIMGITYTIVGITLWGGEIPGDTCDKYHEQLKAKRKVVKMMIIVVMTFAICWLPYHIYFILTAIYQQLNRWKYIQQVYLASFWLAMSSTMYNPIIYCCLNKRFRAGFKRAFRWCPFIKVSSYDELELKTTRFHPNRQSSMYTVTRMESMTVVFDPNDADTTRSSRKKRATPRDPSFNGCSRRNSKSASATSSFISSPYTSVDEYS

SEQ ID NO: 66346 - protein, 1893 aa, Homo sapiens
MGPGCDLLLRTAATITAAAIMSDTDSDEDSAGGGPFSLAGFLFGNINGAGQLEGESVLDDECKKHLAGLGALGLGSLITELTANEELTGTDGALVNDEGWVRSTEDAVDYSDINEVAEDESRRYQQTMGSLQPLCHSDYDEDDYDADCEDIDCKLMPPPPPPPGPMKKDKDQDSITGVSENGEGIILPSIIAPSSLASEKVDFSSSSDSESEMGPQEATQAESEDGKLTLPLAGIMQHDATKLLPSVTELFPEFRPGKVLRFLRLFGPGKNVPSVWRSARRKRKKKHRELIQEEQIQEVECSVESEVSQKSLWNYDYAPPPPPEQCLSDDEITMMAPVESKFSQSTGDIDKVTDTKPRVAEWRYGPARLWYDMLGVPEDGSGFDYGFKLRKTEHEPVIKSRMIEEFRKLEENNGTDLLADENFLMVTQLHWEDDIIWDGEDVKHKGTKPQRASLAGWLPSSMTRNAMAYNVQQGFAATLDDDKPWYSIFPIDNEDLVYGRWEDNIIWDAQAMPRLLEPPVLTLDPNDENLILEIPDEKEEATSNSPSKESKKESSLKKSRILLGKTGVIKEEPQQNMSQPEVKDPWNLSNDEYYYPKQQGLRGTFGGNIIQHSIPAVELRQPFFPTHMGPIKLRQFHRPPLKKYSFGALSQPGPHSVQPLLKHIKKKAKMREQERQASGGGEMFFMRTPQDLTGKDGDLILAEYSEENGPLMMQVGMATKIKNYYKRKPGKDPGAPDCKYGETVYCHTSPFLGSLHPGQLLQAFENNLFRAPIYLHKMPETDFLIIRTRQGYYIRELVDIFVVGQQCPLFEVPGPNSKRANTHIRDFLQVFIYRLFWKSKDRPRRIRMEDIKKAFPSHSESSIRKRLKLCADFKRTGMDSNWWVLKSDFRLPTEEEIRAMVSPEQCCAYYSMIAAEQRLKDAGYGEKSFFAPEEENEEDFQMKIDDEVRTAPWNTTRAFIAAMKGKCLLEVTGVADPTGCGEGFSYVKIPNKPTQQKDDKEPQPVKKTVTGTDADLRRLSLKNAKQLLRKFGVPEEEIKKLSRWEVIDVVRTMSTEQARSGEGPMSKFARGSRFSVAEHQERYKEECQRIFDLQNKVLSSTEVLSTDTDSSSAEDSDFEEMGKNIENMLQNKKTSSQLSREREEQERKELQRMLLAAGSAASGNNHRDDDTASVTSLNSSATGRCLKIYRTFRDEEGKEYVRCETVRKPAVIDAYVRIRTTKDEEFIRKFALFDEQHREEMRKERRRIQEQLRRLKRNQEKEKLKGPPEKKPKKMKERPDLKLKCGACGAIGHMRTNKFCPLYYQTNAPPSNPVAMTEEQEEELEKTVIHNDNEELIKVEGTKIVLGKQLIESADEVRRKSLVLKFPKQQLPPKKKRRVGTTVHCDYLNRPHKSIHRRRTDPMVTLSSILESIINDMRDLPNTYPFHTPVNAKVVKDYYKIITRPMDLQTLRENVRKRLYPSREEFREHLELIVKNSATYNGPKHSLTQISQSMLDLCDEKLKEKEDKLARLEKAINPLLDDDDQVAFSFILDNIVTQKMMAVPDSWPFHHPVNKKFVPDYYKVIVNPMDLETIRKNISKHKYQSRESFLDDVNLILANSVKYNGPESQYTKTAQEIVNVCYQTLTEYDEHLTQLEKDICTAKEAALEEAELESLDPMTPGPYTPQPPDLYDTNTSLSMSRDASVFQDESNMSVLDIPSATPEKQVTQEGEDGDGDLADEEEGTVQQPQASVLYEDLLMSEGEDDEEDAGSDEEGDNPFSAIQLSESGSDSDVGSGGIRPKQPRMLQENTRMDMENEESMMSYEGDGGEASHGLEDSNISYGSYEEPDPKSNTQDTSFSSIGGYEVSEEEEDEEEEEQRSGPSVLSQVHLSEDEEDSEDFHSIAGDSDLDSDE

SEQ ID NO: 66347 - protein, 1872 aa, Homo sapiens
MGPGCDLLLRTAATITAAAIMSDTDSDEDSAGGGPFSLAGFLFGNINGAGQLEGESVLDDECKKHLAGLGALGLGSLITELTANEELTGTDGALVNDEGWVRSTEDAVDYSDINEVAEDESRRYQQTMGSLQPLCHSDYDEDDYDADCEDIDCKLMPPPPPPPGPMKKDKDQDSITGEKVDFSSSSDSESEMGPQEATQAESEDGKLTLPLAGIMQHDATKLLPSVTELFPEFRPGKVLRFLRLFGPGKNVPSVWRSARRKRKKKHRELIQEEQIQEVECSVESEVSQKSLWNYDYAPPPPPEQCLSDDEITMMAPVESKFSQSTGDIDKVTDTKPRVAEWRYGPARLWYDMLGVPEDGSGFDYGFKLRKTEHEPVIKSRMIEEFRKLEENNGTDLLADENFLMVTQLHWEDDIIWDGEDVKHKGTKPQRASLAGWLPSSMTRNAMAYNVQQGFAATLDDDKPWYSIFPIDNEDLVYGRWEDNIIWDAQAMPRLLEPPVLTLDPNDENLILEIPDEKEEATSNSPSKESKKESSLKKSRILLGKTGVIKEEPQQNMSQPEVKDPWNLSNDEYYYPKQQGLRGTFGGNIIQHSIPAVELRQPFFPTHMGPIKLRQFHRPPLKKYSFGALSQPGPHSVQPLLKHIKKKAKMREQERQASGGGEMFFMRTPQDLTGKDGDLILAEYSEENGPLMMQVGMATKIKNYYKRKPGKDPGAPDCKYGETVYCHTSPFLGSLHPGQLLQAFENNLFRAPIYLHKMPETDFLIIRTRQGYYIRELVDIFVVGQQCPLFEVPGPNSKRANTHIRDFLQVFIYRLFWKSKDRPRRIRMEDIKKAFPSHSESSIRKRLKLCADFKRTGMDSNWWVLKSDFRLPTEEEIRAMVSPEQCCAYYSMIAAEQRLKDAGYGEKSFFAPEEENEEDFQMKIDDEVRTAPWNTTRAFIAAMKGKCLLEVTGVADPTGCGEGFSYVKIPNKPTQQKDDKEPQPVKKTVTGTDADLRRLSLKNAKQLLRKFGVPEEEIKKLSRWEVIDVVRTMSTEQARSGEGPMSKFARGSRFSVAEHQERYKEECQRIFDLQNKVLSSTEVLSTDTDSSSAEDSDFEEMGKNIENMLQNKKTSSQLSREREEQERKELQRMLLAAGSAASGNNHRDDDTASVTSLNSSATGRCLKIYRTFRDEEGKEYVRCETVRKPAVIDAYVRIRTTKDEEFIRKFALFDEQHREEMRKERRRIQEQLRRLKRNQEKEKLKGPPEKKPKKMKERPDLKLKCGACGAIGHMRTNKFCPLYYQTNAPPSNPVAMTEEQEEELEKTVIHNDNEELIKVEGTKIVLGKQLIESADEVRRKSLVLKFPKQQLPPKKKRRVGTTVHCDYLNRPHKSIHRRRTDPMVTLSSILESIINDMRDLPNTYPFHTPVNAKVVKDYYKIITRPMDLQTLRENVRKRLYPSREEFREHLELIVKNSATYNGPKHSLTQISQSMLDLCDEKLKEKEDKLARLEKAINPLLDDDDQVAFSFILDNIVTQKMMAVPDSWPFHHPVNKKFVPDYYKVIVNPMDLETIRKNISKHKYQSRESFLDDVNLILANSVKYNGPESQYTKTAQEIVNVCYQTLTEYDEHLTQLEKDICTAKEAALEEAELESLDPMTPGPYTPQPPDLYDTNTSLSMSRDASVFQDESNMSVLDIPSATPEKQVTQEGEDGDGDLADEEEGTVQQPQASVLYEDLLMSEGEDDEEDAGSDEEGDNPFSAIQLSESGSDSDVGSGGIRPKQPRMLQENTRMDMENEESMMSYEGDGGEASHGLEDSNISYGSYEEPDPKSNTQDTSFSSIGGYEVSEEEEDEEEEEQRSGPSVLSQVHLSEDEEDSEDFHSIAGDSDLDSDE

SEQ ID NO: 66348 - protein, 543 aa, Homo sapiens
MTEEQEEELEKTVIHNDNEELIKVEGTKIVLGKQLIESADEVRRKSLVLKFPKQQLPPKKKRRVGTTVHCDYLNRPHKSIHRRRTDPMVTLSSILESIINDMRDLPNTYPFHTPVNAKVVKDYYKIITRPMDLQTLRENVRKRLYPSREEFREHLELIVKNSATYNGPKHSLTQISQSMLDLCDEKLKEKEDKLARLEKAINPLLDDDDQVAFSFILDNIVTQKMMAVPDSWPFHHPVNKKFVPDYYKVIVNPMDLETIRKNISKHKYQSRESFLDDVNLILANSVKYNGPESQYTKTAQEIVNVCYQTLTEYDEHLTQLEKDICTAKEAALEEAELESLDPMTPGPYTPQAKPPDLYDTNTSLSMSRDASVFQDESNMSVLDIPSATPEKQVTQMRQGRGRLGEEDSDVDIEGYDDEEEDGKPKTPAPEGEDGDGDLADEEEGTVQQPQASVLYEDLLMSEGEDDEEDAGSDEEGDNPFSAIQLSESGSDSDVGSGGIRPKQPRMLQENTRMDMENEESMMSYEGDGGEASHGLEDSNISHQ

SEQ ID NO: 66349 - protein, 1895 aa, Homo sapiens
MGPGCDLLLRTAATITAAAIMSDTDSDEDSAGGGPFSLAGFLFGNINGAGQLEGESVLDDECKKHLAGLGALGLGSLITELTANEELTGTDGALVNDEGWVRSTEDAVDYSDINEVAEDESRRYQQTMGSLQPLCHSDYDEDDYDADCEDIDCKLMPPPPPPPGPMKKDKDQDSITGVSENGEGIILPSIIAPSSLASEKVDFSSSSDSESEMGPQEATQAESEDGKLTLPLAGIMQHDATKLLPSVTELFPEFRPGKVLRFLRLFGPGKNVPSVWRSARRKRKKKHRELIQEEQIQEVECSVESEVSQKSLWNYDYAPPPPPEQCLSDDEITMMAPVESKFSQSTGDIDKVTDTKPRVAEWRYGPARLWYDMLGVPEDGSGFDYGFKLRKTEHEPVIKSRMIEEFRKLEENNGTDLLADENFLMVTQLHWEDDIIWDGEDVKHKGTKPQRASLAGWLPSSMTRNAMAYNVQQGFAATLDDDKPWYSIFPIDNEDLVYGRWEDNIIWDAQAMPRLLEPPVLTLDPNDENLILEIPDEKEEATSNSPSKESKKESSLKKSRILLGKTGVIKEEPQQNMSQPEVKDPWNLSNDEYYYPKQQGLRGTFGGNIIQHSIPAVELRQPFFPTHMGPIKLRQFHRPPLKKYSFGALSQPGPHSVQPLLKHIKKKAKMREQERQASGGGEMFFMRTPQDLTGKDGDLILAEYSEENGPLMMQVGMATKIKNYYKRKPGKDPGAPDCKYGETVYCHTSPFLGSLHPGQLLQAFENNLFRAPIYLHKMPETDFLIIRTRQGYYIRELVDIFVVGQQCPLFEVPGPNSKRANTHIRDFLQVFIYRLFWKSKDRPRRIRMEDIKKAFPSHSESSIRKRLKLCADFKRTGMDSNWWVLKSDFRLPTEEEIRAMVSPEQCCAYYSMIAAEQRLKDAGYGEKSFFAPEEENEEDFQMKIDDEVRTAPWNTTRAFIAAMKGKCLLEVTGVADPTGCGEGFSYVKIPNKPTQQKDDKEPQPVKKTVTGTDADLRRLSLKNAKQLLRKFGVPEEEIKKLSRWEVIDVVRTMSTEQARSGEGPMSKFARGSRFSVAEHQERYKEECQRIFDLQNKVLSSTEVLSTDTDSSSAEDSDFEEMGKNIENMLQNKKTSSQLSREREEQERKELQRMLLAAGSAASGNNHRDDDTASVTSLNSSATGRCLKIYRTFRDEEGKEYVRCETVRKPAVIDAYVRIRTTKDEEFIRKFALFDEQHREEMRKERRRIQEQLRRLKRNQEKEKLKGPPEKKPKKMKERPDLKLKCGACGAIGHMRTNKFCPLYYQTNAPPSNPVAMTEEQEEELEKTVIHNDNEELIKVEGTKIVLGKQLIESADEVRRKSLVLKFPKQQLPPKKKRRVGTTVHCDYLNRPHKSIHRRRTDPMVTLSSILESIINDMRDLPNTYPFHTPVNAKVVKDYYKIITRPMDLQTLRENVRKRLYPSREEFREHLELIVKNSATYNGPKHSLTQISQSMLDLCDEKLKEKEDKLARLEKAINPLLDDDDQVAFSFILDNIVTQKMMAVPDSWPFHHPVNKKFVPDYYKVIVNPMDLETIRKNISKHKYQSRESFLDDVNLILANSVKYNGPESQYTKTAQEIVNVCYQTLTEYDEHLTQLEKDICTAKEAALEEAELESLDPMTPGPYTPQAKPPDLYDTNTSLSMSRDASVFQDESNMSVLDIPSATPEKQVTQEGEDGDGDLADEEEGTVQQPQASVLYEDLLMSEGEDDEEDAGSDEEGDNPFSAIQLSESGSDSDVGSGGIRPKQPRMLQENTRMDMENEESMMSYEGDGGEASHGLEDSNISYGSYEEPDPKSNTQDTSFSSIGGYEVSEEEEDEEEEEQRSGPSVLSQVHLSEDEEDSEDFHSIAGDSDLDSDE

SEQ ID NO: 66350 - protein, 1906 aa, Homo sapiens
MGPGCDLLLRTAATITAAAIMSDTDSDEDSAGGGPFSLAGFLFGNINGAGQLEGESVLDDECKKHLAGLGALGLGSLITELTANEELTGTDGALVNDEGWVRSTEDAVDYSDINEVAEDESRRYQQTMGSLQPLCHSDYDEDDYDADCEDIDCKLMPPPPPPPGPMKKDKDQDSITGEKVDFSSSSDSESEMGPQEATQAESEDGKLTLPLAGIMQHDATKLLPSVTELFPEFRPGKVLRFLRLFGPGKNVPSVWRSARRKRKKKHRELIQEEQIQEVECSVESEVSQKSLWNYDYAPPPPPEQCLSDDEITMMAPVESKFSQSTGDIDKVTDTKPRVAEWRYGPARLWYDMLGVPEDGSGFDYGFKLRKTEHEPVIKSRMIEEFRKLEENNGTDLLADENFLMVTQLHWEDDIIWDGEDVKHKGTKPQRASLAGWLPSSMTRNAMAYNVQQGFAATLDDDKPWYSIFPIDNEDLVYGRWEDNIIWDAQAMPRLLEPPVLTLDPNDENLILEIPDEKEEATSNSPSKESKKESSLKKSRILLGKTGVIKEEPQQNMSQPEVKDPWNLSNDEYYYPKQQGLRGTFGGNIIQHSIPAVELRQPFFPTHMGPIKLRQFHRPPLKKYSFGALSQPGPHSVQPLLKHIKKKAKMREQERQASGGGEMFFMRTPQDLTGKDGDLILAEYSEENGPLMMQVGMATKIKNYYKRKPGKDPGAPDCKYGETVYCHTSPFLGSLHPGQLLQAFENNLFRAPIYLHKMPETDFLIIRTRQGYYIRELVDIFVVGQQCPLFEVPGPNSKRANTHIRDFLQVFIYRLFWKSKDRPRRIRMEDIKKAFPSHSESSIRKRLKLCADFKRTGMDSNWWVLKSDFRLPTEEEIRAMVSPEQCCAYYSMIAAEQRLKDAGYGEKSFFAPEEENEEDFQMKIDDEVRTAPWNTTRAFIAAMKGKCLLEVTGVADPTGCGEGFSYVKIPNKPTQQKDDKEPQPVKKTVTGTDADLRRLSLKNAKQLLRKFGVPEEEIKKLSRWEVIDVVRTMSTEQARSGEGPMSKFARGSRFSVAEHQERYKEECQRIFDLQNKVLSSTEVLSTDTDSSSAEDSDFEEMGKNIENMLQNKKTSSQLSREREEQERKELQRMLLAAGSAASGNNHRDDDTASVTSLNSSATGRCLKIYRTFRDEEGKEYVRCETVRKPAVIDAYVRIRTTKDEEFIRKFALFDEQHREEMRKERRRIQEQLRRLKRNQEKEKLKGPPEKKPKKMKERPDLKLKCGACGAIGHMRTNKFCPLYYQTNAPPSNPVAMTEEQEEELEKTVIHNDNEELIKVEGTKIVLGKQLIESADEVRRKSLVLKFPKQQLPPKKKRRVGTTVHCDYLNRPHKSIHRRRTDPMVTLSSILESIINDMRDLPNTYPFHTPVNAKVVKDYYKIITRPMDLQTLRENVRKRLYPSREEFREHLELIVKNSATYNGPKHSLTQISQSMLDLCDEKLKEKEDKLARLEKAINPLLDDDDQVAFSFILDNIVTQKMMAVPDSWPFHHPVNKKFVPDYYKVIVNPMDLETIRKNISKHKYQSRESFLDDVNLILANSVKYNGPESQYTKTAQEIVNVCYQTLTEYDEHLTQLEKDICTAKEAALEEAELESLDPMTPGPYTPQPPDLYDTNTSLSMSRDASVFQDESNMSVLDIPSATPEKQVTQMRQGRGRLGEEDSDVDIEGYDDEEEDGKPKTPAPEGEDGDGDLADEEEGTVQQPQASVLYEDLLMSEGEDDEEDAGSDEEGDNPFSAIQLSESGSDSDVGSGGIRPKQPRMLQENTRMDMENEESMMSYEGDGGEASHGLEDSNISYGSYEEPDPKSNTQDTSFSSIGGYEVSEEEEDEEEEEQRSGPSVLSQVHLSEDEEDSEDFHSIAGDSDLDSDE

SEQ ID NO: 66351 - protein, 298 aa, Homo sapiens
MTEEQEEELEKTVIHNDNEELIKVEGTKIVLGKQLIESADEVRRKSLVLKFPKQQLPPKKKRRVGTTVHCDYLNRPHKSIHRRRTDPMVTLSSILESIINDMRDLPNTYPFHTPVNAKVVKDYYKIITRPMDLQTLRENVRKRLYPSREEFREHLELIVKNSATYNGPKHSLTQISQSMLDLCDEKLKEKEDKLARLEKAINPLLDDDDQVAFSFILDNIVTQKMMAVPDSWPFHHPVNKKFVPDYYKVIVNPMDLETIRKNISKHKYQSRESFLDDVNLILANSVKYNGYMCTTCRF

SEQ ID NO: 66352 - protein, 218 aa, Homo sapiens
MSCSGSGADPEAAPASAASAPGPAPPVSAPAALPSSTAAENKASPAGTAGGPGAGAAAGGTGPLAARAGEPAERRGAAPVSAGGAAPPEGAISNGVYVLPSAANGDVKPVVSSTPLVDFLMQLEDYTPTIPDAVTGYYLNRAGFEASDPRIIRLISLAAQKFISDIANDALQHCKMKGTASGSSRSKSKDRKYTLTMEDLTPALSEYGINVKKPHYFT

SEQ ID NO: 66353 - protein, 211 aa, Homo sapiens
MDDAHESPSDKGGETGESDETAAVPGDPGATDTDGIPEETDGDADVDLKEAAAEEGELESQDVSDLTTVEREDSSLLNPAAKKLKIDTKEKKEKKQKVDEDEIQKMQILVSSFSEEQLNRYEMYRRSAFPKAAIKRLIQSITGTSVSQNVVIAMSGISKVFVGEVVEEALDVCEKWGEMPPLQPKHMREAVRRLKSKGQIPNSKHKKIIFF

SEQ ID NO: 66354 - protein, 154 aa, Homo sapiens
MDDAHESPSDKGGETGESDETAAVPGDPGATDTDGIPEETDGDADVDLKEAAAEEGELESQDVSDLTTVEREDSSLLNPAAKKLKIDTKEKKEKKQKVDEDEIQKMQILVSSFSEEQLNRYEMYRRSAFPKAAIKRHWMCVRSGEKCHHYNPNI

SEQ ID NO: 66355 - protein, 161 aa, Homo sapiens
MNQFGPSALINLSNFSSIKPEPASTPPQGSMANSTAVVKIPGTPGAGGRLSPENNQVLTKKKLQDLVREVDPNEQLDEDVEEMLLQIADDFIESVVTAACQLARHRKSSTLEVKDVQLHLERQWNMWIPGFGSEEIRPYKKACTTEAHKQRMALIRKTTKK

SEQ ID NO: 66356 - protein, 161 aa, Homo sapiens; identical to SEQ ID NO: 66355

SEQ ID NO: 66357 - protein, 592 aa, Homo sapiens
MSDSGSYGQSGGEQQSYSTYGNPGSQGYGQASQSYSGYGQTTDSSYGQNYSGYSSYGQSQSGYSQSYGGYENQKQSSYSQQPYNNQGQQQNMESSGSQGGRAPSYDQPDYGQQDSYDQQSGYDQHQGSYDEQSNYDQQHDSYSQNQQSYHSQRENYSHHTQDDRRDVSRYGEDNRGYGGSQGGGRGRGGYDKDGRGPMTGSSGGDRGGFKNFGGHRDYGPRTDADSESDNSDNNTIFVQGLGEGVSTDQVGEFFKQIGIIKTNKKTGKPMINLYTDKDTGKPKGEATVSFDDPPSAKAAIDWFDGKEFHGNIIKVSFATRRPEFMRGGGSGGGRRGRGGYRGRGGFQGRGGDPKSGDWVCPNPSCGNMNFARRNSCNQCNEPRPEDSRPSGGDFRGRGYGGERGYRGRGGRGGDRGGYGGDRSGGGYGGDRSSGGGYSGDRSGGGYGGDRSGGGYGGDRGGGYGGDRGGGYGGDRGGGYGGDRGGYGGDRGGGYGGDRGGYGGDRGGYGGDRGGYGGDRGGYGGDRSRGGYGGDRGGGSGYGGDRSGGYGGDRSGGGYGGDRGGGYGGDRGGYGGKMGGRNDYRNDQRNRPY

SEQ ID NO: 66358 - protein, 592 aa, Homo sapiens; identical to SEQ ID NO: 66357

SEQ ID NO: 66359 - protein, 395 aa, Homo sapiens
MTGSSGGDRGGFKNFGGHRDYGPRTDADSESDNSDNNTIFVQGLGEGVSTDQVGEFFKQIGIIKTNKKTGKPMINLYTDKDTGKPKGEATVSFDDPPSAKAAIDWFDGKEFHGNIIKVSFATRRPEFMRGGGSGGGRRGRGGYRGRGGFQGRGGDPKSGDWVCPNPSCGNMNFARRNSCNQCNEPRPEDSRPSGGDFRGRGYGGERGYRGRGGRGGDRGGYGGDRSGGGYGGDRSSGGGYSGDRSGGGYGGDRSGGGYGGDRGGGYGGDRGGGYGGDRGGGYGGDRGGYGGDRGGGYGGDRGGYGGDRGGYGGDRGGYGGDRGGYGGDRSRGGYGGDRGGGSGYGGDRSGGYGGDRSGGGYGGDRGGGYGGDRGGYGGKMGGRNDYRNDQRNRPY

SEQ ID NO: 66360 - protein, 929 aa, Homo sapiens
MCESYSRSLLRVSVAQICQALGWDSVQLSACHLLTDVLQRYLQQLGRGCHRYSELYGRTDPILDDVGEAFQLMGVSLHELEDYIHNIEPVTFPHQIPSFPVSKNNVLQFPQPGSKDAEERKEYIPDYLPPIVSSQEEEEEEQVPTDGGTSAEAMQVPLEEDDELEEEEIINDENFLGKRPLDSPEAEELPAMKRPRLLSTKGDTLDVVLLEAREPLSSINTQKIPPMLSPVHVQDSTDLAPPSPEPPMLAPVAKSQMPTAKPLETKSFTPKTKTKTSSPGQKTKSPKTAQSPAMVGSPIRSPKTVSKEKKSPGRSKSPKSPKSPKVTTHIPQTPVRPETPNRTPSATLSEKISKETIQVKQIQTPPDAGKLNSENQPKKAVVADKTIEASIDAVIARACAEREPDPFEFSSGSESEGDIFTSPKRISGPECTTPKASTSANNFTKSGSTPLPLSGGTSSSDNSWTMDASIDEVVRKAKLGTPSNMPPNFPYISSPSVSPPTPEPLHKVYEEKTKLPSSVEVKKKLKKELKTKMKKKEKQRDREREKDKNKDKSKEKDKVKEKEKDKETGRETKYPWKEFLKEEEADPYKFKIKEFEDVDPKVKLKDGLVRKEKEKHKDKKKDREKGKKDKDKREKEKVKDKGREDKMKAPAPPLVLPPKELALPLFSPATASRVPAMLPSLLPVLPEKLFEEKEKVKEKEKKKDKKEKKKKKEKEKEKKEKEREKEKREREKREKEKEKHKHEKIKVEPVALAPSPVIPRLTLRVGAGQDKIVISKVVPAPEAKPAPSQNRPKTPPPAPAPAPGPMLVSPAPVPLPLLAQAAAGPALLPSPGPAASGASAKAPVRSVVTETVSTYVIRDEWGNQIWICPGCNKPDDGSPMIGCDDCDDWYHWPCVGIMTAPPEEMQWFCPKCANKKKDKKHKKRKHRAH

SEQ ID NO: 66361 - protein, 283 aa, Homo sapiens
MCESYSRSLLRVSVAQICQALGWDSVQLSACHLLTDVLQRYLQQLGRGCHRYSELYGRTDPILDDVGEAFQLMGVSLHELEDYIHNIEPVTFPHQIPSFPVSKNNVLQFPQPGSKDAEERKEYIPDYLPPIVSSQEEEEEEQVPTDGGTSAEAMQVPLEEDDELEEEEIINDENFLGKRPLDSPEAEELPAMKRPRLLSTKGDTLDVVLLEAREPLSSINTQKIPPMLSPVHVQDSTDLAPPSPEPPMLAPVAKSQMPTAKPLETKSFTPKTKTKKKKKKKKS

SEQ ID NO: 66362 - protein, 1085 aa, Homo sapiens
MAAGSDLLDEVFFNSEVDEKVVSDLVGSLESQLAASAAHHHHLAPRTPEVRAAAAGALGNHVVSGSPAGAAGAGPAAPAEGAPGAAPEPPPAGRARPGGGGPQRPGPPSPRRPLVPAGPAPPAAKLRPPPEGSAGSCAPVPAAAAVAAGPEPAPAGPAKPAGPAALAARAGPGPGPGPGPGPGPGPGKPAGPGAAQTLNGSAALLNSHHAAAPAVSLVNNGPAALLPLPKPAAPGTVIQTPPFVGAAAPPAPAAPSPPAAPAPAAPAAAPPPPPPAPATLARPPGHPAGPPTAAPAVPPPAAAQNGGSAGAAPAPAPAAGGPAGVSGQPGPGAAAAAPAPGVKAESPKRVVQAAPPAAQTLAASGPASTAASMVIGPTMQGALPSPAAVPPPAPGTPTGLPKGAAGAVTQSLSRTPTATTSGIRATLTPTVLAPRLPQPPQNPTNIQNFQLPPGMVLVRSENGQLLMIPQQALAQMQAQAHAQPQTTMAPRPATPTSAPPVQISTVQAPGTPIIARQVTPTTIIKQVSQAQTTVQPSATLQRSPGVQPQLVLGGAAQTASLGTATAVQTGTPQRTVPGATTTSSAATETMENVKKCKNFLSTLIKLASSGKQSTETAANVKELVQNLLDGKIEAEDFTSRLYRELNSSPQPYLVPFLKRSLPALRQLTPDSAAFIQQSQQQPPPPTSQATTALTAVVLSSSVQRTAGKTAATVTSALQPPVLSLTQPTQVGVGKQGQPTPLVIQQPPKPGALIRPPQVTLTQTPMVALRQPHNRIMLTTPQQIQLNPLQPVPVVKPAVLPGTKALSAVSAQAAAAQKNKLKEPGGGSFRDDDDINDVASMAGVNLSEESARILATNSELVGTLTRSCKDETFLLQAPLQRRILEIGKKHGITELHPDVVSYVSHATQQRLQNLVEKISETAQQKNFSYKDDDRYEQASDVRAQLKFFEQLDQIEKQRKDEQEREILMRAAKSRSRQEDPEQLRLKQKAKEMQQQELAQMRQRDANLTALAAIGPRKKRKVDCPGPGSGAEGSGPGSVVPGSSGVGTPRQFTRQRITRVNLRDLIFCLENERETSHSLLLYKAFLK

SEQ ID NO: 66363 - protein, 949 aa, Homo sapiens
GRGLLQQRGGRESGPAPPAAKLRPPPEGSAGSCAPVPAAAAVAAGPEPAPAGPAKPAGPAALAARAGPGPGPGPGPGPGPGPGKPAGPGAAQTLNGSAALLNSHHAAAPAVSLVNNGPAALLPLPKPAAPAAAPPPPPPAPATLARPPGHPAGPPTAAPAVPPPAAAQNGGSAGAAPAPAPAAGGPAGVSGQPGPGAAAAAPAPGVKAESPKRVVQAAPPAAQTLAASGPASTAASMVIGPTMQGALPSPAAVPPPAPGTPTGLPKGAAGAVTQSLSRTPTATTSGIRATLTPTVLAPRLPQPPQNPTNIQNFQLPPGMVLVRSENGQLLMIPQQALAQMQAQAHAQPQTTMAPRPATPTSAPPVQISTVQAPGTPIIARQVTPTTIIKQVSQAQTTVQPSATLQRSPGVQPQLVLGGAAQTASLGTATAVQTGTPQRTVPGATTTSSAATETMENVKKCKNFLSTLIKLASSGKQSTETAANVKELVQNLLDGKIEAEDFTSRLYRELNSSPQPYLVPFLKRSLPALRQLTPDSAAFIQQSQQQPPPPTSQATTALTAVVLSSSVQRTAGKTAATVTSALQPPVLSLTQPTQVGVGKQGQPTPLVIQQPPKPGALIRPPQVTLTQTPMVALRQPHNRIMLTTPQQIQLNPLQPVPVVKPAVLPGTKALSAVSAQAAAAQKNKLKEPGGGSFRDDDDINDVASMAGVNLSEESARILATNSELVGTLTRSCKDETFLLQAPLQRRILEIGKKHGITELHPDVVSYVSHATQQRLQNLVEKISETAQQKNFSYKDDDRYEQASDVRAQLKFFEQLDQIEKQRKDEQEREILMRAAKSRSRQEDPEQLRLKQKAKEMQQQELAQMRQRDANLTALAAIGPRKKRKVDCPGPGSGAEGSGPGSVVPGSSGVGTPRQFTRQRITRVNLRDLIFCLENERETSHSLLLYKAFLK

SEQ ID NO: 66364 - protein, 862 aa, Homo sapiens
MPAGLTEPAGAAPPAAVSASGTVTMAPAGALPVRVESTPVALGAVTKAPVSVCVEPTASQPLRSPVGTLVTKVAPVSAPPKVSSGPRLPAPQIVAVKAPNTTTIQFPANLQLPPGTVLIKSNSGPLMLVSPQQTVTRAETTSNITSRPAVPANPQTVKICTVPNSSSQLIKKVAVTPVKKLAQIGTTVVTTVPKPSSVQSVAVPTSVVTVTPGKPLNTVTTLKPSSLGASSTPSNEPNLKAENSAAVQINLSPTMLENVKKCKNFLAMLIKLACSGSQSPEMGQNVKKLVEQLLDAKIEAEEFTRKLYVELKSSPQPHLVPFLKKSVVALRQLLPNSQSFIQQCVQQTSSDMVIATCTTTVTTSPVVTTTVSSSQSEKSIIVSGATAPRTVSVQTLNPLAGPVGAKAGVVTLHSVGPTAATGGTTAGTGLLQTSKPLVTSVANTVTTVSLQPEKPVVSGTAVTLSLPAVTFGETSGAAICLPSVKPVVSSAGTTSDKPVIGTPVQIKLAQPGPVLSQPAGIPQAVQVKQLVVQQPSGGNEKQVTTISHSSTLTIQKCGQKTMPVNTIIPTSQFPPASILKQITLPGNKILSLQASPTQKNRIKENVTSCFRDEDDINDVTSMAGVNLNEENACILATNSELVGTLIQSCKDEPFLFIGALQKRILDIGKKHDITELNSDAVNLISQATQERLRGLLEKLTAIAQHRMTTYKASENYILCSDTRSQLKFLEKLDQLEKQRKDLEEREMLLKAAKSRSNKEDPEQLRLKQKAKELQQLELAQIQHRDANLTALAAIGPRKKRPLESGIEGLKDNLLASGTSSLTATKQLHRPRITRICLRDLIFCMEQEREMKYSRALYLALLK

SEQ ID NO: 66365 - protein, 618 aa, Homo sapiens
MPAGLTEPAGAAPPAAVSASGTVTMAPAGALPVRVESTPVALGAVTKAPVSVCVEPTASQPLRSPVGTLVTKVAPVSAPPKVSSGPRLPAPQIVAVKAPNTTTIQFPANLQLPPGTVLIKSNSGPLMLVSPQQTVTRAETTSNITSRPAVPANPQTVKICTVPNSSSQLIKKVAVTPVKKLAQIGTTVVTTVPKPSSVQSVAVPTSVVTVTPGKPLNTVTTLKPSSLGASSTPSNEPNLKAENSAAVQINLSPTMLENVKKCKNFLAMLIKLACSGSQSPEMGQNVKKLVEQLLDAKIEAEEFTRKLYVELKSSPQPHLVPFLKKSVVALRQLLPNSQSFIQQCVQQTSSDMVIATCTTTVTTSPVVTTTVSSSQSEKSIIVSGATAPRTVSVQTLNPLAGPVGAKAGVVTLHSVGPTAATGGTTAGTGLLQTSKPLVTSVANTVTTVSLQPEKPVVSGTAVTLSLPAVTFGETSGAAICLPSVKPVVSSAGTTSDKPVIGTPVQIKLAQPGPVLSQPAGIPQAVQVKQLVVQQPSGGNEKQVTTISHSSTLTIQKCGQKTMPVNTIIPTSQFPPASILKQITLPGNKILSLQASPTQKNRIKENVTSCFRSTFICVY

SEQ ID NO: 66366 - protein, 865 aa, Homo sapiens
MPAGLTEPAGAAPPAAVSASGTVTMAPAGALPVRVESTPVALGAVTKAPVSVCVEPTASQPLRSPVGTLVTKVAPVSAPPKVSSGPRLPAPQIVAVKAPNTTTIQFPANLQLPPGTVLIKSNSGPLMLVSPQQTVTRAETTSNITSRPAVPANPQTVKICTVPNSSSQLIKKVAVTPVKKLAQIGTTVVTTVPKPSSVQSVAVPTSVVTVTPGKPLNTVTTLKPSSLGASSTPSNEPNLKAENSAAVQINLSPTMLENVKKCKNFLAMLIKLACSGSQSPEMGQNVKKLVEQLLDAKIEAEEFTRKLYVELKSSPQPHLVPFLKKSVVALRQLLPNSQSFIQQCVQQTSSDMVIATCTTTVTTSPVVTTTVSSSQSEKSIIVSGATAPRTVSVQTLNPLAGPVGAKAGVVTLHSVGPTAATGGTTAGTGLLQTSKPLVTSVANTVTTVSLQPEKPVVSGTAVTLSLPAVTFGETSGAAICLPSVKPVVFCWDHIKPVIGTPVQIKLAQPGPVLSQPAGIPQAVQVKQLFSLFQVVQQPSGGNEKQVTTISHSSTLTIQKCGQKTMPVNTIIPTSQFPPASILKQITLPGNKILSLQASPTQKNRIKENVTSCFRDEDDINDVTSMAGVNLNEENACILATNSELVGTLIQSCKDEPFLFIGALQKRILDIGKKHDITELNSDAVNLISQATQERLRGLLEKLTAIAQHRMTTYKASENYILCSDTRSQLKFLEKLDQLEKQRKDLEEREMLLKAAKSRSNKEDPEQLRLKQKAKELQQLELAQIQHRDANLTALAAIGPRKKRPLESGIEGLKDNLLASGTSSLTATKQLHRPRITRICLRDLIFCMEQEREMKYSRALYLALLK

SEQ ID NO: 66367 - protein, 745 aa, Homo sapiens
MAALAEEQTEVAVKLEPEGPPTLLPPQAGDGAGEGSGGTTNNGPNGGGGNVAASSSTGGDGGTPKPTVAVSAAAPAGAAPVPAAAPDAGAPHDRQTLLAVLQFLRQSKLREAEEALRREAGLLEEAVAGSGAPGEVDSAGAEVTSALLSRVTASAPGPAAPDPPGTGASGATVVSGSASGPAAPGKVGSVAVEDQPDVSAVLSAYNQQGDPTMYEEYYSGLKHFIECSLDCHRAELSQLFYPLFVHMYLELVYNQHENEAKSFFEKFHGDQECYYQDDLRVLSSLTKKEHMKGNETMLDFRTSKFVLRISRDSYQLLKRHLQEKQNNQIWNIVQEHLYIDIFDGMPRSKQQIDAMVGSLAGEAKREANKSKVFFGLLKEPEIEVPLDDEDEEGENEEGKPKKKKPKKDSIGSKSKKQDPNAPPQNRIPLPELKDSDKLDKIMNMKETTKRVRLGPDCLPSICFYTFLNAYQGLTAVDVTDDSSLIAGGFADSTVRVWSVTPKKLRSVKQASDLSLIDKESDDVLERIMDEKTASELKILYGHSGPVYGASFSPDRLWATDHYQPLRIFAGHLADVNCTRFHPNSNYVATGSADRTVRLWDVLNGNCVRIFTGHKGPIHSLTFSPNGRFLATGATDGRVLLWDIGHGLMVGELKGHTDTVCSLRFSRDGEILASGSMDNTVRLWDAIKAFEDLETDDFTTATGHINLPENSQELLLGTYMTKSTPVVHLHFTRRNLVLAAGAYSPQ

SEQ ID NO: 66368 - protein, 800 aa, Homo sapiens
MAALAEEQTEVAVKLEPEGPPTLLPPQAGDGAGEGSGGTTNNGPNGGGGNVAASSSTGGDGGTPKPTVAVSAAAPAGAAPVPAAAPDAGAPHDRQTLLAVLQFLRQSKLREAEEALRREAGLLEEAVAGSGAPGEVDSAGAEVTSALLSRVTASAPGPAAPDPPGTGASGATVVSGSASGPAAPGKVGSVAVEDQPDVSAVLSAYNQQGDPTMYEEYYSGLKHFIECSLDCHRAELSQLFYPLFVHMYLELVYNQHENEAKSFFEKFHGDQECYYQDDLRVLSSLTKKEHMKGNETMLDFRTSKFVLRISRDSYQLLKRHLQEKQNNQIWNIVQEHLYIDIFDGMPRSKQQIDAMVGSLAGEAKREANKSKVFFGLLKEPEIEVPLDDEDEEGENEEGKPKKKKPKKDSIGSKSKKQDPNAPPQNRIPLPELKDSDKLDKIMNMKETTKRVRLGPDCLPSICFYTFLNAYQGLTAVDVTDDSSLIAGGFADSTVRVWSVTPKKLRSVKQASDLSLIDKESDDVLERIMDEKTASELKILYGHSGPVYGASFSPDRNYLLSSSEDGTVRLWSLQTFTCLVGYKGHNYPVWDTQFSPYGYYFVSGGHDRVARLWATDHYQPLRIFAGHLADVNCTRFHPNSNYVATGSADRTVRLWDVLNGNCVRIFTGHKGPIHSLTFSPNGRFLATGATDGRVLLWDIGHGLMVGELKGHTDTVCSLRFSRDGEILASGSMDNTVRLWDAIKAFEDLETDDFTTATGHINLPENSQELLLGTYMTKSTPVVHLHFTRRNLVLAAGAYSPQ

SEQ ID NO: 66369 - protein, 677 aa, Homo sapiens
MAEEKKLKLSNTVLPSESMKVVAESMGIAQIQEETCQLLTDEVSYRIKEIAQDALKFMHMGKRQKLTTSDIDYALKLKNVEPLYGFHAQEFIPFRFASGGGRELYFYEEKEVDLSDIINTPLPRVPLDVCLKAHWLSIEGCQPAIPENPPPAPKEQQKAEATEPLKSAKPGQEEDGPLKGKGQGATTADGKGKEKKAPPLLEGAPLRLKPRSIHELSVEQQLYYKEITEACVGSCEAKRAEALQSIATDPGLYQMLPRFSTFISEGVRVNVVQNNLALLIYLMRMVKALMDNPTLYLEKYVHELIPAVMTCIVSRQLCLRPDVDNHWALRDFAARLVAQICKHFSTTTNNIQSRITKTFTKSWVDEKTPWTTRYGSIAGLAELGHDVIKTLILPRLQQEGERIRSVLDGPVLSNIDRIGADHVQSLLLKHCAPVLAKLRPPPDNQDAYRAEFGSLGPLLCSQVVKARAQAALQAQQVNRTTLTITQPRPTLTLSQAPQPGPRTPGLLKVPGSIALPVQTLVSARAAAPPQPSPPPTKFIVMSSSSSAPSTQQVLSLSTSAPGSGSTTTSPVTTTVPSVQPIVKLVSTATTAPPSTAPSGPGSVQKYIVVSLPPTGEGKGGPTSHPSPVPPPASSPSPLSGSALCGGKQEAGDSPPPAPGTPKANGSQPNSGSPQPAP

SEQ ID NO: 66370 - protein, 76 aa, Homo sapiens
MAEEKKLKLSNTVLPSESMKVVAESMGIAQIQEETCQLLTDEVSYRIKEIAQDALKFMHMGKRQKLTTSDIDYALK

SEQ ID NO: 66371 - protein, 601 aa, Homo sapiens
MHMGKRQKLTTSDIDYALKLKNVEPLYGFHAQEFIPFRFASGGGRELYFYEEKEVDLSDIINTPLPRVPLDVCLKAPKEQQKAEATEPLKSAKPGQEEDGPLKGKGQGATTADGKGKEKKAPPLLEGAPLRLKPRSIHELSVEQQLYYKEITEACVGSCEAKRAEALQSIATDPGLYQMLPRFSTFISEGVRVNVVQNNLALLIYLMRMVKALMDNPTLYLEKYVHELIPAVMTCIVSRQLCLRPDVDNHWALRDFAARLVAQICKHFSTTTNNIQSRITKTFTKSWVDEKTPWTTRYGSIAGLAELGHDVIKTLILPRLQQEGERIRSVLDGPVLSNIDRIGADHVQSLLLKHCAPVLAKLRPPPDNQDAYRAEFGSLGPLLCSQVVKARAQAALQAQQVNRTTLTITQPRPTLTLSQAPQPGPRTPGLLKVPGSIALPVQTLVSARAAAPPQPSPPPTKFIVMSSSSSAPSTQQVLSLSTSAPGSGSTTTSPVTTTVPSVQPIVKLVSTATTAPPSTAPSGPGSVQKYIVVSLPPTGEGKGGPTSHPSPVPPPASSPSPLSGSALCGGKQEAGDSPPPAPGTPKANGSQPNSGSPQPAP

SEQ ID NO: 66372 - protein, 14 aa, Homo sapiens
MAEEKKLKLSNTVL

SEQ ID NO: 66373 - protein, 714 aa, Homo sapiens
MTKRRLQTITACLQLREGSPSLHRGLHPSREEKRDSRMAEEKKLKLSNTVLPSESMKVVAESMGIAQIQEETCQLLTDEVSYRIKEIAQDALKFMHMGKRQKLTTSDIDYALKLKNVEPLYGFHAQEFIPFRFASGGGRELYFYEEKEVDLSDIINTPLPRVPLDVCLKAHWLSIEGCQPAIPENPPPAPKEQQKAEATEPLKSAKPGQEEDGPLKGKGQGATTADGKGKEKKAPPLLEGAPLRLKPRSIHELSVEQQLYYKEITEACVGSCEAKRAEALQSIATDPGLYQMLPRFSTFISEGVRVNVVQNNLALLIYLMRMVKALMDNPTLYLEKYVHELIPAVMTCIVSRQLCLRPDVDNHWALRDFAARLVAQICKHFSTTTNNIQSRITKTFTKSWVDEKTPWTTRYGSIAGLAELGHDVIKTLILPRLQQEGERIRSVLDGPVLSNIDRIGADHVQSLLLKHCAPVLAKLRPPPDNQDAYRAEFGSLGPLLCSQVVKARAQAALQAQQVNRTTLTITQPRPTLTLSQAPQPGPRTPGLLKVPGSIALPVQTLVSARAAAPPQPSPPPTKFIVMSSSSSAPSTQQVLSLSTSAPGSGSTTTSPVTTTVPSVQPIVKLVSTATTAPPSTAPSGPGSVQKYIVVSLPPTGEGKGGPTSHPSPVPPPASSPSPLSGSALCGGKQEAGDSPPPAPGTPKANGSQPNSGSPQPAP

SEQ ID NO: 66374 - protein, 233 aa, Homo sapiens
MAEEKKLKLSNTVLPSESMKVVAESMGIAQIQEETCQLLTDEVSYRIKEIAQDALKFMHMGKRQKLTTSDIDYALKLKNVEPLYGFHAQEFIPFRFASGGGRELYFYEEKEVDLSDIINTPLPRVPLDVCLKAPKEQQKAEATEPLKSAKPGQEEDGPLKGKGQGATTADGKGKEKKAPPLLEGAPLRLKPRSIHELSVEQQLYYKEITEACVGSCEAKRAEALQSIATDPGL

SEQ ID NO: 66375 - protein, 134 aa, Homo sapiens
MAEEKKLKLSNTVLPSESMKVVAESMGIAQIQEETCQLLTDEVSYRIKEIAQDALKFMHMGKRQKLTTSDIDYALKLKNVEPLYGFHAQEFIPFRFASGGGRELYFYEEKEVDLSDIINTPLPRVPLDVCLKAH

SEQ ID NO: 66376 - protein, 114 aa, Homo sapiens
MAEEKKLKLSNTVLPSESMKVVAESMGIAQIQEETCQLLTDEVSYRIKEIAQDALKFMHMGKRQKLTTSDIDYALKLKNVEPLYGFHAQEFIPFRFASGGGRELYFYEEKEVDL

SEQ ID NO: 66377 - protein, 677 aa, Homo sapiens; identical to SEQ ID NO: 66369

SEQ ID NO: 66378 - protein, 677 aa, Homo sapiens; identical to SEQ ID NO: 66369

SEQ ID NO: 66379 - protein, 9 aa, Homo sapiens
MAEEKKLKL

SEQ ID NO: 66380 - protein, 734 aa, Homo sapiens
MDIRHSEFLPCLHCPPFVGPLPVSHVSFSSACPVPLPGSPSLHRGLHPSREEKRDSRMAEEKKLKLSNTVLPSESMKVVAESMGIAQIQEETCQLLTDEVSYRIKEIAQDALKFMHMGKRQKLTTSDIDYALKLKNVEPLYGFHAQEFIPFRFASGGGRELYFYEEKEVDLSDIINTPLPRVPLDVCLKAHWLSIEGCQPAIPENPPPAPKEQQKAEATEPLKSAKPGQEEDGPLKGKGQGATTADGKGKEKKAPPLLEGAPLRLKPRSIHELSVEQQLYYKEITEACVGSCEAKRAEALQSIATDPGLYQMLPRFSTFISEGVRVNVVQNNLALLIYLMRMVKALMDNPTLYLEKYVHELIPAVMTCIVSRQLCLRPDVDNHWALRDFAARLVAQICKHFSTTTNNIQSRITKTFTKSWVDEKTPWTTRYGSIAGLAELGHDVIKTLILPRLQQEGERIRSVLDGPVLSNIDRIGADHVQSLLLKHCAPVLAKLRPPPDNQDAYRAEFGSLGPLLCSQVVKARAQAALQAQQVNRTTLTITQPRPTLTLSQAPQPGPRTPGLLKVPGSIALPVQTLVSARAAAPPQPSPPPTKFIVMSSSSSAPSTQQVLSLSTSAPGSGSTTTSPVTTTVPSVQPIVKLVSTATTAPPSTAPSGPGSVQKYIVVSLPPTGEGKGGPTSHPSPVPPPASSPSPLSGSALCGGKQEAGDSPPPAPGTPKANGSQPNSGSPQPAP

SEQ ID NO: 66381 - protein, 255 aa, Homo sapiens
MAEEKKLKLSNTVLPSESMKVVAESMGIAQIQEETCQLLTDEVSYRIKEIAQDALKFMHMGKRQKLTTSDIDYALKLKNVEPLYGFHAQEFIPFRFASGGGRELYFYEEKEVDLSDIINTPLPRVPLDVCLKAHWLSIEGCQPAIPENPPPAPKEQQKAEATEPLKSAKPGQEEDGPLKGKGQGATTADGKGKEKKAPPLLEGAPLRLKPRSIHELSVEQQLYYKEITEACVGSCEAKRAEALQSIATDPGLYQM

SEQ ID NO: 66382 - protein, 349 aa, Homo sapiens
MSKSKDDAPHELESQFILRLPPEYASTVRRAVQSGHVNLKDRLTIELHPDGRHGIVRVDRVPLASKLVDLPCVMESLKTIDKKTFYKTADICQMLVSTVDGDLYPPVEEPVASTDPKASKKKDKDKEKKFIWNHGITLPLKNVRKRRFRKTAKKKYIESPDVEKEVKRLLSTDAEAVSTRWEIIAEDETKEAENQGLDISSPGMSGHRQGHDSLEHDELREIFNDLSSSSEDEDETQHQDEEDINIIDTEEDLERQLQDKLNESDEQHQENEGTNQLVMGIQKQIDNMKGKLQETQDRAKRQEDLIMKVENLALKNRFQAVLDELKQKEDREKEQLSSLQEELESLLEK

SEQ ID NO: 66383 - protein, 302 aa, Homo sapiens
MSESQDEVPDEVENQFILRLPLEHACTVRNLARSQSVKMKDKLKIDLLPDGRHAVVEVEDVPLAAKLVDLPCVIESLRTLDKKTFYKTADISQMLVCTADGDIHLSPEEPAASTDPNIVRKKERGREEKCVWKHGITPPLKNVRKKRFRKTQKKVPDVKEMEKSSFTEYIESPDVENEVKRLLRSDAEAVSTRWEVIAEDGTKEIESQGSIPGFLISSGMSSHKQGHTSSVMEIQKQIEKKEKKLHKIQNKAQRQKDLIMKVENLTLKNHFQSVLEQLELQEKQKNEKLISLQEQLQRFLKK

SEQ ID NO: 66384 - protein, 376 aa, Homo sapiens
MSESQDEVPDEVENQFILRLPLEHACTVRNLARSQSVKMKDKLKIDLLPDGRHAVVEVEDVPLAAKLVDLPCVIESLRTLDKKTFYKTADISQMLVCTADGDIHLSPEEPAASTDPNIVRKKERGREEKCVWKHGITPPLKNVRKKRFRKTQKKVPDVKEMEKSSFTEYIESPDVENEVKRLLRSDAEAVSTRWEVIAEDGTKEIESQGSIPGFLISSGMSSHKQGHTSSEYDMLREMFSDSRSNNDDDEDEDDEDEDEDEDEDEDEDKEEEEEDCSEEYLERQLQAEFIESGQYRANEGTSSIVMEIQKQIEKKEKKLHKIQNKAQRQKDLIMKVENLTLKNHFQSVLEQLELQEKQKNEKLISLQEQLQRFLKK

SEQ ID NO: 66385 - protein, 302 aa, Homo sapiens; identical to SEQ ID NO: 66383

SEQ ID NO: 66386 - protein, 462 aa, Homo sapiens
MECPEGQLPISSENDSTPTVSTSEVTSQQEPQILVDRGSETTYESSADIAGDEGTQIPADEDTQTDADSSAQAAAQAPENFQEGKDMSESQDEVPDEVENQFILRLPLEHACTVRNLARSQSVKMKDKLKIDLLPDGRHAVVEVEDVPLAAKLVDLPCVIESLRTLDKKTFYKTADISQMLVCTADGDIHLSPEEPAASTDPNIVRKKERGREEKCVWKHGITPPLKNVRKKRFRKTQKKVPDVKEMEKSSFTEYIESPDVENEVKRLLRSDAEAVSTRWEVIAEDGTKEIESQGSIPGFLISSGMSSHKQGHTSSEYDMLREMFSDSRSNNDDDEDEDDEDEDEDEDEDEDEDKEEEEEDCSEEYLERQLQAEFIESGQYRANEGTSSIVMEIQKQIEKKEKKLHKIQNKAQRQKDLIMKVENLTLKNHFQSVLEQLELQEKQKNEKLISLQEQLQRFLKK

SEQ ID NO: 66387 - protein, 264 aa, Homo sapiens
MESGKTASPKSMPKDAQMMAQILKDMGITEYEPRVINQMLEFAFRYVTTILDDAKIYSSHAKKATVDADDVRLAIQCRADQSFTSPPPRDFLLDIARQRNQTPLPLIKPYSGPRLPPDRYCLTAPNYRLKSLQKKASTSAGRITVPRLSVGSVTSRPSTPTLGTPTPQTMSVSTKVGTPMSLTGQRFTVQMPTSQSPAVKASIPATSAVQNVLINPSLIGSKNILITTNMMSSQNTANESSNALKRKREDDDDDDDDDDDYDNL

SEQ ID NO: 66388 - protein, 264 aa, Homo sapiens; identical to SEQ ID NO: 66387

SEQ ID NO: 66389 - protein, 169 aa, Homo sapiens
MCHRKPGTPGVGKTTLGKELASKSGLKYINVGDLAREEQLYDGYDEEYDCPILDEDRVVDELDNQMREGGVIVDYHGCDFFPERWFHIVFVLRTDTNVLYERLETRGYNEKKLTDNIQCEIFQVLYEEATASYKEEIVHQLPSNKPEELENNVDQILKWIEQWIKDHNS

SEQ ID NO: 66390 - protein, 172 aa, Homo sapiens
MLLPNILLTGTPGVGKTTLGKELASKSGLKYINVGDLAREEQLYDGYDEEYDCPILDEDRVVDELDNQMREGGVIVDYHGCDFFPERWFHIVFVLRTDTNVLYERLETRGYNEKKLTDNIQCEIFQVLYEEATASYKEEIVHQLPSNKPEELENNVDQILKWIEQWIKDHNS

SEQ ID NO: 66391 - protein, 198 aa, Homo sapiens
MESGKTASPKSMPKDAQMMAQILKDMGITEYEPRVINQMLEFAFRYVTTILDDAKIYSSHAKKATVDADDVRLAIQCRADQSFTSPPPRDFLLDIARQRNQTPLPLIKPYSGPRLPPDRYCLTAPNYRLKSLQKKASTSAGRITVPRLSVGSVTSRPSTPTLGTPTPQTMSVSTKVGTPMSLTGQRFTVQMPTSQSPA

SEQ ID NO: 66392 - protein, 136 aa, Homo sapiens
MESGKTASPKSMPKDAQMMAQILKDMGITEYEPRVINQMLEFAFRYVTTILDDAKIYSSHAKKATVDADDVRLAIQCRADQSFTSPPPRDFLLDIARQRNQTPLPLIKPYSGPRLPPDRYCLTAPNYRLKSLQKKA

SEQ ID NO: 66393 - protein, 264 aa, Homo sapiens; identical to SEQ ID NO: 66387

SEQ ID NO: 66394 - protein, 102 aa, Homo sapiens
MESGKTASPKSMPKDAQMMAQILKDMGITEYEPRVINQMLEFAFRYVTTILDDAKIYSSHAKKATVDADDVRLAIQCRADQSFTSPPPRDFLLDIARQRNQT

SEQ ID NO: 66395 - protein, 166 aa, Homo sapiens
MESGKTASPKSMPKDAQMMAQILKDMGITEYEPRVINQMLEFAFRYVTTILDDAKIYSSHAKKATVDADDVRLAIQCRADQSFTSPPPRDFLLDIARQRNQTPLPLIKPYSGPRLPPDRYCLTAPNYRLKSLQKKASTSAGRITVPRLSVGSVTSRPSTPTLGTPT

SEQ ID NO: 66396 - protein, 127 aa, Homo sapiens
MESGKTASPKSMPKDAQMMAQILKDMGITEYEPRVINQMLEFAFRYVTTILDDAKIYSSHAKKATVDADDVRLAIQCRADQSFTSPPPRDFLLDIARQRNQTPLPLIKPYSGPRLPPDRYCLTAPNY

SEQ ID NO: 66397 - protein, 251 aa, Homo sapiens
MESGKMAPPKNAPRDALVMAQILKDMGITEYEPRVINQMLEFAFRYVTTILDDAKIYSSHAKKPNVDADDVRLAIQCRADQSFTSPPPRDFLLDIARQKNQTPLPLIKPYAGPRLPPDRYCLTAPNYRLKSLIKKGPNQGRLVPRLSVGAVSSKPTTPTIATPQTVSVPNKVATPMSVTSQRFTVQIPPSQSTPVKPVPATTAVQNVLINPSMIGPKNILITTNMVSSQNTANEANPLKRKHEDDDDNDIM

SEQ ID NO: 66398 - protein, 292 aa, Homo sapiens
MPLHVKWPFPAVPPLTWTLASSVVMGLVGTYSCFWTKYMNHLTVHNREVLYELIEKRGPATPLITVSNHQSCMDDPHLWGILKLRHIWNLKLMRWTPAAADICFTKELHSHFFSLGKCVPVCRGAEFFQAENEGKGVLDTGRHMPGAGKRREKGDGVYQKGMDFILEKLNHGDWVHIFPEGKVNMSSEFLRFKWGIGRLIAECHLNPIILPLWHVGMNDVLPNSPPYFPRFGQKITVLIGKPFSALPVLERLRAENKSAVEMRKALTDFIQEEFQHLKTQAEQLHNHLQPGR

SEQ ID NO: 66399 - protein, 262 aa, Homo sapiens
MPLHVKWPFPAVPPLTWTLASSVVMGLVGTYSCFWTKYMNHLTVHNREVLYELIEKRGPATPLITVSNHQSCMDDPHLWGILKLRHIWNLKLMRWTPAAADICFTKELHSHFFSLGKCVPVCRGDGVYQKGMDFILEKLNHGDWVHIFPEGKVNMSSEFLRFKWGIGRLIAECHLNPIILPLWHVGMNDVLPNSPPYFPRFGQKITVLIGKPFSALPVLERLRAENKSAVEMRKALTDFIQEEFQHLKTQAEQLHNHLQPGR

SEQ ID NO: 66400 - protein, 278 aa, Homo sapiens
MPLHVKWPFPAVPPLTWTLASSVVMGLVGTYSCFWTKYMNHLTVHNREVLYELIEKRGPATPLITVSNHQSCMDDPHLWGILKLRHIWNLKLMRWTPAAADICFTKELHSHFFSLGKCVPVCRGAEFFQAENEGKGVLDTGRHMPGAGKRREKGDGVYQKGMDFILEKLNHGDWVHIFPEGIGRLIAECHLNPIILPLWHVGMNDVLPNSPPYFPRFGQKITVLIGKPFSALPVLERLRAENKSAVEMRKALTDFIQEEFQHLKTQAEQLHNHLQPGR

SEQ ID NO: 66401 - protein, 248 aa, Homo sapiens
MPLHVKWPFPAVPPLTWTLASSVVMGLVGTYSCFWTKYMNHLTVHNREVLYELIEKRGPATPLITVSNHQSCMDDPHLWGILKLRHIWNLKLMRWTPAAADICFTKELHSHFFSLGKCVPVCRGDGVYQKGMDFILEKLNHGDWVHIFPEGIGRLIAECHLNPIILPLWHVGMNDVLPNSPPYFPRFGQKITVLIGKPFSALPVLERLRAENKSAVEMRKALTDFIQEEFQHLKTQAEQLHNHLQPGR

SEQ ID NO: 66402 - protein, 265 aa, Homo sapiens
MPLHVKWPFPAVPPLTWTLASSVVMGLVGTYSCFWTKYMNHLTVHNREVLYELIEKRGPATPLITVSNHQSCMDDPHLWGILKLRHIWNLKLMRWTPAAADICFTKELHSHFFSLGKCVPVCRGAEFFQAENEGKGVLDTGRHMPGAGKRREKGKVNMSSEFLRFKWGIGRLIAECHLNPIILPLWHVGMNDVLPNSPPYFPRFGQKITVLIGKPFSALPVLERLRAENKSAVEMRKALTDFIQEEFQHLKTQAEQLHNHLQPGR

SEQ ID NO: 66403 - protein, 2542 aa, Homo sapiens
MVALSLKICVRHCNVVKTMQFEPSTAVYDACRVIRERVPEAQTGQASDYGLFLSDEDPRKGIWLEAGRTLDYYMLRNGDILEYKKKQRPQKIRMLDGSVKTVMVDDSKTVGELLVTICSRIGITNYEEYSLIQETIEEKKEEGTGTLKKDRTLLRDERKMEKLKAKLHTDDDLNWLDHSRTFREQGVDENETLLLRRKFFYSDQNVDSRDPVQLNLLYVQARDDILNGSHPVSFEKACEFGGFQAQIQFGPHVEHKHKPGFLDLKEFLPKEYIKQRGAEKRIFQEHKNCGEMSEIEAKVKYVKLARSLRTYGVSFFLVKEKMKGKNKLVPRLLGITKDSVMRVDEKTKEVLQEWPLTTVKRWAASPKSFTLDFGEYQESYYSVQTTEGEQISQLIAGYIDIILKKKQSKDRFGLEGDEESTMLEESVSPKKSTILQQQFNRTGKAEHGSVALPAVMRSGSSGPETFNVGSMPSPQQQVMVGQMHRGHMPPLTSAQQALMGTINTSMHAVQQAQDDLSELDSLPPLGQDMASRVWVQNKVDESKHEIHSQVDAITAGTASVVNLTAGDPADTDYTAVGCAITTISSNLTEMSKGVKLLAALMDDEVGSGEDLLRAARTLAGAVSDLLKAVQPTSGEPRQTVLTAAGSIGQASGDLLRQIGENETDERFQDVLMSLAKAVANAAAMLVLKAKNVAQVAEDTVLQNRVIAAATQCALSTSQLVACAKVVSPTISSPVCQEQLIEAGKLVDRSVENCVRACQAATTDSELLKQVSAAASVVSQALHDLLQHVRQFASRGEPIGRYDQATDTIMCVTESIFSSMGDAGEMVRQARVLAQATSDLVNAMRSDAEAEIDMENSKKLLAAAKLLADSTARMVEAAKGAAANPENEDQQQRLREAAEGLRVATNAAAQNAIKKKIVNRLEVAAKQAAAAATQTIAASQNAAVSNKNPAAQQQLVQSCKAVADHIPQLVQGVRGSQAQAEDLSAQLALIISSQNFLQPGSKMVSSAKAAVPTVSDQAAAMQLSQCAKNLATSLAELRTASQKAHEACGPMEIDSALNTVQTLKNELQDAKMAAVESQLKPLPGETLEKCAQDLGSTSKAVGSSMAQLLTCAAQGNEHYTGVAARETAQALKTLAQAARGVAASTTDPAAAHAMLDSARDVMEGSAMLIQEAKQALIAPGDAERQQRLAQVAKAVSHSLNNCVNCLPGQKDVDVALKSIGESSKKLLVDSLPPSTKPFQEAQSELNQAAADLNQSAGEVVHATRGQSGELAAASGKFSDDFDEFLDAGIEMAGQAQTKEDQIQVIGNLKNISMASSKLLLAAKSLSVDPGAPNAKNLLAAAARAVTESINQLITLCTQQAPGQKECDNALRELETVKGMLDNPNEPVSDLSYFDCIESVMENSKVLGESMAGISQNAKTGDLPAFGECVGIASKALCGLTEAAAQAAYLVGISDPNSQAGHQGLVDPIQFARANQAIQMACQNLVDPGSSPSQVLSAATIVAKHTSALCNACRIASSKTANPVAKRHFVQSAKEVANSTANLVKTIKALDGDFSEDNRNKCRIATAPLIEAVENLTAFASNPEFVSIPAQISSEGSQAQEPILVSAKTMLESSSYLIRTARSLAINPKDPPTWSVLAGHSHTVSDSIKSLITSIRDKAPGQRECDYSIDGINRCIRDIEQASLAAVSQSLATRDDISVEALQEQLTSVVQEIGHLIDPIATAARGEAAQLGHKVTQLASYFEPLILAAVGVASKILDHQQQMTVLDQTKTLAESALQMLYAAKEGGGNPKAQHTHDAITEAAQLMKEAVDDIMVTLNEAASEVGLVGGMVDAIAEAMSKLDEGTPPEPKGTFVDYQTTVVKYSKAIAVTAQEMMTKSVTNPEELGGLASQMTSDYGHLAFQGQMAAATAEPEEIGFQIRTRVQDLGHGCIFLVQKAGALQVCPTDSYTKRELIECARAVTEKVSLVLSALQAGNKGTQACITAATAVSGIIADLDTTIMFATAGTLNAENSETFADHRENILKTAKALVEDTKLLVSGAASTPDKLAQAAQSSAATITQLAEVVKLGAASLGSDDPETQVVLINAIKDVAKALSDLISATKGAASKPVDDPSMYQLKGAAKVMVTNVTSLLKTVKAVEDEATRGTRALEATIECIKQELTVFQSKDVPEKTSSPEESIRMTKGITMATAKAVAAGNSCRQEDVIATANLSRKAVSDMLTACKQASFHPDVSDEVRTRALRFGTECTLGYLDLLEHVLVILQKPTPEFKQQLAAFSKRVAGAVTELIQAAEAMKGTEWVDPEDPTVIAETELLGAAASIEAAAKKLEQLKPRAKPKQADETLDFEEQILEAAKSIAAATSALVKSASAAQRELVAQGKVGSIPANAADDGQWSQGLISAARMVAAATSSLCEAANASVQGHASEEKLISSAKQVAASTAQLLVACKVKADQDSEAMRRLQAAGNAVKRASDNLVRAAQKAAFGKADDDDVVVKTKFVGGIAQIIAAQEEMLKKERELEEARKKLAQIRQQQYKFLPTELREDEG

SEQ ID NO: 66404 - protein, 2542 aa, Homo sapiens; identical to SEQ ID NO: 66403

SEQ ID NO: 66405 - protein, 1729 aa, Homo sapiens
MKVSTLRESSAMASPLPREMEEELVPTGSEPGDTRAKPPVKPKPRALPAKPALPAKPSLLVPVGPRPPRGPLAELPSARKMNMLAGPQPYGGSKRPLPFAPRPAVEASTGGEATQETGKEEAGKEEPPPLTPPARCAAPGGVRKAPAPFRPASERFAATTVEEILAKMEQPRKEVLASPDRLWGSRLTFNHDGSSRYGPRTYGTTTAPRDEDGSTLFRGWSQEGPVKSPAECREEHSKTPEERSLPSDLAFNGDLAKAASSELPADISKPWIPSSPAPSSENGGPASPGLPAEASGSGPGSPHLHPPDKSSPCHSQLLEAQTPEASQASPCPAVTPSAPSAALPDEGSRHTPSPGLPAEGAPEAPRPSSPPPEVLEPHSLDQPPATSPRPLIEVGELLDLTRTFPSGGEEEAKGDAHLRPTSLVQRRFSEGVLQSPSQDQEKLGGSLAALPQGQGSQLALDRPFGAESNWSLSQSFEWTFPTRPSGLGVWRLDSPPPSPITEASEAAEAAEAGNLAVSSREEGVSQQGQGAGSAPSGSGSSWVQGDDPSMSLTQKGDGESQPQFPAVPLEPLPTTEGTPGLPLQQAEERYESQEPLAGQESPLPLATREAALPILEPVLGQEQPAAPDQPCVLFADAPEPGQALPVEEEAVTLARAETTQARTEAQDLCRASPEPPGPESSSRWLDDLLASPPPSGGGARRGAGAELKDTQSPSTCSEGLLGWSQKDLQSEFGITGDPQPSSFSPSSWCQGASQDYGLGGASPRGDPGLGERDWTSKYGQGAGEGSTREWASRCGIGQEEMEASSSQDQSKVSAPGVLTAQDRVVGKPAQLGTQRSQEADVQDWEFRKRDSQGTYSSRDAELQDQEFGKRDSLGTYSSRDVSLGDWEFGKRDSLGAYASQDANEQGQDLGKRDHHGRYSSQDADEQDWEFQKRDVSLGTYGSRAAEPQEQEFGKSAWIRDYSSGGSSRTLDAQDRSFGTRPLSSGFSPEEAQQQDEEFEKKIPSVEDSLGEGSRDAGRPGERGSGGLFSPSTAHVPDGALGQRDQSSWQNSDASQEVGGHQERQQAGAQGPGSADLEDGEMGKRGWVGEFSLSVGPQREAAFSPGQQDWSRDFCIEASERSYQFGIIGNDRVSGAGFSPSSKMEGGHFVPPGKTTAGSVDWTDQLGLRNLEVSSCVGSGGSSEARESAVGQMGWSGGLSLRDMNLTGCLESGGSEEPGGIGVGEKDWTSDVNVKSKDLAEVGEGGGHSQARESGVGQTDWSGVEAGEFLKSRERGVGQADWTPDLGLRNMAPGAVCSPGESKELGVGQMDWGNNLGLRDLEVTCDPDSGGSQGLRGCGVGQMDWTQDLAPQNVELFGAPSEAREHGVGGVSQCPEPGLRHNGSLSPGLEARDPLEARELGVGETSGPETQGEDYSSSSLEPHPADPGMETGEALSFGASPGRCPARPPPSGSQGLLEEMLAASSSKAVARRESAASGLGGLLEEEGAGAGAAQEEVLEPGRDSPPSWRPQPDGEASQTEDVDGTWGSSAARWSDQGPAQTSRRPSQGPPARSPSQDFSFIEDTEILDSAMYRSRANLGRKRGHRAPVIRPGGTLGLSEAADSDAHLFQDSTEPRASRVPSSDEEVVEEPQSRRTRMSLGTKGLKVNLFPGLSPSALKAKLRPRNRSAEEGELAESKSSQKESAVQRSKSCKVPGLGKPLTLPPKPEKSSGSEGSSPNWLQALKLKKKKV

SEQ ID NO: 66406 - protein, 143 aa, Homo sapiens
MKVSTLRESSAMASPLPREMEEELVPTGSEPGDTRAKPPVKPKPRALPAKPALPAKPSLLVPVGPRPPRGPLAELPSARKMNMLAGPQPYGGSKRPLPFAPRPAVEASTGGEATQETGKEEAGKEEPPPLTPPARCAAPGGVR

SEQ ID NO: 66407 - protein, 1729 aa, Homo sapiens; identical to SEQ ID NO: 66405

SEQ ID NO: 66408 - protein, 1001 aa, Homo sapiens
MPSTNRAGSLKDPEIAELFFKEDPEKLFTDLREIGHGSFGAVYFARDVRTNEVVAIKKMSYSGKQSTEKWQDIIKEVKFLQRIKHPNSIEYKGCYLREHTAWLVMEYCLGSASDLLEVHKKPLQEVEIAAITHGALQGLAYLHSHTMIHRDIKAGNILLTEPGQVKLADFGSASMASPANSFVGTPYWMAPEVILAMDEGQYDGKVDVWSLGITCIELAERKPPLFNMNAMSALYHIAQNESPTLQSNEWSDYFRNFVDSCLQKIPQDRPTSEELLKHIFVLRERPETVLIDLIQRTKDAVRELDNLQYRKMKKLLFQEAHNGPAVEAQEEEEEQDHGVGRTGTVNSVGSNQSIPSMSISASSQSSSVNSLPDVSDDKSELDMMEGDHTVMSNSSVIHLKPEEENYREEGDPRTRASDPQSPPQVSRHKSHYRNREHFATIRTASLVTRQMQEHEQDSELREQMSGYKRMRRQHQKQLMTLENKLKAEMDEHRLRLDKDLETQRNNFAAEMEKLIKKHQAAMEKEAKVMSNEEKKFQQHIQAQQKKELNSFLESQKREYKLRKEQLKEELNENQSTPKKEKQEWLSKQKENIQHFQAEEEANLLRRQRQYLELECRRFKRRMLLGRHNLEQDLVREELNKRQTQKDLEHAMLLRQHESMQELEFRHLNTIQKMRCELIRLQHQTELTNQLEYNKRRERELRRKHVMEVRQQPKSLKSKELQIKKQFQDTCKIQTRQYKALRNHLLETTPKSEHKAVLKRLKEEQTRKLAILAEQYDHSINEMLSTQALRLDEAQEAECQVLKMQLQQELELLNAYQSKIKMQAEAQHDRELRELEQRVSLRRALLEQKIEEEMLALQNERTERIRSLLERQAREIEAFDSESMRLGFSNMVLSNLSPEAFSHSYPGASGWSHNPTGGPGPHWGHPMGGPPQAWGHPMQGGPQPWGHPSGPMQGVPRGSSMGVRNSPQALRRTASGGRTEQGMSRSTSVTSQISNGSHMSYT

SEQ ID NO: 66409 - protein, 853 aa, Homo sapiens
MPSTNRAGSLKDPEIAELFFKEDPEKLFTDLREIGHGSFGAVYFARDVRTNEVVAIKKMSYSGKQSTEKWQDIIKEVKFLQRIKHPNSIEYKGCYLREHTAWLVMEYCLGSASDLLEVHKKPLQEVEIAAITHGALQGLAYLHSHTMIHRDIKAGNILLTEPGQVKLADFGSASMASPANSFVGTPYWMAPEVILAMDEGQYDGKVDVWSLGITCIELAERKPPLFNMNAMSALYHIAQNESPTLQSNEWSDYFRNFVDSCLQKIPQDRPTSEELLKHIFVLRERPETVLIDLIQRTKDAVRELDNLQYRKMKKLLFQEAHNGPAVEAQEEEEEQDHGVGRTGTVNSVGSNQSIPSMSISASSQSSSVNSLPDVSDDKSELDMMEGDHTVMSNSSVIHLKPEEENYREEGDPRTRASDPQSPPQVSRHKSHYRNREHFATIRTASLVTRQMQEHEQDSELREQMSGYKRMRRQHQKQLMTLENKLKAEMDEHRLRLDKDLETQRNNFAAEMEKLIKKHQAAMEKEAKVMSNEEKKFQQHIQAQQKKELNSFLESQKREYKLRKEQLKESKELQIKKQFQDTCKIQTRQYKALRNHLLETTPKSEHKAVLKRLKEEQTRKLAILAEQYDHSINEMLSTQALRLDEAQEAECQVLKMQLQQELELLNAYQSKIKMQAEAQHDRELRELEQRVSLRRALLEQKIEEEMLALQNERTERIRSLLERQAREIEAFDSESMRLGFSNMVLSNLSPEAFSHSYPGASGWSHNPTGGPGPHWGHPMGGPPQAWGHPMQGGPQPWGHPSGPMQGVPRGSSMGVRNSPQALRRTASGGRTEQGMSRSTSVTSQISNGSHMSYT

SEQ ID NO: 66410 - protein, 1049 aa, Homo sapiens
MPAGGRAGSLKDPDVAELFFKDDPEKLFSDLREIGHGSFGAVYFARDVRNSEVVAIKKMSYSGKQSNEKWQDIIKEVRFLQKLRHPNTIQYRGCYLREHTAWLVMEYCLGSASDLLEVHKKPLQEVEIAAVTHGALQGLAYLHSHNMIHRDVKAGNILLSEPGLVKLGDFGSASIMAPANSFVGTPYWMAPEVILAMDEGQYDGKVDVWSLGITCIELAERKPPLFNMNAMSALYHIAQNESPVLQSGHWSEYFRNFVDSCLQKIPQDRPTSEVLLKHRFVLRERPPTVIMDLIQRTKDAVRELDNLQYRKMKKILFQEAPNGPGAEAPEEEEEAEPYMHRAGTLTSLESSHSVPSMSISASSQSSSVNSLADASDNEEEEEEEEEEEEEEEGPEAREMAMMQEGEHTVTSHSSIIHRLPGSDNLYDDPYQPEITPSPLQPPAAPAPTSTTSSARRRAYCRNRDHFATIRTASLVSRQIQEHEQDSALREQLSGYKRMRRQHQKQLLALESRLRGEREEHSARLQRELEAQRAGFGAEAEKLARRHQAIGEKEARAAQAEERKFQQHILGQQKKELAALLEAQKRTYKLRKEQLKEELQENPSTPKREKAEWLLRQKEQLQQCQAEEEAGLLRRQRQYFELQCRQYKRKMLLARHSLDQDLLREDLNKKQTQKDLECALLLRQHEATRELELRQLQAVQRTRAELTRLQHQTELGNQLEYNKRREQELRQKHAAQVRQQPKSLKSKELQIKKQFQETCKIQTRQYKALRAHLLETTPKAQHKSLLKRLKEEQTRKLAILAEQYDQSISEMLSSQALRLDETQEAEFQALRQQLQQELELLNAYQSKIKIRTESQHERELRELEQRVALRRALLEQRVEEELLALQTGRSERIRSLLERQAREIEAFDAESMRLGFSSMALGGIPAEAAAQGYPAPPPAPAWPSRPVPRSGAHWSHGPPPPGMPPPAWRQPSLLAPPGPPNWLGPPTQSGTPRGGALLLLRNSPQPLRRAASGGSGSENVGPPAAAVPGPLSRSTSVASHILNGSSHFYS

SEQ ID NO: 66411 - protein, 1235 aa, Homo sapiens
MPAGGRAGSLKDPDVAELFFKDDPEKLFSDLREIGHGSFGAVYFARDVRNSEVVAIKKMSYSGKQSNEKWQDIIKEVRFLQKLRHPNTIQYRGCYLREHTAWLVMEYCLGSASDLLEVHKKPLQEVEIAAVTHGALQGLAYLHSHNMIHRDVKAGNILLSEPGLVKLGDFGSASIMAPANSFVGTPYWMAPEVILAMDEGQYDGKVDVWSLGITCIELAERKPPLFNMNAMSALYHIAQNESPVLQSGHWSEYFRNFVDSCLQKIPQDRPTSEVLLKHRFVLRERPPTVIMDLIQRTKDAVRELDNLQYRKMKKILFQEAPNGPGAEAPEEEEEAEPYMHRAGTLTSLESSHSVPSMSISASSQSSSVNSLADASDNEEEEEEEEEEEEEEEGPEAREMAMMQEGEHTVTSHSSIIHRLPGSDNLYDDPYQPEITPSPLQPPAAPAPTSTTSSARRRAYCRNRDHFATIRTASLVSRQIQEHEQDSALREQLSGYKRMRRQHQKQLLALESRLRGEREEHSARLQRELEAQRAGFGAEAEKLARRHQAIGEKEARAAQAEERKFQQHILGQQKKELAALLEAQKRTYKLRKEQLKEELQENPSTPKREKAEWLLRQKEQLQQCQAEEEAGLLRRQRQYFELQCRQYKRKMLLARHSLDQDLLREDLNKKQTQKDLECALLLRQHEATRELELRQLQAVQRTRAELTRLQHQTELGNQLEYNKRREQELRQKHAAQVRQQPKSLKVRAGQRPPGLPLPIPGALGPPNTGTPIEQQPCSPGQEAVLDQRMLGEEEEAVGERRILGKEGATLEPKQQRILGEESGAPSPSPQKHGSLVDEEVWGLPEEIEELRVPSLVPQERSIVGQEEAGTWSLWGKEDESLLDEEFELGWVQGPALTPVPEEEEEEEEGAPIGTPRDPGDGCPSPDIPPEPPPTHLRPCPASQLPGLLSHGLLAGLSFAVGSSSGLLPLLLLLLLPLLAAQGGGGLQAALLALEVGLVGLGASYLLLCTALHLPSSLFLLLAQGTALGAVLGLSWRRGLMGVPLGLGAAWLLAWPGLALPLVAMAAGGRWVRQQGPRVRRGISRLWLRVLLRLSPMAFRALQGCGAVGDRGLFALYPKTNKDGFRSRLPVPGPRRRNPRTTQHPLALLARVWVLCKGWNWRLARASQGLASHLPPWAIHTLASWGLLRGERPTRIPRLLPRSQRQLGPPASRQPLPGTLAGRRSRTRQSRALPPWR

SEQ ID NO: 66412 - protein, 755 aa, Homo sapiens
MPAGGRAGSLKDPDVAELFFKDDPEKLFSDLREIGHGSFGAVYFARDVRNSEVVAIKKMSYSGKQSNEKWQDIIKEVRFLQKLRHPNTIQYRGCYLREHTAWLVMEYCLGSASDLLEVHKKPLQEVEIAAVTHGALQGLAYLHSHNMIHRDVKAGNILLSEPGLVKLGDFGSASIMAPANSFVGTPYWMAPEVILAMDEGQYDGKVDVWSLGITCIELAERKPPLFNMNAMSALYHIAQNESPVLQSGHWSEYFRNFVDSCLQKIPQDRPTSEVLLKHRFVLRERPPTVIMDLIQRTKDAVRELDNLQYRKMKKILFQEAPNGPGAEAPEEEEEAEPYMHRAGTLTSLESSHSVPSMSISASSQSSSVNSLADASDNEEEEEEEEEEEEEEEGPEAREMAMMQEGEHTVTSHSSIIHRLPGSDNLYDDPYQPEITPSPLQPPAAPAPTSTTSSARRRAYCRNRDHFATIRTASLVSRQIQEHEQDSALREQLSGYKRMRRQHQKQLLALESRLRGEREEHSARLQRELEAQRAGFGAEAEKLARRHQAIGEKEARAAQAEERKFQQHILGQQKKELAALLEAQKRTYKLRKEQLKEELQENPSTPKREKAEWLLRQKEQLQQCQAEEEAGLLRRQRQYFELQCRQYKRKMLLARHSLDQDLLREDLNKKQTQKDLECALLLRQHEATRELELRQLQAVQRTRAELTRLQHQTELGNQLEYNKRREQELRQKHAAQVRQQPKSLKKKTNTNKISER

SEQ ID NO: 66413 - protein, 1122 aa, Homo sapiens
MPAGGRAGSLKDPDVAELFFKDDPEKLFSDLREIGHGSFGAVYFARDVRNSEVVAIKKMSYSGKQSNEKWQDIIKEVRFLQKLRHPNTIQYRGCYLREHTAWLVMEYCLGSASDLLEVHKKPLQEVEIAAVTHGALQGLAYLHSHNMIHRDVKAGNILLSEPGLVKLGDFGSASIMAPANSFVGTPYWMAPEVILAMDEGQYDGKVDVWSLGITCIELAERKPPLFNMNAMSALYHIAQNESPVLQSGHWSEYFRNFVDSCLQKIPQDRPTSEVLLKHRFVLRERPPTVIMDLIQRTKDAVRELDNLQYRKMKKILFQEAPNGPGAEAPEEEEEAEPYMHRAGTLTSLESSHSVPSMSISASSQSSSVNSLADASDNEEEEEEEEEEEEEEEGPEAREMAMMQEGEHTVTSHSSIIHRLPGSDNLYDDPYQPEITPSPLQPPAAPAPTSTTSSARRRAYCRNRDHFATIRTASLVSRQIQEHEQDSALREQLSGYKRMRRQHQKQLLALESRLRGEREEHSARLQRELEAQRAGFGAEAEKLARRHQAIGEKEARAAQAEERKFQQHILGQQKKELAALLEAQKRTYKLRKEQLKEELQENPSTPKREKAEWLLRQKEQLQQCQAEEEAGLLRRQRQYFELQCRQYKRKMLLARHSLDQDLLREDLNKKQTQKDLECALLLRQHEATRELELRQLQAVQRTRAELTRLQHQTELGNQLEYNKRREQELRQKHAAQVRQQPKSLKERSIVGQEEAGTWSLWGKEDESLLDEEFELGWVQGPALTPVPEEEEEEEEGAPIGTPRDPGDGCPSPDIPPEPPPTHLRPCPASQLPGLLSHGLLAGLSFAVGSSSGLLPLLLLLLLPLLAAQGGGGLQAALLALEVGLVGLGASYLLLCTALHLPSSLFLLLAQGTALGAVLGLSWRRGLMGVPLGLGAAWLLAWPGLALPLVAMAAGGRWVRQQGPRVRRGISRLWLRVLLRLSPMAFRALQGCGAVGDRGLFALYPKTNKDGFRSRLPVPGPRRRNPRTTQHPLALLARVWVLCKGWNWRLARASQGLASHLPPWAIHTLASWGLLRGERPTRIPRLLPRSQRQLGPPASRQPLPGTLAGRRSRTRQSRALPPWR

SEQ ID NO: 66414 - protein, 466 aa, Homo sapiens
MKSLSLLLAVALGLATAVSAGPAVIECWFVEDASGKGLAKRPGALLLRQGPGEPPPRPDLDPELYLSVHDPAGALQAAFRRYPRGAPAPHCEMSRFVPLPASAKWASGLTPAQNCPRALDGAWLMVSISSPVLSLSSLLRPQPEPQQEPVLITMATVEMGFHHVGQAALELLTSVVLTVLTHTPAPRVRLGQDALLDLSFAYMPPTSEAASSLAPGPPPFGLEWRRQHLGKGHLLLAATPGLNGQMPAAQEGAVAFAAWDDDEPWGPWTGNGTFWLPRVQPFQEGTYLATIHLPYLQGQVTLELAVYKPPKVSLMPATLARAAPGEAPPELLCLVSHFYPSGGLEVEWELRGGPGGRSQKAEGQRWLSALRHHSDGSVSLSGHLQPPPVTTEQHGARYACRIHHPSLPASGRSAEVTLEVAGLSGPSLEDSVGLFLSAFLLLGLFKALGWAAVYLSTCKDSKKKAE

SEQ ID NO: 66415 - protein, 448 aa, Homo sapiens
MKSLSLLLAVALGLATAVSAGPAVIECWFVEDASGKGLAKRPGALLLRQGPGEPPPRPDLDPELYLSVHDPAGALQAAFRRYPRGAPAPHCEMSRFVPLPASAKWASGLTPAQNCPRALDGAWLMVSISSPVLSLSSLLRPQPEPQQEPVLITMATVVLTVLTHTPAPRVRLGQDALLDLSFAYMPPTSEAASSLAPGPPPFGLEWRRQHLGKGHLLLAATPGLNGQMPAAQEGAVAFAAWDDDEPWGPWTGNGTFWLPRVQPFQEGTYLATIHLPYLQGQVTLELAVYKPPKVSLMPATLARAAPGEAPPELLCLVSHFYPSGGLEVEWELRGGPGGRSQKAEGQRWLSALRHHSDGSVSLSGHLQPPPVTTEQHGARYACRIHHPSLPASGRSAEVTLEVAGLSGPSLEDSVGLFLSAFLLLGLFKALGWAAVYLSTCKDSKKKAE

SEQ ID NO: 66416 - protein, 504 aa, Homo sapiens
MKSLSLLLAVALGLATAVSAGPAVIECWFVEDASGKGLAKRPGALLLRQGPGEPPPRPDLDPELYLSVHDPAGALQAAFRRYPRGAPAPHCEMSRFVPLPASAKWASGLTPAQNCPRALDGAWLMVSISSPVLSLSSLLRPQPEPQQEPVLITMATVVLTVLTHTPAPRVRLGQDALLDLSFAYMPPTSEAASSLAPGPPPFGLEWRRQHLGKGHLLLAATPGLNGQMPAAQEGAVAFAAWDDDEPWGPWTGNGTFWLPTVQPFQEGTYLATIHLPYLQGQVTLELAVYKPPKVSLMPATLARAAPGEAPPELLCLVSHFYPSGGLEVEWELRGGPGGRSQKAEGQRWLSALRHHSDGSVSLSGHLQPPPVTTEQHGARYACRIHHPSLPASGRSAEVTLEVAGLSGPSLEDSVGLFLSAFLLLGLFKALGWAAVYLSTCKDSKKVQCSTSLYLSLVTLSPHPISKPMEGGCWCGRQNLGLEFTLIWVKTWHYILTVGLFEHAT

SEQ ID NO: 66417 - protein, 448 aa, Homo sapiens
MKSLSLLLAVALGLATAVSAGPAVIECWFVEDASGKGLAKRPGALLLRQGPGEPPPRPDLDPELYLSVHDPAGALQAAFRRYPRGAPAPHCEMSRFVPLPASAKWASGLTPAQNCPRALDGAWLMVSISSPVLSLSSLLRPQPEPQQEPVLITMATVVLTVLTHTPAPRVRLGQDALLDLSFAYMPPTSEAASSLAPGPPPFGLEWRRQHLGKGHLLLAATPGLNGQMPAAQEGAVAFAAWDDDEPWGPWTGNGTFWLPTVQPFQEGTYLATIHLPYLQGQVTLELAVYKPPKVSLMPATLARAAPGEAPPELLCLVSHFYPSGGLEVEWELRGGPGGRSQKAEGQRWLSALRHHSDGSVSLSGHLQPPPVTTEQHGARYACRIHHPSLPASGRSAEVTLEVAGLSGPSLEDSVGLFLSAFLLLGLFKALGWAAVYLSTCKDSKKKAE

SEQ ID NO: 66418 - protein, 466 aa, Homo sapiens
MKSLSLLLAVALGLATAVSAGPAVIECWFVEDASGKGLAKRPGALLLRQGPGEPPPRPDLDPELYLSVHDPAGALQAAFRRYPRGAPAPHCEMSRFVPLPASAKWASGLTPAQNCPRALDGAWLMVSISSPVLSLSSLLRPQPEPQQEPVLITMATVEMGFHHVGQAALELLTSVVLTVLTHTPAPRVRLGQDALLDLSFAYMPPTSEAASSLAPGPPPFGLEWRRQHLGKGHLLLAATPGLNGQMPAAQEGAVAFAAWDDDEPWGPWTGNGTFWLPTVQPFQEGTYLATIHLPYLQGQVTLELAVYKPPKVSLMPATLARAAPGEAPPELLCLVSHFYPSGGLEVEWELRGGPGGRSQKAEGQRWLSALRHHSDGSVSLSGHLQPPPVTTEQHGARYACRIHHPSLPASGRSAEVTLEVAGLSGPSLEDSVGLFLSAFLLLGLFKALGWAAVYLSTCKDSKKKAE

SEQ ID NO: 66419 - protein, 504 aa, Homo sapiens [sequence omitted]

SEQ ID NO: 66420 - protein, 448 aa, Homo sapiens; identical to SEQ ID NO: 66415

SEQ ID NO: 66421 - protein, 504 aa, Homo sapiens [sequence omitted]

SEQ ID NO: 66422 - protein, 466 aa, Homo sapiens; identical to SEQ ID NO: 66414

SEQ ID NO: 66423 - protein, 448 aa, Homo sapiens; identical to SEQ ID NO: 66415

SEQ ID NO: 66424 - protein, 504 aa, Homo sapiens; identical to SEQ ID NO: 66416

SEQ ID NO: 66425 - protein, 202 aa, Homo sapiens
MKSLSLLLAVALGLATAVSAGPAVIECWFVEDASGKGLAKRPGALLLRQGPGEPPPRPDLDPELYLSVHVVLTVLTHTPAPRVRLGQDALLDLSFAYMPPTSEAASSLAPGPPPFGLEWRRQHLGKGHLLLAATPGLNGQMPAAQEGAVAFAAWDDDEPWGPWTGNGTFWLPRVQPFQEGTYLATIHLPYLQGQVTLELAVY

SEQ ID NO: 66426 - protein, 448 aa, Homo sapiens; identical to SEQ ID NO: 66417

SEQ ID NO: 66427 - protein, 466 aa, Homo sapiens; identical to SEQ ID NO: 66414

SEQ ID NO: 66428 - protein, 202 aa, Homo sapiens
MKSLSLLLAVALGLATAVSAGPAVIECWFVEDASGKGLAKRPGALLLRQGPGEPPPRPDLDPELYLSVHVVLTVLTHTPAPRVRLGQDALLDLSFAYMPPTSEAASSLAPGPPPFGLEWRRQHLGKGHLLLAATPGLNGQMPAAQEGAVAFAAWDDDEPWGPWTGNGTFWLPTVQPFQEGTYLATIHLPYLQGQVTLELAVY

SEQ ID NO: 66429 - protein, 202 aa, Homo sapiens; identical to SEQ ID NO: 66425

SEQ ID NO: 66430 - protein, 202 aa, Homo sapiens; identical to SEQ ID NO: 66425

SEQ ID NO: 66431 - protein, 448 aa, Homo sapiens
MKSLSLLLAVALGLATAVSAGPAVIECWFVEDASGKGLAKRPGALLLRQGPGEPPPRPDLDPELYLSVHDPAGALQAAFRRYPRGAPAPHCEMSRFVPLPASAKWASGLTPAQNCPRALDGAWLMVSISSPVLSLSSLLRPQPEPQQEPVLITMATVVLTVLTHTPAPRVRLGQDALLDLSFAYMPPTSEAASSLAPGPPPFGLEWRRQHLGKGHLLLAATPGLNGQMPAAQEGAVAFAAWDDDEPWGPWTGNGTFWLPTVQPFQEGTYLATIHLPYLQGQVTLELAVYKPPKVSLMPATLARAAPGEAPPELLCLVSHFYPSGGLEVEWELRGGPGGRSQKAEGQRWLSALRHHSDGSVSLSGHLQPPPVTTEQHGARYACRIHHPSLPASGRSAEVTLEVAGLSGPSLEDSVGLFLSAFLLLGLFKALGWAAVYLSTCKDSKKHAT

SEQ ID NO: 66432 - protein, 504 aa, Homo sapiens [sequence omitted]

SEQ ID NO: 66433 - protein, 156 aa, Homo sapiens
MKSLSLLLAVALGLATAVSAGPAVIECWFVEDASGKGLAKRPGALLLRQGPGEPPPRPDLDPELYLSVHDPAGALQAAFRRYPRGAPAPHCEMSRFVPLPASAKWASGLTPAQNCPRALDGAWLMVSISSMGHAMPVEFTIPACLPRGAALRSPWR

SEQ ID NO: 66434 - protein, 466 aa, Homo sapiens; identical to SEQ ID NO: 66418

SEQ ID NO: 66435 - protein, 361 aa, Homo sapiens
MKSLSLLLAVALGLATAVSAGPAVIECWFVEDASGKGLAKRPGALLLRQGPGEPPPRPDLDPELYLSVHVVLTVLTHTPAPRVRLGQDALLDLSFAYMPPTSEAASSLAPGPPPFGLEWRRQHLGKGHLLLAATPGLNGQMPAAQEGAVAFAAWDDDEPWGPWTGNGTFWLPTVQPFQEGTYLATIHLPYLQGQVTLELAVYKPPKVSLMPATLARAAPGEAPPELLCLVSHFYPSGGLEVEWELRGGPGGRSQKAEGQRWLSALRHHSDGSVSLSGHLQPPPVTTEQHGARYACRIHHPSLPASGRSAEVTLEVAGLSGPSLEDSVGLFLSAFLLLGLFKALGWAAVYLSTCKDSKKKAE

SEQ ID NO: 66436 - protein, 448 aa, Homo sapiens; identical to SEQ ID NO: 66431

SEQ ID NO: 66437 - protein, 156 aa, Homo sapiens; identical to SEQ ID NO: 66433

SEQ ID NO: 66438 - protein, 361 aa, Homo sapiens
MKSLSLLLAVALGLATAVSAGPAVIECWFVEDASGKGLAKRPGALLLRQGPGEPPPRPDLDPELYLSVHVVLTVLTHTPAPRVRLGQDALLDLSFAYMPPTSEAASSLAPGPPPFGLEWRRQHLGKGHLLLAATPGLNGQMPAAQEGAVAFAAWDDDEPWGPWTGNGTFWLPRVQPFQEGTYLATIHLPYLQGQVTLELAVYKPPKVSLMPATLARAAPGEAPPELLCLVSHFYPSGGLEVEWELRGGPGGRSQKAEGQRWLSALRHHSDGSVSLSGHLQPPPVTTEQHGARYACRIHHPSLPASGRSAEVTLEVAGLSGPSLEDSVGLFLSAFLLLGLFKALGWAAVYLSTCKDSKKHAT

SEQ ID NO: 66439 - protein, 448 aa, Homo sapiens
MKSLSLLLAVALGLATAVSAGPAVIECWFVEDASGKGLAKRPGALLLRQGPGEPPPRPDLDPELYLSVHDPAGALQAAFRRYPRGAPAPHCEMSRFVPLPASAKWASGLTPAQNCPRALDGAWLMVSISSPVLSLSSLLRPQPEPQQEPVLITMATVVLTVLTHTPAPRVRLGQDALLDLSFAYMPPTSEAASSLAPGPPPFGLEWRRQHLGKGHLLLAATPGLNGQMPAAQEGAVAFAAWDDDEPWGPWTGNGTFWLPRVQPFQEGTYLATIHLPYLQGQVTLELAVYKPPKVSLMPATLARAAPGEAPPELLCLVSHFYPSGGLEVEWELRGGPGGRSQKAEGQRWLSALRHHSDGSVSLSGHLQPPPVTTEQHGARYACRIHHPSLPASGRSAEVTLEVAGLSGPSLEDSVGLFLSAFLLLGLFKALGWAAVYLSTCKDSKKHAT

SEQ ID NO: 66440 - protein, 361 aa, Homo sapiens; identical to SEQ ID NO: 66438

SEQ ID NO: 66441 - protein, 156 aa, Homo sapiens; identical to SEQ ID NO: 66433

SEQ ID NO: 66442 - protein, 448 aa, Homo sapiens; identical to SEQ ID NO: 66439

SEQ ID NO: 66443 - protein, 361 aa, Homo sapiens; identical to SEQ ID NO: 66435

SEQ ID NO: 66444 - protein, 448 aa, Homo sapiens; identical to SEQ ID NO: 66439

SEQ ID NO: 66445 - protein, 361 aa, Homo sapiens; identical to SEQ ID NO: 66438

SEQ ID NO: 66446 - protein, 678 aa, Homo sapiens
MLLEAERRRGGGAAGARLLERYRRVPGVRALRADSVLIIETVPGFPPAPPAPGAAQIRAAEVLVYGAPPGRVSRLLERFDPPAAPRRRGSPERARPPPPPPPPAPPRPPPAAPSPPAAPGPRGGGASPGARRSDFLQKTGSNSFTVHPRGLHRGAGARLLSNGHSAPEPRAGPANRLAGSPPGSGQWKPKVESGDPSLHPPPSPGTPSATPASPPASATPSQRQCVSAATSTNDSFEIRPAPKPVMETIPLGDLQARALASLRANSRNSFMVIPKSKASGAPPPEGRQSVELPKGDLGPASPSQELGSQPVPGGDGAPALGKSPLEVEAQWAVEEGACPRTATALADRAIRWQRPSSPPPFLPAASEEAEPAEGLRVPGLAKNSREYVRPGLPVTFIDEVDSEEAPQAAKLPYLPHPARPLHPARPGCVAELQPRGSNTFTVVPKRKPGTLQDQHFSQANREPRPREAEEEEASCLLGPTLKKRYPTVHEIEVIGGYLALQKSCLTKAGSSRKKMKISFNDKSLQTTFEYPSESSLEQEEEVDQQEEEEEEEEEEEEEEEGSGSEEKPFALFLPRATFVSSVRPESSRLPEGSSGLSSYTPKHSVAFSKWQEQALEQAPREAEPPPVEAMVRCGGVERWGESDTRASPCVHILSSHFQLTPASQNDLSDFRSEPALYF

SEQ ID NO: 66447 - protein, 711 aa, Homo sapiens
MAALGRPGSGPRAAVPAWKREILERKRAKLAALGGGAGPGAAEPEQRVLAESLGPLRENPFMLLEAERRRGGGAAGARLLERYRRVPGVRALRADSVLIIETVPGFPPAPPAPGAAQIRAAEVLVYGAPPGRVSRLLERFDPPAAPRRRGSPERARPPPPPPPPAPPRPPPAAPSPPAAPGPRGGGASPGARRSDFLQKTGSNSFTVHPRGLHRGAGARLLSNGHSAPEPRAGPANRLAGSPPGSGQWKPKVESGDPSLHPPPSPGTPSATPASPPASATPSQRQCVSAATSTNDSFEIRPAPKPVMETIPLGDLQARALASLRANSRNSFMVIPKSKASGAPPPEGRQSVELPKGDLGPASPSQELGSQPVPGGDGAPALGKSPLEVEAQWAVEEGACPRTATALADRAIRWQRPSSPPPFLPAASEEAEPAEGLRVPGLAKNSREYVRPGLPVTFIDEVDSEEAPQAAKLPYLPHPARPLHPARPGCVAELQPRGSNTFTVVPKRKPGTLQDQHFSQANREPRPREAEEEEASCLLGPTLKKRYPTVHEIEVIGGYLALQKSCLTKAGSSRKKMKISFNDKSLQTTFEYPSESSLEQEEEVDQQEEEEEEEEEEEEEEEGSGSEEKPFALFLPRATFVSSVRPESSRLPEGSSGLSSYTPKHSVAFSKWQEQALEQAPREAEPPPVEAMLTPASQNDLSDFRSEPALYF

SEQ ID NO: 66448 - protein, 1621 aa, Homo sapiens
MEWVLAEALLSQSRDPRALLGALCQGEASAERVETLRFLLQRLEDEEARGSGGAGALPEAAREVAAGYLVPLLRSLRGRPAGGPDPSLQPRHRRRVLRAAGAALRSCVRLAGRPQLAAALAEEALRDLLAGWRAPGAEAAVEVLAAVGPCLRPREDGPLLERVAGTAVALALGGGGDGDEAGPAEDAAALVAGRLLPVLVQCGGAALRAVWGGLAAPGASLGSGRVEEKLLVLSALAEKLLPEPGGDRARGAREAGPDARRCWRFWRTVQAGLGQADALTRKRARYLLQRAVEVSAELGADCTCGPQEGNGPSLFWWSERKKDELLKFWENYILIMETLEGNQIHVIKPVLPKLNNLFEYAVSEENGCWLFHPSWHMCIYKRMFESENKILSKEGVIHFLELYETKILPFSPEFSEFIIGPLMDALSESSLYSRSPGQPIGSCSPLGLKLQKFLVTYISLLPEEIKSSFLLKFIRKMTSRHWCAVPILFLSKALANVPRHKALGIDGLLALRDVIHCTMITHQILLRGAAQCYLLQTAMNLLDVEKVSLSDVSTFLMSLRQEESLGRGTSLWTELCDWLRVNESYFKPSPTCSSIGLHKTSLNAYVKSIVQEYVKSSAWETGENCFMPDWFEAKLVSLMVLLAVDVEGMKTQYSGKQRTENVLRIFLDPLLDVLMKFSTNAYMPLLKTDRCLQLLLKLLNTCRLKGSSAQDDEVSTVLQNFFMSTTESISEFILRRLTMNELNSVSDLDRCHLYLMVLTELINLHLKVGWKRGNPIWRVISLLKNASIQHLQEMDSGQEPTVGSQIQRVVSMAALAMVCEAIDQKPELQLDSLHAGPLESFLSSLQLNQTLQKPHAEEQSSYAHPLECSSVLEESSSSQGWGKIVAQYIHDQWVCLSFLLKKYHTLIPTTGSEILEPFLPAVQMPIRTLQSALEALTVLSSDQVLPVFHCLKVLVPKLLTSSESLCIESFDMAWKIISSLSNTQLIFWANLKAFVQFVFDNKVLTIAAKIKGQAYFKIKEIMYKIIEMSAIKTGVFNTLISYCCQSWIVSASNVSQGSLSSAKNYSELILEACIFGTVFRRDQRLVQDVQTFIENLGHDCAANIVMENTKREDHYVRICAVKFLCLLDGSNMSHKLFIEDLAIKLLDKDELVSKSKKRYYVNSLQHRVKNRVWQTLLVLFPRLDQNFLNGIIDRIFQAGFTNNQASIKYFIEWIIILILHKFPQFLPKFWDCFSYGEENLKTSICTFLAVLSHLDIITQNIPEKKLILKQALIVVLQWCFNHNFSVRLYALVALKKLWTVCKVLSVEEFDALTPVIESSLHQVESMHGAGNAKKNWQRIQEHFFFATFHPLKDYCLETIFYILPRLSGLIEDEWITIDKFTRFTDVPLAAGFQWYLSQTQLSKLKPGDWSQQDIGTNLVEADNQAEWTDVQKKIIPWNSRVSDLDLELLFQDRAARLGKSISRLIVVASLIDKPTNLGGLCRTCEVFGASVLVVGSLQCISDKQFQHLSVSAEQWLPLVEVKPPQLIDYLQQKKTEGYTIIGVEQTAKSLDLTQYCFPEKSLLLLGNEREGIPANLIQQLDVCVEIPQQGIIRSLNVHVSGALLIWEYTRQQLLSHGDTKP

SEQ ID NO: 66449 - protein, 366 aa, Homo sapiens
MSEEEQGSGTTTGCGLPSIEQMLAANPGKTPISLLQEYGTRIGKTPVYDLLKAEGQAHQPNFTFRVTVGDTSCTGQGPSKKAAKHKAAEVALKHLKGGSMLEPALEDSSSFSPLDSSLPEDIPVFTAAAAATPVPSVVLTRSPPMELQPPVSPQQSECNPVGALQELVVQKGWRLPEYTVTQESGPAHRKEFTMTCRVERFIEIGSGTSKKLAKRNAAAKMLLRVHTVPLDARDGNEVEPDDDHFSIGVGSRLDGLRNRGPGCTWDSLRNSVGEKILSLRSCSLGSLGALGPACCRVLSELSEEQAFHVSYLDIEELSLSGLCQCLVELSTQPATVCHGSATTREAARGEAARRALQYLKIMAGSK

SEQ ID NO: 66450 - protein, 345 aa, Homo sapiens
MLAANPGKTPISLLQEYGTRIGKTPVYDLLKAEGQAHQPNFTFRVTVGDTSCTGQGPSKKAAKHKAAEVALKHLKGGSMLEPALEDSSSFSPLDSSLPEDIPVFTAAAAATPVPSVVLTRSPPMELQPPVSPQQSECNPVGALQELVVQKGWRLPEYTVTQESGPAHRKEFTMTCRVERFIEIGSGTSKKLAKRNAAAKMLLRVHTVPLDARDGNEVEPDDDHFSIGVGSRLDGLRNRGPGCTWDSLRNSVGEKILSLRSCSLGSLGALGPACCRVLSELSEEQAFHVSYLDIEELSLSGLCQCLVELSTQPATVCHGSATTREAARGEAARRALQYLKIMAGSK

SEQ ID NO: 66451 - protein, 345 aa, Homo sapiens; identical to SEQ ID NO: 66450

SEQ ID NO: 66452 - protein, 414 aa, Homo sapiens
MSEYIRVTEDENDEPIEIPSEDDGTVLLSTVTAQFPGACGLRYRNPVSQCMRGVRLVEGILHAPDAGWGNLVYVVNYPKDNKRKMDETDASSAVKVKRAVQKTSDLIVLGLPWKTTEQDLKEYFSTFGEVLMVQVKKDLKTGHSKGFGFVRFTEYETQVKVMSQRHMIDGRWCDCKLPNSKQSQDEPLRSRKVFVGRCTEDMTEDELREFFSQYGDVMDVFIPKPFRAFAFVTFADDQIAQSLCGEDLIIKGISVHISNAEPKHNSNRQLERSGRFGGNPGGFGNQGGFGNSRGGGAGLGNNQGSNMGGGMNFGAFSINPAMMAAAQAALQSSWGMMGMLASQQNQSGPSGNNQNQGNMQREPNQAFGSGNNSYSGSNSGAAIGWGSASNAGSGSGFNGGFGSSMDSKSSGWGM

SEQ ID NO: 66453 - protein, 295 aa, Homo sapiens
MSEYIRVTEDENDEPIEIPSEDDGTVLLSTVTAQFPGACGLRYRNPVSQCMRGVRLVEGILHAPDAGWGNLVYVVNYPKDNKRKMDETDASSAVKVKRAVQKTSDLIVLGLPWKTTEQDLKEYFSTFGEVLMVQVKKDLKTGHSKGFGFVRFTEYETQVKVMSQRHMIDGRWCDCKLPNSKQSQDEPLRSRKVFVGRCTEDMTEDELREFFSQYGDVMDVFIPKPFRAFAFVTFADDQIAQSLCGEDLIIKGISVHISNAEPKHNSNRQLERSGRFGVHLISNVYGRSTSLKVVL

SEQ ID NO: 66454 - protein, 298 aa, Homo sapiens
MPQMLAGEIWCMLSTIQKVKKDLKTGHSKGFGFVRFTEYETQVKVMSQRHMIDGRWCDCKLPNSKQSQDEPLRSRKVFVGRCTEDMTEDELREFFSQYGDVMDVFIPKPFRAFAFVTFADDQIAQSLCGEDLIIKGISVHISNAEPKHNSNRQLERSGRFGGNPGGFGNQGGFGNSRGGGAGLGNNQGSNMGGGMNFGAFSINPAMMAAAQAALQSSWGMMGMLASQQNQSGPSGNNQNQGNMQREPNQAFGSGNNSYSGSNSGAAIGWGSASNAGSGSGFNGGFGSSMDSKSSGWGM

SEQ ID NO: 66455 - protein, 510 aa, Homo sapiens
MAADSDDGAVSAPAASDGGVSKSTTSGEELVVQVPVVDVQSNNFKEMWPSLLLAIKTANFVAVDTELSGLGDRKSLLNQCIEERYKAVCHAARTRSILSLGLACFKRQPDKGEHSYLAQVFNLTLLCMEEYVIEPKSVQFLIQHGFNFNQQYAQGIPYHKGNDKGDESQSQSVRTLFLELIRARRPLVLHNGLIDLVFLYQNFYAHLPESLGTFTADLCEMFPAGIYDTKYAAEFHARFVASYLEYAFRKCERENGKQRAAGSPHLTLEFCNYPSSMRDHIDYRCCLPPATHRPHPTSICDNFSAYGWCPLGPQCPQSHDIDLIIDTDEAAAEDKRRRRRRREKRKRALLNLPGTQTSGEAKDGPPKKQVCGDSIKPEETEQEVAADETRNLPHSKQGNKNDLEMGIKAARPEIADRATSEVPGSQASPNPVPGDGLHRAGFDAFMTGYVMAYVEVSQGPQPCSSGPWLPECHNKVYLSGKAVPLTVAKSQFSRSSKAHNQKMKLTWGSS

SEQ ID NO: 66456 - protein, 430 aa, Homo sapiens
MAADSDDGAVSAPAASDGAEWAWGQEEFAEPGEHSYLAQVFNLTLLCMEEYVIEPKSVQFLIQHGFNFNQQYAQGIPYHKGNDKGDESQSQSVRTLFLELIRARRPLVLHNGLIDLVFLYQNFYAHLPESLGTFTADLCEMFPAGIYDTKYAAEFHARFVASYLEYAFRKCERENGKQRAAGSPHLTLEFCNYPSSMRDHIDYRCCLPPATHRPHPTSICDNFSAYGWCPLGPQCPQSHDIDLIIDTDEAAAEDKRRRRRRREKRKRALLNLPGTQTSGEAKDGPPKKQVCGDSIKPEETEQEVAADETRNLPHSKQGNKNDLEMGIKAARPEIADRATSEVPGSQASPNPVPGDGLHRAGFDAFMTGYVMAYVEVSQGPQPCSSGPWLPECHNKVYLSGKAVPLTVAKSQFSRSSKAHNQKMKLTWGSS

SEQ ID NO: 66457 - protein, 420 aa, Homo sapiens
MTMEKGMSSGEGLPSRSSQVSAGKITAKELETKQSYKEKRGGFVLVHAGAGYHSESKAKEYKHVCKRACQKAIEKLQAGALATDAVTAALVELEDSPFTNAGMGSNLNLLGEIECDASIMDGKSLNFGAVGALSGIKNPVSVANRLLCEGQKGKLSAGRIPPCFLVGEGAYRWAVDHGIPSCPPNIMTTRFSLAAFKRNKRKLELAERVDTDFMQLKKRRQSSEKENDSGTLDTVGAVVVDHEGNVAAAVSSGGLALKHPGRVGQAALYGCGCWAENTGAHNPYSTAVSTSGCGEHLVRTILARECSHALQAEDAHQALLETMQNKFISSPFLASEDGVLGGVIVLRSCRCSAEPDSSQNKQTLLVEFLWSHTTESMCVGYMSAQDGKAKTHISRLPPGAVAGQSVAIEGGVCRLESPVN

SEQ ID NO: 66458 - protein, 305 aa, Homo sapiens
MTMEKGMSSGEGLPSRSSQVSAGKITAKELETKQSYKEKRGGFVLVHAGAGYHSESKAKEYKHVCKRACQKDSPFTNAGMGSNLNLLGEIECDASIMDGKSLNFGAVGALSGIKNPVSVANRLLCEGQKGKLSAGRIPPCFLVGEGAYRWAVDHGIPSCPPNIMTTRFSLAAFKRNKRKLELAERVDTDFMQLKKRRQSSEKENDSGTLDTVGAVVVDHEGNVAAAVSSGGLALKHPGRVGQAALYGCGCWAENTGAHNPYSTAVSTSGCGEHLVRTILARECSHALQAEDAHQALLETMQNKFI

SEQ ID NO: 66459 - protein, 110 aa, Homo sapiens
  VARIANT 1: note = MOD_RES - Any amino acid
XKITAKELETKQSYKEKRGGFVLVHAGAGYHSESKAKEYKHVCKRACQKAIEKLQAGALATDAVTAALVELELMWKGQFQVLCVLTNLFLDIIKNPTKTKFKTISNVKVY

SEQ ID NO: 66460 - protein, 305 aa, Homo sapiens; identical to SEQ ID NO: 66458

SEQ ID NO: 66461 - protein, 145 aa, Homo sapiens
MTMEKGMSSGEGLPSRSSQVSAGKITAKELETKQSYKEKRGGFVLVHAGAGYHSESKAKEYKHVCKRACQKAIEKLQAGALATDAVTAALVELEDVESILCAPYWLENVHMLYKLRMLTKPCWRLCKTSLSVHLSLPVKMACLAE

SEQ ID NO: 66462 - protein, 129 aa, Homo sapiens
MTMEKGMSSGEGLPSRSSQVSAGKITAKELETKQSYKEKRGGFVLVHAGAGYHSESKAKEYKHVCKRACQKAIEKLQAGALATDAVTAALVELEVYTHSYTSWSCIQPSIHVLLVKRQRKSPLPRISTF

SEQ ID NO: 66463 - protein, 480 aa, Homo sapiens
MLLCTARLVGLQLLISCCWAFACHSTESSPDFTLPGDYLLAGLFPLHSGCLQVRHRPEVTLCDRSCSFNEHGYHLFQAMRLGVEEINNSTALLPNITLGYQLYDVCSDSANVYATLRVLSLPGQHHIELQGDLLHYSPTVLAVIGPDSTNRAATTAALLSPFLVPMISYAASSETLSVKRQYPSFLRTIPNDKYQVETMVLLLQKFGWTWISLVGSSDDYGQLGVQALENQATGQGICIAFKDIMPFSAQVGDERMQCLMRHLAQAGATVVVVFSSRQLARVFFESVVLTNLTGKVWVASEAWALSRHITGVPGIQRIGMVLGVAIQKRAVPGLKAFEEAYARADKKAPRPCHKGSWCSSNQLCRECQAFMAHTMPKLKAFSMSSAYNAYRAVYAVAHGLHQLLGCASGACSRGRVYPWQTSTDASLVGKKSGHLREARPASRALWCFWLCVSTPLGCCWQLTRCCCCCCLGLLACLPGT

SEQ ID NO: 66464 - protein, 841 aa, Homo sapiens
MLLCTARLVGLQLLISCCWAFACHSTESSPDFTLPGDYLLAGLFPLHSGCLQVRHRPEVTLCDRSCSFNEHGYHLFQAMRLGVEEINNSTALLPNITLGYQLYDVCSDSANVYATLRVLSLPGQHHIELQGDLLHYSPTVLAVIGPDSTNRAATTAALLSPFLVPMISYAASSETLSVKRQYPSFLRTIPNDKYQVETMVLLLQKFGWTWISLVGSSDDYGQLGVQALENQATGQGICIAFKDIMPFSAQVGDERMQCLMRHLAQAGATVVVVFSSRQLARVFFESVVLTNLTGKVWVASEAWALSRHITGVPGIQRIGMVLGVAIQKRAVPGLKAFEEAYARADKKAPRPCHKGSWCSSNQLCRECQAFMAHTMPKLKAFSMSSAYNAYRAVYAVAHGLHQLLGCASGACSRGRVYPWQLLEQIHKVHFLLHKDTVAFNDNRDPLSSYNIIAWDWNGPKWTFTVLGSSTWSPVQLNINETKIQWHGKDNQVPKSVCSSDCLEGHQRVVTGFHHCCFECVPCGAGTFLNKSDLYRCQPCGKEEWAPEGSQTCFPRTVVFLALREHTSWVLLAANTLLLLLLLGTAGLFAWHLDTPVVRSAGGRLCFLMLGSLAAGSGSLYGFFGEPTRPACLLRQALFALGFTIFLSCLTVRSFQLIIIFKFSTKVPTFYHAWVQNHGAGLFVMISSAAQLLICLTWLVVWTPLPAREYQRFPHLVMLECTETNSLGFILAFLYNGLLSISAFACSYLGKDLPENYNEAKCVTFSLLFNFVSWIAFFTTASVYDGKYLPAANMMAGLSSLSSGFGGYFLPKCYVILCRPDLNSTEHFQASIQDYTRRCGST

SEQ ID NO: 66465 - protein, 587 aa, Homo sapiens
MLLCTARLVGLQLLISCCWAFACHSTESSPDFTLPGDYLLAGLFPLHSGCLQVRHRPEVTLCDRSCSFNEHGYHLFQAMRLGVEEINNSTALLPNITLGYQLYDVCSDSANVYATLRVLSLPGQHHIELQGDLLHYSPTVLAVIGPDSTNRAATTAALLSPFLVPMLLEQIHKVHFLLHKDTVAFNDNRDPLSSYNIIAWDWNGPKWTFTVLGSSTWSPVQLNINETKIQWHGKDNQVPKSVCSSDCLEGHQRVVTGFHHCCFECVPCGAGTFLNKSDLYRCQPCGKEEWAPEGSQTCFPRTVVFLALREHTSWVLLAANTLLLLLLLGTAGLFAWHLDTPVVRSAGGRLCFLMLGSLAAGSGSLYGFFGEPTRPACLLRQALFALGFTIFLSCLTVRSFQLIIIFKFSTKVPTFYHAWVQNHGAGLFVMISSAAQLLICLTWLVVWTPLPAREYQRFPHLVMLECTETNSLGFILAFLYNGLLSISAFACSYLGKDLPENYNEAKCVTFSLLFNFVSWIAFFTTASVYDGKYLPAANMMAGLSSLSSGFGGYFLPKCYVILCRPDLNSTEHFQASIQDYTRRCGST

SEQ ID NO: 66466 - protein, 306 aa, Homo sapiens
MRLGVEEINNSTALLPNITLGYQLYDVCSDSANVYATLRVLSLPGQHHIELQGDLLHYSPTVLAVIGPDSTNRAATTAALLSPFLVPMLLEQIHKVHFLLHKDTVAFNDNRDPLSSYNIIAWDWNGPKWTFTVLGSSTWSPVQLNINETKIQWHGKDNQVPKSVCSSDCLEGHQRVVTGFHHCCFECVPCGAGTFLNKSDLYRCQPCGKEEWAPEGSQTCFPRTVVFLALREHTSWVLLAANTLLLLLLLGTAGLFAWHLDTPVVRSAGGRLCFLMLGSLAAGSGSLYGFFGEPSLPLVSPSSCPA

SEQ ID NO: 66467 - protein, 839 aa, Homo sapiens
MGPRAKTISSLFFLLWVLAEPAENSDFYLPGDYLLGGLFSLHANMKGIVHLNFLQVPMCKEYEVKVIGYNLMQAMRFAVEEINNDSSLLPGVLLGYEIVDVCYISNNVQPVLYFLAHEDNLLPIQEDYSNYISRVVAVIGPDNSESVMTVANFLSLFLLPQITYSAISDELRDKVRFPALLRTTPSADHHIEAMVQLMLHFRWNWIIVLVSSDTYGRDNGQLLGERVARRDICIAFQETLPTLQPNQNMTSEERQRLVTIVDKLQQSTARVVVVFSPDLTLYHFFNEVLRQNFTGAVWIASESWAIDPVLHNLTELRHLGTFLGITIQSVPIPGFSEFREWGPQAGPPPLSRTSQSYTCNQECDNCLNATLSFNTILRLSGERVVYSVYSAVYAVAHALHSLLGCDKSTCTKRVVYPWQLLEEIWKVNFTLLDHQIFFDPQGDVALHLEIVQWQWDRSQNPFQSVASYYPLQRQLKNIQDISWHTINNTIPMSMCSKRCQSGQKKKPVGIHVCCFECIDCLPGTFLNHTEDEYECQACPNNEWSYQSETSCFKRQLVFLEWHEAPTIAVALLAALGFLSTLAILVIFWRHFQTPIVRSAGGPMCFLMLTLLLVAYMVVPVYVGPPKVSTCLCRQALFPLCFTICISCIAVRSFQIVCAFKMASRFPRAYSYWVRYQGPYVSMAFITVLKMVIVVIGMLATGLSPTTRTDPDDPKITIVSCNPNYRNSLLFNTSLDLLLSVVGFSFAYMGKELPTNYNEAKFITLSMTFYFTSSVSLCTFMSAYSGVLVTIVDLLVTVLNLLAISLGYFGPKCYMILFYPERNTPAYFNSMIQGYTMRRD

SEQ ID NO: 66468 - protein, 852 aa, Homo sapiens
MLGPAVLGLSLWALLHPGTGAPLCLSQQLRMKGDYVLGGLFPLGEAEEAGLRSRTRPSSPVCTRFSSNGLLWALAMKMAVEEINNKSDLLPGLRLGYDLFDTCSEPVVAMKPSLMFLAKAGSRDIAAYCNYTQYQPRVLAVIGPHSSELAMVTGKFFSFFLMPQVSYGASMELLSARETFPSFFRTVPSDRVQLTAAAELLQEFGWNWVAALGSDDEYGRQGLSIFSALAAARGICIAHEGLVPLPRADDSRLGKVQDVLHQVNQSSVQVVLLFASVHAAHALFNYSISSRLSPKVWVASEAWLTSDLVMGLPGMAQMGTVLGFLQRGAQLHEFPQYVKTHLALATDPAFCSALGEREQGLEEDVVGQRCPQCDCITLQNVSAGLNHHQTFSVYAAVYSVAQALHNTLQCNASGCPAQDPVKPWQLLENMYNLTFHVGGLPLRFDSSGNVDMEYDLKLWVWQGSVPRLHDVGRFNGSLRTERLKIRWHTSDNQKPVSRCSRQCQEGQVRRVKGFHSCCYDCVDCEAGSYRQNPDDIACTFCGQDEWSPERSTRCFRRRSRFLAWGEPAVLLLLLLLSLALGLVLAALGLFVHHRDSPLVQASGGPLACFGLVCLGLVCLSVLLFPGQPSPARCLAQQPLSHLPLTGCLSTLFLQAAEIFVESELPLSWADRLSGCLRGPWAWLVVLLAMLVEVALCTWYLVAFPPEVVTDWHMLPTEALVHCRTRSWVSFGLAHATNATLAFLCFLGTFLVRSQPGCYNRARGLTFAMLAYFITWVSFVPLLANVQVVLRPAVQMGALLLCVLGILAAFHLPRCYLLMRQPGLNTPEFFLGGGPGDAQGQNDGNTGNQGKHE

SEQ ID NO: 66469 - protein, 291 aa, Homo sapiens
MIPIQLTVFFMIIYVLESLTIIVQSSLIVAVLGREWLQVRRLMPVDMILISLGISRFCLQWASMLNNFCSYFNLNYVLCNLTITWEFFNILTFWLNSLLTVFYCIKVSSFTHHIFLWLRWRILRLFPWILLGSLMITCVTIIPSAIGNYIQIQLLTMEHLPRNSTVTDKLENFHQYQFQAHTVALVIPFILFLASTIFLMASLTKQIQHHSTGHCNPSMKARFTALRSLAVLFIVFTSYFLTILITIIGTLFDKRCWLWVWEAFVYAFILMHSTSLMLSSPTLKRILKGKC

SEQ ID NO: 66470 - protein, 299 aa, Homo sapiens
MMCFLLIISSILVVFAFVLGNVANGFIALVNVIDWVNTRKISSAEQILTALVVSRIGLLWVMLFLWYATVFNSALYGLEVRIVASNAWAVTNHFSMWLAASLSIFCLLKIANFSNLISLHLKKRIKSVVLVILLGPLVFLICNLAVITMDERVWTKEYEGNVTWKIKLRNAIHLSSLTVTTLANLIPFTLSLICFLLLICSLCKHLKKMRLHSKGSQDPSTKVHIKALQTVTSFLMLFAIYFLCIITSTWNLRTQQSKLVLLLCQTVAIMYPSFHSFILIMGSRKLKQTFLSVLWQMTR

SEQ ID NO: 66471 - protein, 309 aa, Homo sapiens
MMSFLHIVFSILVVVAFILGNFANGFIALINFIAWVKRQKISSADQIIAALAVSRVGLLWVILLHWYSTVLNPTSSNLKVIIFISNAWAVTNHFSIWLATSLSIFYLLKIVNFSRLIFHHLKRKAKSVVLVIVLGSLFFLVCHLVMKHTYINVWTEECEGNVTWKIKLRNAMHLSNLTVAMLANLIPFTLTLISFLLLIYSLCKHLKKMQLHGKGSQDPSTKIHIKALQTVTSFLILLAIYFLCLIISFWNFKMRPKEIVLMLCQAFGIIYPSFHSFILIWGNKTLKQTFLSVLWQVTCWAKGQNQSTP

SEQ ID NO: 66472 - protein, 316 aa, Homo sapiens
MMGLTEGVFLILSGTQFTLGILVNCFIELVNGSSWFKTKRMSLSDFIITTLALLRIILLCIILTDSFLIEFSPNTHDSGIIMQIIDVSWTFTNHLSIWLATCLGVLYCLKIASFSHPTFLWLKWRVSRVMVWMLLGALLLSCGSTASLINEFKLYSVFRGIEATRNVTEHFRKKRSEYYLIHVLGTLWYLPPLIVSLASYSLLIFSLGRHTRQMLQNGTSSRDPTTEAHKRAIRIILSFFFLFLLYFLAFLIASFGNFLPKTKMAKMIGEVMTMFYPAGHSFILILGNSKLKQTFVVMLRCESGHLKPGSKGPIFS

SEQ ID NO: 66473 - protein, 319 aa, Homo sapiens
MITFLPIIFSILIVVIFVIGNFANGFIALVNSIEWVKRQKISFVDQILTALAVSRVGLLWVLLLHWYATQLNPAFYSVEVRITAYNVWAVTNHFSSWLATSLSMFYLLRIANFSNLIFLRIKRRVKSVVLVILLGPLLFLVCHLFVINMDETVWTKEYEGNVTWKIKLRSAMYHSNMTLTMLANFVPLTLTLISFLLLICSLCKHLKKMQLHGKGSQDPSTKVHIKALQTVTSFLLLCAIYFLSMIISVCNFGRLEKQPVFMFCQAIIFSYPSTHPFILILGNKKLKQIFLSVLRHVRYWVKDRSLRLHRFTRGALCVF

SEQ ID NO: 66474 - protein, 309 aa, Homo sapiens
MTTFIPIIFSSVVVVLFVIGNFANGFIALVNSIERVKRQKISFADQILTALAVSRVGLLWVLLLNWYSTVFNPAFYSVEVRTTAYNVWAVTGHFSNWLATSLSIFYLLKIANFSNLIFLHLKRRVKSVILVMLLGPLLFLACQLFVINMKEIVRTKEYEGNLTWKIKLRSAVYLSDATVTTLGNLVPFTLTLLCFLLLICSLCKHLKKMQLHGKGSQDPSTKVHIKALQTVIFFLLLCAVYFLSIMISVWSFGSLENKPVFMFCKAIRFSYPSIHPFILIWGNKKLKQTFLSVLRQVRYWVKGEKPSSP

SEQ ID NO: 66475 - protein, 333 aa, Homo sapiens
MLTLTRIRTVSYEVRSTFLFISVLEFAVGFLTNAFVFLVNFWDVVKRQALSNSDCVLLCLSISRLFLHGLLFLSAIQLTHFQKLSEPLNHSYQAIIMLWMIANQANLWLAACLSLLYCSKLIRFSHTFLICLASWVSRKISQMLLGIILCSCICTVLCVWCFFSRPHFTVTTVLFMNNNTRLNWQIKDLNLFYSFLFCYLWSVPPFLLFLVSSGMLTVSLGRHMRTMKVYTRNSRDPSLEAHIKALKSLVSFFCFFVISSCAAFISVPLLILWRDKIGVMVCVGIMAACPSGHAAILISGNAKLRRAVMTILLWAQSSLKVRADHKADSRTLC

SEQ ID NO: 66476 - protein, 299 aa, Homo sapiens
MLRLFYFSAIIASVILNFVGIIMNLFITVVNCKTWVKSHRISSSDRILFSLGITRFLMLGLFLVNTIYFVSSNTERSVYLSAFFVLCFMFLDSSSVWFVTLLNILYCVKITNFQHSVFLLLKRNISPKIPRLLLACVLISAFTTCLYITLSQASPFPELVTTRNNTSFNISEGILSLVVSLVLSSSLQFIINVTSASLLIHSLRRHIQKMQKNATGFWNPQTEAHVGAMKLMVYFLILYIPYSVATLVQYLPFYAGMDMGTKSICLIFATLYSPGHSVLIIITHPKLKTTAKKILCFKK

SEQ ID NO: 66477 - protein, 323 aa, Homo sapiens
MATVNTDATDKDISKFKVTFTLVVSGIECITGILGSGFITAIYGAEWARGKTLPTGDRIMLMLSFSRLLLQIWMMLENIFSLLFRIVYNQNSVYILFKVITVFLNHSNLWFAAWLKVFYCLRIANFNHPLFFLMKRKIIVLMPWLLRLSVLVSLSFSFPLSRDVFNVYVNSSIPIPSSNSTEKKYFSETNMVNLVFFYNMGIFVPLIMFILAATLLILSLKRHTLHMGSNATGSRDPSMKAHIGAIKATSYFLILYIFNAIALFLSTSNIFDTYSSWNILCKIIMAAYPAGHSVQLILGNPGLRRAWKRFQHQVPLYLKGQTL

SEQ ID NO: 66478 - protein, 307 aa, Homo sapiens
MQAALTAFFVLLFSLLSLLGIAANGFIVLVLGREWLRYGRLLPLDMILISLGASRFCLQLVGTVHNFYYSAQKVEYSGGLGRQFFHLHWHFLNSATFWFCSWLSVLFCVKIANITHSTFLWLKWRFPGWVPWLLLGSVLISFIITLLFFWVNYPVYQEFLIRKFSGNMTYKWNTRIETYYFPSLKLVIWSIPFSVFLVSIMLLINSLRRHTQRMQHNGHSLQDPSTQAHTRALKSLISFLILYALSFLSLIIDAAKFISMQNDFYWPWQIAVYLCISVHPFILIFSNLKLRSVFSQLLLLARGFWVA

SEQ ID NO: 66479 - protein, 314 aa, Homo sapiens
MATELDKIFLILAIAEFIISMLGNVFIGLVNCSEGIKNQKVFSADFILTCLAISTIGQLLVILFDSFLVGLASHLYTTYRLGKTVIMLWHMTNHLTTWLATCLSIFYFFKIAHFPHSLFLWLRWRMNGMIVMLLILSLFLLIFDSLVLEIFIDISLNIIDKSNLTLYLDESKTLYDKLSILKTLLSLTSFIPFSLFLTSLLFLFLSLVRHTRNLKLSSLGSRDSSTEAHRRAMKMVMSFLFLFIVHFFSLQVANGIFFMLWNNKYIKFVMLALNAFPSCHSFILILGNSKLRQTAVRLLWHLRNYTKTPNALPL

SEQ ID NO: 66480 - protein, 309 aa, Homo sapiens
MITFLPIIFSSLVVVTFVIGNFANGFIALVNSIEWFKRQKISFADQILTALAVSRVGLLWVLLLNWYSTVLNPAFNSVEVRTTAYNIWAVINHFSNWLATTLSIFYLLKIANFSNFIFLHLKRRVKSVILVMLLGPLLFLACHLFVINMNEIVRTKEFEGNMTWKIKLKSAMYFSNMTVTMVANLVPFTLTLLSFMLLICSLCKHLKKMQLHGKGSQDPSTKVHIKALQTVISFLLLCAIYFLSIMISVWSFGSLENKPVFMFCKAIRFSYPSIHPFILIWGNKKLKQTFLSVFWQMRYWVKGEKTSSP

SEQ ID NO: 66481 - protein, 309 aa, Homo sapiens
MITFLPIIFSILIVVTFVIGNFANGFIALVNSIEWFKRQKISFADQILTALAVSRVGLLWVLVLNWYATELNPAFNSIEVRITAYNVWAVINHFSNWLATSLSIFYLLKIANFSNLIFLHLKRRVKSVVLVILLGPLLFLVCHLFVINMNQIIWTKEYEGNMTWKIKLRSAMYLSNTTVTILANLVPFTLTLISFLLLICSLCKHLKKMQLHGKGSQDPSMKVHIKALQTVTSFLLLCAIYFLSIIMSVWSFESLENKPVFMFCEAIAFSYPSTHPFILIWGNKKLKQTFLSVLWHVRYWVKGEKPSSS

SEQ ID NO: 66482 - protein, 299 aa, Homo sapiens
MLSAGLGLLMLVAVVEFLIGLIGNGSLVVWSFREWIRKFNWSSYNLIILGLAGCRFLLQWLIILDLSLFPLFQSSRWLRYLSIFWVLVSQASLWFATFLSVFYCKKITTFDRPAYLWLKQRAYNLSLWCLLGYFIINLLLTVQIGLTFYHPPQGNSSIRYPFESWQYLYAFQLNSGSYLPLVVFLVSSGMLIVSLYTHHKKMKVHSAGRRDVRAKAHITALKSLGCFLLLHLVYIMASPFSITSKTYPPDLTSVFIWETLMAAYPSLHSLILIMGIPRVKQTCQKILWKTVCARRCWGP

SEQ ID NO: 66483 - protein, 299 aa, Homo sapiens
MITFLYIFFSILIMVLFVLGNFANGFIALVNFIDWVKRKKISSADQILTALAVSRIGLLWALLLNWYLTVLNPAFYSVELRITSYNAWVVTNHFSMWLAANLSIFYLLKIANFSNLLFLHLKRRVRSVILVILLGTLIFLVCHLLVANMDESMWAEEYEGNMTGKMKLRNTVHLSYLTVTTLWSFIPFTLSLISFLMLICSLCKHLKKMQLHGEGSQDLSTKVHIKALQTLISFLLLCAIFFLFLIVSVWSPRRLRNDPVVMVSKAVGNIYLAFDSFILIWRTKKLKHTFLLILCQIRC

SEQ ID NO: 66484 - protein, 318 aa, Homo sapiens
MNGDHMVLGSSVTDKKAIILVTILLLLRLVAIAGNGFITAALGVEWVLRRMLLPCDKLLVSLGASRFCLQSVVMGKTIYVFLHPMAFPYNPVLQFLAFQWDFLNAATLWSSTWLSVFYCVKIATFTHPVFFWLKHKLSGWLPWMLFSSVGLSSFTTILFFIGNHRMYQNYLRNHLQPWNVTGDSIRSYCEKFYLFPLKMITWTMPTAVFFICMILLITSLGRHRKKALLTTSGFREPSVQAHIKALLALLSFAMLFISYFLSLVFSAAGIFPPLDFKFWVWESVIYLCAAVHPIILLFSNCRLRAVLKSRRSSRCGTP

SEQ ID NO: 66485 - protein, 339 aa, Homo sapiens
MDQNNSLPPYAQGLASPQGAMTPGIPIFSPMMPYGTGLTPQPIQNTNSLSILEEQQRQQQQQQQQQQQQQQQQQQQQQQQQQQQQQQQQQQQQQQAVAAAAVQQSTSQQATQGTSGQAPQLFHSQTLTTAPLPGTTPLYPSPMTPMTPITPATPASESSGIVPQLQNIVSTVNLGCKLDLKTIALRARNAEYNPKRFAAVIMRIREPRTTALIFSSGKMVCTGAKSEEQSRLAARKYARVVQKLGFPAKFLDFKIQNMVGSCDVKFPIRLEGLVLTHQQFSSYEPELFPGLIYRMIKPRIVLLIFVSGKVVLTGAKVRAEIYEAFENIYPILKGFRKTT

SEQ ID NO: 66486 - protein, 316 aa, Homo sapiens
MDQNNSLPPYAQGLASPQGAMTPGIPIFSPMMPYGTGLTPQPIQNTNSLSILEEQQRQQQQQQQQQQQQQQQAVAAAAVQQSTSQQATQGTSGQAPQLFHSQTLTTAPLPGTTPLYPSPMTPMTPITPATPASESSGIVPQLQNIVSTVNLGCKLDLKTIALRARNAEYNPKRFAAVIMRIREPRTTALIFSSGKMVCTGAKSEEQSRLAARKYARVVQKLGFPAKFLDFKIQNMVGSCDVKFPIRLEGLVLTHQQFSSYEPELFPGLIYRMIKPRIVLLIFVSGKVVLTGAKVRAEIYEAFENIYPILKGFRKTT

SEQ ID NO: 66487 - protein, 339 aa, Homo sapiens; identical to SEQ ID NO: 66485

SEQ ID NO: 66488 - protein, 208 aa, Homo sapiens
MDQNNSLPPYAQGLASPQGAMTPGIPIFSPMMPYGTGLTPQPIQNTNSLSILEEQQRQQQQQQQQQQQQQQQQQQQQQQQQQQQQQQQQQQQQQQAVAAAAVQQSTSQQATQGTSGQAPQLFHSQTLTTAPLPGTTPLYPSPMTPMTPITPATPASESSGIVPQLQNIVSTVNLGCKLDLKTIALRARNAEYNPKRFAAVIMRIREPR

SEQ ID NO: 66489 - protein, 151 aa, Homo sapiens [sequence omitted]

SEQ ID NO: 66490 - protein, 101 aa, Homo sapiens
  VARIANT 1: note = MOD_RES - Any amino acid
XEEQSRLAARKYARVVQKLGFPAKFLDFKIQNMVGSCDVKFPISYEPELFPGLIYRMIKPRIVLLIFVSGKVVLTGAKVRAEIYEAFENIYPILKGFRKTT

SEQ ID NO: 66491 - protein, 319 aa, Homo sapiens
MTPGIPIFSPMMPYGTGLTPQPIQNTNSLSILEEQQRQQQQQQQQQQQQQQQQQQQQQQQQQQQQQQQQQQQQQQAVAAAAVQQSTSQQATQGTSGQAPQLFHSQTLTTAPLPGTTPLYPSPMTPMTPITPATPASESSGIVPQLQNIVSTVNLGCKLDLKTIALRARNAEYNPKRFAAVIMRIREPRTTALIFSSGKMVCTGAKSEEQSRLAARKYARVVQKLGFPAKFLDFKIQNMVGSCDVKFPIRLEGLVLTHQQFSSYEPELFPGLIYRMIKPRIVLLIFVSGKVVLTGAKVRAEIYEAFENIYPILKGFRKTT

SEQ ID NO: 66492 - protein, 869 aa, Homo sapiens
MDFPSSLRPALFLTGPLGLSDVPDLSFMCSWRDALTLPEAQPQNSENGALHVTKDLLWEPATPGPLPMLPPLIDPWDPGLTARDLLFRGGCRYRKRPRVVLDVTEQISRFLLDHGDVAFAPLGKLMLENFKLEGAGSRTKKKTVVSVKKLLQDLGGHQPWGCPWAYLSNRQRRFSILGGPILGTSVASHLAELLHEELVLRWEQLLLDEACTGGALAWVPGRTPQFGQLVYPAGGAQDRLHFQEVVLTPGDNPQFLGKPGRIQLQGPVRQVVTCTVQGESKALIYTFLPHWLTCYLTPGPFHPSSALLAVRSDYHCAVWKFGKQWQPTLLQAMQVEKGATGISLSPHLPGELAICSRSGAVCLWSPEDGLRQIYRDPETLVFRDSSSWRWADFTAHPRVLTVGDRTGVKMLDTQGPPGCGLLLFRLGAEASCQKGERVLLTQYLGHSSPKCLPPTLHLVCTQFSLYLVDERLPLVPMLKWNHGLPSPLLLARLLPPPRPSCVQPLLLGGQGGQLQLLHLAGEGASVPRLAGPPQSLPSRIDSLPAFPLLEPKIQWRLQERLKAPTIGLAAVVPPLPSAPTPGLVLFQLSAAGDVFYQQLRPQVDSSLRRDAGPPGDTQPDCHAPTASWTSQDTAGCSQWLKALLKVPLAPPVWTAPTFTHRQMLGSTELRREEEEGQRLGVLRKAMARGQLLLQRDLGSLPAAEPPPAPESGLEDKLSERLGEAWAGRGAAWWERQQGRTSEPGRQTRRPKRRTQLSSSFSLSGHVDPSEDTSSPHSPEWPPADALPLPPTTPPSQELTPDACAQGVPSEQRQMLRDYMAKLPPQRDTPGCATTPPHSQASSVRATRSQQHTPVLSSSQPLRKKPRMGF

SEQ ID NO: 66493 - protein, 450 aa, Homo sapiens
MSDFSEELKGPVTDDEEVETSVLSGAGMHFPWLQTYVETVAIGGKRRKDFAQTTSACLSFIQEALLKHQWQQAAEYMYSYFQTLEDSDSYKRQAAPEIIWKLGSEILFYHPKSNMESFNTFANRMKNIGVMNYLKISLQHALYLLHHGMLKDAKRNLSEAETWRHGENTSSREILINLIQAYKGLLQYYTWSEKKMELSKLDKDDYAYNAVAQDVFNHSWKTSANISALIKIPGVWDPFVKSYVEMLEFYGDRDGAQEVLTNYAYDEKFPSNPNAHIYLYNFLKRQKAPRSKLISVLKILYQIVPSHKLMLEFHTLLRKSEKEEHRKLGLEVLFGVLDFAGCTKNITAWKYLAKYLKNILMGNHLAWVQEEWNSRKNWWPGFHFSYFWAKSDWKEDTALACEKAFVAGLLLGKGCRYFRYILKQDHQILGKKIKRMKRSVKKYSIVNPRL

SEQ ID NO: 66494 - protein, 450 aa, Homo sapiens; identical to SEQ ID NO: 66493

SEQ ID NO: 66495 - protein, 336 aa, Homo sapiens
MESFNTFANRMKNIGVMNYLKISLQHALYLLHHGMLKDAKRNLSEAETWRHGENTSSREILINLIQAYKGLLQYYTWSEKKMELSKLDKDDYAYNAVAQDVFNHSWKTSANISALIKIPGVWDPFVKSYVEMLEFYGDRDGAQEVLTNYAYDEKFPSNPNAHIYLYNFLKRQKAPRSKLISVLKILYQIVPSHKLMLEFHTLLRKSEKEEHRKLGLEVLFGVLDFAGCTKNITAWKYLAKYLKNILMGNHLAWVQEEWNSRKNWWPGFHFSYFWAKSDWKEDTALACEKAFVAGLLLGKGCRYFRYILKQDHQILGKKIKRMKRSVKKYSIVNPRL

SEQ ID NO: 66496 - protein, 336 aa, Homo sapiens; identical to SEQ ID NO: 66495

SEQ ID NO: 66497 - protein, 286 aa, Homo sapiens
MSDFSEELKGPVTDDEEVETSVLSGAGMHFPWLQTYVETVAIGGKRRKDFAQTTSACLSFIQEALLKHQWQQAAEYMYSYFQTLEDSDSYKRQAAPEISLQHALYLLHHGMLKDAKRNLSEAETWRHGENTSSREILINLIQAYKGLLQYYTWSEKKMELSKLDKDDYAYNAVAQDVFNHSWKTSANISALIKIPGVWDPFVKSYVEMLEFYGDRDGAQEVLTNYAYDEKFPSNPNAHIYLYNFLKRQKAPRSKLISVLKILYQIVPSHKLMLEFHTLLRKSEKEE

SEQ ID NO: 66498 - protein, 282 aa, Homo sapiens
MSDFSEELKGPVTDDEEVETSVLSGAGMHFPWLQTYVETVAIGGKRRKDFAQTTSACLSFIQEALLKHQWQQAAEYMYSYFQTLEDSDSYKRQAAPEISLQHALYLLHHGMLKDAKRNLSEAETWRHGENTSSREILINLIQAYKGLLQYYTWSEKKMELSKLDKDDYAYNAVAQDVFNHSWKTSANISALIKIPGVWDPFVKSYVEMLEFYGDRDGAQEVLTNYAYDEKFPSNPNAHIYLYNFLKRQKAPRSKLISVLKILYQIVPSHKLMLEFHTLLRKS

SEQ ID NO: 66499 - protein, 311 aa, Homo sapiens
MSDFSEELKGPVTDDEEVETSVLSGAGMHFPWLQTYVETVAIGGKRRKDFAQTTSACLSFIQEALLKHQWQQAAEYMYSYFQTLEDSDSYKRQAAPEIIWKLGSEILFYHPKSNMESFNTFANRMKNIGVMNYLKISLQHALYLLHHGMLKDAKRNLSEAETWRHGENTSSREILINLIQAYKGLLQYYTWSEKKMELSKLDKDDYAYNAVAQDVFNHSWKTSANISALIKIPGVWDPFVKSYVEMLEFYGDRDGAQEVLTNYAYDEKFPSNPNAHIYLYNFLKRQKAPRSKLISVLKHLQKISIMYSTLR

SEQ ID NO: 66500 - protein, 775 aa, Homo sapiens
MLPPLIDPWDPGLTARDLLFRGGCRYRKRPRVVLDVTEQISRFLLDHGDVAFAPLGKLMLENFKLEGAGSRTKKKTVVSVKKLLQDLGGHQPWGCPWAYLSNRQRRFSILGGPILGTSVASHLAELLHEELVLRWEQLLLDEACTGGALAWVPGRTPQFGQLVYPAGGAQDRLHFQEVVLTPGDNPQFLGKPGRIQLQGPVRQVVTCTVQGETLLAVRSDYHCAVWKFGKQWQPTLLQAMQVEKGATGISLSPHLPGELAICSRSGAVCLWSPEDGLRQIYRDPETLVFRDSSSWRWADFTAHPRVLTVGDRTGVKMLDTQGPPGCGLLLFRLGAEASCQKGERVLLTQYLGHSSPKCLPPTLHLVCTQFSLYLVDERLPLVPMLKWNHGLPSPLLLARLLPPPRPSCVQPLLLGGQGGQLQLLHLAEGASVPRLAGPPQSLPSRIDSLPAFPLLEPKIQWRLQERLKAPTIGLAAVVPPLPSAPTPGLVLFQLSAAGDVFYQQLRPQVDSSLRRDAGPPGDTQPDCHAPTASWTSQDTAGCSQWLKALLKVPLAPPVWTAPTFTHRQMLGSTELRREEEEGQRLGVLRKAMARGQLLLQRDLGSLPAAEPPPAPESGLEDKLSERLGEAWAGRGAAWWERQQGRTSEPGRQTRRPKRRTQLSSSFSLSGHVDPSEDTSSPHSPEWPPADALPLPPTTPPSQELTPDACAQGVPSEQRQMLRDYMAKLPPQRDTPGCATTPPHSQASSVRATRSQQHTPVLSSSQPLRKKPRMGF

SEQ ID NO: 66501 - protein, 869 aa, Homo sapiens; identical to SEQ ID NO: 66492

SEQ ID NO: 66502 - protein, 348 aa, Homo sapiens
MDFPSSLRPALFLTGPLGLSDVPDLSFMCSWRDALTLPEAQPQNSENGALHVTKDLLWEPATPGPLPMLPPLIDPWDPGLTARDLLFRGGCRYRKRPRVVLDVTEQISRFLLDHGDVAFAPLGKLMLENFKLEGAGSRTKKKTVVSVKKLLQDLGGHQPWGCPWAYLSNRQRRFSILGGPILGTSVASHLAELLHEELVLRWEQLLLDEACTGGALAWVPGRTPQFGQLVYPAGGAQDRLHFQEVVLTPGDNPQFLGKPGRIQLQGPVRQVVTCTVQGETLLAVRSDYHCAVWKFGKQWQPTLLQAMQVEKGATGISLSPHLPGELAICSRSGAVCLWSPEDGYRRFL

SEQ ID NO: 66503 - protein, 776 aa, Homo sapiens
MLPPLIDPWDPGLTARDLLFRGGCRYRKRPRVVLDVTEQISRFLLDHGDVAFAPLGKLMLENFKLEGAGSRTKKKTVVSVKKLLQDLGGHQPWGCPWAYLSNRQRRFSILGGPILGTSVASHLAELLHEELVLRWEQLLLDEACTGGALAWVPGRTPQFGQLVYPAGGAQDRLHFQEVVLTPGDNPQFLGKPGRIQLQGPVRQVVTCTVQGETLLAVRSDYHCAVWKFGKQWQPTLLQAMQVEKGATGISLSPHLPGELAICSRSGAVCLWSPEDGLRQIYRDPETLVFRDSSSWRWADFTAHPRVLTVGDRTGVKMLDTQGPPGCGLLLFRLGAEASCQKGERVLLTQYLGHSSPKCLPPTLHLVCTQFSLYLVDERLPLVPMLKWNHGLPSPLLLARLLPPPRPSCVQPLLLGGQGGQLQLLHLAGEGASVPRLAGPPQSLPSRIDSLPAFPLLEPKIQWRLQERLKAPTIGLAAVVPPLPSAPTPGLVLFQLSAAGDVFYQQLRPQVDSSLRRDAGPPGDTQPDCHAPTASWTSQDTAGCSQWLKALLKVPLAPPVWTAPTFTHRQMLGSTELRREEEEGQRLGVLRKAMARGQLLLQRDLGSLPAAEPPPAPESGLEDKLSERLGEAWAGRGAAWWERQQGRTSEPGRQTRRPKRRTQLSSSFSLSGHVDPSEDTSSPHSPEWPPADALPLPPTTPPSQELTPDACAQGVPSEQRQMLRDYMAKLPPQRDTPGCATTPPHSQASSVRATRSQQHTPVLSSSQPLRKKPRMGF

SEQ ID NO: 66504 - protein, 392 aa, Homo sapiens
MLKWNHGLPSPLLLARLLPPPRPSCVQPLLLGGQGGQLQLLHLAEGASVPRLAGPPQSLPSRIDSLPAFPLLEPKIQWRLQERLKAPTIGLAAVVPPLPSAPTPGLVLFQLSAAGDVFYQQLRPQVDSSLRRDAGPPGDTQPDCHAPTASWTSQDTAGCSQWLKALLKVPLAPPVWTAPTFTHRQMLGSTELRREEEEGQRLGVLRKAMARGQLLLQRDLGSLPAAEPPPAPESGLEDKLSERLGEAWAGRGAAWWERQQGRTSEPGRQTRRPKRRTQLSSSFSLSGHVDPSEDTSSPHSPEWPPADALPLPPTTPPSQELTPDACAQGVPSEQRQMLRDYMAKLPPQRDTPGCATTPPHSQASSVRATRSQQHTPVLSSSQPLRKKPRMGF

SEQ ID NO: 66505 - protein, 278 aa, Homo sapiens
MDKSGIDSLDHVTSDAVELANRSDNSSDSSLFKTQCIPYSPKGEKRNPIRKFVRTPESVHASDSSSDSSFEPIPLTIKAIFERFKNRKKRYKKKKKRRYQPTGRPRGRPEGRRNPIYSLIDKKKQFRSRGSGFPFLESENEKNAPWRKILTFEQAVARGFFNYIEKLKYEHHLKESLKQMNVGEDLENEDFDSRRYKFLDDDGSISPIEESTAEDEDATHLEDNECDIKLAGDSFIVSSEFPVRLSVYLEEEDITEEAALSKKRATKAKNTGQRGLKM

SEQ ID NO: 66506 - protein, 278 aa, Homo sapiens; identical to SEQ ID NO: 66505

SEQ ID NO: 66507 - protein, 278 aa, Homo sapiens; identical to SEQ ID NO: 66505

SEQ ID NO: 66508 - protein, 8 aa, Homo sapiens
MDKSGIDS

SEQ ID NO: 66509 - protein, 1009 aa, Homo sapiens
MSWFNASQLSSFAKQALSQAQKSIDRVLDIQEEEPSIWAETIPYGEPGISSPVSGGWDTSTWGLKSNTEPQSPPIASPKAITKPVRRTVVDESENFFSAFLSPTVSLKVSESVIDVKTTMESISNTSTQSLTAETKDIALEPKEQKHEDRQSNTPSPPVSTFSSGTSTTSDIEVLDHESVISESSASSRQETTDSKSSLHLMQTSFQLLSASACPEYNRLDDFQKLTESCCSSDAFERIDSFSVQSLDSRSVSEINSDDELSGKGYALVPIIVNSSTPKSKTVESAEGKSEEVNETLVIPTEEAEMEESGRSATPVNCEQPDILVSSTPINEGQTVLDKVAEQCEPAESQPEALSEKEDVCKVTLTVEFLNEKLEKREAQLLSLSKEKALLEEAFDNLKDEMFRVKEESSSISSLKDEFTQRIAEAEKKVQLACKERDAAKKEIKNIKEELATRLNSSETADLLKEKDEQIRGLMEEGEKLSKQQLHNSNIIKKLRAKDKENENMVAKLNKKVKELEEELQHLKQVLDGKEEVEKQHRENIKKLNSMVERQEKDLGRLQVDMDELEEKNRSIQAALDSAYKELTDLHKANAAKDSEAQEAALSREMKAKEELSAALEKAQEEARQQQETLAIQVGDLRLALQRTEQAAARKEDYLRHEIGELQQRLQEAENRNQELSQSVSSTTRPLLRQIENLQATLGSQTSSWEKLEKNLSDRLGESQTLLAAAVERERAATEELLANKIQMSSMESQNSLLRQENSRFQAQLESEKNRLCKLEDENNRYQVELENLKDEYVRTLEETRKEKTLLNSQLEMERMKVEQERKKAIFTQETIKEKERKPFSVSSTPTMSRSSSISGVDMAGLQTSFLSQDESHDHSFGPMPISANGSNLYDAVRMGAGSSIIENLQSQLKLREGEITHLQLEIGNLEKTRSIMAEELVKLTNQNDELEEKVKEIPKLRTQLRDLDQRYNTILQMYGEKAEEAEELRLDLEDVKNMYKTQIDELLRQSLS

SEQ ID NO: 66510 - protein, 1093 aa, Homo sapiens
MSWFNASQLSSFAKQALSQAQKSIDRVLDIQEEEPSIWAETIPYGEPGISSPVSGGWDTSTWGLKSNTEPQSPPIASPKAITKPVRRTVVDESENFFSAFLSPTDVQTIQKSPVVSKPPAKSQRPEEEVKSSLHESLHIGQSRTPETTESQVKDSSLCVSGETLAAGTSSPKTEGKHEETVNKESDMKVPTVSLKVSESVIDVKTTMESISNTSTQSLTAETKDIALEPKEQKHEDRQSNTPSPPVSTFSSGTSTTSDIEVLDHESVISESSASSRQETTDSKSSLHLMQTSFQLLSASACPEYNRLDDFQKLTESCCSSDAFERIDSFSVQSLDSRSVSEINSDDELSGKGYALVPIIVNSSTPKSKTVESAEGKSEEVNETLVIPTEEAEMEESGRSATPVNCEQPDILVSSTPINEGQTVLDKVAEQCEPAESQPEALSEKEDVCKTVEFLNEKLEKREAQLLSLSKEKALLEEAFDNLKDEMFRVKEESSSISSLKDEFTQRIAEAEKKVQLACKERDAAKKEIKNIKEELATRLNSSETADLLKEKDEQIRGLMEEGEKLSKQQLHNSNIIKKLRAKDKENENMVAKLNKKVKELEEELQHLKQVLDGKEEVEKQHRENIKKLNSMVERQEKDLGRLQVDMDELEEKNRSIQAALDSAYKELTDLHKANAAKDSEAQEAALSREMKAKEELSAALEKAQEEARQQQETLAIQVGDLRLALQRTEQAAARKEDYLRHEIGELQQRLQEAENRNQELSQSVSSTTRPLLRQIENLQATLGSQTSSWEKLEKNLSDRLGESQTLLAAAVERERAATEELLANKIQMSSMESQNSLLRQENSRFQAQLESEKNRLCKLEDENNRYQVELENLKDEYVRTLEETRKEKTLLNSQLEMERMKVEQERKKAIFTQETIKEKERKPFSVSSTPTMSRSSSISGVDMAGLQTSFLSQDESHDHSFGPMPISANGSNLYDAVRMGAGSSIIENLQSQLKLREGEITHLQLEIGNLEKTRSIMAEELVKLTNQNDELEEKVKEIPKLRTQLRDLDQRYNTILQMYGEKAEEAEELRLDLEDVKNMYKTQIDELLRQSLS

SEQ ID NO: 66511 - protein, 533 aa, Homo sapiens
MSWFNASQLSSFAKQALSQAQKSIDRVLDIQEEEPSIWAETIPYGEPGISSPVSGGWDTSTWGLKSNTEPQSPPIASPKAITKPVRRTVVDESENFFSAFLSPTDVQTIQKSPVVSKPPAKSQRPEEEVKSSLHESLHIGQSRTPETTESQVKDSSLCVSGETLAAGTSSPKTEGKHEETVNKESDMKVPTVSLKVSESVIDVKTTMESISNTSTQSLTAETKDIALEPKEQKHEDRQSNTPSPPVSTFSSGTSTTSDIEVLDHESVISESSASSRQETTDSKSSLHLMQTSFQLLSASACPEYNRLDDFQKLTESCCSSDAFERIDSFSVQSLDSRSVSEINSDDELSGKGYALVPIIVNSSTPKSKTVESAEGKSEEVNETLVIPTEEAEMEESGRSATPVNCEQPDILVSSTPINEGQTVLDKVAEQCEPAESQPEALSEKEDVCKTVEFLNEKLEKREAQLLSLSKEKALLEEAFDNLKDEMFRVKEESSSISSLKDEFTQRIAEAEKKVQLACKERDAAKKEVKRKKR

SEQ ID NO: 66512 - protein, 1096 aa, Homo sapiens
MSWFNASQLSSFAKQALSQAQKSIDRVLDIQEEEPSIWAETIPYGEPGISSPVSGGWDTSTWGLKSNTEPQSPPIASPKAITKPVRRTVVDESENFFSAFLSPTDVQTIQKSPVVSKPPAKSQRPEEEVKSSLHESLHIGQSRTPETTESQVKDSSLCVSGETLAAGTSSPKTEGKHEETVNKESDMKVPTVSLKVSESVIDVKTTMESISNTSTQSLTAETKDIALEPKEQKHEDRQSNTPSPPVSTFSSGTSTTSDIEVLDHESVISESSASSRQETTDSKSSLHLMQTSFQLLSASACPEYNRLDDFQKLTESCCSSDAFERIDSFSVQSLDSRSVSEINSDDELSGKGYALVPIIVNSSTPKSKTVESAEGKSEEVNETLVIPTEEAEMEESGRSATPVNCEQPDILVSSTPINEGQTVLDKVAEQCEPAESQPEALSEKEDVCKVTLTVEFLNEKLEKREAQLLSLSKEKALLEEAFDNLKDEMFRVKEESSSISSLKDEFTQRIAEAEKKVQLACKERDAAKKEIKNIKEELATRLNSSETADLLKEKDEQIRGLMEEGEKLSKQQLHNSNIIKKLRAKDKENENMVAKLNKKVKELEEELQHLKQVLDGKEEVEKQHRENIKKLNSMVERQEKDLGRLQVDMDELEEKNRSIQAALDSAYKELTDLHKANAAKDSEAQEAALSREMKAKEELSAALEKAQEEARQQQETLAIQVGDLRLALQRTEQAAARKEDYLRHEIGELQQRLQEAENRNQELSQSVSSTTRPLLRQIENLQATLGSQTSSWEKLEKNLSDRLGESQTLLAAAVERERAATEELLANKIQMSSMESQNSLLRQENSRFQAQLESEKNRLCKLEDENNRYQVELENLKDEYVRTLEETRKEKTLLNSQLEMERMKVEQERKKAIFTQETIKEKERKPFSVSSTPTMSRSSSISGVDMAGLQTSFLSQDESHDHSFGPMPISANGSNLYDAVRMGAGSSIIENLQSQLKLREGEITHLQLEIGNLEKTRSIMAEELVKLTNQNDELEEKVKEIPKLRTQLRDLDQRYNTILQMYGEKAEEAEELRLDLEDVKNMYKTQIDELLRQSLS

SEQ ID NO: 66513 - protein, 1649 aa, Homo sapiens
MESVEKDWGWGLWRNLRCLGHAHQGKCCTEGGISSTTKTSSENGSCCFEKAARKDHVCRFIGCGRNDRFNYVVMQLQGRNLADLRRSQSRGTFTISTTLRLGRQILESIESIHSVGFLHRDIKPSNFAMGRFPSTCRKCYMLDFGLARQFTNSCGDVRPPRAVAGFRGTVRYASINAHRNREMGRHDDLWSLFYMLVEFVVGQLPWRKIKDKEQVGSIKERYDHRLMLKHLPPEFSIFLDHISSLDYFTKPDYQMSIRVTRKSYKVSTSGPQAFNSLSYTSGPGACISSSSFSRMGSSSFRGGLGAGYGGASGGITTITVNQSLLSPLNLEVDPNIQAVRTQEEKQIKTLNNKFFSFIDKVRFLEQQNKMLETKWSLVQQQKMARSNMDNMFESYINNLKWQLETLGQEKLKLEAELGNMHGLVEDFRNKYEVEISKCTEMENEFVLIKEYVDEAYMNKMELESSLKELTAKISFLRQLYEEEIGSCSPRSRIHLWCCSWTTAASWTWTASSLRSRPEGFPGGCHADTEQRGELAIKDANAKLSELEAALQLASQDMARQLREYQELMNVKLALDIKIATYRKLLEGEESWLESGMQNMSIHMKTTSSYAGGQSLAYGGLTSPGLSYGLGSSFGSGMGSSSFSHTSSSRAVVMKKIETRDGKLVSESSNVLPNLRITATLLTSVFDNSIKTFGVIESDPFDWEKTGNDGSLTTTTTSTTPQLHTRLTPAAIGIANATPIPGDLLRENTDEVFPDEQLSDGENGIPVGVSPDKLPGSLGHPRPQEKDVWEEMDANKNKIKLGICKAATEEENSHGQANGLLNAPSLGSPIRVRSEITQPDRDIPLVRKLRSIHSFELEKRLTLEPKPDTDKFLETCLEKMQKDTSAGKESILPALLHKPCVPAVSRTDHIWHYDEEYLPDASKPASANTPEQADGGGSNGFIAVNLSSCKQEIDSKEWVIVDKEQDLQDFRTNEAVGHKTTGSPSDEEPEVLQVLEASPQDEKLQLGPWAENDHLKKETSGVVLALSAEGPPTAASEQYTDRLELQPGAASQFIAATPTSLMEAQAEGPLTAITIPRPSVASTQSTSGSFHCGQQPEKKDLQPMEPTVELYSPRENFSGLVVTEGEPPSGGSRTDLGLQIDHIGHDMLPNIRESNKSQDLGPKELPDHNRLVVREFENLPGETEEKSILLESDNEDEKLSRGQHCIEISSLPGDLVIVEKDHSATTEPLDVTKTQTFSVVPNQDKNNEIMKLLTVGTSEISSRDIDPHVEGQIGQVAEMQKNKISKDDDIMSEDLPGHQGDLSTFLHQEGKREKITPRNGELFHCVSENEHGAPTRKDMVRSSFVTRHSRIPVLAQEIDSTLESSSPVSAKEKLLQKKAYQPDLVKLLVEKRQFKSFLGDLSSASDKLLEEKLATVPAPFCEEEVLTPFSRLTVDSHLSRSAEDSFLSPIISQSRKSKIPRPVSWVNTDQVNSSTSSQFFPRPPPGKPPTRPGVEARLRRYKVLGSSNSDSDLFSRLAQILQNGSQKPRSTTQCKSPGSPHNPKTPPKSPVVPRRSPSASPRSSSLPRTSSSSPSRAGRPHHDQRSSSPHLGRSKSPPSHSGSSSSRRSCQQEHCKPSKNGLKGSGSLHHHSASTKTPQGKSKPASKLSR

SEQ ID NO: 66514 - protein, 1244 aa, Homo sapiens
MSGGGEQLDILSVGILVKERWKVLRKIGGGGFGEIYDALDMLTRENVALKVESAQQPKQVLKMEVAVLKKLQGKDHVCRFIGCGRNDRFNYVVMQLQGRNLADLRRSQSRGTFTISTTLRLGRQILESIESIHSVGFLHRDIKPSNFAMGRFPSTCRKCYMLDFGLARQFTNSCGDVRPPRAVAGFRGTVRYASINAHRNREMGRHDDLWSLFYMLVEFVVGQLPWRKIKDKEQVGSIKERYDHRLMLKHLPPEFSIFLDHISSLDYFTKPDYQLLTSVFDNSIKTFGVIESDPFDWEKTGNDGSLTTTTTSTTPQLHTRLTPAAIGIANATPIPGDLLRENTDEVFPDEQLSDGENGIPVGVSPDKLPGSLGHPRPQEKDVWEEMDANKNKIKLGICKAATEEENSHGQANGLLNAPSLGSPIRVRSEITQPDRDIPLVRKLRSIHSFELEKRLTLEPKPDTDKFLETCLEKMQKDTSAGKESILPALLHKPCVPAVSRTDHIWHYDEEYLPDASKPASANTPEQADGGGSNGFIAVNLSSCKQEIDSKEWVIVDKEQDLQDFRTNEAVGHKTTGSPSDEEPEVLQVLEASPQDEKLQLGPWAENDHLKKETSGVVLALSAEGPPTAASEQYTDRLELQPGAASQFIAATPTSLMEAQAEGPLTAITIPRPSVASTQSTSGSFHCGQQPEKKDLQPMEPTVELYSPRENFSGLVVTEGEPPSGGSRTDLGLQIDHIGHDMLPNIRESNKSQDLGPKELPDHNRLVVREFENLPGETEEKSILLESDNEDEKLSRGQHCIEISSLPGDLVIVEKDHSATTEPLDVTKTQTFSVVPNQDKNNEIMKLLTVGTSEISSRDIDPHVEGQIGQVAEMQKNKISKDDDIMSEDLPGHQGDLSTFLHQEGKREKITPRNGELFHCVSENEHGAPTRKDMVRSSFVTRHSRIPVLAQEIDSTLESSSPVSAKEKLLQKKAYQPDLVKLLVEKRQFKSFLGDLSSASDKLLEEKLATVPAPFCEEEVLTPFSRLTVDSHLSRSAEDSFLSPIISQSRKSKIPRPVSWVNTDQVNSSTSSQFFPRPPPGKPPTRPGVEARLRRYKVLGSSNSDSDLFSRLAQILQNGSQKPRSTTQCKSPGSPHNPKTPPKSPVVPRRSPSASPRSSSLPRTSSSSPSRAGRPHHDQRSSSPHLGRSKSPPSHSGSSSSRRSCQQEHCKPSKNGLKGSGSLHHHSASTKTPQGKSKPASKLSR

SEQ ID NO: 66515 - protein, 1174 aa, Homo sapiens
EPGKDHVCRFIGCGRNDRFNYVVMQLQGRNLADLRRSQSRGTFTISTTLRLGRQILESIESIHSVGFLHRDIKPSNFAMGRFPSTCRKCYMLDFGLARQFTNSCGDVRPPRAVAGFRGTVRYASINAHRNREMGRHDDLWSLFYMLVEFVVGQLPWRKIKDKEQVGSIKERYDHRLMLKHLPPEFSIFLDHISSLDYFTKPDYQLLTSVFDNSIKTFGVIESDPFDWEKTGNDGSLTTTTTSTTPQLHTRLTPAAIGIANATPIPGDLLRENTDEVFPDEQLSDGENGIPVGVSPDKLPGSLGHPRPQEKDVWEEMDANKNKIKLGICKAATEEENSHGQANGLLNAPSLGSPIRVRSEITQPDRDIPLVRKLRSIHSFELEKRLTLEPKPDTDKFLETCLEKMQKDTSAGKESILPALLHKPCVPAVSRTDHIWHYDEEYLPDASKPASANTPEQADGGGSNGFIAVNLSSCKQEIDSKEWVIVDKEQDLQDFRTNEAVGHKTTGSPSDEEPEVLQVLEASPQDEKLQLGPWAENDHLKKETSGVVLALSAEGPPTAASEQYTDRLELQPGAASQFIAATPTSLMEAQAEGPLTAITIPRPSVASTQSTSGSFHCGQQPEKKDLQPMEPTVELYSPRENFSGLVVTEGEPPSGGSRTDLGLQIDHIGHDMLPNIRESNKSQDLGPKELPDHNRLVVREFENLPGETEEKSILLESDNEDEKLSRGQHCIEISSLPGDLVIVEKDHSATTEPLDVTKTQTFSVVPNQDKNNEIMKLLTVGTSEISSRDIDPHVEGQIGQVAEMQKNKISKDDDIMSEDLPGHQGDLSTFLHQEGKREKITPRNGELFHCVSENEHGAPTRKDMVRSSFVTRHSRIPVLAQEIDSTLESSSPVSAKEKLLQKKAYQPDLVKLLVEKRQFKSFLGDLSSASDKLLEEKLATVPAPFCEEEVLTPFSRLTVDSHLSRSAEDSFLSPIISQSRKSKIPRPVSWVNTDQVNSSTSSQFFPRPPPGKPPTRPGVEARLRRYKVLGSSNSDSDLFSRLAQILQNGSQKPRSTTQCKSPGSPHNPKTPPKSPVVPRRSPSASPRSSSLPRTSSSSPSRAGRPHHDQRSSSPHLGRSKSPPSHSGSSSSRRSCQQEHCKPSKNGLKGSGSLHHHSASTKTPQGKSKPASKLSR

SEQ ID NO: 66516 - protein, 747 aa, Homo sapiens
MTSFQEVPLQTSNFAHVIFQNVAKSYLPNAHLECHYTLTPYIHPHPKDWVGIFKVGWSTARDYYTFLWSPMPEHYVEGSTVNCVLAFQGYYLPNDDGEFYQFCYVTHKGEIRGASTPFQFRASSPVEELLTMEDEGNSDMLVVTTKAGLLELKIEKTMKEKEELLKLIAVLEKETAQLREQVGRMERELNHEKERCDQLQAEQKGLTEVTQSLKMENEEFKKRFSDATSKAHQLEEDIVSVTHKAIEKETELDSLKDKLKKAQHEREQLECQLKTEKDEKELYKVHLKNTEIENTKLMSEVQTLKNLDGNKESVITHFKEEIGRLQLCLAEKENLQRTFLLTTSSKEDTCFLKEQLRKAEEQVQATRQEVVFLAKELSDAVNVRDRTMADLHTARLENEKVKKQLADAVAELKLNAMKKDQDKTDTLEHELRREVEDLKLRLQMAADHYKEKFKECQRLQKQINKLSDQSANNNNVFTKKTGNQQKVNDASVNTDPATSASTVDVKPSPSAAEADFDIVTKGQVCEMTKEIADKTEKYNKCKQLLQDEKAKCNKYADELAKMELKWKEQVKIAENVKLELAEVQDNYKELKRSLENPAERKMEDGADGAFYPDEIQRPPVRVPSWGLEDNVVCSQPARNFSRPDGLEDSEDSKEDENVPTAPDPPSQHLRGHGTGFCFDSSFDVHKKCPLCELMFPPNYDQSKFEEHVESHWKVCPMCSEQFPPDYDQQVFERHVQTHFDQNVLNFD

SEQ ID NO: 66517 - protein, 789 aa, Homo sapiens
MTSFQEVPLQTSNFAHVIFQNVAKSYLPNAHLECHYTLTPYIHPHPKDWVGIFKVGWSTARDYYTFLWSPMPEHYVEGSTVNCVLAFQGYYLPNDDGEFYQFCYVTHKGEIRGASTPFQFRASSPVEELLTMEDEGNSDMLVVTTKAGLLELKIEKTMKEKEELLKLIAVLEKETAQLREQVGRMERELNHEKERCDQLQAEQKGLTEVTQSLKMENEEFKKRFSDATSKAHQLEEDIVSVTHKAIEKETELDSLKDKLKKAQHEREQLECQLKTEKDEKELYKVHLKNTEIENTKLMSEVQTLKNLDGNKESVITHFKEEIGRLQLCLAEKENLQRTFLLTTSSKEDTCFLKEQLRKAEEQVQATRQEVVFLAKELSDAVNVRDRTMADLHTARLENEKVKKQLADAVAELKLNAMKKDQDKTDTLEHELRREVEDLKLRLQMAADHYKEKFKECQRLQKQINKLSDQSANNNNVFTKKTGNQQKVNDASVNTDPATSASTVDVKPSPSAAEADFDIVTKGQVCEMTKEIADKTEKYNKCKQLLQDEKAKCNKYADELAKMELKWKEQVKIAENVKLELAEVQDNYKELKRSLENPAERKMEGQNSQSPQCFKTCSEQNGYVLTLSNAQPVLQYGNPYASQETRDGADGAFYPDEIQRPPVRVPSWGLEDNVVCSQPARNFSRPDGLEDSEDSKEDENVPTAPDPPSQHLRGHGTGFCFDSSFDVHKKCPLCELMFPPNYDQSKFEEHVESHWKVCPMCSEQFPPDYDQQVFERHVQTHFDQNVLNFD

SEQ ID NO: 66518 - protein, 138 aa, Homo sapiens
MTSFQEVPLQTSNFAHVIFQNVAKSYLPNAHLECHYTLTPYIHPHPKDWVGIFKVGWSTARDYYTFLWSPMPEHYVEGSTVNCVLAFQGYYLPNDDGEFYQFCYVTHKGEIRGASTPFQFRASSPVEELLTMEDEGNS

SEQ ID NO: 66519 - protein, 98 aa, Homo sapiens
MTSFQEVPLQTSNFAHVIFQNVAKSYLPNAHLECHYTLTPYIHPHPKDWVGIFKVGWSTARDYYTFLWSPMPEHYVEGSTVNCVLAFQGYYLPNDDGE

SEQ ID NO: 66520 - protein, 590 aa, Homo sapiens
MKEKEELLKLIAVLEKETAQLREQVGRMERELNHEKERCDQLQAEQKGLTEVTQSLKMENEEFKKRFSDATSKAHQLEEDIVSVTHKAIEKETELDSLKDKLKKAQHEREQLECQLKTEKDEKELYKVHLKNTEIENTKLMSEVQTLKNLDGNKESVITHFKEEIGRLQLCLAEKENLQRTFLLTTSSKEDTCFLKEQLRKAEEQVQATRQEVVFLAKELSDAVNVRDRTMADLHTARLENEKVKKQLADAVAELKLNAMKKDQDKTDTLEHELRREVEDLKLRLQMAADHYKEKFKECQRLQKQINKLSDQSANNNNVFTKKTGNQQKVNDASVNTDPATSASTVDVKPSPSAAEADFDIVTKGQVCEMTKEIADKTEKYNKCKQLLQDEKAKCNKYADELAKMELKWKEQVKIAENVKLELAEVQDNYKELKRSLENPAERKMEDGADGAFYPDEIQRPPVRVPSWGLEDNVVCSQPARNFSRPDGLEDSEDSKEDENVPTAPDPPSQHLRGHGTGFCFDSSFDVHKKCPLCELMFPPNYDQSKFEEHVESHWKVCPMCSEQFPPDYDQQVFERHVQTHFDQNVLNFD

SEQ ID NO: 66521 - protein, 747 aa, Homo sapiens; identical to SEQ ID NO: 66516

SEQ ID NO: 66522 - protein, 1159 aa, Homo sapiens
MEPITFTARKHLLSNEVSVDFGLQLVGSLPVHSLTTMPMLPWVVAEVRRLSRQSTRKEPVTKQVRLCVSPSGLRCEPEPGRSQQWDPLIYSSIFECKPQRVHKLIHNSHDPSYFACLIKEDAVHRQSICYVFKADDQTKVPEIISSIRQAGKIARQEELHCPSEFDDTFSKKFEVLFCGRVTVAHKKAPPALIDECIEKFNHVSGSRGSESPRPNPPHAAPTGSQEPVRRPMRKSFSQPGLRSLAFRKELQDGGLRSSGFFSSFEESDIENHLISGHNIVQPTDIEENRTMLFTIGQSEVYLISPDTKKIALEKNFKEISFCSQGIRHVDHFGFICRESSGGGGFHFVCYVFQCTNEALVDEIMMTLKQAFTVAAVQQTAKAPAQLCEGCPLQSLHKLCERIEGMNSSKTKLELQKHLTTLTNQEQATIFEEVQKLRPRNEQRENELIISFLRCLYEEKQKEHIHIGEMKQTSQMAAENIGSELPPSATRFRLDMLKNKAKRSLTESLESILSRGNKARGLQEHSISVDLDSSLSSTLSNTSKEPSVCEKEALPISESSFKLLGSSEDLSSDSESHLPEEPAPLSPQQAFRRRANTLSHFPIECQEPPQPARGSPGVSQRKLMRYHSVSTETPHERNVDPSPVGESKHRPGQSSAPAPPPRLNPSASSPNFFKYLKHNSSGEQSGNAVPKSISYRNALRKKLHSSSSVPNFLKFLAPVDENNTSDFMNTKRDFESKANHLGDSGGTPVKTRRHSWRQQIFLRVATPQKACDSSSRYEDYSELGELPPRSPLEPVCEDGPFGPPPEEKKRTSRELRELWQKAILQQILLLRMEKENQKLQASENDLLNKRLKLDYEEITPCLKEVTTVWEKMLSTPGRSKIKFDMEKMHSAVGQGVPRHHRGEIWKFLAEQFHLKHQFPSKQQPKDVPYKELLKQLTSQQHAILIDLGRTFPTHPYFSAQLGAGQLSLYNILKAYSLLDQEVGYCQGLSFVAGILLLHMSEEEAFKMLKFLMFDMGLRKQYRPDMIILQMEKTINQVFEMDIAKQLQAYEVEYHVLQEELIDSSPLSDNQRMDKLEKTNSSLRKQNLDLLEQLQVANGRIQSLEATIEKLLSSESKLKQAMLTLELERSALLQTVEELRRRSAEPSDREPECTQPEPTGD

SEQ ID NO: 66523 - protein, 1168 aa, Homo sapiens
MEPITFTARKHLLSNEVSVDFGLQLVGSLPVHSLTTMPMLPWVVAEVRRLSRQSTRKEPVTKQVRLCVSPSGLRCEPEPGRSQQWDPLIYSSIFECKPQRVHKLIHNSHDPSYFACLIKEDAVHRQSICYVFKADDQTKVPEIISSIRQAGKIARQEELHCPSEFDDTFSKKFEVLFCGRVTVAHKKAPPALIDECIEKFNHVSGSRGSESPRPNPPHAAPTGSQEPVRRPMRKSFSQPGLRSLAFRKELQDGGLRSSGFFSSFEESDIENHLISGHNIVQPTDIEENRTMLFTIGQSEVYLISPDTKKIALEKNFKEISFCSQGIRHVDHFGFICRESSGGGGFHFVCYVFQCTNEALVDEIMMTLKQAFTVAAVQQTAKAPAQLCEGCPLQSLHKLCERIEGMNSSKTKLELQKHLTTLTNQEQATIFEEVQKLRPRNEQRENELIISFLRCLYEEKQKEHIHIGEMKQTSQMAAENIGSELPPSATRFRLDMLKNKAKRSLTESLESILSRGNKARGLQEHSISVDLDSSLSSTLSNTSKEPSVCEKEALPISESSFKLLGSSEDLSSDSESHLPEEPAPLSPQQAFRRRANTLSHFPIECQEPPQPARGSPGVSQRKLMRYHSVSTETPHERKDFESKANHLGDSGGTPVKTRRHSWRQQIFLRVATPQKACDSSSRYEDYSELGELPPRSPLEPVCEDGPFGPPPEEKKRTSRELRELWQKAILQQILLLRMEKENQKLQASENDLLNKRLKLDYEEITPCLKEVTTVWEKMLSTPGRSKIKFDMEKMHSAVGQGVPRHHRGEIWKFLAEQFHLKHQFPSKQQPKDVPYKELLKQLTSQQHAILIDLGRTFPTHPYFSAQLGAGQLSLYNILKAYSLLDQEVGYCQGLSFVAGILLLHMSEEEAFKMLKFLMFDMGLRKQYRPDMIILQIQMYQLSRLLHDYHRDLYNHLEEHEIGPSLYAAPWFLTMFASQFPLGFVARVFDMIFLQGTEVIFKVALSLLGSHKPLILQHENLETIVDFIKSTLPNLGLVQMEKTINQVFEMDIAKQLQAYEVEYHVLQEELIDSSPLSDNQRMDKLEKTNSSLRKQNLDLLEQLQVANGRIQSLEATIEKLLSSESKLKQAMLTLELERSALLQTVEELRRRSAEPSDREPECTQPEPTGD

SEQ ID NO: 66524 - protein, 432 aa, Homo sapiens
MEKENQKLQASENDLLNKRLKLDYEEITPCLKEVTTVWEKMLSTPGRSKIKFDMEKMHSAVGQGVPRHHRGEIWKFLAEQFHLKHQFPSKQQPKDVPYKELLKQLTSQQHAILIDLGRTFPTHPYFSAQLGAGQLSLYNILKAYSLLDQEVGYCQGLSFVAGILLLHMSEEEAFKMLKFLMFDMGLRKQYRPDMIILQIQMYQLSRLLHDYHRDLYNHLEEHEIGPSLYAAPWFLTMFASQFPLGFVARVFDMIFLQGTEVIFKVALSLLGSHKPLILQHENLETIVDFIKSTLPNLGLVQMEKTINQVFEMDIAKQLQAYEVEYHVLQEELIDSSPLSDNQRMDKLEKTNSSLRKQNLDLLEQLQVANGRIQSLEATIEKLLSSESKLKQAMLTLELERSALLQTVEELRRRSAEPSDREPECTQPEPTGD

SEQ ID NO: 66525 - protein, 310 aa, Homo sapiens
MAQALGEDLVQPPELQDDSSSLGSDSELSGPGPYRQADRYGFIGGSSAEPGPGHPPADLIRQREMKWVEMTSHWEKTMSRRYKKVKMQCRKGIPSALRARCWPLLCGAHVCQKNSPGTYQELAEAPGDPQWMETIGRDLHRQFPLHEMFVSPQGHGRGSCRCSRPTPCIDRSRATARPRGPWLLCCSCTCPQRRPSGAWCRSVRSTSLGTTGPTWCQSTVPCGADTGAPGAGHCRAARGLPWPPGDTGSPSSHPPRAAAGGGLHVTGAQRGAVRAGPAAGDQGPAGPAARFRAGTPAPATGPPRRGPSHL

SEQ ID NO: 66526 - protein, 553 aa, Homo sapiens
MDSPGYNCFVDKDKMDAAIQDLGPKELSCTELQELKQLARQGYWAQSHALRGKVYQRLIRDIPCRTVTPDASVYSDIVGKIVGKHSSSCLPLPEFVDNTQVPSYCLNARGEGAVRKILLCLANQFPDISFCPALPAVVALLLHYSIDEAECFEKACRILACNDPGRRLIDQSFLAFESSCMTFGDLVNKYCQAAHKLMVAVSEDVLQVYADWQRWLFGELPLCYFARVFDVFLVEGYKVLYRVALAILKFFHKVRAGQPLESDSVKQDIRTFVRDIAKTVSPEKLLEKAFAIRLFSRKEIQLLQMANEKALKQKGITVKQKRQFVHLAVHAENFRSEIVSVREMRDIWSWVPERFALCQPLLLFSSLQHGYSLARFYFQCEGHEPTLLLIKTTQKEVCGAYLSTDWSERNKFGGKLGFFGTGECFVFRLQPEVQRYEWVVIKHPELTKPPPLMAAEPTAPLSHSASSDPADRLSPFLAARHFNLPSKTESMFMAGGSDCLIVGGGGGQALYIDGDLNRGRTSHCDTFNNQPLCSENFLIAAVEAWGFQDPDTQ

SEQ ID NO: 66527 - protein, 508 aa, Homo sapiens
MAKSNGENGPRAPAAGESLSGTRESLAQGPDAATTDELSSLGSDSEANGFAERRIDKFGFIVGSQGAEGALEEVPLEVLRQRESKWLDMLNNWDKWMAKKHKKIRLRCQKGIPPSLRGRAWQYLSGGKVKLQQNPGKFDELDMSPGDPKWLDVIERDLHRQFPFHEMFVSRGGHGQQDLFRVLKAYTLYRPEEGYCQAQAPIAAVLLMHMPAEQAFWCLVQICEKYLPGYYSEKLEAIQLDGEILFSLLQKVSPVAHKHLSRQKIDPLLYMTEWFMCAFSRTLPWSSVLRVWDMFFCEGVKIIFRVGLVLLKHALGSPEKVKACQGQYETIERLRSLSPKIMQEAFLVQEVVELPVTERQIEREHLIQLRRWQETRGELQCRSPPRLHGAKAILDAEPGPRPALQPSPSIRLPLDAPLPGSKAKPKPPKQAQKEQRKQMKGRGQLEKPPAPNQAMVVAAAGDACPPQHVPPKDSAPKDSAPQDLAPQVSAHHRSQESLTSQESEDTYL

SEQ ID NO: 66528 - protein, 420 aa, Homo sapiens
MLNNWDKWMAKKHKKIRLRCQKGIPPSLRGRAWQYLSGGKVKLQQNPGKFDELDMSPGDPKWLDVIERDLHRQFPFHEMFVSRGGHGQQDLFRVLKAYTLYRPEEGYCQAQAPIAAVLLMHMPAEQAFWCLVQICEKYLPGYYSEKLEAIQLDGEILFSLLQKVSPVAHKHLSRQKIDPLLYMTEWFMCAFSRTLPWSSVLRVWDMFFCEGVKIIFRVGLVLLKHALGSPEKVKACQGQYETIERLRSLSPKIMQEAFLVQEVVELPVTERQIEREHLIQLRRWQETRGELQCRSPPRLHGAKAILDAEPGPRPALQPSPSIRLPLDAPLPGSKAKPKPPKQAQKEQRKQMKGRGQLEKPPAPNQAMVVAAAGDACPPQHVPPKDSAPKDSAPQDLAPQVSAHHRSQESLTSQESEDTYL

SEQ ID NO: 66529 - protein, 515 aa, Homo sapiens
MAKSNGENGPRAPAAGESLSGTRESLAQGPDAATTDELSSLGSDSEANGFAERRIDKFGFIVGSQGAEGAPCPLLHRLEEVPLEVLRQRESKWLDMLNNWDKWMAKKHKKIRLRCQKGIPPSLRGRAWQYLSGGKVKLQQNPGKFDELDMSPGDPKWLDVIERDLHRQFPFHEMFVSRGGHGQQDLFRVLKAYTLYRPEEGYCQAQAPIAAVLLMHMPAEQAFWCLVQICEKYLPGYYSEKLEAIQLDGEILFSLLQKVSPVAHKHLSRQKIDPLLYMTEWFMCAFSRTLPWSSVLRVWDMFFCEGVKIIFRVGLVLLKHALGSPEKVKACQGQYETIERLRSLSPKIMQEAFLVQEVVELPVTERQIEREHLIQLRRWQETRGELQCRSPPRLHGAKAILDAEPGPRPALQPSPSIRLPLDAPLPGSKAKPKPPKQAQKEQRKQMKGRGQLEKPPAPNQAMVVAAAGDACPPQHVPPKDSAPKDSAPQDLAPQVSAHHRSQESLTSQESEDTYL

SEQ ID NO: 66530 - protein, 808 aa, Homo sapiens
METGTAPLVAPPRRHGAPAAPSPPPRGSRAGPVVVVAPGPPVTTATSAPVTLVAPGEARPAWVPGSAETSAPAPAPAPAPAPAVTGSTVVVLTLEASPEAPKPQLPSGPESPEPAAVAGVETSRALAAGADSPKTEEARPSPAPGPGTPTGTPTRTPSRTAPGALTAKPPLAPKPGTTVASGVTARSASGQVTGGHGAAAATSASAGQAPEDPSGPGTGPSGTCEAPVAVVTVTPAPEPAENSQDLGSTSSLGPGISGPRGQAPDTLSYLDSVSLMSGTLESLADDVSSMGSDSEINGLALRKTDKYGFLGGSQYSGSLESSIPVDVARQRELKWLDMFSNWDKWLSRRFQKVKLRCRKGIPSSLRAKAWQYLSNSKELLEQNPGKFEELERAPGDPKWLDVIEKDLHRQFPFHEMFAARGGHGQQDLYRILKAYTIYRPDEGYCQAQAPVAAVLLMHMPAEQAFWCLVQICDKYLPGYYSAGLEAIQLDGEIFFALLRRASPLAHRHLRRQRIDPVLYMTEWFMCIFARTLPWASVLRVWDMFFCEGVKIIFRVALVLLRHTLGSVEKLRSCQGMYETMEQLRNLPQQCMQEDFLVHEVTNLPVTEALIERENAAQLKKWRETRGELQYRPSRRLHGSRAIHEERRRQQPPLGPSSSLLSLPGLKSRGSRAAGGAPSPPPPVRRASAGPAPGPVVTAEGLHPSLPSPTGNSTPLGSSKETRKQEKERQKQEKERQKQEKEREKERQKQEKEREKQEKEREKQEKERQKQEKKAQGRKLSLRRKADGPPGPHDGGDRPSAEARQDAYF

SEQ ID NO: 66531 - protein, 446 aa, Homo sapiens
MAQALGEDLVQPPELQDDSSSLGSDSELSGPGPYRQADRYGFIGGSSAEPGPGHPPADLIRQREMKWVEMTSHWEKTMSRRYKKVKMQCRKGIPSALRARCWPLLCGAHVCQKNSPGTYQELAEAPGDPQWMETIGRDLHRQFPLHEMFVSPQGHGQQGLLQVLKAYTLYRPEQGYCQAQGPVAAVLLMHLPPEEAFWCLVQICEVYLPGYYGPHMEAVRLDAEVFMALLRRLLPHVHKHLQQVGVGPLLYLPEWFLCLFARSLPFPTVLRVWDAFLSEGARVLFRVGLTLVRLALGTAEQRGACPGLLETLGALRAIPPAQLQEEAFMSQVHSVVLSERDLQREIKAQLAQLPDSAPGPPPRPQVRLAGAQAIFEAQQLAGVRRGAKPEVPRIVVQPPEEPRPPRRKPQTRGKTFHGLLTRARGPPIEGPPRPQRGSTSFLDTRF

SEQ ID NO: 66532 - protein, 446 aa, Homo sapiens; identical to SEQ ID NO: 66531

SEQ ID NO: 66533 - protein, 682 aa, Homo sapiens
MCPGLYPYSSLLEYGRSMIIYEQEGVYIHSSCGKTNDQDGLISGILRVLEKDAEVIVDWRPLDDALDSSSILYARKDSSSVVEWTQAPKERGHRGSEHLNSYEAEWDMVNTVSFKRKPHTNGDAPSHRNGKSKWSFLFSLTDLKSIKQNKEGMGWSYLVFCLKDDVVLPALHFHQGDSKLLIESLEKYVVLCESPQDKRTLLVNCQNKSLSQSFENLLDEPAYGLIQKIKKDPYTATMIGFSKVTNYIFDSLRGSDPSTHQRPPSEMADFLSDAIPGLKINQQEEPGFEVITRIDLGERPVVQRREPVSLEEWTKNIDSEGRILNVDNMKQMIFRGGLSHALRKQAWKFLLGYFPWDSTKEERTQLQKQKTDEYFRMKLQWKSISQEQEKRNSRLRDYRSLIEKDVNRTDRTNKFYEGQDNPGLILLHDILMTYCMYDFDLGYVQGMSDLLSPLLYVMENEVDAFWCFASYMDQMHQNFEEQMQGMKTQLIQLSTLLRLLDSGFCSYLESQDSGYLYFCFRWLLIRFKREFSFLDILRLWEVMWTELPCTNFHLLLCCAILESEKQQIMEKHYGFNEILKHINELSMKIDVEDILCKAEAISLQMVKCKELPQAVCEILGLQGSEVTTPDSDVGEDENVVMTPCPTSAFQSNALPTLSASGARNDSPTQIPVSSDVCRLTPA

SEQ ID NO: 66534 - protein, 445 aa, Homo sapiens
MIGFSKVTNYIFDSLRGSDPSTHQRPPSEMADFLSDAIPGLKINQQEEPGFEVITRIDLGERPVVQRREPVSLEEWTKNIDSEGRILNVDNMKQMIFRGGLSHALRKQAWKFLLGYFPWDSTKEERTQLQKQKTDEYFRMKLQWKSISQEQEKRNSRLRDYRSLIEKDVNRTDRTNKFYEGQDNPGLILLHDILMTYCMYDFDLGYVQGMSDLLSPLLYVMENEVDAFWCFASYMDQMHQNFEEQMQGMKTQLIQLSTLLRLLDSGFCSYLESQDSGYLYFCFRWLLIRFKREFSFLDILRLWEVMWTELPCTNFHLLLCCAILESEKQQIMEKHYGFNEILKHINELSMKIDVEDILCKAEAISLQMVKCKELPQAVCEILGLQGSEVTTPDSDVGEDENVVMTPCPTSAFQSNALPTLSASGARNDSPTQIPVSSDVCRLTPA

SEQ ID NO: 66535 - protein, 674 aa, Homo sapiens
MAAAGVVSGKIIYEQEGVYIHSSCGKTNDQDGLISGILRVLEKDAEVIVDWRPLDDALDSSSILYARKDSSSVVEWTQAPKERGHRGSEHLNSYEAEWDMVNTVSFKRKPHTNGDAPSHRNGKSKWSFLFSLTDLKSIKQNKEGMGWSYLVFCLKDDVVLPALHFHQGDSKLLIESLEKYVVLCESPQDKRTLLVNCQNKSLSQSFENLLDEPAYGLIQKIKKDPYTATMIGFSKVTNYIFDSLRGSDPSTHQRPPSEMADFLSDAIPGLKINQQEEPGFEVITRIDLGERPVVQRREPVSLEEWTKNIDSEGRILNVDNMKQMIFRGGLSHALRKQAWKFLLGYFPWDSTKEERTQLQKQKTDEYFRMKLQWKSISQEQEKRNSRLRDYRSLIEKDVNRTDRTNKFYEGQDNPGLILLHDILMTYCMYDFDLGYVQGMSDLLSPLLYVMENEVDAFWCFASYMDQMHQNFEEQMQGMKTQLIQLSTLLRLLDSGFCSYLESQDSGYLYFCFRWLLIRFKREFSFLDILRLWEVMWTELPCTNFHLLLCCAILESEKQQIMEKHYGFNEILKHINELSMKIDVEDILCKAEAISLQMVKCKELPQAVCEILGLQGSEVTTPDSDVGEDENVVMTPCPTSAFQSNALPTLSASGARNDSPTQIPVSSDVCRLTPA

SEQ ID NO: 66536 - protein, 691 aa, Homo sapiens
MAAAGVVSGKIIYEQEGVYIHSSCGKTNDQDGLISGILRVLEKDAEVIVDWRPLDDALDSSSILYARKDSSSVVEWTQAPKERGHRGSEHLNSYEAEWDMVNTVSFKRKPHTNGDAPSHRNGKSKWSFLFSLTDLKSIKQNKEGMGWSYLVFCLKDDVVLPALHFHQGDSKLLIESLEKYVVLCESPQDKRTLLVNCQNKSLSQSFENLLDEPAYGLIQAGLLDRRKLLWAIHHWKKIKKDPYTATMIGFSKVTNYIFDSLRGSDPSTHQRPPSEMADFLSDAIPGLKINQQEEPGFEVITRIDLGERPVVQRREPVSLEEWTKNIDSEGRILNVDNMKQMIFRGGLSHALRKQAWKFLLGYFPWDSTKEERTQLQKQKTDEYFRMKLQWKSISQEQEKRNSRLRDYRSLIEKDVNRTDRTNKFYEGQDNPGLILLHDILMTYCMYDFDLGYVQGMSDLLSPLLYVMENEVDAFWCFASYMDQMHQNFEEQMQGMKTQLIQLSTLLRLLDSGFCSYLESQDSGYLYFCFRWLLIRFKREFSFLDILRLWEVMWTELPCTNFHLLLCCAILESEKQQIMEKHYGFNEILKHINELSMKIDVEDILCKAEAISLQMVKCKELPQAVCEILGLQGSEVTTPDSDVGEDENVVMTPCPTSAFQSNALPTLSASGARNDSPTQIPVSSDVCRLTPA

SEQ ID NO: 66537 - protein, 710 aa, Homo sapiens
MHNIRGNKQAQGTGHEPPGEDSPQSGEPQREEQPLASDASTPGREPEDSPKPAPKPSLTISFAQKAKRQNNTFPFFSEGITRNRTAQEKVAALEQQVLMLTKELKSQKELVKILHKALEAAQQEKRASSAYLAAAEDKDRLELVRHKVRQIAELGRRVEALEQERESLAHTASLREQQVQELQQHVQLLMDKNHAKQQVICKLSEKVTQDFTHPPDQSPLRPDAANRDFLSQQGKIEHLKDDMEAYRTQNCFLNSEIHQVTKIWRKVAEKEKALLTKCAYLQARNCQVESKYLAGLRRLQEALGDEASECSELLRQLVQEALQWEAGEASSDSIELSPISKYDEYGFLTVPDYEVEDLKLLAKIQALESRSHHLLGLEAVDRPLRERWAALGDLVPSAELKQLLRAGVPREHRPRVWRWLVHLRVQHLHTPGCYQELLSRGQAREHPAARQIELDLNRTFPNNKHFTCPTSSFPDKLRRVLLAFSWQNPTIGYCQGLNRLAAIALLVLEEEESAFWCLVAIVETIMPADYYCNTLTASQVDQRVLQDLLSEKLPRLMAHLGQHHVDLSLVTFNWFLVVFADSLISNILLRVWDAFLYEGTKVVFRYALAIFKYNEKEILRLQNGLEIYQYLRFFTKTISNSRKLMNIAFNDMNPFRMKQLRQLRMVHRERLEAELRELEQLKAEYLERRASRRRAVSEGCASEDEVEGEA

SEQ ID NO: 66538 - protein, 468 aa, Homo sapiens
MEAYRTQNCFLNSEIHQVTKIWRKVAEKEKALLTKCAYLQARNCQVESKYLAGLRRLQEALGDEASECSELLRQLVQEALQWEAGEASSDSIELSPISKYDEYGFLTVPDYEVEDLKLLAKIQALESRSHHLLGLEAVDRPLRERWAALGDLVPSAELKQLLRAGVPREHRPRVWRWLVHLRVQHLHTPGCYQELLSRGQAREHPAARQIELDLNRTFPNNKHFTCPTSSFPDKLRRVLLAFSWQNPTIGYCQGLNRLAAIALLVLEEEESAFWCLVAIVETIMPADYYCNTLTASQVDQRVLQDLLSEKLPRLMAHLGQHHVDLSLVTFNWFLVVFADSLISNILLRVWDAFLYEGTKVVFRYALAIFKYNEKEILRLQNGLEIYQYLRFFTKTISNSRKLMNIAFNDMNPFRMKQLRQLRMVHRERLEAELRELEQLKAEYLERRASRRRAVSEGCASEDEVEGEA

SEQ ID NO: 66539 - protein, 860 aa, Homo sapiens
MEGAGENAPESSSSAPGSEESARDPQVPPPEEESGDCARSLEAVPKKLCGYLSKFGGKGPIRGWKSRWFFYDERKCQLYYSRTAQDANPLDSIDLSSAVFDCKADAEEGIFEIKTPSRVITLKAATKQAMLYWLQQLQMKRWEFHNSPPAPPATPDAALAGNGPVLHLELGQEEAELEEFLCPVKTPPGLVGVAAALQPFPALQNISLKHLGTEIQNTMHNIRGNKQAQGTGHEPPGEDSPQSGEPQREEQPLASDASTPGREPEDSPKPAPKPSLTISFAQKAKRQNNTFPFFSEGITRNRTAQEKVAALEQQVLMLTKELKSQKELVKILHKALEAAQQEKRASSAYLAAAEDKDRLELVRHKVRQIAELGRRVEALEQERESLAHTASLREQQVQELQQHVQLLMDKNHAKQQVICKLSEKVTQDFTHPPDQSPLRPDAANRDFLSQQGKIEHLKDDMEAYRTQNCFLNSEIHQVTKIWRKVAEKEKALLTKCAYLQARNCQVESKYLAGLRRLQEALGDEASECSELLRQLVQEALQWEAGEASSDSIELSPISKYDEYGFLTVPDYEVEDLKLLAKIQALESRSHHLLGLEAVDRPLRERWAALGDLVPSAELKQLLRAGVPREHRPRVWRWLVHLRVQHLHTPGCYQELLSRGQAREHPAARQIELDLNRTFPNNKHFTCPTSSFPDKLRRVLLAFSWQNPTIGYCQGLNRLAAIALLVLEEEESAFWCLVAIVETIMPADYYCNTLTASQVDQRVLQDLLSEKLPRLMAHLGQHHVDLSLVTFNWFLVVFADSLISNILLRVWDAFLYEGTKVVFRYALAIFKYNEKEILRLQNGLEIYQYLRFFTKTISNSR

SEQ ID NO: 66540 - protein, 917 aa, Homo sapiens
MEGAGENAPESSSSAPGSEESARDPQVPPPEEESGDCARSLEAVPKKLCGYLSKFGGKGPIRGWKSRWFFYDERKCQLYYSRTAQDANPLDSIDLSSAVFDCKADAEEGIFEIKTPSRVITLKAATKQAMLYWLQQLQMKRWEFHNSPPAPPATPDAALAGNGPVLHLELGQEEAELEEFLCPVKTPPGLVGVAAALQPFPALQNISLKHLGTEIQNTMHNIRGNKQAQGTGHEPPGEDSPQSGEPQREEQPLASDASTPGREPEDSPKPAPKPSLTISFAQKAKRQNNTFPFFSEGITRNRTAQEKVAALEQQVLMLTKELKSQKELVKILHKALEAAQQEKRASSAYLAAAEDKDRLELVRHKVRQIAELGRRVEALEQERESLAHTASLREQQVQELQQHVQLLMDKNHAKQQVICKLSEKVTQDFTHPPDQSPLRPDAANRDFLSQQGKIEHLKDDMEAYRTQNCFLNSEIHQVTKIWRKVAEKEKALLTKCAYLQARNCQVESKYLAGLRRLQEALGDEASECSELLRQLVQEALQWEAGEASSDSIELSPISKYDEYGFLTVPDYEVEDLKLLAKIQALESRSHHLLGLEAVDRPLRERWAALGDLVPSAELKQLLRAGVPREHRPRVWRWLVHLRVQHLHTPGCYQELLSRGQAREHPAARQIELDLNRTFPNNKHFTCPTSSFPDKLRRVLLAFSWQNPTIGYCQGLNRLAAIALLVLEEEESAFWCLVAIVETIMPADYYCNTLTASQVDQRVLQDLLSEKLPRLMAHLGQHHVDLSLVTFNWFLVVFADSLISNILLRVWDAFLYEGTKYNEKEILRLQNGLEIYQYLRFFTKTISNSRKLMNIAFNDMNPFRMKQLRQLRMVHRERLEAELRELEQLKAEYLERRASRRRAVSEGCASEDEVEGEA

SEQ ID NO: 66541 - protein, 428 aa, Homo sapiens
MPSGCYVPRSEPRLLPAPPPAGARVGALRSAQGDGPTSGHWDGGAEKADFNAKRKKKVAEIHQALNSDPTDVAALRRMAISEGGLLTDEIRRKVWPKLLNVNANDPPPISGKNLRQMSKDYQQVLLDVRRSLRRFPPGMPEEQREGLQEELIDIILLILERNPQLHYYQGYHDIVVTFLLVVGERLATSLVEKLSTHHLRDFMDPTMDNTKHILNYLMPIIDQVNPELHDFMQSAEVGTIFALSWLITWFGHVLSDFRHVVRLYDFFLACHPLMPIYFAAVIVLYREQEVLDCDCDMASVHHLLSQIPQDLPYETLISRAGDLFVQFPPSELAREAAAQQQAERTAASTFKDFELASAQQRPDMVLRQRFRGLLRPEDRTKDVLTKPRTNRFVKLAVMGLTVALGAAALAVVKSALEWAPKFQLQLFP

SEQ ID NO: 66542 - protein, 403 aa, Homo sapiens
MALRSAQGDGPTSGHWDGGAEKADFNAKRKKKVAEIHQALNSDPTDVAALRRMAISEGGLLTDEIRRKVWPKLLNVNANDPPPISGKNLRQMSKDYQQVLLDVRRSLRRFPPGMPEEQREGLQEELIDIILLILERNPQLHYYQGYHDIVVTFLLVVGERLATSLVEKLSTHHLRDFMDPTMDNTKHILNYLMPIIDQVNPELHDFMQSAEVGTIFALSWLITWFGHVLSDFRHVVRLYDFFLACHPLMPIYFAAVIVLYREQEVLDCDCDMASVHHLLSQIPQDLPYETLISRAGDLFVQFPPSELAREAAAQQQAERTAASTFKDFELASAQQRPDMVLRQRFRGLLRPEDRTKDVLTKPRTNRFVKLAVMGLTVALGAAALAVVKSALEWAPKFQLQLFP

SEQ ID NO: 66543 - protein, 403 aa, Homo sapiens; identical to SEQ ID NO: 66542

SEQ ID NO: 66544 - protein, 553 aa, Homo sapiens; identical to SEQ ID NO: 66526

SEQ ID NO: 66545 - protein, 559 aa, Homo sapiens
MDSPGYNCFVDKDKMDAAIQDLGPKELSCTELQELKQLARQGYWAQSHALRGKVYQRLIRDIPCRTVTPDASVYSDIVGKIVGKHSSSCLPLPEFVDNTQVPSYCLNARGEGAVRKILLCLANQFPDISFCPALPAVVALLLHYSIDEAECFEKACRILACNDPGRRLIDQSFLAFESSCMTFGDLVNKYCQAAHKLMVAVSEDVLQVYADWQRWLFGELPLCYFARVFDVFLVEGYKVLYRVALAILKFFHKVRAGQPLESDSVKQDIRTFVRDIAKTVSPEKLLEKAFAIRLFSRKEIQLLQMANEKALKQKGITVKQKSVSLSKRQFVHLAVHAENFRSEIVSVREMRDIWSWVPERFALCQPLLLFSSLQHGYSLARFYFQCEGHEPTLLLIKTTQKEVCGAYLSTDWSERNKFGGKLGFFGTGECFVFRLQPEVQRYEWVVIKHPELTKPPPLMAAEPTAPLSHSASSDPADRLSPFLAARHFNLPSKTESMFMAGGSDCLIVGGGGGQALYIDGDLNRGRTSHCDTFNNQPLCSENFLIAAVEAWGFQDPDTQ

SEQ ID NO: 66546 - protein, 688 aa, Homo sapiens
MATASGASDLSGSGAPPPGVGAQAAAAAEEEEREVVRVRVKKCESFLPPEFRSFAVDPQITSLDVLQHILIRAFDLSGKKNFGISYLGRDRLGQEVYLSLLSDWDLSTAFATASKPYLQLRVDIRPSEDSPLLEDWDIISPKDVIGSDVLLAEKRSSLTTAALPFTQSILTQVGRTLSKVQQVLSWSYGEDVKPFKPPLSDAEFHTYLNHEGQLSRPEELRLRIYHGGVEPSLRKVVWRYLLNVYPDGLTGRERMDYMKRKSREYEQLKSEWAQRANPEDLEFIRSTVLKDVLRTDRAHPYYAGPEDGPHLRALHDLLTTYAVTHPQVSYCQGMSDLASPILAVMDHEGHAFVCFCGIMKRLAANFHPDGRAMATKFAHLKLLLRHADPDFYQYLQEAGADDLFFCYRWLLLELKREFAFDDALRMLEVTWSSLPPDPPEHEVELVGPPSQVADAGFGGHRGWPVRQRHMLRPAGGGGSTFEDAVDHLATASQGPGGGGRLLRQASLDGLQQLRDNMGSRRDPLVQLPHPAALISSKSLSEPLLNSPDPLLSSFSHPDSPSSSSPPSTQEASPTGDMAVGSPLMQEVGSPKDPGKSLPPVPPMGLPPPQEFGRGNPFMLFLCLAILLEHRDHIMRNGLDYNELAMHFDRLVRKHHLGRVLRRARALFADYLQSEVWDSEEGAEATAAS

SEQ ID NO: 66547 - protein, 230 aa, Homo sapiens
MATASGASDLSGSGAPPPGVGAQAAAAAEEEEREVVRVRVKHGDGAPGGLPHVFSPQKCESFLPPEFRSFAVDPQITSLDVLQHILIRAFDLSGKKNFGISYLGRDRLGQEVYLSLLSDWDLSTAFATASKPYLQLRVDIRPSEDSPLLEDWDIISPKDVIGSDVLLAEKRSSLTTAALPFTQSILTQVGRTLSKVQQVLSWSYGEDVKPFKPPLSDAEFHTYLNHEGQL

SEQ ID NO: 66548 - protein, 100 aa, Homo sapiens
MATASGASDLSGSGAPPPGVGAQAAAAAEEEEREVVRVRVKKCESFLPPEFRSFAVDPQITSLDVLQHILIRAFDLSGPIARRLGHNQPQRCHWLRRVAG

SEQ ID NO: 66549 - protein, 434 aa, Homo sapiens
MDYMKRKSREYEQLKSEWAQRANPEDLEFIRSTVLKDVLRTDRAHPYYAGPEDGPHLRALHDLLTTYAVTHPQVSYCQGMSDLASPILAVMDHEGHAFVCFCGIMKRLAANFHPDGRAMATKFAHLKLLLRHADPDFYQYLQEAGADDLFFCYRWLLLELKREFAFDDALRMLEVTWSSLPPDPPEHEVELVGPPSQVADAGFGGHRGWPVRQRHMLRPAGGGGSTFEDAVDHLATASQGPGGGGRLLRQASLDGLQQLRDNMGSRRDPLVQLPHPAALISSKSLSEPLLNSPDPLLSSFSHPDSPSSSSPPSTQEASPTGDMAVGSPLMQEVGSPKDPGKSLPPVPPMGLPPPQEFGRGNPFMLFLCLAILLEHRDHIMRNGLDYNELAMHFDRLVRKHHLGRVLRRARALFADYLQSEVWDSEEGAEATAAS

SEQ ID NO: 66550 - protein, 291 aa, Homo sapiens
MDVVEVAGSWWAQEREDIIMKYEKGHRAGLPEDKGPKPFRSYNNNVDHLGIVHETELPPLTAREAKQIRREISRKSKWVDMLGDWEKYKSSRKLIDRAYKGMPMNIRGPMWSVLLNIEEMKLKNPGRYQIMKEKGKRSSEHIQRIDRDVSGTLRKHIFFRDRYGTKQRELLHILLAYEEYNPEVGYCRDLSHIAALFLLYLPEEDAFWALVQLLASERHSLQGFHSPNGGTVQGLQDQQEHVVATSQPKTMGHQSASRRRPGVARGHVFATGSLIPGPGMRTLCSSILGPL

SEQ ID NO: 66551 - protein, 549 aa, Homo sapiens
MDVVEVAGSWWAQEREDIIMKYEKGHRAGLPEDKGPKPFRSYNNNVDHLGIVHETELPPLTAREAKQIRREISRKSKWVDMLGDWEKYKSSRKLIDRAYKGMPMNIRGPMWSVLLNIEEMKLKNPGRYQIMKEKGKRSSEHIQRIDRDVSGTLRKHIFFRDRYGTKQRELLHILLAYEEYNPEVGYCRDLSHIAALFLLYLPEEDAFWALVQLLASERHSLQGFHSPNGGTVQGLQDQQEHVVATSQPKTMGHQDKKDLCGQCSPLGCLIRILIDGISLGLTLRLWDVYLVEGEQALMPITRIAFKVQQKRLTKTSRCGPWARFCNRFVDTWARDEDTVLKHLRASMKKLTRKQGDLPPPAKPEQGSSASRPVPASRGGKTLCKGDRQAPPGPPARFPRPIWSASPPRAPRSSTPCPGGAVREDTYPVGTQGVPSPALAQGGPQGSWRFLQWNSMPRLPTDLDVEGPWFRHYDFRQSCWVRAISQEDQLAPCWQAEHPAERVRSAFAAPSTDSDQGTPFRARDEQPCAPTSGPCLCGLHLESSQFPPGF

SEQ ID NO: 66552 - protein, 299 aa, Homo sapiens
MGHQDKKDLCGQCSPLGCLIRILIDGISLGLTLRLWDVYLVEGEQALMPITRIAFKVQQKRLTKTSRCGPWARFCNRFVDTWARDEDTVLKHLRASMKKLTRKQGDLPPPAKPEQGSSASRPVPASRGGKTLCKGDRQAPPGPPARFPRPIWSASPPRAPRSSTPCPGGAVREDTYPVGTQGVPSPALAQGGPQGSWRFLQWNSMPRLPTDLDVEGPWFRHYDFRQSCWVRAISQEDQLAPCWQAEHPAERVRSAFAAPSTDSDQGTPFRARDEQPCAPTSGPCLCGLHLESSQFPPGF

SEQ ID NO: 66553 - protein, 527 aa, Homo sapiens
MDVVEVAGSWWAQEREDIIMKYEKGHRAGLPEDKGPKPFRSYNNNVDHLGIVHETELPPLTAREAKQIRREISRKSKWVDMLGDWEKYKSSRKLIDRAYKGMPMNIRGPMWSVLLNIEEMKLKNPGRYQIMKEKGKRSSEHIQRIDRDVSGTLRKHIFFRDRYGTKQRELLHILLAYEEYNPEVGYCRDLSHIAALFLLYLPEEDAFWALVQLLASERHSLQGFHSPNGGTVQGLQDQQEHVVATSQPKTMGHQISLGLTLRLWDVYLVEGEQALMPITRIAFKVQQKRLTKTSRCGPWARFCNRFVDTWARDEDTVLKHLRASMKKLTRKQGDLPPPAKPEQGSSASRPVPASRGGKTLCKGDRQAPPGPPARFPRPIWSASPPRAPRSSTPCPGGAVREDTYPVGTQGVPSPALAQGGPQGSWRFLQWNSMPRLPTDLDVEGPWFRHYDFRQSCWVRAISQEDQLAPCWQAEHPAERVRSAFAAPSTDSDQGTPFRARDEQPCAPTSGPCLCGLHLESSQFPPGF

SEQ ID NO: 66554 - protein, 549 aa, Homo sapiens; identical to SEQ ID NO: 66551

SEQ ID NO: 66555 - protein, 527 aa, Homo sapiens
MDVVEVAGSWWAQEREDIIMKYEKGHRAGLPEDKGPKPFRSYNNNVDHLGIVHETELPPLTAREAKQIRREISRKSKWVDMLGDWEKYKSSRKLIDRAYKGMPMNIRGPMWSVLLNIEEMKLKNPGRYQIMKEKGKRSSEHIQRIDRDISGTLRKHMFFRDRYGTKQRELLHILLAYEEYNPEVGYCRDLSHIAALFLLYFPEEDAFWALVQLLASERHSLQGFHSPNGGTVQGLQDQQEHVVATSQSKTMGHQISLGLTLRLWDVYLVEGEQALMPITRIAFKVQQKRLTKTSRCGPWARFCNRFVDTWARDEDTVLKHLRASMKKLTRKQGDLPPPAKPEQGSSASRPVPASRGGKTLCKGDRQAPPGPPARFPRPIWSASPPRAPRSSTPCPGGAVREDTYPVGTQGVPSPALAQGGPQGSWRFLQWNSMPRLPTDLDVEGPWFRHYDFRQSCWVRAISQEDQLAPCWQAEHPAERVRSAFAAPSTDSDQGTPFRARDEQQYAPTSGPCLCGLHLESSQFPPGF

SEQ ID NO: 66556 - protein, 549 aa, Homo sapiens
MDVVEVAGSWWAQEREDIIMKYEKGHRAGLPEDKGPKPFRSYNNNVDHLGIVHETELPPLTAREAKQIRREISRKSKWVDMLGDWEKYKSSRKLIDRAYKGMPMNIRGPMWSVLLNIEEMKLKNPGRYQIMKEKGKRSSEHIQRIDRDISGTLRKHMFFRDRYGTKQRELLHILLAYEEYNPEVGYCRDLSHIAALFLLYFPEEDAFWALVQLLASERHSLQGFHSPNGGTVQGLQDQQEHVVATSQSKTMGHQDKKDLCGQCSPLGCLIRILIDGISLGLTLRLWDVYLVEGEQALMPITRIAFKVQQKRLTKTSRCGPWARFCNRFVDTWARDEDTVLKHLRASMKKLTRKQGDLPPPAKPEQGSSASRPVPASRGGKTLCKGDRQAPPGPPARFPRPIWSASPPRAPRSSTPCPGGAVREDTYPVGTQGVPSPALAQGGPQGSWRFLQWNSMPRLPTDLDVEGPWFRHYDFRQSCWVRAISQEDQLAPCWQAEHPAERVRSAFAAPSTDSDQGTPFRARDEQQYAPTSGPCLCGLHLESSQFPPGF

SEQ ID NO: 66557 - protein, 549 aa, Homo sapiens; identical to SEQ ID NO: 66556

SEQ ID NO: 66558 - protein, 549 aa, Homo sapiens
MDVVEVAGSWWAQEREDIIMKYEKGHRAGLPEDKGPKPFRSYNNNVDHLGIVHETELPPLTAREAKQIRREISRKSKWVDMLGDWEKYKSSRKLIDRAYKGMPMNIRGPMWSVLLNIEEMKLKNPGRYQIMKEKGKRSSEHIQRIDRDISGTLRKHMFFRDRYGTKQRELLHILLAYEEYNPEVGYCRDLSHIAALFLLYLPEEDAFWALVQLLASERHSLQGFHSPNGGTVQGLQDQQEHVVATSQSKTMGHQDKKDLCGQCSPLGCLIRILIDGISLGLTLRLWDVYLVEGEQALMPITRIAFKVQQKRLTKTSRCGPWARFCNRFVDTWARDEDTVLKHLRASMKKLTRKQGDLPPPAKPEQGSSASRPVPASRGGKTLCKGDRQAPPGPPAWFPRPIWSASPPRAPRSSTPCPGGAVREDTYPVGTQGVPSPALAQGGPQGSWRFLQWNSMPRLPTDLDVEGPWFRHYDFRQSCWVRAISQEDQLAPCWQAEHPAERVRSAFAAPSTDSDQGTPFRARDEQQCAPTSGPCLCGLHLESSQFPPGF

SEQ ID NO: 66559 - protein, 527 aa, Homo sapiens
MDVVEVAGSWWAQEREDIIMKYEKGHRAGLPEDKGPKPFRSYNNNVDHLGIVHETELPPLTAREAKQIRREISRKSKWVDMLGDWEKYKSSRKLIDRAYKGMPMNIRGPMWSVLLNIEEMKLKNPGRYQIMKEKGKRSSEHIQRIDRDISGTLRKHMFFRDRYGTKQRELLHILLAYEEYNPEVGYCRDLSHIAALFLLYLPEEDAFWALVQLLASERHSLQGFHSPNGGTVQGLQDQQEHVVATSQSKTMGHQISLGLTLRLWDVYLVEGEQALMPITRIAFKVQQKRLTKTSRCGPWARFCNRFVDTWARDEDTVLKHLRASMKKLTRKQGDLPPPAKPEQGSSASRPVPASRGGKTLCKGDRQAPPGPPAWFPRPIWSASPPRAPRSSTPCPGGAVREDTYPVGTQGVPSPALAQGGPQGSWRFLQWNSMPRLPTDLDVEGPWFRHYDFRQSCWVRAISQEDQLAPCWQAEHPAERVRSAFAAPSTDSDQGTPFRARDEQQCAPTSGPCLCGLHLESSQFPPGF

SEQ ID NO: 66560 - protein, 549 aa, Homo sapiens; identical to SEQ ID NO: 66558

SEQ ID NO: 66561 - protein, 549 aa, Homo sapiens
MDVVEVAGSWWAQEREDIIMKYEKGHRAGLPEDKGPKPFRSYNNNVDHLGIVHETELPPLTAREAKQIRREISRKSKWVDMLGDWEKYKSSRKLIDRAYKGMPMNIRGPMWSVLLNTEEMKLKNPGRYQIMKEKGKRSSEHIQRIDRDVSGTLRKHIFFRDRYGTKQRELLHILLAYEEYNPEVGYCRDLSHIAALFLLYLPEEDAFWALVQLLASERHSLQGFHSPNGGTVQGLQDQQEHVVATSQPKTMGHQDKKDLCGQCSPLGCLIRILIDGISLGLTLRLWDVYLVEGEQALMPITRIAFKVQQKRLTKTSRCGPWARFCNRFVDTWARDEDTVLKHLRASMKKLTRKQGDLPPPAKPEQGSSASRPVPASRGGKTLCKGDRQAPPGPPARFPRPIWSASPPRAPRSSTPCPGGAVREDTYPVGTQGVPSPALAQGGPQGSWRFLQWNSMPRLPTDLDVEGPWFRHYDFRQSCWVRAISQEDQLAPCWQAEHPAERVRSAFAAPSTDSDQGTPFRARDEQPCAPTSGPCLCGLHLESSQFPPGF

SEQ ID NO: 66562 - protein, 291 aa, Homo sapiens
MDVVEVAGSWWAQEREDIIMKYEKGHRAGLPEDKGPKPFRSYNNNVDHLGIVHETELPPLTAREAKQIRREISRKSKWVDMLGDWEKYKSSRKLIDRAYKGMPMNIRGPMWSVLLNTEEMKLKNPGRYQIMKEKGKRSSEHIQRIDRDVSGTLRKHIFFRDRYGTKQRELLHILLAYEEYNPEVGYCRDLSHIAALFLLYLPEEDAFWALVQLLASERHSLQGFHSPNGGTVQGLQDQQEHVVATSQPKTMGHQSASRRRPGVARGHVFATGSLIPGPGMRTLCSSILGPL

SEQ ID NO: 66563 - protein, 299 aa, Homo sapiens; identical to SEQ ID NO: 66552

SEQ ID NO: 66564 - protein, 469 aa, Homo sapiens
MLGDWEKYKSSRKLIDRAYKGMPMNIRGPMWSVLLNTEEMKLKNPGRYQIMKEKGKRSSEHIQRIDRDVSGTLRKHIFFRDRYGTKQRELLHILLAYEEYNPEVGYCRDLSHIAALFLLYLPEEDAFWALVQLLASERHSLQGFHSPNGGTVQGLQDQQEHVVATSQPKTMGHQDKKDLCGQCSPLGCLIRILIDGISLGLTLRLWDVYLVEGEQALMPITRIAFKVQQKRLTKTSRCGPWARFCNRFVDTWARDEDTVLKHLRASMKKLTRKQGDLPPPAKPEQGSSASRPVPASRGGKTLCKGDRQAPPGPPARFPRPIWSASPPRAPRSSTPCPGGAVREDTYPVGTQGVPSPALAQGGPQGSWRFLQWNSMPRLPTDLDVEGPWFRHYDFRQSCWVRAISQEDQLAPCWQAEHPAERVRSAFAAPSTDSDQGTPFRARDEQPCAPTSGPCLCGLHLESSQFPPGF

SEQ ID NO: 66565 - protein, 549 aa, Homo sapiens
MDVVEVAGSWWAQEREDIIMKYEKGHRAGLPEDKGPKPFRSYNNNVDHLGIVHETELPPLTAREAKQIRREISRKSKWVDMLGDWEKYKSSRKLIDRAYKGMPMNIRGPMWSVLLNIEEMKLKNPGRYQIMKEKGKRSSEHIQRIDRDISGTLRKHMFFRDRYGTKQRELLHILLAYEEYNPEVGYCRDLSHIAALFLLYLPEEDAFWALVQLLASERHSLQGFHSPNGGTVQGLQDQQEHVVATSQPKTMGHQDKKDLCGQCSPLGCLIRILIDGISLGLTLRLWDVYLVEGEQALMPITRIAFKVQQKRLTKTSRCGPWARFCNRFVDTWARDEDTVLKHLRASMKKLTRKQGDLPPPAKPEQGSSASRPVPASRGGKTLCKGDRQAPPGPPARFPRPIWSASPPRAPRSSTPCPGGAVREDTYPVGTQGVPSPALAQGGPQGSWRFLQWNSMPRLPTDLDVEGPWFRHYDFRQSCWVRAISQEDQLAPCWQAEHPAERVRSAFAAPSTDSDQGTPFRARDEQQCAPTSGPCLCGLHLESSQFPPGF

SEQ ID NO: 66566 - protein, 549 aa, Homo sapiens; identical to SEQ ID NO: 66565

SEQ ID NO: 66567 - protein, 527 aa, Homo sapiens
MDVVEVAGSWWAQEREDIIMKYEKGHRAGLPEDKGPKPFRSYNNNVDHLGIVHETELPPLTAREAKQIRREISRKSKWVDMLGDWEKYKSSRKLIDRAYKGMPMNIRGPMWSVLLNIEEMKLKNPGRYQIMKEKGKRSSEHIQRIDRDISGTLRKHMFFRDRYGTKQRELLHILLAYEEYNPEVGYCRDLSHIAALFLLYLPEEDAFWALVQLLASERHSLQGFHSPNGGTVQGLQDQQEHVVATSQPKTMGHQISLGLTLRLWDVYLVEGEQALMPITRIAFKVQQKRLTKTSRCGPWARFCNRFVDTWARDEDTVLKHLRASMKKLTRKQGDLPPPAKPEQGSSASRPVPASRGGKTLCKGDRQAPPGPPARFPRPIWSASPPRAPRSSTPCPGGAVREDTYPVGTQGVPSPALAQGGPQGSWRFLQWNSMPRLPTDLDVEGPWFRHYDFRQSCWVRAISQEDQLAPCWQAEHPAERVRSAFAAPSTDSDQGTPFRARDEQQCAPTSGPCLCGLHLESSQFPPGF

SEQ ID NO: 66568 - protein, 527 aa, Homo sapiens; identical to SEQ ID NO: 66567

SEQ ID NO: 66569 - protein, 469 aa, Homo sapiens
MLGDWEKYKSSRKLIDRAYKGMPMNIRGPMWSVLLNIEEMKLKNPGRYQIMKEKGKRSSEHIQRIDRDISGTLRKHMFFRDRYGTKQRELLHILLAYEEYNPEVGYCRDLSHIAALFLLYLPEEDAFWALVQLLASERHSLQGFHSPNGGTVQGLQDQQEHVVATSQPKTMGHQDKKDLCGQCSPLGCLIRILIDGISLGLTLRLWDVYLVEGEQALMPITRIAFKVQQKRLTKTSRCGPWARFCNRFVDTWARDEDTVLKHLRASMKKLTRKQGDLPPPAKPEQGSSASRPVPASRGGKTLCKGDRQAPPGPPARFPRPIWSASPPRAPRSSTPCPGGAVREDTYPVGTQGVPSPALAQGGPQGSWRFLQWNSMPRLPTDLDVEGPWFRHYDFRQSCWVRAISQEDQLAPCWQAEHPAERVRSAFAAPSTDSDQGTPFRARDEQQCAPTSGPCLCGLHLESSQFPPGF

SEQ ID NO: 66570 - protein, 469 aa, Homo sapiens
MLGDWEKYKSSRKLIDRAYKGMPMNIRGPMWSVLLNIEEMKLKNPGRYQIMKEKGKRSSEHIQRIDRDISGTLRKHMFFRDRYGTKQRELLHILLAYEEYNPEVGYCRDLSHIAALFLLYLPEEDAFWALVQLLASERHSLQGFHSPNGGTVQGLQDQQEHVVATSQPKTMGHQDKKDLCGQCSPLGCLIRILIDGISLGLTLRLWDVYLVEGEQALMPITRIAFKVQQKRLTKTSRCGPWARFCNRFVDTWARDEDTVLKHLRASMKKLTRKQGDLPPPAKPEQGSSASRPVPASRGGKTLCKGDRQAPPGPPAWFPRPIWSASPPRAPRSSTPCPGGAVREDTYPVGTQGVPSPALAQGGPQGSWRFLQWNSMPRLPTDLDVEGPWFRHYDFRQSCWVRAISQEDQLAPCWQAEHPAERVRSAFAAPSTDSDQGTPFRARDEQQCAPTSGPCLCGLHLESSQFPPGF

SEQ ID NO: 66571 - protein, 549 aa, Homo sapiens
MDVVEVAGSWWAQEREDIIMKYEKGHQAGLPEDKGPKPFRSYNNNVDHLGIVHETELPPLTAREAKQIRREISRKSKWVDMLGDWEKYKSSRKLIDRAYKGMPMNIRGPMWSVLLNIEEMKLKNPGRYQIMKEKGKRSSEHIQRIDRDISGTLRKHMFFRDRYGTKQRELLHILLAYEEYNPEVGYCRDLSHIAALFLLYLPEEDAFWALVQLLASERHSLQGFHSPNGGTVQGLQDQQEHVVATSQPKTMGHQDKKDLCGQCSPLGCLIRILIDGISLGLTLRLWDVYLVEGEQALMPITRIAFKVQQKRLTKTSRCGPWARFCNRFVDTWARDEDTVLKHLRASMKKLTRKQGDLPPPAKPEQGSSASRPVPASRGGKTLCKGDRQAPPGPPARFPRPIWSASPPRAPRSSTPCPGGAVREDTYPVGTQGVPSPALAQGGPQGSWRFLQWNSMPRLPTDLDVEGPWFRHYDFRQSCWVRAISQEDQLAPCWQAEHPAERVRSAFAAPSTDSDQGTPFRARDEQQCAPTSGPCLCGLHLESSQFPPGF

SEQ ID NO: 66572 - protein, 469 aa, Homo sapiens; identical to SEQ ID NO: 66570

SEQ ID NO: 66573 - protein, 1235 aa, Homo sapiens
MEPPSCIQDEPFPHPLEPEPGVSAQPGPGKPSDKRFRLWYVGGSCLDHRTTLPMLPWLMAEIRRRSQKPEAGGCGAPAAREVILVLSAPFLRCVPAPGAGASGGTSPSATQPNPAVFIFEHKAQHISRFIHNSHDLTYFAYLIKAQPDDPESQMACHVFRATDPSQVPDVISSIRQLSKAAMKEDAKPSKDNEDAFYNSQKFEVLYCGKVTVTHKKAPSSLIDDCMEKFSLHEQQRLKIQGEQRGPDPGEDLADLEVVVPGSPGDCLPEEADGTDTHLGLPAGASQPALTSSRVCFPERILEDSGFDEQQEFRSRCSSVTGVQRRVHEGSQKSQPRRRHASAPSHVQPSDSEKNRTMLFQVGRFEINLISPDTKSVVLEKNFKDISSCSQGIKHVDHFGFICRESPEPGLSQYICYVFQCASESLVDEVMLTLKQAFSTAAALQSAKTQIKLCEACPMHSLHKLCERIEGLYPPRAKLVIQRHLSSLTDNEQADIFERVQKMKPVSDQEENELVILHLRQLCEAKQKTHVHIGEGPSTISNSTIPENATSSGRFKLDILKNKAKRSLTSSLENIFSRGANRMRGRLGSVDSFERSNSLASEKDYSPGDSPPGTPPASPPSSAWQTFPEEDSDSPQFRRRAHTFSHPPSSTKRKLNLQDGRAQGVRSPLLRQSSSEQCSDGEGRKRTSSTCSNESLSVGGTSVTPRRISWRQRIFLRVASPMNKSPSAMQQQDGLDRNELLPLSPLSPTMEEEPLVVFLSGEDDPEKIEERKKSKELRSLWRKAIHQQILLLRMEKENQKLEASRDELQSRKVKLDYEEVGACQKEVLITWDKKLLNCRAKIRCDMEDIHTLLKEGVPKSRRGEIWQFLALQYRLRHRLPNKQQPPDISYKELLKQLTAQQHAILVDLGRTFPTHPYFSVQLGPGQLSLFNLLKAYSLLDKEVGYCQGISFVAGVLLLHMSEEQAFEMLKFLMYDLGFRKQYRPDMMSLQIQMYQLSRLLHDYHRDLYNHLEENEISPSLYAAPWFLTLFASQFSLGFVARVFDIIFLQGTEVIFKVALSLLSSQETLIMECESFENIVEFLKNTLPDMNTSEMEKIITQVFEMDISKQLHAYEVEYHVLQDELQESSYSCEDSETLEKLERANSQLKRQNMDLLEKLQVAHTKIQALESNLENLLTRETKMKSLIRTLEQEKMAYQKTVEQLRKLLPADALVNCDLLLRDLNCNPNNKAKIGNKP

SEQ ID NO: 66574 - protein, 1298 aa, Homo sapiens
MEPPSCIQDEPFPHPLEPEPGVSAQPGPGKPSDKRFRLWYVGGSCLDHRTTLPMLPWLMAEIRRRSQKPEAGGCGAPAAREVILVLSAPFLRCVPAPGAGASGGTSPSATQPNPAVFIFEHKAQHISRFIHNSHDLTYFAYLIKAQPDDPESQMACHVFRATDPSQVPDVISSIRQLSKAAMKEDAKPSKDNEDAFYNSQKFEVLYCGKVTVTHKKAPSSLIDDCMEKFSLHEQQRLKIQGEQRGPDPGEDLADLEVVVPGSPGDCLPEEADGTDTHLGLPAGASQPALTSSRVCFPERILEDSGFDEQQEFRSRCSSVTGVQRRVHEGSQKSQPRRRHASAPSHVQPSDSEKNRTMLFQVGRFEINLISPDTKSVVLEKNFKDISSCSQGIKHVDHFGFICRESPEPGLSQYICYVFQCASESLVDEVMLTLKQAFSTAAALQSAKTQIKLCEACPMHSLHKLCERIEGLYPPRAKLVIQRHLSSLTDNEQADIFERVQKMKPVSDQEENELVILHLRQLCEAKQKTHVHIGEGPSTISNSTIPENATSSGRFKLDILKNKAKRSLTSSLENIFSRGANRMRGRLGSVDSFERSNSLASEKDYSPGDSPPGTPPASPPSSAWQTFPEEDSDSPQFRRRAHTFSHPPSSTKRKLNLQDGRAQGVRSPLLRQSSSEQCSNLSSVRRMYKESNSSSSLPSLHTSFSAPSFTAPSFLKSFYQNSGRLSPQYENEIRQDTASESSDGEGRKRTSSTCSNESLSVGGTSVTPRRISWRQRIFLRVASPMNKSPSAMQQQDGLDRNELLPLSPLSPTMEEEPLVVFLSGEDDPEKIEERKKSKELRSLWRKAIHQQILLLRMEKENQKLEASRDELQSRKVKLDYEEVGACQKEVLITWDKKLLNCRAKIRCDMEDIHTLLKEGVPKSRRGEIWQFLALQYRLRHRLPNKQQPPDISYKELLKQLTAQQHAILVDLGRTFPTHPYFSVQLGPGQLSLFNLLKAYSLLDKEVGYCQGISFVAGVLLLHMSEEQAFEMLKFLMYDLGFRKQYRPDMMSLQIQMYQLSRLLHDYHRDLYNHLEENEISPSLYAAPWFLTLFASQFSLGFVARVFDIIFLQGTEVIFKVALSLLSSQETLIMECESFENIVEFLKNTLPDMNTSEMEKIITQVFEMDISKQLHAYEVEYHVLQDELQESSYSCEDSETLEKLERANSQLKRQNMDLLEKLQVAHTKIQALESNLENLLTRETKMKSLIRTLEQEKMAYQKTVEQLRKLLPADALVNCDLLLRDLNCNPNNKAKIGNKP

SEQ ID NO: 66575 - protein, 282 aa, Homo sapiens
DNEQADIFERVQKMKPVSDQEENELVILHLRQLCEAKQKTHVHIGEGPSTISNSTIPENATSSGRFKLDILKNKAKRSLTSSLENIFSRGANRMRGRLGSVDSFERSNSLASEKDYSPGDSPPGTPPASPPSSAWQTFPEEDSDSPQFRRRAHTFSHPPSSTKRKLNLQDGRAQGVRSPLLRQSSSEQCSDGEGRKRTSSTCSNESLSVGGTSVTPRRISWRQRIFLRVASPMNKSPSAMQQQDGLDRNELLPLSPLSPTMEEEPLVVFLSGEDDPEKIEER

SEQ ID NO: 66576 - protein, 462 aa, Homo sapiens
MNKSPSAMQQQDGLDRNELLPLSPLSPTMEEEPLVVFLSGEDDPEKIEERKKSKELRSLWRKAIHQQILLLRMEKENQKLEGVPKSRRGEIWQFLALQYRLRHRLPNKQQPPDISYKELLKQLTAQQHAILVDLGRTFPTHPYFSVQLGPGQLSLFNLLKAYSLLDKEVGYCQGISFVAGVLLLHMSEEQAFEMLKFLMYDLGFRKQYRPDMMSLQIQMYQLSRLLHDYHRDLYNHLEENEISPSLYAAPWFLTLFASQFSLGFVARVFDIIFLQGTEVIFKVALSLLSSQETLIMECESFENIVEFLKNTLPDMNTSEMEKIITQVFEMDISKQLHAYEVEYHVLQDELQESSYSCEDSETLEKLERANSQLKRQNMDLLEKLQVAHTKIQALESNLENLLTRETKMKSLIRTLEQEKMAYQKTVEQLRKLLPADALVNCDLLLRDLNCNPNNKAKIGNKP

SEQ ID NO: 66577 - protein, 1290 aa, Homo sapiens
MEPPSCIQDEPFPHPLEPEPGVSAQPGPGKPSDKRFRLWYVGGSCLDHRTTLPMLPWLMAEIRRRSQKPEAGGCGAPAAREVILVLSAPFLRCVPAPGAGASGGTSPSATQPNPAVFIFEHKAQHISRFIHNSHDLTYFAYLIKAQPDDPESQMACHVFRATDPSQVPDVISSIRQLSKAAMKEDAKPSKDNEDAFYNSQKFEVLYCGKVTVTHKKAPSSLIDDCMEKFSLHEQQRLKIQGEQRGPDPGEDLADLEVVVPGSPGDCLPEEADGTDTHLGLPAGASQPALTSSRVCFPERILEDSGFDEQQEFRSRCSSVTGVQRRVHEGSQKSQPRRRHASAPSHVQPSDSEKNRTMLFQVGRFEINLISPDTKSVVLEKNFKDISSCSQGIKHVDHFGFICRESPEPGLSQYICYVFQCASESLVDEVMLTLKQAFSTAAALQSAKTQIKLCEACPMHSLHKLCERIEGLYPPRAKLVIQRHLSSLTDNEQADIFERVQKMKPVSDQEENELVILHLRQLCEAKQKTHVHIGEGPSTISNSTIPENATSSGRFKLDILKNKAKRSLTSSLENIFSRGANRMRGRLGSVDSFERSNSLASEKDYSPGDSPPGTPPASPPSSAWQTFPEEDSDSPQFRRRAHTFSHPPSSTKRKLNLQDGRAQGVRSPLLRQSSSEQCSNLSSVRRMYKESNSSSSLPSLHTSFSAPSFTAPSFLKSFYQNSGRLSPQYENEISDGEGRKRTSSTCSNESLSVGGTSVTPRRISWRQRIFLRVASPMNKSPSAMQQQDGLDRNELLPLSPLSPTMEEEPLVVFLSGEDDPEKIEERKKSKELRSLWRKAIHQQILLLRMEKENQKLEASRDELQSRKVKLDYEEVGACQKEVLITWDKKLLNCRAKIRCDMEDIHTLLKEGVPKSRRGEIWQFLALQYRLRHRLPNKQQPPDISYKELLKQLTAQQHAILVDLGRTFPTHPYFSVQLGPGQLSLFNLLKAYSLLDKEVGYCQGISFVAGVLLLHMSEEQAFEMLKFLMYDLGFRKQYRPDMMSLQIQMYQLSRLLHDYHRDLYNHLEENEISPSLYAAPWFLTLFASQFSLGFVARVFDIIFLQGTEVIFKVALSLLSSQETLIMECESFENIVEFLKNTLPDMNTSEMEKIITQVFEMDISKQLHAYEVEYHVLQDELQESSYSCEDSETLEKLERANSQLKRQNMDLLEKLQVAHTKIQALESNLENLLTRETKMKSLIRTLEQEKMAYQKTVEQLRKLLPADALVNCDLLLRDLNCNPNNKAKIGNKP

SEQ ID NO: 66578 - protein, 398 aa, Homo sapiens
MHFSTVTRDMEAFTASSLSSLGAAGGFPGAASPGADPYGPREPPPPPPRYDPCAAAAPGAPGPPPPPHAYPFAPAAGAATSAAAEPEGPGASCAAAAKAPVKKNAKVAGVSVQLEMKALWDEFNQLGTEMIVTKAGRRMFPTFQVKLFGMDPMADYMLLMDFVPVDDKRYRYAFHSSSWLVAGKADPATPGRVHYHPDSPAKGAQWMKQIVSFDKLKLTNNLLDDNGHIILNSMHRYQPRFHVVYVDPRKDSEKYAEENFKTFVFEETRFTAVTAYQNHRITQLKIASNPFAKGFRDCDPEDWPRNHRPGALPLMSAFARSRNPVASPTQPSGTEKGGHVLKDKEVKAETSRNTPEREVELLRDAGGCVNLGLPCPAECQPFNTQGLVAGRTAGDRLC

SEQ ID NO: 66579 - protein, 495 aa, Homo sapiens
MHFSTVTRDMEAFTASSLSSLGAAGGFPGAASPGADPYGPREPPPPPPRYDPCAAAAPGAPGPPPPPHAYPFAPAAGAATSAAAEPEGPGASCAAAAKAPVKKNAKVAGVSVQLEMKALWDEFNQLGTEMIVTKAGRRMFPTFQVKLFGMDPMADYMLLMDFVPVDDKRYRYAFHSSSWLVAGKADPATPGRVHYHPDSPAKGAQWMKQIVSFDKLKLTNNLLDDNGHIILNSMHRYQPRFHVVYVDPRKDSEKYAEENFKTFVFEETRFTAVTAYQNHRITQLKIASNPFAKGFRDCDPEDWPRNHRPGALPLMSAFARSRNPVASPTQPSGTEKDAAEARREFQRDAGGPAVLGDPAHPPQLLARVLSPSLPGAGGAGGLVPLPGAPGGRPSPPNPELRLEAPGASEPLHHHPYKYPAAAYDHYLGAKSRPAPYPLPGLRGHGYHPHAHPHHHHHPVSPAAAAAAAAAAAAAAANMYSSAGAAPPGSYDYCPR

SEQ ID NO: 66580 - protein, 372 aa, Homo sapiens
MHFSTVTRDMEAFTASSLSSLGAAGGFPGAASPGADPYGPREPPPPPPRYDPCAAAAPGAPGPPPPPHAYPFAPAAGAATSAAAEPEGPGASCAAAAKAPVKKNAKVAGVSVQLEMKALWDEFNQLGTEMIVTKAGRRMFPTFQVKLFGMDPMADYMLLMDFVPVDDKRYRYAFHSSSWLVAGKADPATPGRVHYHPDSPAKGAQWMKQIVSFDKLKLTNNLLDDNGHIILNSMHRYQPRFHVVYVDPRKDSEKYAEENFKTFVFEETRFTAVTAYQNHRITQLKIASNPFAKGFRDCDPEDWPRNHRPGALPLMSAFARSRNPVASPTQPSGTEKGLVTEGSGLQPGLLDVLLKPPSKKSESLRPPHCKDT

SEQ ID NO: 66581 - protein, 385 aa, Homo sapiens
MAAFLSAGLGILAPSETYPLPTTSSGWEPRLGSPFPSGPCTSSTGAQAVAEPTGQGPKNPRVSRVTVQLEMKPLWEEFNQLGTEMIVTKAGRRMFPPFQVKILGMDSLADYALLMDFIPLDDKRYRYAFHSSAWLVAGKADPATPGRVHFHPDSPAKGAQWMRQIVSFDKLKLTNNLLDDNGHIILNSMHRYQPRFHVVFVDPRKDSERYAQENFKSFIFTETQFTAVTAYQNHRITQLKIASNPFAKGFRESDLDSWPVAPRPLLSVPARSHSSLSPCVLKGATDREKDPNKASASTSKTPAWLHHQLLPPPEVLLAPATYRPVTYQSLYSGAPSHLGIPRTRPAPYPLPNIRADRDQGGLPLPAGLGLLSPTVVCLGPGQDSQ

SEQ ID NO: 66582 - protein, 496 aa, Homo sapiens
MSSMEEIQVELQCADLWKRFHDIGTEMIITKAGRRMFPAMRVKITGLDPHQQYYIAMDIVPVDNKRYRYVYHSSKWMVAGNADSPVPPRVYIHPDSLASGDTWMRQVVSFDKLKLTNNELDDQGHIILHSMHKYQPRVHVIRKDFSSDLSPTKPVPVGDGVKTFNFPETVFTTVTAYQNQQITRLKIDRNPFAKGFRDSGRNRTGLEAIMETYAFWRPPVRTLTFEDFTTMQKQQGGSTGTSPTTSSTGTPSPSASSHLLSPSCSPPTFHLAPNTFNVGCRESQLCNLNLSDYPPCARSNMAALQSYPGLSDSGYNRLQSGTTSATQPSETFMPQRTPSLISGIPTPPSLPGNSKMEAYGGQLGSFPTSQFQYVMQAGNAASSSSSPHMFGGSHMQQSSYNAFSLHNPYNLYGYNFPTSPRLAASPEKLSASQSTLLCSSPSNGAFGERQYLPSGMEHSMHMISPSPNNQQATNTCDGRQYGAVPGSSSQMSVHMV

SEQ ID NO: 66583 - protein, 399 aa, Homo sapiens
MHKYQPRVHVIRKDFSSDLSPTKPVPVGDGVKTFNFPETVFTTVTAYQNQQITRLKIDRNPFAKGFRDSGRNRTGLEAIMETYAFWRPPVRTLTFEDFTTMQKQQASKKTSQGYTVNQHSSETDAIELYERRVWLMERRGSTGTSPTTSSTGTPSPSASSHLLSPSCSPPTFHLAPNTFNVGCRESQLCNLNLSDYPPCARSNMAALQSYPGLSDSGYNRLQSGTTSATQPSETFMPQRTPSLISGIPTPPSLPGNSKMEAYGGQLGSFPTSQFQYVMQAGNAASSSSSPHMFGGSHMQQSSYNAFSLHNPYNLYGYNFPTSPRLAASPEKLSASQSTLLCSSPSNGAFGERQYLPSGMEHSMHMISPSPNNQQATNTCDGRQYGAVPGSSSQMSVHMV

SEQ ID NO: 66584 - protein, 602 aa, Homo sapiens
MSERRRSAVALSSRAHAFSVEALIGSNKKRKLRDWEEKGLDLSMEALSPAGPLGDTEDAAAHGLEPHPDSEQSTGSDSEVLTERTSCSFSTHTDLASGAAGPVPAAMSSMEEIQVELQCADLWKRFHDIGTEMIITKAGRRMFPAMRVKITGLDPHQQYYIAMDIVPVDNKRYRYVYHSSKWMVAGNADSPVPPRVYIHPDSLASGDTWMRQVVSFDKLKLTNNELDDQGHIILHSMHKYQPRVHVIRKDFSSDLSPTKPVPVGDGVKTFNFPETVFTTVTAYQNQQITRLKIDRNPFAKGFRDSGRNRTGLEAIMETYAFWRPPVRTLTFEDFTTMQKQQGGSTGTSPTTSSTGTPSPSASSHLLSPSCSPPTFHLAPNTFNVGCRESQLCNLNLSDYPPCARSNMAALQSYPGLSDSGYNRLQSGTTSATQPSETFMPQRTPSLISGIPTPPSLPGNSKMEAYGGQLGSFPTSQFQYVMQAGNAASSSSSPHMFGGSHMQQSSYNAFSLHNPYNLYGYNFPTSPRLAASPEKLSASQSTLLCSSPSNGAFGERQYLPSGMEHSMHMISPSPNNQQATNTCDGRQYGAVPGSSSQMSVHMV

SEQ ID NO: 66585 - protein, 253 aa, Homo sapiens
RVRTGLEAIMETYAFWRPPVRTLTFEDFTTMQKQQASKKTSQGYTVNQHSSETDAIELYERRVWLMERRGSTGTSPTTSSTGTPSPSASSHLLSPSCSPPTFHLAPNTFNVGCRESQLCNLNLSDYPPCARSNMAALQSYPGLSDSGYNRLQSGTTSATQPSETFMPQRTPSLISGIPTPPSLPTARWKPTVASWGPFPLPSFSMSCRQAMLPPAPHHHTCSGAATCSRAPTMPSPFTTLTTCMDTISPLPLG

SEQ ID NO: 66586 - protein, 330 aa, Homo sapiens
GRNRTGLEAIMETYAFWRPPVRTLTFEDFTTMQKQQASKKTSQGYTVNQHSSETDAIELYERRVWLMERRGSTGTSPTTSSTGTPSPSASSHLLSPSCSPPTFHLAPNTFNVGCRESQLCNLNLSDYPPCARSNMAALQSYPGLSDSGYNRLQSGTTSATQPSETFMPQRTPSLISGIPTPPSLPGNSKMEAYGGQLGSFPTSQFQYVMQAGNAASSSSSPHMFGGSHMQQSSYNAFSLHNPYNLYGYNFPTSPRLAASPEKLSASQSTLLCSSPSNGAFGERQYLPSGMEHSMHMISPSPNNQQATNTCDGRQYGAVPGSSSQMSVHMV

SEQ ID NO: 66587 - protein, 448 aa, Homo sapiens
MAMSELGTRKPSDGTVSHLLNVVESELQAGREKGDPTEKQLQIILEDAPLWQRFKEVTNEMIVTKNGRRMFPVLKISVTGLDPNAMYSLLLDFVPTDSHRWKYVNGEWVPAGKPEVSSHSCVYIHPDSPNFGAHWMKAPISFSKVKLTNKLNGGGQIMLNSLHKYEPQVHIVRVGSAHRMVTNCSFPETQFIAVTAYQNEEITALKIKYNPFAKAFLDAKERNHLRDVPEAISESQHVTYSHLGGWIFSNPDGVCTAGNSNYQYAAPLPLPAPHTHHGCEHYSGLRGHRQAPYPSAYMHRNHSPSVNLIESSSNNLQVFSGPDSWTSLSSTPHASILSVPHTNGPINPGPSPYPCLWTISNGAGGPSGPGPEVHASTPGAFLLGNPAVTSPPSVLSTQAPTSAGVEVLGEPSLTSIAVSTWTAVASHPFAGWGGPGAGGHHSPSSLDG

SEQ ID NO: 66588 - protein, 325 aa, Homo sapiens
MIVTKNGRRMFPVLKISVTGLDPNAMYSLLLDFVPTDSHRWKYVNGEWVPAGKPEVSSHSCVYIHPDSPNFGAHWMKAPISFSKVKLTNKLNGGGQIMLNSLHKYEPQVHIVRVGSAHRMVTNCSFPETQFIAVTAYQNEEITALKIKYNPFAKAFLDAKERNHLRDVPEAISESQHVTYSHLNLIESSSNNLQVFSGPDSWTSLSSTPHASILSVPHTNGPINPGPSPYPCLWTISNGAGGPSGPGPEVHASTPGAFLLGNPAVTSPPSVLSTQAPTSAGVEVLGEPSLTSIAVSTWTAVASHPFAGWGGPGAGGHHSPSSLDG

SEQ ID NO: 66589 - protein, 318 aa, Homo sapiens
  VARIANT 1: note = MOD_RES - Any amino acid
XRMFPVLKISVTGLDPNAMYSLLLDFVPTDSHRWKYVNGEWVPAGKPEVSSHSCVYIHPDSPNFGAHWMKAPISFSKVKLTNKLNGGGQIMLNSLHKYEPQVHIVRVGSAHRMVTNCSFPETQFIAVTAYQNEEITALKIKYNPFAKAFLDAKERNHLRDVPEAISESQHVTYSHLNLIESSSNNLQVFSGPDSWTSLSSTPHASILSVPHTNGPINPGPSPYPCLWTISNGAGGPSGPGPEVHASTPGAFLLGNPAVTSPPSVLSTQAPTSAGVEVLGEPSLTSIAVSTWTAVASHPFAGWGGPGAGGHHSPSSLDG

SEQ ID NO: 66590 - protein, 281 aa, Homo sapiens
  VARIANT 1: note = MOD_RES - Any amino acid
XKERELNWFYRRQRVLFAHVYPTFTNTSCLCKCKITALKIKYNPFAKAFLDAKERNHLRDVPEAISESQHVTYSHLGGWIFSNPDGVCTAGNSNYQYAAPLPLPAPHTHHGCEHYSGLRGHRQAPYPSAYMHRNHSPSVNLIESSSNNLQVFSGPDSWTSLSSTPHASILSVPHTNGPINPGPSPYPCLWTISNGAGGPSGPGPEVHASTPGAFLLGNPAVTSPPSVLSTQAPTSAGVEVLGEPSLTSIAVSTWTAVASHPFAGWGGPGAGGHHSPSSLDG

SEQ ID NO: 66591 - protein, 447 aa, Homo sapiens
MEFTASPKPQLSSRANAFSIAALMSSGGSKEKEATENTIKPLEQFVEKSSCAQPLGELTSLDAHGEFGGGSGSSPSSSSLCTEPLIPTTPIIPSEEMAKIACSLETKELWDKFHELGTEMIITKSGRRMFPTIRVSFSGVDPEAKYIVLMDIVPVDNKRYRYAYHRSSWLVAGKADPPLPARLYVHPDSPFTGEQLLKQMVSFEKVKLTNNELDQHGHIILNSMHKYQPRVHIIKKKDHTASLLNLKSEEFRTFIFPETVFTAVTAYQNQLITKLKIDSNPFAKGFRDSSRLTDIERESVESLIQKHSYARSPIRTYGGEEDVLGDESQTTPNRGSAFTTSDNLSLSSWVSSSSSFPGFQHPQSLTALGTSTASIATPIPHPIQGSLPPYSRLGMPLTPSAIASSMQGSGPTFPSFHMPRYHHYFQQGPYAAIQGLRHSSAVMTPFV

SEQ ID NO: 66592 - protein, 535 aa, Homo sapiens
MGIVEPGCGDMLTGTEPMPGSDEGRAPGADPQHRYFYPEPGAQDADERRGGGSLGSPYPGGALVPAPPSRFLGAYAYPPRPQAAGFPGAGESFPPPADAEGYQPGEGYAAPDPRAGLYPGPREDYALPAGLEVSGKLRVALNNHLLWSKFNQHQTEMIITKQGRRMFPFLSFTVAGLEPTSHYRMFVDVVLVDQHHWRYQSGKWVQCGKAEGSMPGNRLYVHPDSPNTGAHWMRQEVSFGKLKLTNNKGASNNVTQMIVLQSLHKYQPRLHIVEVNDGEPEAACNASNTHIFTFQETQFIAVTAYQNAEITQLKIDNNPFAKGFRENFESMYTSVDTSIPSPPGPNCQFLGGDHYSPLLPNQYPVPSRFYPDLPGQAKDVVPQAYWLGAPRDHSYEAEFRAVSMKPAFLPSAPGPTMSYYRGQEVLAPGAGWPVAPQYPPKMGPASWFRPMRTLPMEPGPGGSEGRGPEDQGPPLVWTEIAPIRPESSDSGLGEGDSKRRRVSPYPSSGDSSSPAGAPSPFDKEAEGQFYNYFPN

SEQ ID NO: 66593 - protein, 400 aa, Homo sapiens
MFPSVRVKVKGLDPGKQYHVAIDVVPVDSKRYRYVYHSSQWMVAGNTDHLCIIPRFYVHPDSPCSGETWMRQIISFDRMKLTNNEMDDKGHIILQSMHKYKPRVHVIEQGSSVDLSQIQSLPTEGVKTFSFKETEFTTVTAYQNQQITKLKIERNPFAKGFRDTGRNRGVLDGLLETYPWRPSFTLDFKTFGADTQSGSSGSSPVTSSGGAPSPLNSLLSPLCFSPMFHLPTSSLGMPCPEAYLPNVNLPLCYKICPTNFWQQQPLVLPAPERLASSNSSQSLAPLMMEVPMLSSLGVTNSKSGSSEDSSDQYLQAPNSTNQMLYGLQSPGNIFLPNSITPEALSCSFHPSYDFYRYNFSMPSRLISGSNHLKVNDDSQVSFGEGKCNHVHWYPAINHYL

SEQ ID NO: 66594 - protein, 520 aa, Homo sapiens
MALSSRARAFSVEALVGRPSKRKLQDPIQAEQPELREKKGGEEEEERRSSAAGKSEPLEKQPKTEPSTSASSGCGSDSGYGNSSESLEEKDIQMELQGSELWKRFHDIGTEMIITKAGRRMFPSVRVKVKGLDPGKQYHVAIDVVPVDSKRYRYVYHSSQWMVAGNTDHLCIIPRFYVHPDSPCSGETWMRQIISFDRMKLTNNEMDDKGHIILQSMHKYKPRVHVIEQGSSVDLSQIQSLPTEGVKTFSFKETEFTTVTAYQNQQITKLKIERNPFAKGFRDTGRNRGVLDGLLETYPWRPSFTLDFKTFGADTQSGSSGSSPVTSSGGAPSPLNSLLSPLCFSPMFHLPTSSLGMPCPEAYLPNVNLPLCYKICPTNFWQQQPLVLPAPERLASSNSSQSLAPLMMEVPMLSSLGVTNSKSGSSEDSSDQYLQAPNSTNQMLYGLQSPGNIFLPNSITPEALSCSFHPSYDFYRYNFSMPSRLISGSNHLKVNDDSQVSFGEGKCNHVHWYPAINHYL

SEQ ID NO: 66595 - protein, 520 aa, Homo sapiens; identical to SEQ ID NO: 66594

SEQ ID NO: 66596 - protein, 400 aa, Homo sapiens; identical to SEQ ID NO: 66593

SEQ ID NO: 66597 - protein, 743 aa, Homo sapiens
MSLSMRDPVIPGTSMAYHPFLPHRAPDFAMSAVLGHQPPFFPALTLPPNGAAALSLPGALAKPIMDQLVGAAETGIPFSSLGPQAHLRPLKTMEPEEEVEDDPKVHLEAKELWDQFHKRGTEMVITKSGRRMFPPFKVRCSGLDKKAKYILLMDIIAADDCRYKFHNSRWMVAGKADPEMPKRMYIHPDSPATGEQWMSKVVTFHKLKLTNNISDKHGFTLAFPSDHATWQGNYSFGTQTILNSMHKYQPRFHIVRANDILKLPYSTFRTYLFPETEFIAVTAYQNDKITQLKIDNNPFAKGFRDTGNGRREKRKQLTLQSMRVFDERHKKENGTSDESSSEQAAFNCFAQASSPAASTVGTSNLKDLCPSEGESDAEAESKEEHGPEACDAAKISTTTSEEPCRDKGSPAVKAHLFAAERPRDSGRLDKASPDSRHSPATISSSTRGLGAEERRSPVREGTAPAKVEEARALPGKEAFAPLTVQTDAAAAHLAQGPLPGLGFAPGLAGQQFFNGHPLFLHPSQFAMGGAFSSMAAAGMGPLLATVSGASTGVSGLDSTAMASAAAAQGLSGASAATLPFHLQQHVLASQGLAMSPFGSLFPYPYTYMAAAAAASSAAASSSVHRHPFLNLNTMRPRLRYSPYSIPVPVPDGSSLLTTALPSMAAAAGPLDGKVAALAASPASVAVDSGSELNSRSSTLSSSSMSLSPKLCAEKEAATSELQSIQRLVSGLEAKPDRSRSASP

SEQ ID NO: 66598 - protein, 723 aa, Homo sapiens
MSLSMRDPVIPGTSMAYHPFLPHRAPDFAMSAVLGHQPPFFPALTLPPNGAAALSLPGALAKPIMDQLVGAAETGIPFSSLGPQAHLRPLKTMEPEEEVEDDPKVHLEAKELWDQFHKRGTEMVITKSGRRMFPPFKVRCSGLDKKAKYILLMDIIAADDCRYKFHNSRWMVAGKADPEMPKRMYIHPDSPATGEQWMSKVVTFHKLKLTNNISDKHGFTILNSMHKYQPRFHIVRANDILKLPYSTFRTYLFPETEFIAVTAYQNDKITQLKIDNNPFAKGFRDTGNGRREKRKQLTLQSMRVFDERHKKENGTSDESSSEQAAFNCFAQASSPAASTVGTSNLKDLCPSEGESDAEAESKEEHGPEACDAAKISTTTSEEPCRDKGSPAVKAHLFAAERPRDSGRLDKASPDSRHSPATISSSTRGLGAEERRSPVREGTAPAKVEEARALPGKEAFAPLTVQTDAAAAHLAQGPLPGLGFAPGLAGQQFFNGHPLFLHPSQFAMGGAFSSMAAAGMGPLLATVSGASTGVSGLDSTAMASAAAAQGLSGASAATLPFHLQQHVLASQGLAMSPFGSLFPYPYTYMAAAAAASSAAASSSVHRHPFLNLNTMRPRLRYSPYSIPVPVPDGSSLLTTALPSMAAAAGPLDGKVAALAASPASVAVDSGSELNSRSSTLSSSSMSLSPKLCAEKEAATSELQSIQRLVSGLEAKPDRSRSASP

SEQ ID NO: 66599 - protein, 600 aa, Homo sapiens
MSLSMRDPVIPGTSMAYHPFLPHRAPDFAMSAVLGHQPPFFPALTLPPNGAAALSLPGALAKPIMDQLVGAAETGIPFSSLGPQAHLRPLKTMEPEEEVEDDPKVHLEAKELWDQFHKRGTEMVITKSGRRMFPPFKVRCSGLDKKAKYILLMDIIAADDCRYKFHNSRWMVAGKADPEMPKRMYIHPDSPATGEQWMSKVVTFHKLKLTNNISDKHGFTLAFPSDHATWQGNYSFGTQTILNSMHKYQPRFHIVRANDILKLPYSTFRTYLFPETEFIAVTAYQNDKITQLKIDNNPFAKGFRDTGNGRREKRKQLTLQSMRVFDERHKKENGTSDESSSEQAAFNCFAQASSPAASTVGTSNLKDLCPSEGESDAEAESKEEHGPEACDAAKISTTTSEEPCRDKGSPAVKAHLFAAERPRDSGRLDKASPDSRHSPATISSSTRGLGAEERRSPVREGTAPAKVEEARALPGKEAFAPLTVQTDAAAAAASSSVHRHPFLNLNTMRPRLRYSPYSIPVPVPDGSSLLTTALAASPASVAVDSGSELNSRSSTLSSSSMSLSPKLCAEKEAATSELQSIQRLVSGLEAKPDRSRSASP

SEQ ID NO: 66600 - protein, 545 aa, Homo sapiens
MLQDKGLSESEEAFRAPGPALGEASAANAPEPALAAPGLSGAALGSPPGPGADVVAAAAAEQTIENIKVGLHEKELWKKFHEAGTEMIITKAGRRMFPSYKVKVTGMNPKTKYILLIDIVPADDHRYKFCDNKWMVAGKAEPAMPGRLYVHPDSPATGAHWMRQLVSFQKLKLTNNHLDPFGHIILNSMHKYQPRLHIVKADENNAFGSKNTAFCTHVFPETSFISVTSYQNHKITQLKIENNPFAKGFRGSDDSDLRVARLQSKEYPVISKSIMRQRLISPQLSATPDVGPLLGTHQALQHYQHENGAHSQLAEPQDLPLSTFPTQRDSSLFYHCLKRRDGTRHLDLPCKRSYLEAPSSVGEDHYFRSPPPYDQQMLSPSYCSEVTPREACMYSGSGPEIAGVSGVDDLPPPPLSCNMWTSVSPYTSYSVQTMETVPYQPFPTHFTATTMMPRLPTLSAQSSQPPGNAHFSVYNQLSQSQVRERGPSASFPRERGLPQGCERKPPSPHLNAANEFLYSQTFSLSRESSLQYHSGMGTVENWTDG

SEQ ID NO: 66601 - protein, 546 aa, Homo sapiens
MLQDKGLSESEEAFRAPGPALGEASAANAPEPALAAPGLSGAALGSPPGPGADVVAAAAAEQTIENIKVGLHEKELWKKFHEAGTEMIITKAGRRMFPSYKVKVTGMNPKTKYILLIDIVPADDHRYKFCDNKWMVAGKAEPAMPGRLYVHPDSPATGAHWMRQLVSFQKLKLTNNHLDPFGHIILNSMHKYQPRLHIVKADENNAFGSKNTAFCTHVFPETSFISVTSYQNHKITQLKIENNPFAKGFRGSDDSDLRVARLQSKEYPVISKSIMRQRLISPQLSATPDVGPLLGTHQALQHYQHENGAHSQLAEPQDLPLSTFPTQRDSSLFYHCLKRRADGTRHLDLPCKRSYLEAPSSVGEDHYFRSPPPYDQQMLSPSYCSEVTPREACMYSGSGPEIAGVSGVDDLPPPPLSCNMWTSVSPYTSYSVQTMETVPYQPFPTHFTATTMMPRLPTLSAQSSQPPGNAHFSVYNQLSQSQVRERGPSASFPRERGLPQGCERKPPSPHLNAANEFLYSQTFSLSRESSLQYHSGMGTVENWTDG

SEQ ID NO: 66602 - protein, 518 aa, Homo sapiens
MADADEGFGLAHTPLEPDAKDLPCDSKPESALGAPSKSPSSPQAAFTQQGMEGIKVFLHERELWLKFHEVGTEMIITKAGRRMFPSYKVKVTGLNPKTKYILLMDIVPADDHRYKFADNKWSVTGKAEPAMPGRLYVHPDSPATGAHWMRQLVSFQKLKLTNNHLDPFGHIILNSMHKYQPRLHIVKADENNGFGSKNTAFCTHVFPETAFIAVTSYQNHKITQLKIENNPFAKGFRGSDDMELHRMSRMQSKEYPVVPRSTVRQKVASNHSPFSSESRALSTSSNLGSQYQCENGVSGPSQDLLPPPNPYPLPQEHSQIYHCTKRKEEECSTTDHPYKKPYMETSPSEEDSFYRSSYPQQQGLGASYRTESAQRQACMYASSAPPSEPVPSLEDISCNTWPSMPSYSSCTVTTVQPMDRLPYQHFSAHFTSGPLVPRLAGMANHGSPQLGEGMFQHQTSVAHQPVVRQCGPQTGLQSPGTLQPPEFLYSHGVPRTLSPHQYHSVHGVGMVPEWSDNS

SEQ ID NO: 66603 - protein, 468 aa, Homo sapiens
MEGIKVFLHERELWLKFHEVGTEMIITKAGRRMFPSYKVKVTGLNPKTKYILLMDIVPADDHRYKFADNKWSVTGKAEPAMPGRLYVHPDSPATGAHWMRQLVSFQKLKLTNNHLDPFGHIILNSMHKYQPRLHIVKADENNGFGSKNTAFCTHVFPETAFIAVTSYQNHKITQLKIENNPFAKGFRGSDDMELHRMSRMQSKEYPVVPRSTVRQKVASNHSPFSSESRALSTSSNLGSQYQCENGVSGPSQDLLPPPNPYPLPQEHSQIYHCTKRKEEECSTTDHPYKKPYMETSPSEEDSFYRSSYPQQQGLGASYRTESAQRQACMYASSAPPSEPVPSLEDISCNTWPSMPSYSSCTVTTVQPMDRLPYQHFSAHFTSGPLVPRLAGMANHGSPQLGEGMFQHQTSVAHQPVVRQCGPQTGLQSPGTLQPPEFLYSHGVPRTLSPHQYHSVHGVGMVPEWSDNS

SEQ ID NO: 66604 - protein, 518 aa, Homo sapiens; identical to SEQ ID NO: 66602

SEQ ID NO: 66605 - protein, 422 aa, Homo sapiens
MDIVPADDHRYKFADNKWSVTGKAEPAMPGRLYVHPDSPATGAHWMRQLVSFQKLKLTNNHLDPFGHIILNSMHKYQPRLHIVKADENNGFGSKNTAFCTHVFPETAFIAVTSYQNHKITQLKIENNPFAKGFRGSDDMELHRMSRMQSKEYPVVPRSTVRQKVASNHSPFSSESRALSTSSNLGSQYQCENGVSGPSQDLLPPPNPYPLPQEHSQIYHCTKRKEEECSTTDHPYKKPYMETSPSEEDSFYRSSYPQQQGLGASYRTESAQRQACMYASSAPPSEPVPSLEDISCNTWPSMPSYSSCTVTTVQPMDRLPYQHFSAHFTSGPLVPRLAGMANHGSPQLGEGMFQHQTSVAHQPVVRQCGPQTGLLHNRHFLEKERERGERERRRETVAKRTPRTRFFISPNVHICTQGRWMLI

SEQ ID NO: 66606 - protein, 349 aa, Homo sapiens
MADADEGFGLAHTPLEPDAKDLPCDSKPESALGAPSKSPSSPQAAFTQQGMEGIKVFLHERELWLKFHEVGTEMIITKAGRRMFPSYKVKVTGLNPKTKYILLMDIVPADDHRYKFADNKWSVTGKAEPAMPGRLYVHPDSPATGAHWMRQLVSFQKLKLTNNHLDPFGHIILNSMHKYQPRLHIVKADENNGFGSKNTAFCTHVFPETAFIAVTSYQNHKITQLKIENNPFAKGFRGSDDMELHRMSRMQSKEYPVVPRSTVRQKVASNHSPFSSESRALSTSSNLGSQYQCENGVSGPSQDLLPPPNPYPLPQEHSQIYHCTKRKGECDHPWSICFLSYLFLSLGWG

SEQ ID NO: 66607 - protein, 436 aa, Homo sapiens
MYHPRELYPSLGAGYRLGPAQPGADSSFPPALAEGYRYPELDTPKLDCFLSGMEAAPRTLAAHPPLPLLPPAMGTEPAPSAPEALHSLPGVSLSLENRELWKEFSSVGTEMIITKAGRRMFPACRVSVTGLDPEARYLFLLDVIPVDGARYRWQGRRWEPSGKAEPRLPDRVYIHPDSPATGAHWMRQPVSFHRVKLTNSTLDPHGHLILHSMHKYQPRIHLVRAAQLCSQHWGGMASFRFPETTFISVTAYQNPQITQLKIAANPFAKGFRENGRNCKRERDARVKRKLRGPEPAATEAYGSGDTPGGPCDSTLGGDIRESDPEQAPAPGEATAAPAPLCGGPSAEAYLLHPAAFHGAPSHLPTRSPSFPEAPDSGRSAPYSAAFLELPHGSGGSGYPAAPPAVPFAPHFLQGGPFPLPYTAPGGYLDVGSKPMY

SEQ ID NO: 66608 - protein, 436 aa, Homo sapiens; identical to SEQ ID NO: 66607

SEQ ID NO: 66609 - protein, 295 aa, Homo sapiens
MYHPRELYPSLGAGYRLGPAQPGADSSFPPALAEGYRYPELDTPKLDCFLSGMEAAPRTLAAHPPLPLLPPAMGTEPAPSAPEALHSLPGVSLSLENRELWKEFSSVGTEMIITKAGRRMFPACRVSVTGLDPEARYLFLLDVIPVDGARYRWQGRRWEPSGKAEPRLPDRVYIHPDSPATGAHWMRQPVSFHRVKLTNSTLDPHGHLILHSMHKYQPRIHLVRAAQLCSQHWGGMASFRFPETTFISVTAYQNPQITQLKIAANPFAKGFRENGRNCKRWELFIHLFMHSTNVY

SEQ ID NO: 66610 - protein, 657 aa, Homo sapiens
MEMETTEPEPDCVVQPPSPPDDFSCQMRLSEKITPLKTCFKKKDQKRLGTGTLRSLRPILNTLLESGSLDGVFRSRNQSTDENSLHEPMMKKAMEINSSCPPAENNMSVLIPDRTNVGDQIPEAHPSTEAPERVVPIQDHSFPSETLSGTVADSTPAHFQTDLLHPVSSDVPTSPDCLDKVIDYVPGIFQENSFTIQYILDTSDKLSTELFQDKSEEASLDLVFELVNQLQYHTHQENGIEICMDFLQGTCIYGRDCLKHHTVLPYHWQIKRTTTQKWQSVFNDSQEHLERFYCNPENDRMRMKYGGQEFWADLNAMNVYETTEFDQLRRLSTPPSSNVNSIYHTVWKFFCRDHFGWREYPESVIRLIEEANSRGLKEVRFMMWNNHYILHNSFFRREIKRRPLFRSCFILLPYLQTLGGVPTQAPPPLEATSSSQIICPDGVTSANFYPETWVYMHPSQDFIQVPVSAEDKSYRIIYNLFHKTVPEFKYRILQILRVQNQFLWEKYKRKKEYMNRKMFGRDRIINERHLFHGTSQDVVDGICKHNFDPRVCGKHATMFGQGSYFAKKASYSHNFSKKSSKGVHFMFLAKVLTGRYTMGSHGMRRPPPVNPGSVTSDLYDSCVDNFFEPQIFVIFNDDQSYPYFVIQYEEVSNTVSI

SEQ ID NO: 66611 - protein, 657 aa, Homo sapiens; identical to SEQ ID NO: 66610

SEQ ID NO: 66612 - protein, 506 aa, Homo sapiens
MEMETTEPEPDCVVQPPSPPDDFSCQMRLSEKITPLKTCFKKKDQKRLGTGTLRSLRPILNTLLESGSLDGVFRSRNQSTDENSLHEPMMKKAMEINSSCPPAENNMSVLIPDRTNVGDQIPEAHPSTEAPERVVPIQDHSFPSETLSGTVADSTPAHFQTDLLHPVSSDVPTSPDCLDKVIDYVPGIFQENSFTIQYILDTSDKLSTELFQDKSEEASLDLVFELVNQLQYHTHQENGIEICMDFLQGTCIYGRDCLKHHTVLPYHWQIKRTTTQKWQSVFNDSQEHLERFYCNPENDRMRMKYGGQEFWADLNAMNVYETTEFDQLRRLSTPPSSNVNSIYHTVWKFFCRDHFGWREYPESVIRLIEEANSRGLKEVRFMMWNNHYILHNSFFRREIKRRPLFRSCFILLPYLQTLGGVPTQAPPPLEATSSSQIICPDGVTSANFYPETWVYMHPSQDFIQVPVSAEDKSYRIIYNLFHKTVPEFKYRILQILRVQNQFLWEK

SEQ ID NO: 66613 - protein, 654 aa, Homo sapiens
MEMETTEPEPDCVVQPPSPPDDFSCQMRLSEKITPLKTCFKKKDQKRLGTGTLRSLRPILNTLLESGSLDGVFRSRNQSTDENSLHEPMMKKAMEINSSCPPAENNMSVLIPDRTNVGDQIPEAHPSTEAPERVVPIQDHSFPSETLSGTVADSTPAHFQTDLLHPVSSDVPTSPDCLDKVIDYVPGIFQENSFTIQYILDTSDKLSTELFQDKSEEASLDLVFELVNQLQYHTHQENGIEICMDFLQGTCIYGRDCLKHHTVLPYHWQIKRTTTQKWQSVFNDSQEHLERFYCNPENDRMRMKYGGQEFWADLNAMNVYETTEFDQLRRLSTPPSSNVNSIYHTVWKFFCRDHFGWREYPESVIRLIEEANSRGLKEVRFMMWNNHYILHNSFFRREIKRRPLFRSCFILLPYLQTLGGVPTQAPPPLEATSSSQIICPDGVTSANFYPETWVYMHPSQDFIQVPVSAEDKSYRIIYNLFHKTVPEFKYRILQILRVQNQFLWEKYKRKKEYMNRKMFGRDRIINERHLFHGTSQDVVDGICKHNFDPRVCGKHATMFGQGSYFAKKASYSHNFSKKSSKGVHFMFLAKVLTGRYTMGSHGMRRPPPVNPGSVTSDLYDSCVDNFFEPQIFVIFNDDQSYPYFVIQYEEVSNT

SEQ ID NO: 66614 - protein, 657 aa, Homo sapiens; identical to SEQ ID NO: 66610

SEQ ID NO: 66615 - protein, 657 aa, Homo sapiens; identical to SEQ ID NO: 66610

SEQ ID NO: 66616 - protein, 553 aa, Homo sapiens
MGALEMQDEEDRIEALKQVADKLPRPNLLLLKHLVYVLHLISKNSEVNRMDSSNLAICIGPNMLTLENDQSLSFEAQKDLNNKVKTLVEFLIDNCFEIFGENIPVHSSITSDDSLEHTDSSDVSTLQNDSAYDSNDPDVESNSSSGISSPSRQPQVPMATAAGLDSAGPQDAREVSPEPIVSTVARLKSSLAQPDRRYSEPSMPSSQECLESRVTNQTLTKSEGDFPVPRVGSRLESEEAEDPFPEEVFPAVQGKTKRPVDLKIKNLAPGSVLPRALVLKAFSSSSLDASSDSSPVASPSSPKRNFFSRHQSFTTKTEKGKPSREIKKHSMSFTFAPHKKVLTKNLSAGSGKSQDFTRDHVPRGVRKESQLAGRIVQENGCETHNQTARGFCLRPHALSVDDVFQGADWERPGSPPSYEEAMQGPAARLVASESQTVGSMTVGSMRARMLEAHCLLPPLPPAHHVEDSRHRGSKEPLPGHGLSPLPERWKQSRTVHASGDSLGHVSGPGRPELLPLRTVSESVQRNKRDCLVRRCSQPVFEADQFQYAKESYI

SEQ ID NO: 66617 - protein, 266 aa, Homo sapiens
MKLRSSHNASKTLNANNMETLIECQSEGDIKEHPLLASCESEDSICQLIEVKKRKKVLSWPFLMRRLSPASDFSGALETDLKASLFDQPLSIICGDSDTLPRPIQDILTILCLKGPSTEGIFRRAANEKARKELKEELNSGDAVDLERLPVHLLAVVFKDFLRSIPRKLLSSDLFEEWMGALEMQDEEDRIEALKQVADKLPRPNLLLLKHLVYVLHLISKNSEVNRMDSSNLAICIGPNMLTLENDQSLSFEAQKDLNNKVCSAY

SEQ ID NO: 66618 - protein, 731 aa, Homo sapiens
MKLRSSHNASKTLNANNMETLIECQSEGDIKEHPLLASCESEDSICQLIEVKKRKKVLSWPFLMRRLSPASDFSGALETDLKASLFDQPLSIICGDSDTLPRPIQDILTILCLKGPSTEGIFRRAANEKARKELKEELNSGDAVDLERLPVHLLAVVFKDFLRSIPRKLLSSDLFEEWMGALEMQDEEDRIEALKQVADKLPRPNLLLLKHLVYVLHLISKNSEVNRMDSSNLAICIGPNMLTLENDQSLSFEAQKDLNNKVKTLVEFLIDNCFEIFGENIPVHSSITSDDSLEHTDSSDVSTLQNDSAYDSNDPDVESNSSSGISSPSRQPQVPMATAAGLDSAGPQDAREVSPEPIVSTVARLKSSLAQPDRRYSEPSMPSSQECLESRVTNQTLTKSEGDFPVPRVGSRLESEEAEDPFPEEVFPAVQGKTKRPVDLKIKNLAPGSVLPRALVLKAFSSSSLDASSDSSPVASPSSPKRNFFSRHQSFTTKTEKGKPSREIKKHSMSFTFAPHKKVLTKNLSAGSGKSQDFTRDHVPRGVRKESQLAGRIVQENGCETHNQTARGFCLRPHALSVDDVFQGADWERPGSPPSYEEAMQGPAARLVASESQTVGSMTVGSMRARMLEAHCLLPPLPPAHHVEDSRHRGSKEPLPGHGLSPLPERWKQSRTVHASGDSLGHVSGPGRPELLPLRTVSESVQRNKRDCLVRRCSQPVFEADQFQYAKESYI

SEQ ID NO: 66619 - protein, 275 aa, Homo sapiens
MATAAGLDSAGPQDAREVSPEPIVSTVARLKSSLAQPDRRYSEPSMPSSQECLESRVTNQTLTKSEGDFPVPRVGSRLESEEAEDPFPEEVFPAVQGKTKRPVDLKIKNLAPGSVLPRALVLKAFSSSSLDASSDSSPVASPSSPKRNFFSRHQSFTTKTEKGKPSREIKKHSMSFTFAPHKKVLTKNLSAGSGKSQDFTRDHVPRGVRKESQLAGRIVQENGCETHNQTARGFCLRPHALSVDDVFQGADWERPGSPPSYEEAMQGPAARPWGA

SEQ ID NO: 66620 - protein, 108 aa, Homo sapiens
MTRKIFTNTRERWRQQNVNSAFAKLRKLIPTHPPDKKLSKNETLRLAMRYINFLVKVLGEQSLQQTGVAAQGNILGLFPQGPHLPGLEDRTLLENYQVPSPGPSHHIP

SEQ ID NO: 66621 - protein, 284 aa, Homo sapiens
MEPGMLGPHNLPHHEPISFGIDQILSGPETPGGGLGLGRGGQGHGENGAFSGGYHGASGYGPAGSLAPLPGSSGVGPGGVIRVPAHRPLPVPPPAGGAPAVPGPSGLGGAGGLAGLTFPWMDSGRRFAKDRLTAALSPFSGTRRIGHPYQNRTPPKRKKPRTSFSRSQVLELERRFLRQKYLASAERAALAKALRMTDAQVKTWFQNRRTKWRRQTAEEREAERHRAGRLLLHLQQDALPRPLRPPLPPDPLCLHNSSLFALQNLQPWAEDNKVASVSGLASVV

SEQ ID NO: 66622 - protein, 291 aa, Homo sapiens
MEAPASAQTPHPHEPISFGIDQILNSPDQDSAPAPRGPDGASYLGGPPGGRPGATYPSLPASFAGLGAPFEDAGSYSVNLSLAPAGVIRVPAHRPLPGAVPPPLPSALPAMPSVPTVSSLGGLNFPWMESSRRFVKDRFTAAAALTPFTVTRRIGHPYQNRTPPKRKKPRTSFSRVQICELEKRFHRQKYLASAERAALAKSLKMTDAQVKTWFQNRRTKWRRQTAEEREAERQQASRLMLQLQHDAFQKSLNDSIQPDPLCLHNSSLFALQNLQPWEEDSSKVPAVTSLV

SEQ ID NO: 66623 - protein, 103 aa, Homo sapiens
MAESWSGQALQALPATVLGALGSEFLREWEAQDMRVTLFKLLLLWLVLSLLGIQLAWGFYGNTVTGLYHRPGLGGQNGSTPDGSTHFPSWEMAANEPLKTHRE

SEQ ID NO: 66624 - protein, 128 aa, Homo sapiens
MASEASVRLGVPPGRLWIQRPGIYEDEEGRTWVTVVVRFNPSRREWARASQGSRYEPSITVHLWQMAVHTRELLSSGQMPFSQLPAVWQLYPGRKYRAADSSFWEIADHGQIDSMEQLVLTYQPERKD

SEQ ID NO: 66625 - protein, 128 aa, Homo sapiens; identical to SEQ ID NO: 66624

SEQ ID NO: 66626 - protein, 1591 aa, Homo sapiens
MGNAESQHVEHEFYGEKHASLGRKHTSRSLRLSHKTRRTRHASSGKVIHRNSEVSTRSSSTPSIPQSLAENGLEPFSQDGTLEDFGSPIWVDRVDMGLRPVSYTDSSVTPSVDSSIVLTAASVQSMPDTEESRLYGDDATYLAEGGRRQHSYTSNGPTFMETASFKKKRSKSADIWREDSLEFSLSDLSQEHLTSNEEILGSAEEKDCEEARGMETRASPRQLSTCQRANSLGDLYAQKNSGVTANGGPGSKFAGYCRNLVSDIPNLANHKMPPAAAEETPPYSNYNTLPCRKSHCLSEGATNPQISHSNSMQGRRAKTTQDVNAGEGSEFADSGIEGATTDTDLLSRRSNATNSSYSPTTGRAFVGSDSGSSSTGDAARQGVYENFRRELEMSTTNSESLEEAGSAHSDEQSSGTLSSPGQSDILLTAAQGTVRKAGALAVKNFLVHKKNKKVESATRRKWKHYWVSLKGCTLFFYESDGRSGIDHNSIPKHAVWVENSIVQAVPEHPKKDFVFCLSNSLGDAFLFQTTSQTELENWITAIHSACATAVARHHHKEDTLRLLKSEIKKLEQKIDMDEKMKKMGEMQLSSVTDSKKKKTILDQIFVWEQNLEQFQMDLFRFRCYLASLQGGELPNPKRLLAFASRPTKVAMGRLGIFSVSSFHALVAARTGETGVRRRTQAMSRSASKRRSRFSSLWGLDTTSKKKQGRPSINQVFGEGTEAVKKSLEGIFDDIVPDGKREKEVVLPNVHQHNPDCDIWVHEYFTPSWFCLPNNQPALTVVRPGDTARDTLELICKTHQLDHSAHYLRLKFLIENKMQLYVPQPEEDIYELLYKEIEICPKVTQSIHIEKSDTAADTYGFSLSSVEEDGIRRLYVNSVKETGLASKKGLKAGDEILEINNRAADALNSSMLKDFLSQPSLGLLVRTYPELEEGVELLESPPHRVDGPADLGESPLAFLTSNPGHSLCSEQGSSAETAPEETEGPDLESSDETDHSSKSTEQVAAFCRSLHEMNPSDQSPSPQDSTGPQLATMRQLSDADKLRKVICELLETERTYVKDLNCLMERYLKPLQKETFLTQDELDVLFGNLTEMVEFQVEFLKTLEDGVRLVPDLEKLEKVDQFKKVLFSLGGSFLYYADRFKLYSAFCASHTKVPKVLVKAKTDTAFKAFLDAQNPKQQHSSTLESYLIKPIQRILKYPLLLRELFALTDAESEEHYHLDVAIKTMNKVASHINEMQKIHEEFGAVFDQLIAEQTGEKKEVADLSMGDLLLHTTVIWLNPPASLGKWKKEPELAAFVFKTAVVLVYKDGSKQKKKLVGSHRLSIYEDWDPFRFRHMIPTEALQVRALASADAEANAVCEIVHVKSESEGRPERVFHLCCSSPESRKDFLKAVHSILRDKHRRQLLKTESLPSSQQYVPFGGKRLCALKGARPAMSRAVSAPSKSLGRRRRRLARNRFTIDSDAVSASSPEKESQQPPGGGDTDRWVEEQFDLAQYEEQDDIKETDILSDDDEFCESVKGASVDRDLQERLQATSISQRERGRKTLDSHASRMAQLKKQAALSGINGGLESASEEVIWVRREDFAPSRKLNTEI

SEQ ID NO: 66627 - protein, 1071 aa, Homo sapiens
METASFKKKRSKSADIWREDSLEFSLSDLSQEHLTSNEEILGSAEEKDCEEARGMETRASPRQLSTCQRANSLGDLYAQKNSGVTANGGPGSKFAGYCRNLVSDIPNLANHKMPPAAAEETPPYSNYNTLPCRKSHCLSEGATNPQISHSNSMQGRRAKTTQDVNAGEGSEFADSGIEGATTDTDLLSRRSNATNSSYSPTTGRAFVGSDSGSSSTGDAARQGVYENFRRELEMSTTNSESLEEAGSAHSDEQSSGTLSSPGQSDILLTAAQGTVRKAGALAVKNFLVHKKNKKVESATRRKWKHYWVSLKGCTLFFYESDGRSGIDHNSIPKHAVWVENSIVQAVPEHPKKDFVFCLSNSLGDAFLFQTTSQTELENWITAIHSACATAVARHHHKEDTLRLLKSEIKKLEQKIDMDEKMKKMGEMQLSSVTDSKKKKTILDQIFVWEQNLEQFQMDLFRFRCYLASLQGGELPNPKRLLAFASRPTKVAMGRLGIFSVSSFHALVAARTGETGVRRRTQAMSRSASKRRSRFSSLWGLDTTSKKKQGRPSINQVFGEGTEAVKKSLEGIFDDIVPDGKREKEVVLPNVHQHNPDCDIWVHEYFTPSWFCLPNNQPALTVVRPGDTARDTLELICKTHQLDHSAHYLRLKFLIENKMQLYVPQPEEDIYELLYKEIEICPKVTQSIHIEKSDTAADTYGFSLSSVEEDGIRRLYVNSVKETGLASKKGLKAGDEILEINNRAADALNSSMLKDFLSQPSLGLLVRTYPELEEGVELLESPPHRVDGPADLGESPLAFLTSNPGHSLCSEQGSSAETAPEETEGPDLESSDETDHSSKSTEQVAAFCRSLHEMNPSDQSPSPQDSTGPQLATMRQLSDADKLRKVICELLETERTYVKDLNCLMERYLKPLQKETFLTQDELDVLFGNLTEMVEFQVEFLKTLEDGVRLVPDLEKLEKVDQFKKVLFSLGGSFLYYADRFKLYSAFCAHKSSQGPGESQDRHGFQGILGCPEPEAAALIHAGVVPHQAHPEDPQVPTSAQGAVRPDRCGERGALPPGRGHQDHEQGCQSHQ

SEQ ID NO: 66628 - protein, 225 aa, Homo sapiens
MGNAESQHVEHEFYGEKHASLGRKHTSRSLRLSHKTRRTRHASSGKVIHRNSEVSTRSSSTPSIPQSLAENGLEPFSQDGTLEDFGSPIWVDRVDMGLRPVSYTDSSVTPSVDSSIVLTAASVQSMPDTEESRLYGDDATYLAEGGRRQHSYTSNGPTFMETASFKKKRSKSADIWREDSLEFSLSDLSQEHLTSNEEILGSAEEKDCEEARGMETRASPRQLST

SEQ ID NO: 66629 - protein, 1531 aa, Homo sapiens
MGNAESQHVEHEFYGEKHASLGRKHTSRSLRLSHKTRRTRHASSGKVIHRNSEVSTRSSSTPSIPQSLAENGLEPFSQDGTLEDFGSPIWVDRVDMGLRPVSYTDSSVTPSVDSSIVLTAASVQSMPDTEESRLYGDDATYLAEGGRRQHSYTSNGPTFMETASFKKKRSKSADIWREDSLEFSLSDLSQEHLTSNEEILGSAEEKDCEEARGMETRASPRQLSTCQRANSLGDLYAQKNSGVTANGGPGSKFAGYCRNLVSDIPNLANHKMPPAAAEETPPYSNYNTLPCRKSHCLSEGATNPQISHSNSMQGRRAKTTQDVNAGEGSEFADSGIEGATTDTDLLSRRSNATNSSYSPTTGRAFVGSDSGSSSTGDAARQGVYENFRRELEMSTTNSESLEEAGSAHSDEQSSGTLSSPGQSDILLTAAQGTVRKAGALAVKNFLVHKKNKKVESATRRKWKHYWVSLKGCTLFFYESDGRSGIDHNSIPKHAVWVENSIVQAVPEHPKKDFVFCLSNSLGDAFLFQTTSQTELENWITAIHSACATAVARHHHKEDTLRLLKSEIKKLEQKIDMDEKMKKMGEMQLSSVTDSKKKKTILDQIFVWEQNLEQFQMDLFRFRCYLASLQGGELPNPKRLLAFASRPTKVAMGRLGIFSVSSFHALVAARTGETGVRRRTQAMSRSASKRRSRFSSLWGLDTTSKKKQGRPSINQREKEVVLPNVHQHNPDCDIWVHEYFTPSWFCLPNNQPALTVVRPGDTARDTLELICKLYKEIEICPKVTQSIHIEKSDTAADTYGFSLSSVEEDGIRRLYVNSVKETGLASKKGLKAGDEILEINNRAADALNSSMLKDFLSQPSLGLLVRTYPELEEGVELLESPPHRVDGPADLGESPLAFLTSNPGHSLCSEQGSSAETAPEETEGPDLESSDETDHSSKSTEQVAAFCRSLHEMNPSDQSPSPQDSTGPQLATMRQLSDADKLRKVICELLETERTYVKDLNCLMERYLKPLQKETFLTQDELDVLFGNLTEMVEFQVEFLKTLEDGVRLVPDLEKLEKVDQFKKVLFSLGGSFLYYADRFKLYSAFCASHTKVPKVLVKAKTDTAFKAFLDAQNPKQQHSSTLESYLIKPIQRILKYPLLLRELFALTDAESEEHYHLDVAIKTMNKVASHINEMQKIHEEFGAVFDQLIAEQTGEKKEVADLSMGDLLLHTTVIWLNPPASLGKWKKEPELAAFVFKTAVVLVYKDGSKQKKKLVGSHRLSIYEDWDPFRFRHMIPTEALQVRALASADAEANAVCEIVHVKSESEGRPERVFHLCCSSPESRKDFLKAVHSILRDKHRRQLLKTESLPSSQQYVPFGGKRLCALKGARPAMSRAVSAPSKSLGRRRRRLARNRFTIDSDAVSASSPEKESQQPPGGGDTDRWVEEQFDLAQYEEQDDIKETDILSDDDEFCESVKGASVDRDLQERLQATSISQRERGRKTLDSHASRMAQLKKQAALSGINGGLESASEEVIWVRREDFAPSRKLNTEI

SEQ ID NO: 66630 - protein, 830 aa, Homo sapiens
MGSMFRSEEVALVQLFLPTAAAYTCVSRLGELGLVEFRDLNASVSAFQRRFVVDVRRCEELEKTFTFLQEEVRRAGLVLPPPKGRLPAPPPRDLLRIQEETERLAQELRDVRGNQQALRAQLHQLQLHAAVLRQGHEPQLAAAHTDGASERTPLLQAPGGPHQDLRVNFVAGAVEPHKAPALERLLWRACRGFLIASFRELEQPLEHPVTGEPATWMTFLISYWGEQIGQKIRKITDCFHCHVFPFLQQEEARLGALQQLQQQSQELQEVLGETERFLSQVLGRVLQLLPPGQVQVHKMKAVYLALNQCSVSTTHKCLIAEAWCSVRDLPALQEALRDSSMEEGVSAVAHRIPCRDMPPTLIRTNRFTASFQGIVDAYGVGRYQEVNPAPYTIITFPFLFAVMFGDVGHGLLMFLFALAMVLAENRPAVKAAQNEIWQTFFRGRYLLLLMGLFSIYTGFIYNECFSRATSIFPSGWSVAAMANQSGWSDAFLAQHTMLTLDPNVTGVFLGPYPFGIDPIWSLAANHLSFLNSFKMKMSVILGVVHMAFGVVLGVFNHVHFGQRHRLLLETLPELTFLLGLFGYLVFLVIYKWLCVWAARAASAPSILIHFINMFLFSHSPSNRLLYPRQEVVQATLVVLALAMVPILLLGTPLHLLHRHRRRLRRRPADRQEENKAGLLDLPDASVNGWSSDEEKAGGLDDEEEAELVPSEVLMHQAIHTIEFCLGCVSNTASYLRLWALSLAHAQLSEVLWAMVMRIGLGLGREVGVAAVVLVPIFAAFAVMTVAILLVMEGLSAFLHALRLHWVEFQNKFYSGTGYKLSPFTFAATDD

SEQ ID NO: 66631 - protein, 218 aa, Homo sapiens
MGSMFRSEEVALVQLFLPTAAAYTCVSRLGELGLVEFRDLNASVSAFQRRFVVDVRRCEELEKTFTFLQEEVRRAGLVLPPPKGRLPAPPPRDLLRIQEETERLAQELRDVRGNQQALRAQLHQLQLHAAVLRQGHEPQLAAAHTDGASERTPLLQAPGGPHQDLRVNFVAGAVEPHKAPALERLLWRACRGFLIASFRELEQPLEHPVTGEPATWMT

SEQ ID NO: 66632 - protein, 61 aa, Homo sapiens
DDEEEAELVPSEVLMHQAIHTIEFCLGCVSNTASYLRLWALSLAHARWNSRTSSTQARATS

SEQ ID NO: 66633 - protein, 614 aa, Homo sapiens
MTFLISYWGEQIGQKIRKITDCFHCHVFPFLQQEEARLGALQQLQQQSQELQEVLGETERFLSQVLGRVLQLLPPGQVQVHKMKAVYLALNQCSVSTTHKCLIAEAWCSVRDLPALQEALRDSSMEEGVSAVAHRIPCRDMPPTLIRTNRFTASFQGIVDAYGVGRYQEVNPAPYTIITFPFLFAVMFGDVGHGLLMFLFALAMVLAENRPAVKAAQNEIWQTFFRGRYLLLLMGLFSIYTGFIYNECFSRATSIFPSGWSVAAMANQSGWSDAFLAQHTMLTLDPNVTGVFLGPYPFGIDPIWSLAANHLSFLNSFKMKMSVILGVVHMAFGVVLGVFNHVHFGQRHRLLLETLPELTFLLGLFGYLVFLVIYKWLCVWAARAASAPSILIHFINMFLFSHSPSNRLLYPRQEVVQATLVVLALAMVPILLLGTPLHLLHRHRRRLRRRPADRQEENKAGLLDLPDASVNGWSSDEEKAGGLDDEEEAELVPSEVLMHQAIHTIEFCLGCVSNTASYLRLWALSLAHAQLSEVLWAMVMRIGLGLGREVGVAAVVLVPIFAAFAVMTVAILLVMEGLSAFLHALRLHWVEFQNKFYSGTGYKLSPFTFAATDD

SEQ ID NO: 66634 - protein, 118 aa, Homo sapiens
MVPILLLGTPLHLLHRHRRRLRRRPADRQEENKAGLLDLPDASVNGWSSDEEKAGGLDDEEEAELVPSEVLMHQAIHTIEFCLGCVSNTASYLRLWALSLAHARWNSRTSSTQARATS

SEQ ID NO: 66635 - protein, 556 aa, Homo sapiens
MEGPLSVFGDRSTGETIRSQNVMAAASIANIVKSSLGPVGLDKMLVDDIGDVTITNDGATILKLLEVEHPAAKVLCELADLQDKEVGDGTTSVVIIAAELLKNADELVKQKIHPTSVISGYRLACKEAVRYINENLIVNTDELGRDCLINAAKTSMSSKIIGINGDFFANMVVDAVLAIKYTDIRGQPRYPVNSVNILKAHGRSQMESMLISGYALNCVVGSQGMPKRIVNAKIACLDFSLQKTKMKLGVQVVITDPEKLDQIRQRESDITKERIQKILATGANVILTTGGIDDMCLKYFVEAGAMAVRRVLKRDLKRIAKASGATILSTLANLEGEETFEAAMLGQAEEVVQERICDDELILIKNTKARTSASIILRGANDFMCDEMERSLHDALCVVKRVLESKSVVPGGGAVEAALSIYLENYATSMGSREQLAIAEFARSLLVIPNTLAVNAAQDSTDLVAKLRAFHNEAQVNPERKNLKWIGLDLSNGKPRDNKQAGVFEPTIVKVKSLKFATEAAITILRIDDLIKLHPESKDDKHGSYEDAVHSGALND

SEQ ID NO: 66636 - protein, 401 aa, Homo sapiens
MSSKIIGINGDFFANMVVDAVLAIKYTDIRGQPRYPVNSVNILKAHGRSQMESMLISGYALNCVVGSQGMPKRIVNAKIACLDFSLQKTKMKLGVQVVITDPEKLDQIRQRESDITKERIQKILATGANVILTTGGIDDMCLKYFVEAGAMAVRRVLKRDLKRIAKASGATILSTLANLEGEETFEAAMLGQAEEVVQERICDDELILIKNTKARTSASIILRGANDFMCDEMERSLHDALCVVKRVLESKSVVPGGGAVEAALSIYLENYATSMGSREQLAIAEFARSLLVIPNTLAVNAAQDSTDLVAKLRAFHNEAQVNPERKNLKWIGLDLSNGKPRDNKQAGVFEPTIVKVKSLKFATEAAITILRIDDLIKLHPESKDDKHGSYEDAVHSGALND

SEQ ID NO: 66637 - protein, 433 aa, Homo sapiens
MEGPLSVFGDRSTGETIRSQNVMAAASIANIVKSSLGPVGLDKMLVDDIGDVTITNDGATILKLLEVEHPAAKVLCELADLQDKEVGDGTTSVVIIAAELLKNADELVKQKIHPTSVISGYRLACKEAVRYINENLIVNTDELGRDCLINAAKTSMSSKIIGINGDFFANMVVDAVLAIKYTDIRGQPRYPVNSVNILKAHGRSQMESMLISGYALNCVVGSQGMPKRIVNAKIACLDFSLQKTKMKLGVQVVITDPEKLDQIRQRESDITKERIQKILATGANVILTTGGIDDMCLKYFVEAGAMAVRRVLKRDLKRIAKASGATILSTLANLEGEETFEAAMLGQAEEVVQERICDDELILIKNTKARTSASIILRGANDFMCDEMERSLHDALCVVKRVLESKSVVPGGGAVEAALSIYLENYATSMDWS

SEQ ID NO: 66638 - protein, 215 aa, Homo sapiens
MLAGQLEARDPKEGTHPEDPCPGAGAVMEKTAVAAEVLTEDCNTGEMPPLQQQIIRLHQELGRQKSLWADVHGKLRSHIDALREQNMELREKLRALQLQRWKARKKSAASPHAGQESHTLALEPAFGKISPLSADEETIPKYAGHKNQSATLLGQRSSSNNSAPPKPMSLKIERISSWKTPPQENRDKNLSRRRQDRRATPTGRPTPCAERRGGV

SEQ ID NO: 66639 - protein, 326 aa, Homo sapiens
MEKTPAAAEVPREDSNAGEMPSLQQQITSLHQELGRQQSLWADIHRKLQSHMDALRKQNRELREELRGLQRQQWEAGKKPAASPHAGRESHTLALEPAFGKISHLSADEDTTPKYAGRKSQSATLLGQRWSSNHLAPPKPMSLKTERINSGKTPPQEDREKSPPGRRQDRSPAPTGRPTPGAERRGVSEDGKIMHPSSRSPQNSGGRKSPVQASQATTLQEQTAAARGADRSSSVLGSSEGGFLSRVQADEFASSAPDSAERQNLPVNPPSSLEIAQAMDTKMKKEEVQEEKRHPKGKADDCRRSGFPSEFPGALHAAPSRQDMGP

SEQ ID NO: 66640 - protein, 441 aa, Homo sapiens
MAPKGILGSFPTAMNLSLEGKVKETVHNAFWDHLKEQLSATPPDFSCALELLKEIKEILLSLLLPRQNRLRIEIEEALDMDLLKQEAEHGALKVLYLSKYVLNMMALLCAPVRDEAVQKLENITDPVWLLRGIFQVLGRMKMDMVNYTIQSLQPHLQEHSIQYERAKFQELLNKQPSLLNHTTKWLTQAAGDLTMSPPTCPDTSDSSSVAGPSPNEAANNPEPLSPTMVLCQGFLNLLLWDLENEEFPETLLMDRTRLQELKSQLHQLTVMASVLLVASSFSGSVLFGSPQFVDKLKRITKSLLEDFHSRPEEAILTVSEQVSQEIHQSLKNMGLVALSSDNTASLMGQLQNIAKKENCVCSVIDQRIHLFLKCCLVLGVQRSLLDLPGGLTLIEAELAELGQKFVNLTHHNQQVFGPYYTEILKTLISPAQALETKVESV

SEQ ID NO: 66641 - protein, 516 aa, Homo sapiens
MTRGGGGGDTISKMPDVKESVPPKYPGDSEGRSCKPETSGPPQEDKSGSEDPPPFLSVTGLTETVNEVSKLSNKIGMNCDYYMEEKVLPPSSLEGKVKETVHNAFWDHLKEQLSATPPDFSCALELLKEIKEILLSLLLPRQNRLRIEIEEALDMDLLKQEAEHGALKVLYLSKYVLNMMALLCAPVRDEAVQKLENITDPVWLLRGIFQVLGRMKMDMVNYTIQSLQPHLQEHSIQYERAKFQELLNKQPSLLNHTTKWLTQAAGDLTMSPPTCPDTSDSSSVAGPSPNEAANNPEPLSPTMVLCQGFLNLLLWDLENEEFPETLLMDRTRLQELKSQLHQLTVMASVLLVASSFSGSVLFGSPQFVDKLKRITKSLLEDFHSRPEEAILTVSEQVSQEIHQSLKNMGLVALSSDNTASLMGQLQNIAKKENCVCSVIDQRIHLFLKCCLVLGVQRSLLDLPGGLTLIEAELAELGQKFVNLTHHNQQVFGPYYTEILKTLISPAQALETKVESV

SEQ ID NO: 66642 - protein, 273 aa, Homo sapiens
GLSHRATPQPAAPPRWYAPGRQAARPTERTPVDDPRRGRRSLEGKVKETVHNAFWDHLKEQLSATPPDFSCALELLKEIKEILLSLLLPRQNRLRIEIEEALDMDLLKQEAEHGALKVLYLSKYVLNMMALLCAPVRDEAVQKLENITDPVWLLRGIFQVLGRMKMDMVNYTIQSLQPHLQEHSIQYERAKFQELLNKQPSLLNHTTKWLTQAAGDLTMSPPTCPDTSDSSSVAGPSPNEAANNPEPLSPTMVLCQGFLNLLLWDLENEEFPE

SEQ ID NO: 66643 - protein, 441 aa, Homo sapiens; identical to SEQ ID NO: 66640

SEQ ID NO: 66644 - protein, 103 aa, Homo sapiens
MAPKGILGSFPTAMNLSLEGKVKETVHNAFWDHLKEQLSATPPDFSCALELLKEIKEILLSLLLPRQNRLRIEIEEALDMDLLKQEAEHGALKVLYLSKYVLN

SEQ ID NO: 66645 - protein, 503 aa, Homo sapiens
MPDVKESVPPKYPGDSEGRSCKPETSGPPQEDKSGSEDPPPFLSVTGLTETVNEVSKLSNKIGMNCDYYMEEKVLPPSSLEGKVKETVHNAFWDHLKEQLSATPPDFSCALELLKEIKEILLSLLLPRQNRLRIEIEEALDMDLLKQEAEHGALKVLYLSKYVLNMMALLCAPVRDEAVQKLENITDPVWLLRGIFQVLGRMKMDMVNYTIQSLQPHLQEHSIQYERAKFQELLNKQPSLLNHTTKWLTQAAGDLTMSPPTCPDTSDSSSVAGPSPNEAANNPEPLSPTMVLCQGFLNLLLWDLENEEFPETLLMDRTRLQELKSQLHQLTVMASVLLVASSFSGSVLFGSPQFVDKLKRITKSLLEDFHSRPEEAILTVSEQVSQEIHQSLKNMGLVALSSDNTASLMGQLQNIAKKENCVCSVIDQRIHLFLKCCLVLGVQRSLLDLPGGLTLIEAELAELGQKFVNLTHHNQQVFGPYYTEILKTLISPAQALETKVESV

SEQ ID NO: 66646 - protein, 470 aa, Homo sapiens
MTRGGGGGVLSVTGLTETVNEVSKLSNKIGMNCDYYMEEKVLPPSSLEGKVKETVHNAFWDHLKEQLSATPPDFSCALELLKEIKEILLSLLLPRQNRLRIEIEEALDMDLLKQEAEHGALKVLYLSKYVLNMMALLCAPVRDEAVQKLENITDPVWLLRGIFQVLGRMKMDMVNYTIQSLQPHLQEHSIQYERAKFQELLNKQPSLLNHTTKWLTQAAGDLTMSPPTCPDTSDSSSVAGPSPNEAANNPEPLSPTMVLCQGFLNLLLWDLENEEFPETLLMDRTRLQELKSQLHQLTVMASVLLVASSFSGSVLFGSPQFVDKLKRITKSLLEDFHSRPEEAILTVSEQVSQEIHQSLKNMGLVALSSDNTASLMGQLQNIAKKENCVCSVIDQRIHLFLKCCLVLGVQRSLLDLPGGLTLIEAELAELGQKFVNLTHHNQQVFGPYYTEILKTLISPAQALETKVESV

SEQ ID NO: 66647 - protein, 465 aa, Homo sapiens
MTRGGGGGGLTETVNEVSKLSNKIGMNCDYYMEEKVLPPSSLEGKVKETVHNAFWDHLKEQLSATPPDFSCALELLKEIKEILLSLLLPRQNRLRIEIEEALDMDLLKQEAEHGALKVLYLSKYVLNMMALLCAPVRDEAVQKLENITDPVWLLRGIFQVLGRMKMDMVNYTIQSLQPHLQEHSIQYERAKFQELLNKQPSLLNHTTKWLTQAAGDLTMSPPTCPDTSDSSSVAGPSPNEAANNPEPLSPTMVLCQGFLNLLLWDLENEEFPETLLMDRTRLQELKSQLHQLTVMASVLLVASSFSGSVLFGSPQFVDKLKRITKSLLEDFHSRPEEAILTVSEQVSQEIHQSLKNMGLVALSSDNTASLMGQLQNIAKKENCVCSVIDQRIHLFLKCCLVLGVQRSLLDLPGGLTLIEAELAELGQKFVNLTHHNQQVFGPYYTEILKTLISPAQALETKVESV

SEQ ID NO: 66648 - protein, 54 aa, Homo sapiens
MTRGGGGGDTISKMPDVKESVPPKYPGDSEGRSCKPETSGPPQEDKSGSEDPPP

SEQ ID NO: 66649 - protein, 54 aa, Homo sapiens; identical to SEQ ID NO: 66648

SEQ ID NO: 66650 - protein, 198 aa, Homo sapiens
MFFERHLENLLKHFIPGTTDPAVILDLLPLCRNYVRRVHVDQFLPPVQLPAQLRPGDQSDSGSEGEMEEPTVDHYQLGDLVAGLSHLEELDLVYDVKDCGMNFEWNLFLFTYRDCLSLAAAIKACHTLKDGGKQLLEGMSDNKTLLEFDLRLSDVAQESEYLIGQALYANREAARQRALNPSHFMSTITANGPENSVG

SEQ ID NO: 66651 - protein, 198 aa, Homo sapiens; identical to SEQ ID NO: 66650

SEQ ID NO: 66652 - protein, 501 aa, Homo sapiens
MQDTVTTSALLDPSHSSVSTQDNSSTGGHTSSTSPQLSKPSITPVPAKSRNPHPRANIRRMRRIIAEDPEWSLAIVPLLTELCIQHIIRNFQKNPILKQMLPEHQQKVLNHLSPDLPLAVTANLIDSENYWLRCCMHRWPVCHVAHHGGSWKRMFFERHLENLLKHFIPGTTDPAVILDLLPLCRNYVRRVHVDQFLPPVQLPAQLRPGDQSDSGSEGEMEEPTVDHYQLGDLVAGLSHLEELDLVYDVKDCGMNFEWNLFLFTYRDCLSLAAAIKACHTLKIFKLTRSKVDDDKARIIIRSLLDHPVLEELDLSQNLIGDRGARGAAKLLSHSRLRVLNLANNQVRAPGAQSLAHALAHNTNLISLNLRLNCIEDEGGQALAHALQTNKCLTTLHLGGNELSEPTATLLSQVLAINTTLTSINLSCNHIGLDGGKQLLEGMSDNKTLLEFDLRLSDVAQESEYLIGQALYANREAARQRALNPSHFMSTITANGPENSVG

SEQ ID NO: 66653 - protein, 198 aa, Homo sapiens
MEKRGRGVKSSPIQTPNQTPQQAPVTPRKERRPSMFEKEAYTQILRERLRESIHNVQYVEPPFDDSIADIGKEWKSALAKLKFANSYRMEPLKKFQAHSVETKVQQILTESLKDVKYDDKVFSHLSLELADRILLAVKEFGYHRYKFIIKVLFIQKTGQAINIASRWIWDIAWDSWVAAKHEAESYVALVLVFALYYE

SEQ ID NO: 66654 - protein, 221 aa, Homo sapiens
MASRPLPPGRQEEENAKDSGRKPSPVRPRGCLPSIDEARPAGPGPAPASRRGSMLGLAASFSRRNSLVGPGAGPGGQRPSLGPVPPLGSRVSFSGLPLAPARWVAPSYRTEPVPGERWEAARAQRALEAALAAGLHDACYSSDEAARLVRELCEQVHVRLRELSPPRYKLVCSVVLGPRAGQGVHVVSRALWDVARDGLASVSYTNTSLFAVATVHGLYCE

SEQ ID NO: 66655 - protein, 221 aa, Homo sapiens; identical to SEQ ID NO: 66654

SEQ ID NO: 66656 - protein, 357 aa, Homo sapiens
MERMSDSADKPIDNDAEGVWSPDIEQSFQEALAIYPPCGRRKIILSDEGKMYGRNELIARYIKLRTGKTRTRKQVSSHIQVLARRKSRDFHSKLKVTSMDQTAKDKALQHMAAMSSAQIVSATAIHNKLGLPGIPRPTFPGAPGFWPGMIQTGQPGSSQDVKPFVQQAYPIQPAVTAPIPGFEPASAPAPSVPAWQGRSIGTTKLRLVEFSAFLEQQRDPDSADLNCNIQDDAGAFYGVTSQYESSENMTVTCSTKVCSFGKQVVEKVETEYARFENGRFVYRINRSPMCEYMINFIHKLKHLPEKYMMNSVLENFTILLVVTNRDTQETLLCMACVFEVSNSEHGAQHHIYRLVKD

SEQ ID NO: 66657 - protein, 411 aa, Homo sapiens
MERMSDSADKPIDNDAEGVWSPDIEQSFQEALAIYPPCGRRKIILSDEGKMYGRNELIARYIKLRTGKTRTRKQVSSHIQVLARRKSRDFHSKLKDQTAKDKALQHMAAMSSAQIVSATAIHNKLGLPGIPRPTFPGAPGFWPGMIQTGQPGSSQDVKPFVQQAYPIQPAVTAPIPGFEPASAPAPSVPAWQGRSIGTTKLRLVEFSAFLEQQRDPDSYNKHLFVHIGHANHSYSDPLLESVDIRQIYDKFPEKKGGLKELFGKGPQNAFFLVKFWADLNCNIQDDAGAFYGVTSQYESSENMTVTCSTKVCSFGKQVVEKVETEYARFENGRFVYRINRSPMCEYMINFIHKLKHLPEKYMMNSVLENFTILLVVTNRDTQETLLCMACVFEVSNSEHGAQHHIYRLVKD

SEQ ID NO: 66658 - protein, 426 aa, Homo sapiens
IEPSSWSGSESPAENMERMSDSADKPIDNDAEGVWSPDIEQSFQEALAIYPPCGRRKIILSDEGKMYGRNELIARYIKLRTGKTRTRKQVSSHIQVLARRKSRDFHSKLKDQTAKDKALQHMAAMSSAQIVSATAIHNKLGLPGIPRPTFPGAPGFWPGMIQTGQPGSSQDVKPFVQQAYPIQPAVTAPIPGFEPASAPAPSVPAWQGRSIGTTKLRLVEFSAFLEQQRDPDSYNKHLFVHIGHANHSYSDPLLESVDIRQIYDKFPEKKGGLKELFGKGPQNAFFLVKFWADLNCNIQDDAGAFYGVTSQYESSENMTVTCSTKVCSFGKQVVEKVETEYARFENGRFVYRINRSPMCEYMINFIHKLKHLPEKYMMNSVLENFTILLVVTNRDTQETLLCMACVFEVSNSEHGAQHHIYRLVKD

SEQ ID NO: 66659 - protein, 330 aa, Homo sapiens
MRYVLSWCVTVTFKDQTAKDKALQHMAAMSSAQIVSATAIHNKLGLPGIPRPTFPGAPGFWPGMIQTGQPGSSQDVKPFVQQAYPIQPAVTAPIPGFEPASAPAPSVPAWQGRSIGTTKLRLVEFSAFLEQQRDPDSYNKHLFVHIGHANHSYSDPLLESVDIRQIYDKFPEKKGGLKELFGKGPQNAFFLVKFWADLNCNIQDDAGAFYGVTSQYESSENMTVTCSTKVCSFGKQVVEKVETEYARFENGRFVYRINRSPMCEYMINFIHKLKHLPEKYMMNSVLENFTILLVVTNRDTQETLLCMACVFEVSNSEHGAQHHIYRLVKD

SEQ ID NO: 66660 - protein, 68 aa, Homo sapiens
IEPSSWSGSESPAENMERMSDSADKPIDNDAEGVWSPDIEQSFQEALAIYPPCGRRKIILSDEGKMYG

SEQ ID NO: 66661 - protein, 426 aa, Homo sapiens; identical to SEQ ID NO: 66658

SEQ ID NO: 66662 - protein, 447 aa, Homo sapiens
MGEPRAGAALDDGSGWTGSEEGSEEGTGGSEGAGGDGGPDAEGVWSPDIEQSFQEALAIYPPCGRRKIILSDEGKMYGRNELIARYIKLRTGKTRTRKQVSSHIQVLARRKSREIQSKLKDQVSKDKAFQTMATMSSAQLISAPSLQAKLGPTGPQASELFQFWSGGSGPPWNVPDVKPFSQTPFTLSLTPPSTDLPGYEPPQALSPLPPPTPSPPAWQARGLGTARLQLVEFSAFVEPPDAVDSYQRHLFVHISQHCPSPGAPPLESVDVRQIYDKFPEKKGGLRELYDRGPPHAFFLVKFWADLNWGPSGEEAGAGGSISSGGFYGVSSQYESLEHMTLTCSSKVCSFGKQVVEKVETERAQLEDGRFVYRLLRSPMCEYLVNFLHKLRQLPERYMMNSVLENFTILQVVTNRDTQELLLCTAYVFEVSTSERGAQHHIYRLVRD

SEQ ID NO: 66663 - protein, 450 aa, Homo sapiens
MGEPRAGAALDDGSGWTGSEEGSEEGTGGSEGAGGDGGPDAEGVWSPDIEQSFQEALAIYPPCGRRKIILSDEGKMYGRNELIARYIKLRTGKTRTRKQVSSHIQVLARRKSREIQSKLKDQVSKDKAFQTMATMSSAQLISAPSLQAKLGPTGPQVVQASELFQFWSGGSGPPWNVPDVKPFSQTPFTLSLTPPSTDLPGYEPPQALSPLPPPTPSPPAWQARGLGTARLQLVEFSAFVEPPDAVDSYQRHLFVHISQHCPSPGAPPLESVDVRQIYDKFPEKKGGLRELYDRGPPHAFFLVKFWADLNWGPSGEEAGAGGSISSGGFYGVSSQYESLEHMTLTCSSKVCSFGKQVVEKVETERAQLEDGRFVYRLLRSPMCEYLVNFLHKLRQLPERYMMNSVLENFTILQVVTNRDTQELLLCTAYVFEVSTSERGAQHHIYRLVRD

SEQ ID NO: 66664 - protein, 319 aa, Homo sapiens
MATMSSAQLISAPSLQAKLGPTGPQVVQASELFQFWSGGSGPPWNVPDVKPFSQTPFTLSLTPPSTDLPGYEPPQALSPLPPPTPSPPAWQARGLGTARLQLVEFSAFVEPPDAVDSYQRHLFVHISQHCPSPGAPPLESVDVRQIYDKFPEKKGGLRELYDRGPPHAFFLVKFWADLNWGPSGEEAGAGGSISSGGFYGVSSQYESLEHMTLTCSSKVCSFGKQVVEKVETERAQLEDGRFVYRLLRSPMCEYLVNFLHKLRQLPERYMMNSVLENFTILQVVTNRDTQELLLCTAYVFEVSTSERGAQHHIYRLVRD

SEQ ID NO: 66665 - protein, 451 aa, Homo sapiens
MGEPRAGAALDDGSGWTGSEEGSEEGTGGSEGAGGDGGPDAEGVWSPDIEQSFQEALAIYPPCGRRKIILSDEGKMYGRNELIARYIKLRTGKTRTRKQVSSHIQVLARRKSREIQSKLKALNVDQVSKDKAFQTMATMSSAQLISAPSLQAKLGPTGPQASELFQFWSGGSGPPWNVPDVKPFSQTPFTLSLTPPSTDLPGYEPPQALSPLPPPTPSPPAWQARGLGTARLQLVEFSAFVEPPDAVDSYQRHLFVHISQHCPSPGAPPLESVDVRQIYDKFPEKKGGLRELYDRGPPHAFFLVKFWADLNWGPSGEEAGAGGSISSGGFYGVSSQYESLEHMTLTCSSKVCSFGKQVVEKVETERAQLEDGRFVYRLLRSPMCEYLVNFLHKLRQLPERYMMNSVLENFTILQVVTNRDTQELLLCTAYVFEVSTSERGAQHHIYRLVRD

SEQ ID NO: 66666 - protein, 451 aa, Homo sapiens; identical to SEQ ID NO: 66665

SEQ ID NO: 66667 - protein, 450 aa, Homo sapiens; identical to SEQ ID NO: 66663

SEQ ID NO: 66668 - protein, 435 aa, Homo sapiens
IASNSWNASSSPGEAREDGPEGLDKGLDNDAEGVWSPDIEQSFQEALAIYPPCGRRKIILSDEGKMYGRNELIARYIKLRTGKTRTRKQVSSHIQVLARKKVREYQVGIKAMNLDQVSKDKALQSMASMSSAQIVSASVLQNKFSPPSPLPQAVFSTSSRFWSSPPLLGQQPGPSQDIKPFAQPAYPIQPPLPPTLSSYEPLAPLPSAAASVPVWQDRTIASSRLRLLEYSAFMEVQRDPDTYSKHLFVHIGQTNPAFSDPPLEAVDVRQIYDKFPEKKGGLKELYEKGPPNAFFLVKFWADLNSTIQEGPGAFYGVSSQYSSADSMTISVSTKVCSFGKQVVEKVETEYARLENGRFVYRIHRSPMCEYMINFIHKLKHLPEKYMMNSVLENFTILQVVTSRDSQETLLVIAFVFEVSTSEHGAQHHVYKLVKD

SEQ ID NO: 66669 - protein, 451 aa, Homo sapiens
LSRPVGSGPEPRATSTIASNSWNASSSPGEAREDGPEGLDKGLDNDAEGVWSPDIEQSFQEALAIYPPCGRRKIILSDEGKMYGRNELIARYIKLRTGKTRTRKQVSSHLQVLARRKSREIQSKLKSSPQDQVSKDKALQSMASMSSAQIVSASVLQNKFSPPSPLPQAVFSTSSRFWSSPPLLGQQPGPSQDIKPFAQPAYPIQPPLPPTLSSYEPLAPLPSAAASVPVWQDRTIASSRLRLLEYSAFMEVQRDPDTYSKHLFVHIGQTNPAFSDPPLEAVDVRQIYDKFPEKKGGLKELYEKGPPNAFFLVKFWADLNSTIQEGPGAFYGVSSQYSSADSMTISVSTKVCSFGKQVVEKVETEYARLENGRFVYRIHRSPMCEYMINFIHKLKHLPEKYMMNSVLENFTILQVVTSRDSQETLLVIAFVFEVSTSEHGAQHHVYKLVKD

SEQ ID NO: 66670 - protein, 391 aa, Homo sapiens
LEGTAGTITSNEWSSPTSPEGSTASGGSQALDKPIDNDAEGVWSPDIEQSFQEALAIYPPCGRRKIILSDEGKMYGRNELIARYIKLRTGKTRTRKQVSSHIQVLARRKAREIQAKLKFWQGALPGQAGTSHDVKPFSQQTYAVQPPLPLPGFESPAGPAPSPSAPPAPPWQGRSVASSKLWMLEFSAFLEQQQDPDTYNKHLFVHIGQSSPSYSDPYLEAVDIRQIYDKFPEKKGGLKDLFERGPSNAFFLVKFWADLNTNIEDEGSSFYGVSSQYESPENMIITCSTKVCSFGKQVVEKVETEYARYENGHYSYRIHRSPLCEYMINFIHKLKHLPEKYMMNSVLENFTILQVVTNRDTQETLLCIAYVFEVSASEHGAQHHIYRLVKE

SEQ ID NO: 66671 - protein, 434 aa, Homo sapiens
LEGTAGTITSNEWSSPTSPEGSTASGGSQALDKPIDNDAEGVWSPDIEQSFQEALAIYPPCGRRKIILSDEGKMYGRNELIARYIKLRTGKTRTRKQVSSHIQVLARRKAREIQAKLKDQAAKDKALQSMAAMSSAQIISATAFHSSMALARGPGRPAVSGFWQGALPGQAGTSHDVKPFSQQTYAVQPPLPLPGFESPAGPAPSPSAPPAPPWQGRSVASSKLWMLEFSAFLEQQQDPDTYNKHLFVHIGQSSPSYSDPYLEAVDIRQIYDKFPEKKGGLKDLFERGPSNAFFLVKFWADLNTNIEDEGSSFYGVSSQYESPENMIITCSTKVCSFGKQVVEKVETEYARYENGHYSYRIHRSPLCEYMINFIHKLKHLPEKYMMNSVLENFTILQVVTNRDTQETLLCIAYVFEVSASEHGAQHHIYRLVKE

SEQ ID NO: 66672 - protein, 305 aa, Homo sapiens
MAAMSSAQIISATAFHSSMALARGPGRPAVSGFWQGALPGQAGTSHDVKPFSQQTYAVQPPLPLPGFESPAGPAPSPSAPPAPPWQGRSVASSKLWMLEFSAFLEQQQDPDTYNKHLFVHIGQSSPSYSDPYLEAVDIRQIYDKFPEKKGGLKDLFERGPSNAFFLVKFWADLNTNIEDEGSSFYGVSSQYESPENMIITCSTKVCSFGKQVVEKVETEYARYENGHYSYRIHRSPLCEYMINFIHKLKHLPEKYMMNSVLENFTILQVVTNRDTQETLLCIAYVFEVSASEHGAQHHIYRLVKE

SEQ ID NO: 66673 - protein, 72 aa, Homo sapiens
LEGTAGTITSNEWSSPTSPEGSTASGGSQALDKPIDNDAEGVWSPDIEQSFQEALAIYPPCGRRKIILSDEG

SEQ ID NO: 66674 - protein, 22 aa, Homo sapiens
LEGTAGTITSNEWSSPTSPEGS

SEQ ID NO: 66675 - protein, 175 aa, Homo sapiens
LEGTAGTITSNEWSSPTSPEGSTASGGSQALDKPIDNDAEGVWSPDIEQSFQEALAIYPPCGRRKIILSDEGKMYGRNELIARYIKLRTGKTRTRKQVSSHIQVLARRKAREIQAKLKDQAAKDKALQSMAAMSSAQIISATAFHSSMALARGPGRPAVSGFWQGALPGQAGTSH

SEQ ID NO: 66676 - protein, 1032 aa, Homo sapiens
MCNEETEIKEAQSYQNSPVSSATNQDAGYGSPFSESSDQLAHFKGSSSREEKEDPQCPDSVSYPQDSLAQIKAVYANLFSESCWSSLALDLKKSGSTTSTNDASQKESSAPTPTPPTCPVSTTGPTTSTPSTSCSSSTSHSSTTSTSSSSGYDWHQAALAKTLQQTSSYGLLPEPSLFSTVQLYRQNNKLYGSVFTGASKFRCKDCSAAYDTLVELTVHMNETGHYRDDNRDKDSEKTKRWSKPRKRSLMEMEGKEDAQKVLKCMYCGHSFESLQDLSVHMIKTKHYQKVPLKEPVPAITKLVPSTKKRALQDLAPPCSPEPAGMAAEVALSESAKDQKAANPYVTPNNRYGYQNGASYTWQFEARKAQILKCMECGSSHDTLQQLTAHMMVTGHFLKVTTSASKKGKQLVLDPVVEEKIQSIPLPPTTHTRLPASSIKKQPDSPAGSTTSEEKKEPEKEKPPVAGDAEKIKEESEDSLEKFEPSTLYPYLREEDLDDSPKGGLDILKSLENTVSTAISKAQNGAPSWGGYPSIHAAYQLPGTVKPLPAAVQSVQVQPSYAGGVKSLSSAEHNALLHSPGSLTPPPHKSNVSAMEELVEKVTGKVNIKKEERPPEKEKSSLAKAASPIAKENKDFPKTEEVSGKPQKKGPEAETGKAKKEGPLDVHTPNGTEPLKAKVTNGCNNLGIIMDHSPEPSFINPLSALQSIMNTHLGKVSKPVSPSLDPLAMLYKISNSMLDKPVYPATPVKQADAIDRYYYENSDQPIDLTKSKNKPLVSSVADSVASPLRESALMDISDMVKNLTGRLTPKSSTPSTVSEKSDADGSSFEEALDELSPVHKRKGRQSNWNPQHLLILQAQFASSLRETTEGKYIMSDLGPQERVHISKFTGLSMTTISHWLANVKYQLRRTGGTKFLKNLDTGHPVFFCNDCASQFRTASTYISHLETHLGFSLKDLSKLPLNQIQEQQNVSKVLTNKTLGPLGATEEDLGSTFQCKLCNRTFASKHAVKLHLSKTHGKSPEDHLIYVTELEKQ

SEQ ID NO: 66677 - protein, 78 aa, Homo sapiens
MCNEETEIKEAQSYQNSPVSSATNQDAGYGSPFSESSDQLAHFKGSSSREEKEDPQCPDSVSYPQDSLAQIKAVYANL

SEQ ID NO: 66678 - protein, 106 aa, Homo sapiens
MCNEETEIKEAQSYQNSPVSSATNQDAGYGSPFSESSDQLAHFKGSSSREEKEDPQCPDSVSYPQDSLAQIKAVYANLFSESCWSSLALDLKKSGSTTSTNDASQK

SEQ ID NO: 66679 - protein, 1031 aa, Homo sapiens
MMAAALLHYTGYAQEEQLKEEEEIKEEEEEEDSGSVAQLQGGNDTGTDEELETGPEQKGCFSYQNSPGSHLSNQDAENESLLSDASDQVSDIKSVCGRDASDKKAHTHVRLPNEAHNCMDKMTAVYANILSDSYWSGLGLGFKLSNSERRNCDTRNGSNKSDFDWHQDALSKSLQQNLPSRSVSKPSLFSSVQLYRQSSKMCGTVFTGASRFRCRQCSAAYDTLVELTVHMNETGHYQDDNRKKDKLRPTSYSKPRKRAFQDMDKEDAQKVLKCMFCGDSFDSLQDLSVHMIKTKHYQKVPLKEPVPTISSKMVTPAKKRVFDVNRPCSPDSTTGSFADSFSSQKNANLQLSSNNRYGYQNGASYTWQFEACKSQILKCMECGSSHDTLQQLTTHMMVTGHFLKVTSSASKKGKQLVLDPLAVEKMQSLSEAPNSDSLAPKPSSNSASDCTASTTELKKESKKERPEETSKDEKVVKSEDYEDPLQKPLDPTIKYQYLREEDLEDGSKGGGDILKSLENTVTTAINKAQNGAPSWSAYPSIHAAYQLSEGTKPPLPMGSQVLQIRPNLTNKLRPIAPKWKVMPLVSMPTHLAPYTQVKKESEDKDEAVKECGKESPHEEASSFSHSEGDSFRKSETPPEAKKTELGPLKEEEKLMKEGSEKEKPQPLEPTSALSNGCALANHAPALPCINPLSALQSVLNNHLGKATEPLRSPSCSSPSSSTISMFHKSNLNVMDKPVLSPASTRSASVSRRYLFENSDQPIDLTKSKSKKAESSQAQSCMSPPQKHALSDIADMVKVLPKATTPKPASSSRVPPMKLEMDVRRFEDVSSEVSTLHKRKGRQSNWNPQHLLILQAQFASSLFQTSEGKYLLSDLGPQERMQISKFTGLSMTTISHWLANVKYQLRKTGGTKFLKNMDKGHPIFYCSDCASQFRTPSTYISHLESHLGFQMKDMTRLSVDQQSKVEQEISRVSSAQRSPETIAAEEDTDSKFKCKLCCRTFVSKHAVKLHLSKTHSKSPEHHSQFVTDVDEE

SEQ ID NO: 66680 - protein, 1034 aa, Homo sapiens
MPRRKQQAPKRAAGYAQEEQLKEEEEIKEEEEEEDSGSVAQLQGGNDTGTDEELETGPEQKGCFSYQNSPGSHLSNQDAENESLLSDASDQVSDIKSVCGRDASDKKAHTHVRLPNEAHNCMDKMTAVYANILSDSYWSGLGLGFKLSNSERRNCDTRNGSNKSDFDWHQDALSKSLQQNLPSRSVSKPSLFSSVQLYRQSSKMCGTVFTGASRFRCRQCSAAYDTLVELTVHMNETGHYQDDNRKKDKLRPTSYSKPRKRAFQDMDKEDAQKVLKCMFCGDSFDSLQDLSVHMIKTKHYQKVPLKEPVPTISSKMVTPAKKRVFDVNRPCSPDSTTGSFADSFSSQKNANLQLSSNNRYGYQNGASYTWQFEACKSQILKCMECGSSHDTLQQLTTHMMVTGHFLKVTSSASKKGKQLVLDPLAVEKMQSLSEAPNSDSLAPKPSSNSASDCTASTTELKKESKKERPEETSKDEKVVKSEDYEDPLQKPLDPTIKYQYLREEDLEDGSKGGGDILKSLENTVTTAINKAQNGAPSWSAYPSIHAAYQLSEGTKPPLPMGSQVLQIRPNLTNKLRPIAPKWKVMPLVSMPTHLAPYTQVKKESEDKDEAVKECGKESPHEEASSFSHSEGDSFRKSETPPEAKKTELGPLKEEEKLMKEGSEKEKPQPLEPTSALSNGCALANHAPALPCINPLSALQSVLNNHLGKATEPLRSPSCSSPSSSTISMFHKSNLNVMDKPVLSPASTRSASVSRRYLFENSDQPIDLTKSKSKKAESSQAQSCMSPPQKHALSDIADMVKVLPKATTPKPASSSRVPPMKLEMDVRRFEDVSSEVSTLHKRKGRQSNWNPQHLLILQAQFASSLFQTSEGKYLLSDLGPQERMQISKFTGLSMTTISHWLANVKYQLRKTGGTKFLKNMDKGHPIFYCSDCASQFRTPSTYISHLESHLGFQMKDMTRLSVDQQSKVEQEISRVSSAQRSPETIAAEEDTDSKFKCKLCCRTFVSKHAVKLHLSKTHSKSPEHHSQFVTDVDEE

SEQ ID NO: 66681 - protein, 1081 aa, Homo sapiens
MPRRKQQAPRRAAAYVSEELKAAALVDEGLDPEEHTADGEPSAKYMCPEKELARACPSYQNSPAAEFSCHEMDSESHISETSDRMADFESGSIKNEEETKEVTVPLEDTTVSDSLEQMKAVYNNFLSNSYWSNLNLNLHQPSSEKNNGSSSSSSSSSSSCGSGSFDWHQSAMAKTLQQVSQSRMLPEPSLFSTVQLYRQSSKLYGSIFTGASKFRCKDCSAAYDTLVELTVHMNETGHYRDDNHETDNNNPKRWSKPRKRSLLEMEGKEDAQKVLKCMYCGHSFESLQDLSVHMIKTKHYQKVPLKEPVTPVAAKIIPATRKKASLELELPSSPDSTGGTPKATISDTNDALQKNSNPYITPNNRYGHQNGASYAWHFEARKSQILKCMECGSSHDTLQELTAHMMVTGHFIKVTNSAMKKGKPIVETPVTPTITTLLDEKVQSVPLAATTFTSPSNTPASISPKLNVEVKKEVDKEKAVTDEKPKQKDKPGEEEEKCDISSKYHYLTENDLEESPKGGLDILKSLENTVTSAINKAQNGTPSWGGYPSIHAAYQLPNMMKLSLGSSGKSTPLKPMFGNSEIVSPTKNQTLVSPPSSQTSPMPKTNFHAMEELVKKVTEKVAKVEEKMKEPDGKLSPPKRATPSPCSSEVGEPIKMEASSDGGFRSQENSPSPPRDGCKDGSPLAEPVENGKELVKPLASSLSGSTAIITDHPPEQPFVNPLSALQSVMNIHLGKAAKPSLPALDPMSMLFKMSNSLAEKAAVATPPPLQSKKADHLDRYFYHVNNDQPIDLTKGKSDKGCSLGSVLLSPTSTAPATSSSTVTTAKTSAVVSFMSNSPLRENALSDISDMLKNLTESHTSKSSTPSSISEKSDIDGATLEEAEESTPAQKRKGRQSNWNPQHLLILQAQFAASLRQTSEGKYIMSDLSPQERMHISRFTGLSMTTISHWLANVKYQLRRTGGTKFLKNLDTGHPVFFCNDCASQIRTPSTYISHLESHLGFRLRDLSKLSTEQINSQIAQTKSPSEKMVTSSPEEDLGTSYQCKLCNRTFASKHAVKLHLSKTHGKSPEDHLLYVSELEKQ

SEQ ID NO: 66682 - protein, 631 aa, Homo sapiens
MNFNTILEEILIKRSQQKKKTSPLNYKERLFVLTKSMLTYYEGRAEKKYRKGFIDVSKIKCVEIVKNDDGVIPCQNKYPFQVVHDANTLYIFAPSPQSRDLWVKKLKEEIKNNNNIMIKYHPKFWTDGSYQCCRQTEKLAPGCEKYNLFESSIRKALPPAPETKKRRPPPPIPLEEEDNSEEIVVAMYDFQAAEGHDLRLERGQEYLILEKNDVHWWRARDKYGNEGYIPSNYVTGKKSNNLDQYEWYCRNMNRSKAEQLLRSEDKEGGFMVRDSSQPGLYTVSLYTKFGGEGSSGFRHYHIKETTTSPKKYYLAEKHAFGSIPEIIEYHKHNAAGLVTRLRYPVSVKGKNAPTTAGFSYEKWEINPSELTFMRELGSGLFGVVRLGKWRAQYKVAIKAIREGAMCEEDFIEEAKVMMKLTHPKLVQLYGVCTQQKPIYIVTEFMERGCLLNFLRQRQGHFSRDVLLSMCQDVCEGMEYLERNSFIHRDLAARNCLVSEAGVVKVSDFGMARYVLDDQYTSSSGAKFPVKWCPPEVFNYSRFSSKSDVWSFGVLMWEVFTEGRMPFEKYTNYEVVTMVTRGHRLYQPKLASNYVYEVMLRCWQEKPEGRPSFEDLLRTIDELVECEETFGR

SEQ ID NO: 66683 - protein, 697 aa, Homo sapiens
MGFQPPAALLLRLFLLQGILRLLWGDLAFIPPFIRMSGPAVSASLVGDTEGVTVSLAVLQDEAGILPIPTCGVLNNETEDWSVTVIPGAKVLEVTVRWKRGLDWCSSNETDSFSESPCILQTLLVSASHNSSCSAHLLIQVEIYANSSLTHNASENVTVIPNQVYQPLGPCPCNLTAGACDVRCCCDQECSSNLTTLFRRSCFTGVFGGDVNPPFDQLCSAGTTTRGVPDWFPFLCVQSPLANTPFLGYFYHGAVSPKQDSSFEVYVDTDAKDFADFGYKQGDPIMTVKKAYFTIPQVSLAGQCMQNAPVAFLHNFDVKCVTNLELYQERDGIINAKIKNVALGGIVTPKVIYEEATDLDKFITNTETPLNNGSTPRIVNVEEHYIFKWNNNTISEINVKIFRAEINAHQKGIMTQRFVVKFLSYNSGNEEELSGNPGYQLGKPVRALNINRMNNVTTLHLWQSAGRGLCTSATFKPILFGENVLSGCLLEVGINENCTQLRENAVERLDSLIQATHVAMRGNSDYADLSDGWLEIIRVDAPDPGADPLASSVNGMCLDIPAHLSIRILISDAGAVEGITQQEILGVETRFSSVNWQYQCGLTCEHKADLLPISASVQFIKIPAQLPHPLTRFQINYTEYDCNRNEVCWPQLLYPWTQYYQGELHSQCVAKGLLLLLFLTLALFLSNPWTRICKAYS

SEQ ID NO: 66684 - protein, 696 aa, Homo sapiens
MGFQPPAALLLRLFLLQGILRLLWGDLAFIPPFIRMSGPAVSASLVGDTEGVTVSLAVLQDEAGILPIPTCGVLNNETEDWSVTVIPGAVLEVTVRWKRGLDWCSSNETDSFSESPCILQTLLVSASHNSSCSAHLLIQVEIYANSSLTHNASENVTVIPNQVYQPLGPCPCNLTAGACDVRCCCDQECSSNLTTLFRRSCFTGVFGGDVNPPFDQLCSAGTTTRGVPDWFPFLCVQSPLANTPFLGYFYHGAVSPKQDSSFEVYVDTDAKDFADFGYKQGDPIMTVKKAYFTIPQVSLAGQCMQNAPVAFLHNFDVKCVTNLELYQERDGIINAKIKNVALGGIVTPKVIYEEATDLDKFITNTETPLNNGSTPRIVNVEEHYIFKWNNNTISEINVKIFRAEINAHQKGIMTQRFVVKFLSYNSGNEEELSGNPGYQLGKPVRALNINRMNNVTTLHLWQSAGRGLCTSATFKPILFGENVLSGCLLEVGINENCTQLRENAVERLDSLIQATHVAMRGNSDYADLSDGWLEIIRVDAPDPGADPLASSVNGMCLDIPAHLSIRILISDAGAVEGITQQEILGVETRFSSVNWQYQCGLTCEHKADLLPISASVQFIKIPAQLPHPLTRFQINYTEYDCNRNEVCWPQLLYPWTQYYQGELHSQCVAKGLLLLLFLTLALFLSNPWTRICKAYS

SEQ ID NO: 66685 - protein, 607 aa, Homo sapiens
MRTPQLALLQVFFLVFPDGVRPQPSSSPSGAVPTSLELQRGTDGGTLQSPSEATATRPAVPGLPTVVPTLVTPSAPGNRTVDLFPVLPICVCDLTPGACDINCCCDRDCYLLHPRTVFSFCLPGSVRSSSWVCVDNSVIFRSNSPFPSRVFMDSNGIRQFCVHVNNSNLNYFQKLQKVNATNFQALAAEFGGESFTSTFQTQSPPSFYRAGDPILTYFPKWSVISLLRQPAGVGAGGLCAESNPAGFLESKSTTCTRFFKNLASSCTLDSALNAASYYNFTVLKVPRSMTDPQNMEFQVPVILTSQANAPLLAGNTCQNVVSQVTYEIETNGTFGIQKVSVSLGQTNLTVEPGASLQQHFILRFRAFQQSTAASLTSPRSGNPGYIVGKPLLALTDDISYSMTLLQSQGNGSCSVKRHEVQFGVNAISGCKLRLKKADCSHLQQEIYQTLHGRPRPEYVAIFGNADPAQKGGWTRILNRHCSISAINCTSCCLIPVSLEIQVLWAYVGLLSNPQAHVSGVRFLYQCQSIQDSQQVTEVSLTTLVNFVDITQKPQPPRGQPKMDWKWPFDFFPFKVAFSRGVFSQKCSVSPILILCLLLLGVLNLETM

SEQ ID NO: 66686 - protein, 429 aa, Homo sapiens
MDSNGIRQFCVHVNNSNLNYFQKLQKVNATNFQALAAEFGGESFTSTFQTQSPPSFYRAGDPILTYFPKWSVISLLRQPAGVGAGGLCAESNPAGFLESKSTTCTRFFKNLASSCTLDSALNAASYYNFTVLKVPRSMTDPQNMEVTYEIETNGTFGIQKVSVSLGQTNLTVEPGASLQQHFILRFRAFQQSTAASLTSPRSGNPGYIVGKPLLALTDDISYSMTLLQSQGNGSCSVKRHEVQFGVNAISGCKLRLKKADCSHLQQEIYQTLHGRPRPEYVAIFGNADPAQKGGWTRILNRHCSISAINCTSCCLIPVSLEIQVLWAYVGLLSNPQAHVSGVRFLYQCQSIQDSQQVTEVSLTTLVNFVDITQKPQPPRGQPKMDWKWPFDFFPFKVAFSRGVFSQKCSVSPILILCLLLLGVLNLETM

SEQ ID NO: 66687 - protein, 443 aa, Homo sapiens
MRTPQLALLQVFFLVFPDGVRPQPSSSPSGAVPTSLELQRGTDGGTLQSPSEATATRPAVPGLPTVVPTLVTPSAPGNRTVDLFPVLPICVCDLTPGACDINCCCDRDCYLLHPRTVFSFCLPGSVRSSSWVCVDNSVIFRSNSPFPSRVFMDSNGIRQFCVHVNNSNLNYFQKLQKVNATNFQALAAEFGGESFTSTFQTQSPPSFYRAGDPILTYFPKWSVISLLRQPAGVGAGGLCAESNPAGFLESKSTTCTRFFKNLASSCTLDSALNAASYYNFTVLKVPRSMTDPQNMEFQVPVILTSQANAPLLAGNTCQNVVSQVTYEIETNGTFGIQKVSVSLGQTNLTVEPGASLQQHFILRFRAFQQSTAASLTSPRSGNPGYIVGKPLLALTDDISYSVSFLELGGLLQPNEKSCKGFQTYVRLAKGEEFFVHYNEVLIY

SEQ ID NO: 66688 - protein, 625 aa, Homo sapiens
MRLETAEAYVGPGGPECPMRTPQLALLQVFFLVFPDGVRPQPSSSPSGAVPTSLELQRGTDGGTLQSPSEATATRPAVPGLPTVVPTLVTPSAPGNRTVDLFPVLPICVCDLTPGACDINCCCDRDCYLLHPRTVFSFCLPGSVRSSSWVCVDNSVIFRSNSPFPSRVFMDSNGIRQFCVHVNNSNLNYFQKLQKVNATNFQALAAEFGGESFTSTFQTQSPPSFYRAGDPILTYFPKWSVISLLRQPAGVGAGGLCAESNPAGFLESKSTTCTRFFKNLASSCTLDSALNAASYYNFTVLKVPRSMTDPQNMEFQVPVILTSQANAPLLAGNTCQNVVSQVTYEIETNGTFGIQKVSVSLGQTNLTVEPGASLQQHFILRFRAFQQSTAASLTSPRSGNPGYIVGKPLLALTDDISYSMTLLQSQGNGSCSVKRHEVQFGVNAISGCKLRLKKADCSHLQQEIYQTLHGRPRPEYVAIFGNADPAQKGGWTRILNRHCSISAINCTSCCLIPVSLEIQVLWAYVGLLSNPQAHVSGVRFLYQCQSIQDSQQVTEVSLTTLVNFVDITQKPQPPRGQPKMDWKWPFDFFPFKVAFSRGVFSQKCSVSPILILCLLLLGVLNLETM

SEQ ID NO: 66689 - protein, 459 aa, Homo sapiens
MRTPQLALLQVFFLVFPDGVRPQPSSSPSGAVPTSLELQRGTDGGTLQSPSEATATRPAVPGLPTVVPTLVTPSAPGNRTVDLFPVLPICVCDLTPGACDINCCCDRDCYLLHPRTVFSFCLPGSVRSSSWVCVDNSVIFRSNSPFPSRVFMDSNGIRQFCVHVNNCFLESKSTTCTRFFKNLASSCTLDSALNAASYYNFTVLKVPRSMTDPQNMEAFQQSTAASLTSPRSGNPGYIVGKPLLALTDDISYSMTLLQSQGNGSCSVKRHEVQFGVNAISGCKLRLKKADCSHLQQEIYQTLHGRPRPEYVAIFGNADPAQKGGWTRILNRHCSISAINCTSCCLIPVSLEIQVLWAYVGLLSNPQAHVSGVRFLYQCQSIQDSQQVTEVSLTTLVNFVDITQKPQPPRGQPKMDWKWPFDFFPFKVAFSRGVFSQKCSVSPILILCLLLLGVLNLETM

SEQ ID NO: 66690 - protein, 2155 aa, Homo sapiens
MNYSSFLRIWVSFIFALVQHQAQPRELMYPFWQNDTKTPKVDDGSSSEIKLAIPVFFFGVPYRTVYVNNNGVVSFNVLVSQFTPESFPLTDGRAFVAPFWADVHNGIRGEIYYRETMEPAILKRATKDIRKYFKDMATFSATWVFIVTWEEVTFYGGSSTTPVNTFQAVLVSDGSYTFTLFNYYEINWTTGTASGGDPLTGLGGVMAQAGFNGGNLTNFFSLPGSRTPEIVNIQETTNVNVPGRWAFKVDGKEIDPANGCTSRGQFLRRGEVFWDDLNCTVKCRCLDFNNEIYCQEASCSPYEVCEPKGKFFYCSAVETSTCVVFGEPHYHTFDGFLFHFQGSCAYLLARQCLQTSSLPFFSVEAKNEHRRGSAVSWVKELSVEVNGYKILIPKGSYGRVKVNDLVTSLPVTLDLGTVKIYQSGISTAVETDFGLLVTFDGQHYASISVPGSYINSTCGLCGNYNKNPLDDFLRPDGRPAMSVLDLGESWRVYHADWKCDSGCVDNCTQCDAATEALYFGSDYCGFLNKTDGPLWECGTVVDPTAFVHSCVYDLCSVRDNGTLLCQAIQAYALVCQALGIPIGDWRTQTGCVSTVQCPSFSHYSVCTSSCPDTCSDLTASRNCATPCTEGCECNQGFVLSTSQCVPLHKCGCDFDGHYYTMGEFFWATANCTVQCLCEEGGDVYCFNKTCGSGEVCAVEDGYQGCFPKRETVCLLSQNQVLHTFDGASYAFPSEFSYTLLKTCPERPEYLEIDINKKKPDAGPAWLRGLRILVADQEVKIGGIGASEVKLNGQEVELPFFHPSGKLEIYRNKNSTTVESKGVVTVQYSDIGLLYIRLSTTYFNCTGGLCGFYNANASDEFCLPNGKCTDNLAVFLESWTTFEEICNGECGDLLKACNNDSELLKFYRSRSRCGIINDPSNSSFLECHGVVNVTAYYRTCLFRLCQSGGNESELCDSVARYASACKNADVEVGPWRTYDFCPLECPENSHFEECITCTETCETLTLGPICVDSCSEGCQCDEGYALLGSQCVTRSECGCNFEGHQLATNETFWVDLDCQIFCYCSGTDNRVHCETIPCKDDEYCMEEGGLYYCQARTDASCIVSGYGHYLTFDGFPFDFQTSCPLILCTTGSRPSSDSFPKFVVTAKNEDRDPSLALWVKQVDVTVFGYSIVIHRAYKHTVLVNSERLYLPLKLGQGKINIFSFGFHVVVETDFGLKVVYDWKTFLSITVPRSMQNSTYGLCGRYNGNPDDDLEMPMGLLASSVNEFGQSWVKRDTFCQVGCGDRCPSCAKVEGFSKVQQLCSLIPNQNAAFSKCHSKVNPTFFYKNCLFDSCIDGGAVQTACSWLQNYASTCQTQGITVTGWRNYTSCTVTCPPNSHYESCVSVCQPRCAAIRLKSDCSHYCVEGCHCDAGYVLNGKSCILPHSCGCYSDGKYYEPKQLFWNSDCTRRCRCFRRNVIQCDPRQCKSDEECALRNGVRGCFSTKTSYCLAAGGGVFRTFDGAFLRFPANCAFVLSTICQKLPDISFQLIINFDKWSAPNLTIISPVYFYINEEQILINDRNTVKVNGTQVNVPFITGLATKIYSSEGFLVIDTSPDIQIYYNGFNVIKISISERLQNKVCGLCGNFNGDLTDDYVTLRGKPVVSSVVLAQSWKTNGMQKRPLAPSCNELQFSQYAAMCDNVHIQKMQGDGYCLKLTDMKGFFQPCYGLLDPLPFYESCYLDGCYSHKKFQLCGSLAAYGEACRSFGILSTEWIEKENCSGVVEDPCVGADCPNRTCELGNGRELCGCIEPPPYGNNSHDIIDAEVTCKAAQMEVSISKCKLFQLGFEREGVRINDRQCTGIEGEDFISFQINNTKGNCGNIVQSNGTHIMYKNTLWIESANNTGNIITRDRTINVEFSCAYELDIKISLDSVVKPMLSVINLTVPTQEGSFITKMALYKNASYKHPYRQGEVVLTTRDVLYVGVFVVGADATHLILTLNKCYATPTRDSNDKLRYFIIEGGCQNLKDNTIGIEENAVSLTCRFHVTVFKFIGDYDEVHLHCAVSLCDSEKYSCKITCPHNSRIATDYTKEPKEQIISVGPIRRKRLDWCEDNGGCEQICTSRVDGPLCSCVTGTLQEDGKSCRASNSSMELQVWTLLLIMIQISLWHFVYKSGTTS

SEQ ID NO: 66691 - protein, 2155 aa, Homo sapiens; identical to SEQ ID NO: 66690

SEQ ID NO: 66692 - protein, 418 aa, Homo sapiens
MAKLLQPPPKFLPSEWHIANKNQYHRADAQRSRSERLVAESQRLVDEIEKTTRKSQSDVNKKLEQRLEEVQFWKKELDDKLEQLVNVTDDLLIYKIRLEKALETLKEPLHITETCLAYREKRIGIDLVHDTVEHELIKEAEIIQGIMALLTRTLEEASEQIRMNRSAKYNLEKDLKDKFVALTIDDICFSLNNNSPNIRYSENAVRIEPNSVSLEDWLDFSSTNVEKADKQRNNSLMLKALVDRILSQTANDLRKQCDVVDTAFKNGLKDTKDARDKLADHLAKVMEEIASQEKNITALEKAILDQEGPAKVAHTRLETRTHRPNVELCRDVAQYRLMKEVQEITHNVARLKETLAQAQAELKGLHRRQLALQEEIQVKENTIYIDEVLCMQMRKSIPLRDGEDHGVWAGGLRPDAVC

SEQ ID NO: 66693 - protein, 272 aa, Homo sapiens
MALLTRTLEEASEQIRMNRSAKYNLEKDLKDKFVALTIDDICFSLNNNSPNIRYSENAVRIEPNSVSLEDWLDFSSTNVEKADKQRNNSLMLKALVDRILSQTANDLRKQCDVVDTAFKNGLKDTKDARDKLADHLAKVMEEIASQEKNITALEKAILDQEGPAKVAHTRLETRTHRPNVELCRDVAQYRLMKEVQEITHNVARLKETLAQAQAELKGLHRRQLALQEEIQVKENTIYIDEVLCMQMRKSIPLRDGEDHGVWAGGLRPDAVC

SEQ ID NO: 66694 - protein, 490 aa, Homo sapiens
MERVGCTLTTTYAHPRPTPTNFLPAISTMASSYRDRFPHSNLTHSLSLPWRPSTYYKVASNSPSVAPYCTRSQRVSENTMLPFVSNRTTFFTRYTPDDWYRSNLTNYQESNTSRHNSEKLRVDTSRLIQDKYQQTRKTQADTTQNLGERVNDIGFWKSEIIHELDEMIGETNALTDVKKRLERALMETEAPLQVARECLFHREKRMGIDLVHDEVEAQLLTEVDTILCCQERMKLHLDKAIAQLAANRASQHELEKDLSDKQTAYRIDDKCHHLRNTSDGVGYFRGVERVDATVSVPESWAKFTDDNILRSQSERAASAKLRDDIENLLVVTANEMWNQFNKVNLSFTNRIAETADAKNKIQTHLAKTLQEIFQTEMTIESIKKAIKDKTAFLKVAQTRLDERTRRPNIELCRDMAQLRLVNEVHEVDDTIQTLQQRLRDAEDTLQSLVHIKATLEYDLAVKANSLYIDQEKCMSMRKSYPNTLRLVGFC

SEQ ID NO: 66695 - protein, 490 aa, Homo sapiens; identical to SEQ ID NO: 66694

SEQ ID NO: 66696 - protein, 147 aa, Homo sapiens
MERVGCTLTTTYAHPRPTPTNFLPAISTMASSYRDRFPHSNLTHSLSLPWRPSTYYKVASNSPSVAPYCTRSQRVSENTMLPFVSNRTTFFTRYTPDDWYRSNLTNYQESNTSRHNSEKLRVDTSRLIQDKYQQTRKTQADTTQNLG

SEQ ID NO: 66697 - protein, 140 aa, Homo sapiens
MERVGCTLTTTYAHPRPTPTNFLPAISTMASSYRDRFPHSNLTHSLSLPWRPSTYYKVASNSPSVAPYCTRSQRVSENTMLPFVSNRTTFFTRYTPDDWYRSNLTNYQESNTSRHNSEKLRVDTSRLIQDKYQQTRKTQA

SEQ ID NO: 66698 - protein, 82 aa, Homo sapiens
MERVGCTLTTTYAHPRPTPTNFLPAISTMASSYRDRFPHSNLTHSLSLPWRPSTYYKVASNSPSVAPYCTRSQRVSENTMLP

SEQ ID NO: 66699 - protein, 837 aa, Homo sapiens
MEPAPSEVRLAVREAIHALSSSEDGGHIFCTLESLKRYLGEMEPPALPREKEEFASAHFSPVLRCLASRLSPAWLELLPHGRLEELWASFFLEGPADQAFLVLMETIEGAAGPSFRLMKMARLLARFLREGRLAVLMEAQCRQQTQPGFILLRETLLGKVVALPDHLGNRLQQENLAEFFPQNYFRLLGEEVVRVLQAVVDSLQGGLDSSVSFVSQVLGKACVHGRQQEILGVLVPRLAALTQGSYLHQRVCWRLVEQVPDRAMEAVLTGLVEAALGPEVLSRLLGNLVVKNKKAQFVMTQKLLFLQSRLTTPMLQSLLGHLAMDSQRRPLLLQVLKELLETWGSSSAIRHTPLPQQRHVSKAVLICLAQLGEPELRDSRDELLASMMAGVKCRLDSSLPPVRRLGMIVAEVVSARIHPEGPPLKFQYEEDELSLELLALASPQPAGDGASEAGTSLVPATAEPPAETPAEIVDGGVPQAQLAGSDSDLDSDDEFVPYDMSGDRELKSSKAPAYVRDCVEALTTSEDIERWEAALRALEGLVYRSPTATREVSVELAKVLLHLEEKTCVVGFAGLRQRALVAVTVTDPAPVADYLTSQFYALNYSLRQRMDILDVLTLAAQELSRPGCLGRTPQPGSPSPNTPCLPEAAVSQPGSAVASDWRVVVEERIRSKTQRLSKGGPRQGPAGSPSRFNSVAGHFFFPLLQRFDRPLVTFDLLGEDQLVLGRLAHTLGALMCLAVNTTVAVAMGKALLEFVWALRFHIDAYVRQGLLSAVSSVLLSLPAARLLEDLMDELLEARSWLADVAEKDPDEDCRTLALRALLLLQRLKNRLLPPASP

SEQ ID NO: 66700 - protein, 360 aa, Homo sapiens
MMAGVKCRLDSSLPPVRRLGMIVAEVVSARIHPEGPPLKFQYEEDELSLELLALASPQPAGDGASEAGTSLVPATAEPPAETPAEIVDGGVPQAQLAGSDSDLDSDDEFVPYDMSGDRELKSSKAPAYVRDCVEVLDVLTLAAQELSRPGCLGRTPQPGSPSPNTPCLPEAAVSQPGSAVASDWRVVVEERIRSKTQRLSKGGPRQGPAGSPSRFNSVAGHFFFPLLQRFDRPLVTFDLLGEDQLVLGRLAHTLGALMCLAVNTTVAVAMGKALLEFVWALRFHIDAYVRQGLLSAVSSVLLSLPAARLLEDLMDELLEARSWLADVAEKDPDEDCRTLALRALLLLQRLKNRLLPPASP

SEQ ID NO: 66701 - protein, 1089 aa, Homo sapiens
MAVFDTPEEAFGVLRPVCVQLTKTQTVENVEHLQTRLQAVSDSALQELQQYILFPLRFTLKTPGPKRERLIQSVVECLTFVLSSTCVKEQELLQELFSELSACLYSPSSQKPAAVSEELKLAVIQGLSTLMHSAYGDIILTFYEPSILPRLGFAVSLLLGLAEQEKSKQIKIAALKCLQVLLLQCDCQDHPRSLDELEQKQLGDLFASFLPGISTALTRLITGDFKQGHSIVVSSLKIFYKTVSFIMADEQLKRISKVQAKPAVEHRVAELMVYREADWVKKTGDKLTILIKKIIECVSVHPHWKVRLELVELVEDLLLKCSQSLVECAGPLLKALVGLVNDESPEIQAQCNKVLRHFADQKVVVGNKALADILSESLHSLATSLPRLMNSQDDQGKFSTLSLLLGYLKLLGPKINFVLNSVAHLQRLSKALIQVLELDVADIKIVEERRWNSDDLNASPKTSATQPWNRIQRRYFRFFTDERIFMLLRQVCQLLGYYGNLYLLVDHFMELYHQSVVYRKQAAMILNELVTGAAGLEVEDLHEKHIKTNPEELREIVTSILEEYTSQENWYLVTCLETEEMGEELMMEHPGLQAITSGEHTCQVTSFLAFSKPSPTICSMNSNIWQICIQLEGIGQFAYALGKDFCLLLMSALYPVLEKAGDQTLLISQVATSTMMDVCRACGYDSLQHLINQNSDYLVNGISLNLRHLALHPHTPKVLEVMLRNSDANLLPLVADVVQDVLATLDQFYDKRAASFVSVLHALMAALAQWFPDTGNLGHLQEQSLGEEGSHLNQRPAALEKSTTTAEDIEQFLLNYLKEKDVADGNVSDFDNEEEEQSVPPKVDENDTRPDVEPPLPLQIQIAMDVMERCIHLLSDKNLQIRLKVLDVLDLCVVVLQSHKNQLLPLAHQAWPSLVHRLTRDAPLAVLRAFKVLRTLGSKCGDFLRSRFCKDVLPKLAGSLVTQAPISARAGPVYSHTLAFKLQLAVLQGLGPLCERLDLGEGDLNKVADACLIYLSVKQPVKLQEAARSVFLHLMKVDPDSTWFLLNELYCPVQFTPPHPSLHPVQLHGASGQQNPYTTNVLQLLKELQ

SEQ ID NO: 66702 - protein, 1089 aa, Homo sapiens; identical to SEQ ID NO: 66701

SEQ ID NO: 66703 - protein, 1089 aa, Homo sapiens; identical to SEQ ID NO: 66701

SEQ ID NO: 66704 - protein, 508 aa, Homo sapiens
MELDSALEAPSQEDSNLSEELSHSAFGQAFSKILHCLARPEARRGNVKDAVLKDLGDLIEATEFDRLFEGTGARLRGMPETLGQVAKALEKYAAPSKEEEGGGDGHSEAAEKAAQVGLLFLKLLGKVETAKNSLVGPAWQTGLHHLAGPVYIFAITHSLEQPWTTPRSREVAREVLTSLLQVTECGSVAGFLHGENEDEKGRLSVILGLLKPDLYKESWKNNPAIKHVFSWTLQQVTRPWLSQHLERVLPASLVISDDYQTENKILGVHCLHHIVLNVPAADLLQYNRAQVLYHAISNHLYTPEHHLIQAVLLCLLDLFPILEKTLHWKGDGARPTTHCDEVLRLILTHMEPEHRLLLRRTYARNLPAFVNRLGILTVRHLKRLERVIIGYLEVYDGPEEEARLKILETLKLLMQHTWPRVSCRLVVLLKALLKLICDVARDPNLTPESVKSALLQEATDCLILLDRCSQGRVKGLLAKIPQSCEDRKVVNYIRKVQQVSEGAPYNGT

SEQ ID NO: 66705 - protein, 508 aa, Homo sapiens; identical to SEQ ID NO: 66704

SEQ ID NO: 66706 - protein, 497 aa, Homo sapiens
MELDSALEAPSQEDSNLSEELSHSAFGQAFSKILHCLARPEARRGNVKDAVLKDLGDLIEATEFDRLFEGTGARLRGMPETLGQVAKALEKYAAPSKEEEGGGDGHSEAAEKAAQVGLLFLKLLGKVETAKNSLVGPAWQTGLHHLAGPVYIFAITHSLEQPWTTPRSREVAREVLTSLLQVTECGSVAGFLHGENEDEKGRLSVILGLLKPDLYKESWKNNPAIKHVFSWTLQQVTRPWLSQHLERVLPASLVISDDYQTENKILGVHCLHHIVLNVPAADLLQYNRAQVLYHAISNHLYTPEHHLIQAVLLCLLDLFPILEKTLHWKGDGARPTTHCDEVLRLILTHMEPEHRLLLRRTYARNLPAFVNRLERVIIGYLEVYDGPEEEARLKILETLKLLMQHTWPRVSCRLVVLLKALLKLICDVARDPNLTPESVKSALLQEATDCLILLDRCSQGRVKGLLAKIPQSCEDRKVVNYIRKVQQVSEGAPYNGT

SEQ ID NO: 66707 - protein, 101 aa, Homo sapiens
MELDSALEAPSQEDSNLSEELSHSAFGQAFSKILHCLARPEARRGNVKDAVLKDLGDLIEATEFDRLFEGTGARLRGMPETLGQVAKALEKYAAPSKEEEG

SEQ ID NO: 66708 - protein, 807 aa, Homo sapiens
MPRAPRCRAVRSLLRSHYREVLPLATFVRRLGPQGWRLVQRGDPAAFRALVAQCLVCVPWDARPPPAAPSFRQVSCLKELVARVLQRLCERGAKNVLAFGFALLDGARGGPPEAFTTSVRSYLPNTVTDALRGSGAWGLLLRRVGDDVLVHLLARCALFVLVAPSCAYQVCGPPLYQLGAATQARPPPHASGPRRRLGCERAWNHSVREAGVPLGLPAPGARRRGGSASRSLPLPKRPRRGAAPEPERTPVGQGSWAHPGRTRGPSDRGFCVVSPARPAEEATSLEGALSGTRHSHPSVGRQHHAGPPSTSRPPRPWDTPCPPVYAETKHFLYSSGDKEQLRPSFLLSSLRPSLTGARRLVETIFLGSRPWMPGTPRRLPRLPQRYWQMRPLFLELLGNHAQCPYGVLLKTHCPLRAAVTPAAGVCAREKPQGSVAAPEEEDTDPRRLVQLLRQHSSPWQVYGFVRACLRRLVPPGLWGSRHNERRFLRNTKKFISLGKHAKLSLQELTWKMSVRDCAWLRRSPGVGCVPAAEHRLREEILAKFLHWLMSVYVVELLRSFFYVTETTFQKNRLFFYRKSVWSKLQSIGIRQHLKRVQLRELSEAEVRQHREARPALLTSRLRFIPKPDGLRPIVNMDYVVGARTFRREKRAERLTSRVKALFSVLNYERARRPGLLGASVLGLDDIHRAWRTFVLRVRAQDPPPELYFVKVDVTGAYDTIPQDRLTEVIASIIKPQNTYCVRRYAVVQKAAHGHVRKAFKSHVLRPVPGDPAGLHPLHAALQPVLRRHGEQAVCGDSAGRAAPAFGG

SEQ ID NO: 66709 - protein, 1132 aa, Homo sapiens
MPRAPRCRAVRSLLRSHYREVLPLATFVRRLGPQGWRLVQRGDPAAFRALVAQCLVCVPWDARPPPAAPSFRQVSCLKELVARVLQRLCERGAKNVLAFGFALLDGARGGPPEAFTTSVRSYLPNTVTDALRGSGAWGLLLRRVGDDVLVHLLARCALFVLVAPSCAYQVCGPPLYQLGAATQARPPPHASGPRRRLGCERAWNHSVREAGVPLGLPAPGARRRGGSASRSLPLPKRPRRGAAPEPERTPVGQGSWAHPGRTRGPSDRGFCVVSPARPAEEATSLEGALSGTRHSHPSVGRQHHAGPPSTSRPPRPWDTPCPPVYAETKHFLYSSGDKEQLRPSFLLSSLRPSLTGARRLVETIFLGSRPWMPGTPRRLPRLPQRYWQMRPLFLELLGNHAQCPYGVLLKTHCPLRAAVTPAAGVCAREKPQGSVAAPEEEDTDPRRLVQLLRQHSSPWQVYGFVRACLRRLVPPGLWGSRHNERRFLRNTKKFISLGKHAKLSLQELTWKMSVRDCAWLRRSPGVGCVPAAEHRLREEILAKFLHWLMSVYVVELLRSFFYVTETTFQKNRLFFYRKSVWSKLQSIGIRQHLKRVQLRELSEAEVRQHREARPALLTSRLRFIPKPDGLRPIVNMDYVVGARTFRREKRAERLTSRVKALFSVLNYERARRPGLLGASVLGLDDIHRAWRTFVLRVRAQDPPPELYFVKVDVTGAYDTIPQDRLTEVIASIIKPQNTYCVRRYAVVQKAAHGHVRKAFKSHVSTLTDLQPYMRQFVAHLQETSPLRDAVVIEQSSSLNEASSGLFDVFLRFMCHHAVRIRGKSYVQCQGIPQGSILSTLLCSLCYGDMENKLFAGIRRDGLLLRLVDDFLLVTPHLTHAKTFLRTLVRGVPEYGCVVNLRKTVVNFPVEDEALGGTAFVQMPAHGLFPWCGLLLDTRTLEVQSDYSSYARTSIRASLTFNRGFKAGRNMRRKLFGVLRLKCHSLFLDLQVNSLQTVCTNIYKILLLQAYRFHACVLQLPFHQQVWKNPTFFLRVISDTASLCYSILKAKNAGMSLGAKGAAGPLPSEAVQWLCHQAFLLKLTRHRVTYVPLLGSLRTAQTQLSRKLPGTTLTALEAAANPALPSDFKTILD

SEQ ID NO: 66710 - protein, 1069 aa, Homo sapiens
MPRAPRCRAVRSLLRSHYREVLPLATFVRRLGPQGWRLVQRGDPAAFRALVAQCLVCVPWDARPPPAAPSFRQVSCLKELVARVLQRLCERGAKNVLAFGFALLDGARGGPPEAFTTSVRSYLPNTVTDALRGSGAWGLLLRRVGDDVLVHLLARCALFVLVAPSCAYQVCGPPLYQLGAATQARPPPHASGPRRRLGCERAWNHSVREAGVPLGLPAPGARRRGGSASRSLPLPKRPRRGAAPEPERTPVGQGSWAHPGRTRGPSDRGFCVVSPARPAEEATSLEGALSGTRHSHPSVGRQHHAGPPSTSRPPRPWDTPCPPVYAETKHFLYSSGDKEQLRPSFLLSSLRPSLTGARRLVETIFLGSRPWMPGTPRRLPRLPQRYWQMRPLFLELLGNHAQCPYGVLLKTHCPLRAAVTPAAGVCAREKPQGSVAAPEEEDTDPRRLVQLLRQHSSPWQVYGFVRACLRRLVPPGLWGSRHNERRFLRNTKKFISLGKHAKLSLQELTWKMSVRDCAWLRRSPGVGCVPAAEHRLREEILAKFLHWLMSVYVVELLRSFFYVTETTFQKNRLFFYRKSVWSKLQSIGIRQHLKRVQLRELSEAEVRQHREARPALLTSRLRFIPKPDGLRPIVNMDYVVGARTFRREKRAERLTSRVKALFSVLNYERARRPGLLGASVLGLDDIHRAWRTFVLRVRAQDPPPELYFVKVDVTGAYDTIPQDRLTEVIASIIKPQNTYCVRRYAVVQKAAHGHVRKAFKSHVSTLTDLQPYMRQFVAHLQETSPLRDAVVIEQSSSLNEASSGLFDVFLRFMCHHAVRIRGKSYVQCQGIPQGSILSTLLCSLCYGDMENKLFAGIRRDGLLLRLVDDFLLVTPHLTHAKTFLSYARTSIRASLTFNRGFKAGRNMRRKLFGVLRLKCHSLFLDLQVNSLQTVCTNIYKILLLQAYRFHACVLQLPFHQQVWKNPTFFLRVISDTASLCYSILKAKNAGMSLGAKGAAGPLPSEAVQWLCHQAFLLKLTRHRVTYVPLLGSLRTAQTQLSRKLPGTTLTALEAAANPALPSDFKTILD

SEQ ID NO: 66711 - protein, 807 aa, Homo sapiens; identical to SEQ ID NO: 66708

SEQ ID NO: 66712 - protein, 123 aa, Homo sapiens
MMLPKPGTYYLPWEVSAGQVPDGSTLRTFGRLCLYDMIQSRVTLMAQHGSDQHQVLVCTKLVEPFHAQVGSLYIVLGELQHQQDRGSVVKARVLTCVEGMNLPLLEQAIREQRLYKQERGGSQ

SEQ ID NO: 66713 - protein, 122 aa, Homo sapiens
MLPKPGTYYLPWEVSAGQVPDGSTLRTFGRLCLYDMIQSRVTLMAQHGSDQHQVLVCTKLVEPFHAQVGSLYIVLGELQHQQDRGSVVKARVLTCVEGMNLPLLEQAIREQRLYKQERGGSQ

SEQ ID NO: 66714 - protein, 1837 aa, Homo sapiens
MGAMTQLLAGVFLAFLALATEGGVLKKVIRHKRQSGVNATLPEENQPVVFNHVYNIKLPVGSQCSVDLESASGEKDLAPPSEPSESFQEHTVDGENQIVFTHRINIPRRACGCAAAPDVKELLSRLEELENLVSSLREQCTAGAGCCLQPATGRLDTRPFCSGRGNFSTEGCGCVCEPGWKGPNCSEPECPGNCHLRGRCIDGQCICDDGFTGEDCSQLACPSDCNDQGKCVNGVCICFEGYAGADCSREICPVPCSEEHGTCVDGLCVCHDGFAGDDCNKPLCLNNCYNRGRCVENECVCDEGFTGEDCSELICPNDCFDRGRCINGTCYCEEGFTGEDCGKPTCPHACHTQGRCEEGQCVCDEGFAGVDCSEKRCPADCHNRGRCVDGRCECDDGFTGADCGELKCPNGCSGHGRCVNGQCVCDEGYTGEDCSQLRCPNDCHSRGRCVEGKCVCEQGFKGYDCSDMSCPNDCHQHGRCVNGMCVCDDGYTGEDCRDRQCPRDCSNRGLCVDGQCVCEDGFTGPDCAELSCPNDCHGQGRCVNGQCVCHEGFMGKDCKEQRCPSDCHGQGRCVDGQCICHEGFTGLDCGQHSCPSDCNNLGQCVSGRCICNEGYSGEDCSEVSPPKDLVVTEVTEETVNLAWDNEMRVTEYLVVYTPTHEGGLEMQFRVPGDQTSTIIQELEPGVEYFIRVFAILENKKSIPVSARVATYLPAPEGLKFKSIKETSVEVEWDPLDIAFETWEIIFRNMNKEDEGEITKSLRRPETSYRQTGLAPGQEYEISLHIVKNNTRGPGLKRVTTTRLDAPSQIEVKDVTDTTALITWFKPLAEIDGIELTYGIKDVPGDRTTIDLTEDENQYSIGNLKPDTEYEVSLISRRGDMSSNPAKETFTTGLDAPRNLRRVSQTDNSITLEWRNGKAAIDSYRIKYAPISGGDHAEVDVPKSQQATTKTTLTGLRPGTEYGIGVSAVKEDKESNPATINAATELDTPKDLQVSETAETSLTLLWKTPLAKFDRYRLNYSLPTGQWVGVQLPRNTTSYVLRGLEPGQEYNVLLTAEKGRHKSKPARVKASTAKEPEIGNLNVSDITPESFNLSWMATDGIFETFTIEIIDSNRLLETVEYNISGAERTAHISGLPPSTDFIVYLSGLAPSIRTKTISATATTEALPLLENLTISDINPYGFTVSWMASENAFDSFLVTVVDSGKLLDPQEFTLSGTQRKLELRGLITGIGYEVMVSGFTQGHQTKPLRAEIVTEAEPEVDNLLVSDATPDGFRLSWTADEGVFDNFVLKIRDTKKQSEPLEITLLAPERTRDITGLREATEYEIELYGISKGRRSQTVSAIATTAMGSPKEVIFSDITENSATVSWRAPTAQVESFRITYVPITGGTPSMVTVDGTKTQTRLVKLIPGVEYLVSIIAMKGFEESEPVSGSFTTALDGPSGLVTANITDSEALARWQPAIATVDSYVISYTGEKVPEITRTVSGNTVEYALTDLEPATEYTLRIFAEKGPQKSSTITAKFTTDLDSPRDLTATEVQSETALLTWRPPRASVTGYLLVYESVDGTVKEVIVGPDTTSYSLADLSPSTHYTAKIQALNGPLRSNMIQTIFTTIGLLYPFPKDCSQAMLNGDTTSGLYTIYLNGDKAEALEVFCDMTSDGGGWIVFLRRKNGRENFYQNWKAYAAGFGDRREEFWLGLDNLNKITAQGQYELRVDLRDHGETAFAVYDKFSVGDAKTRYKLKVEGYSGTAGDSMAYHNGRSFSTFDKDTDSAITNCALSYKGAFWYRNCHRVNLMGRYGDNNHSQGVNWFHWKGHEHSIQFAEMKLRPSNFRNLEGRRKRA

SEQ ID NO: 66715 - protein, 1564 aa, Homo sapiens
MGAMTQLLAGVFLAFLALATEGGVLKKVIRHKRQSGVNATLPEENQPVVFNHVYNIKLPVGSQCSVDLESASGEKDLAPPSEPSESFQEHTVDGENQIVFTHRINIPRRACGCAAAPDVKELLSRLEELENLVSSLREQCTAGAGCCLQPATGRLDTRPFCSGRGNFSTEGCGCVCEPGWKGPNCSEPECPGNCHLRGRCIDGQCICDDGFTGEDCSQLACPSDCNDQGKCVNGVCICFEGYAGADCSREICPVPCSEEHGTCVDGLCVCHDGFAGDDCNKPLCLNNCYNRGRCVENECVCDEGFTGEDCSELICPNDCFDRGRCINGTCYCEEGFTGEDCGKPTCPHACHTQGRCEEGQCVCDEGFAGVDCSEKRCPADCHNRGRCVDGRCECDDGFTGADCGELKCPNGCSGHGRCVNGQCVCDEGYTGEDCSQLRCPNDCHSRGRCVEGKCVCEQGFKGYDCSDMSCPNDCHQHGRCVNGMCVCDDGYTGEDCRDRQCPRDCSNRGLCVDGQCVCEDGFTGPDCAELSCPNDCHGQGRCVNGQCVCHEGFMGKDCKEQRCPSDCHGQGRCVDGQCICHEGFTGLDCGQHSCPSDCNNLGQCVSGRCICNEGYSGEDCSEVSPPKDLVVTEVTEETVNLAWDNEMRVTEYLVVYTPTHEGGLEMQFRVPGDQTSTIIQELEPGVEYFIRVFAILENKKSIPVSARVATYLPAPEGLKFKSIKETSVEVEWDPLDIAFETWEIIFRNMNKEDEGEITKSLRRPETSYRQTGLAPGQEYEISLHIVKNNTRGPGLKRVTTTRLDAPSQIEVKDVTDTTALITWFKPLAEIDGIELTYGIKDVPGDRTTIDLTEDENQYSIGNLKPDTEYEVSLISRRGDMSSNPAKETFTTGLDAPRNLRRVSQTDNSITLEWRNGKAAIDSYRIKYAPISGGDHAEVDVPKSQQATTKTTLTGLRPGTEYGIGVSAVKEDKESNPATINAATELDTPKDLQVSETAETSLTLLWKTPLAKFDRYRLNYSLPTGQWVGVQLPRNTTSYVLRGLEPGQEYNVLLTAEKGRHKSKPARVKASTAMGSPKEVIFSDITENSATVSWRAPTAQVESFRITYVPITGGTPSMVTVDGTKTQTRLVKLIPGVEYLVSIIAMKGFEESEPVSGSFTTALDGPSGLVTANITDSEALARWQPAIATVDSYVISYTGEKVPEITRTVSGNTVEYALTDLEPATEYTLRIFAEKGPQKSSTITAKFTTDLDSPRDLTATEVQSETALLTWRPPRASVTGYLLVYESVDGTVKEVIVGPDTTSYSLADLSPSTHYTAKIQALNGPLRSNMIQTIFTTIGLLYPFPKDCSQAMLNGDTTSGLYTIYLNGDKAEALEVFCDMTSDGGGWIVFLRRKNGRENFYQNWKAYAAGFGDRREEFWLGLDNLNKITAQGQYELRVDLRDHGETAFAVYDKFSVGDAKTRYKLKVEGYSGTAGDSMAYHNGRSFSTFDKDTDSAITNCALSYKGAFWYRNCHRVNLMGRYGDNNHSQGVNWFHWKGHEHSIQFAEMKLRPSNFRNLEGRRKRA

SEQ ID NO: 66716 - protein, 1655 aa, Homo sapiens
MGAMTQLLAGVFLAFLALATEGGVLKKVIRHKRQSGVNATLPEENQPVVFNHVYNIKLPVGSQCSVDLESASGEKDLAPPSEPSESFQEHTVDGENQIVFTHRINIPRRACGCAAAPDVKELLSRLEELENLVSSLREQCTAGAGCCLQPATGRLDTRPFCSGRGNFSTEGCGCVCEPGWKGPNCSEPECPGNCHLRGRCIDGQCICDDGFTGEDCSQLACPSDCNDQGKCVNGVCICFEGYAGADCSREICPVPCSEEHGTCVDGLCVCHDGFAGDDCNKPLCLNNCYNRGRCVENECVCDEGFTGEDCSELICPNDCFDRGRCINGTCYCEEGFTGEDCGKPTCPHACHTQGRCEEGQCVCDEGFAGVDCSEKRCPADCHNRGRCVDGRCECDDGFTGADCGELKCPNGCSGHGRCVNGQCVCDEGYTGEDCSQLRCPNDCHSRGRCVEGKCVCEQGFKGYDCSDMSCPNDCHQHGRCVNGMCVCDDGYTGEDCRDRQCPRDCSNRGLCVDGQCVCEDGFTGPDCAELSCPNDCHGQGRCVNGQCVCHEGFMGKDCKEQRCPSDCHGQGRCVDGQCICHEGFTGLDCGQHSCPSDCNNLGQCVSGRCICNEGYSGEDCSEVSPPKDLVVTEVTEETVNLAWDNEMRVTEYLVVYTPTHEGGLEMQFRVPGDQTSTIIQELEPGVEYFIRVFAILENKKSIPVSARVATYLPAPEGLKFKSIKETSVEVEWDPLDIAFETWEIIFRNMNKEDEGEITKSLRRPETSYRQTGLAPGQEYEISLHIVKNNTRGPGLKRVTTTRLDAPSQIEVKDVTDTTALITWFKPLAEIDGIELTYGIKDVPGDRTTIDLTEDENQYSIGNLKPDTEYEVSLISRRGDMSSNPAKETFTTGLDAPRNLRRVSQTDNSITLEWRNGKAAIDSYRIKYAPISGGDHAEVDVPKSQQATTKTTLTGLRPGTEYGIGVSAVKEDKESNPATINAATELDTPKDLQVSETAETSLTLLWKTPLAKFDRYRLNYSLPTGQWVGVQLPRNTTSYVLRGLEPGQEYNVLLTAEKGRHKSKPARVKASTEAEPEVDNLLVSDATPDGFRLSWTADEGVFDNFVLKIRDTKKQSEPLEITLLAPERTRDITGLREATEYEIELYGISKGRRSQTVSAIATTAMGSPKEVIFSDITENSATVSWRAPTAQVESFRITYVPITGGTPSMVTVDGTKTQTRLVKLIPGVEYLVSIIAMKGFEESEPVSGSFTTALDGPSGLVTANITDSEALARWQPAIATVDSYVISYTGEKVPEITRTVSGNTVEYALTDLEPATEYTLRIFAEKGPQKSSTITAKFTTDLDSPRDLTATEVQSETALLTWRPPRASVTGYLLVYESVDGTVKEVIVGPDTTSYSLADLSPSTHYTAKIQALNGPLRSNMIQTIFTTIGLLYPFPKDCSQAMLNGDTTSGLYTIYLNGDKAEALEVFCDMTSDGGGWIVFLRRKNGRENFYQNWKAYAAGFGDRREEFWLGLDNLNKITAQGQYELRVDLRDHGETAFAVYDKFSVGDAKTRYKLKVEGYSGTAGDSMAYHNGRSFSTFDKDTDSAITNCALSYKGAFWYRNCHRVNLMGRYGDNNHSQGVNWFHWKGHEHSIQFAEMKLRPSNFRNLEGRRKRA

SEQ ID NO: 66717 - protein, 2201 aa, Homo sapiens
MGAMTQLLAGVFLAFLALATEGGVLKKVIRHKRQSGVNATLPEENQPVVFNHVYNIKLPVGSQCSVDLESASGEKDLAPPSEPSESFQEHTVDGENQIVFTHRINIPRRACGCAAAPDVKELLSRLEELENLVSSLREQCTAGAGCCLQPATGRLDTRPFCSGRGNFSTEGCGCVCEPGWKGPNCSEPECPGNCHLRGRCIDGQCICDDGFTGEDCSQLACPSDCNDQGKCVNGVCICFEGYAGADCSREICPVPCSEEHGTCVDGLCVCHDGFAGDDCNKPLCLNNCYNRGRCVENECVCDEGFTGEDCSELICPNDCFDRGRCINGTCYCEEGFTGEDCGKPTCPHACHTQGRCEEGQCVCDEGFAGVDCSEKRCPADCHNRGRCVDGRCECDDGFTGADCGELKCPNGCSGHGRCVNGQCVCDEGYTGEDCSQLRCPNDCHSRGRCVEGKCVCEQGFKGYDCSDMSCPNDCHQHGRCVNGMCVCDDGYTGEDCRDRQCPRDCSNRGLCVDGQCVCEDGFTGPDCAELSCPNDCHGQGRCVNGQCVCHEGFMGKDCKEQRCPSDCHGQGRCVDGQCICHEGFTGLDCGQHSCPSDCNNLGQCVSGRCICNEGYSGEDCSEVSPPKDLVVTEVTEETVNLAWDNEMRVTEYLVVYTPTHEGGLEMQFRVPGDQTSTIIQELEPGVEYFIRVFAILENKKSIPVSARVATYLPAPEGLKFKSIKETSVEVEWDPLDIAFETWEIIFRNMNKEDEGEITKSLRRPETSYRQTGLAPGQEYEISLHIVKNNTRGPGLKRVTTTRLDAPSQIEVKDVTDTTALITWFKPLAEIDGIELTYGIKDVPGDRTTIDLTEDENQYSIGNLKPDTEYEVSLISRRGDMSSNPAKETFTTGLDAPRNLRRVSQTDNSITLEWRNGKAAIDSYRIKYAPISGGDHAEVDVPKSQQATTKTTLTGLRPGTEYGIGVSAVKEDKESNPATINAATELDTPKDLQVSETAETSLTLLWKTPLAKFDRYRLNYSLPTGQWVGVQLPRNTTSYVLRGLEPGQEYNVLLTAEKGRHKSKPARVKASTEQAPELENLTVTEVGWDGLRLNWTAADQAYEHFIIQVQEANKVEAARNLTVPGSLRAVDIPGLKAATPYTVSIYGVIQGYRTPVLSAEASTGETPNLGEVVVAEVGWDALKLNWTAPEGAYEYFFIQVQEADTVEAAQNLTVPGGLRSTDLPGLKAATHYTITIRGVTQDFSTTPLSVEVLTEEVPDMGNLTVTEVSWDALRLNWTTPDGTYDQFTIQVQEADQVEEAHNLTVPGSLRSMEIPGLRAGTPYTVTLHGEVRGHSTRPLAVEVVTEDLPQLGDLAVSEVGWDGLRLNWTAADNAYEHFVIQVQEVNKVEAAQNLTLPGSLRAVDIPGLEAATPYRVSIYGVIRGYRTPVLSAEASTAKEPEIGNLNVSDITPESFNLSWMATDGIFETFTIEIIDSNRLLETVEYNISGAERTAHISGLPPSTDFIVYLSGLAPSIRTKTISATATTEALPLLENLTISDINPYGFTVSWMASENAFDSFLVTVVDSGKLLDPQEFTLSGTQRKLELRGLITGIGYEVMVSGFTQGHQTKPLRAEIVTEAEPEVDNLLVSDATPDGFRLSWTADEGVFDNFVLKIRDTKKQSEPLEITLLAPERTRDITGLREATEYEIELYGISKGRRSQTVSAIATTAMGSPKEVIFSDITENSATVSWRAPTAQVESFRITYVPITGGTPSMVTVDGTKTQTRLVKLIPGVEYLVSIIAMKGFEESEPVSGSFTTALDGPSGLVTANITDSEALARWQPAIATVDSYVISYTGEKVPEITRTVSGNTVEYALTDLEPATEYTLRIFAEKGPQKSSTITAKFTTDLDSPRDLTATEVQSETALLTWRPPRASVTGYLLVYESVDGTVKEVIVGPDTTSYSLADLSPSTHYTAKIQALNGPLRSNMIQTIFTTIGLLYPFPKDCSQAMLNGDTTSGLYTIYLNGDKAEALEVFCDMTSDGGGWIVFLRRKNGRENFYQNWKAYAAGFGDRREEFWLGLDNLNKITAQGQYELRVDLRDHGETAFAVYDKFSVGDAKTRYKLKVEGYSGTAGDSMAYHNGRSFSTFDKDTDSAITNCALSYKGAFWYRNCHRVNLMGRYGDNNHSQGVNWFHWKGHEHSIQFAEMKLRPSNFRNLEGRRKRA

SEQ ID NO: 66718 - protein, 1079 aa, Homo sapiens
MGAMTQLLAGVFLAFLALATEGGVLKKVIRHKRQSGVNATLPEENQPVVFNHVYNIKLPVGSQCSVDLESASGEKDLAPPSEPSESFQEHTVDGENQIVFTHRINIPRRACGCAAAPDVKELLSRLEELENLVSSLREQCTAGAGCCLQPATGRLDTRPFCSGRGNFSTEGCGCVCEPGWKGPNCSEPECPGNCHLRGRCIDGQCICDDGFTGEDCSQLACPSDCNDQGKCVNGVCICFEGYAGADCSREICPVPCSEEHGTCVDGLCVCHDGFAGDDCNKPLCLNNCYNRGRCVENECVCDEGFTGEDCSELICPNDCFDRGRCINGTCYCEEGFTGEDCGKPTCPHACHTQGRCEEGQCVCDEGFAGVDCSEKRCPADCHNRGRCVDGRCECDDGFTGADCGELKCPNGCSGHGRCVNGQCVCDEGYTGEDCSQLRCPNDCHSRGRCVEGKCVCEQGFKGYDCSDMSCPNDCHQHGRCVNGMCVCDDGYTGEDCRDRQCPRDCSNRGLCVDGQCVCEDGFTGPDCAELSCPNDCHGQGRCVNGQCVCHEGFMGKDCKEQRCPSDCHGQGRCVDGQCICHEGFTGLDCGQHSCPSDCNNLGQCVSGRCICNEGYSGEDCSEVSPPKDLVVTEVTEETVNLAWDNEMRVTEYLVVYTPTHEGGLEMQFRVPGDQTSTIIQELEPGVEYFIRVFAILENKKSIPVSARVATYLPAPEGLKFKSIKETSVEVEWDPLDIAFETWEIIFRNMNKEDEGEITKSLRRPETSYRQTGLAPGQEYEISLHIVKNNTRGPGLKRVTTTRLDAPSQIEVKDVTDTTALITWFKPLAEIDGIELTYGIKDVPGDRTTIDLTEDENQYSIGNLKPDTEYEVSLISRRGDMSSNPAKETFTTGLDAPRNLRRVSQTDNSITLEWRNGKAAIDSYRIKYAPISGGDHAEVDVPKSQQATTKTITAKFTTDLDSPRDLTATEVQSETALLTWRPPRASVTGYLLVYESVDGTVKEVIVGPDTTSYSLADLSPPSLFLHFIQQKPEKQYCFHFKDMINIINIIMMMMMMKTKDFSRDLSFQNISGQYLIVFFF

SEQ ID NO: 66719 - protein, 92 aa, Homo sapiens
MGAMTQLLAGVFLAFLALATEGGVLKKVIRHKRQSGVNATLPEENQPVVFNHVYNIKLPVGSQCSVDLESASGEKDLAPPSEPSESFQEHTV

SEQ ID NO: 66720 - protein, 1746 aa, Homo sapiens
MGAMTQLLAGVFLAFLALATEGGVLKKVIRHKRQSGVNATLPEENQPVVFNHVYNIKLPVGSQCSVDLESASGEKDLAPPSEPSESFQEHTVDGENQIVFTHRINIPRRACGCAAAPDVKELLSRLEELENLVSSLREQCTAGAGCCLQPATGRLDTRPFCSGRGNFSTEGCGCVCEPGWKGPNCSEPECPGNCHLRGRCIDGQCICDDGFTGEDCSQLACPSDCNDQGKCVNGVCICFEGYAGADCSREICPVPCSEEHGTCVDGLCVCHDGFAGDDCNKPLCLNNCYNRGRCVENECVCDEGFTGEDCSELICPNDCFDRGRCINGTCYCEEGFTGEDCGKPTCPHACHTQGRCEEGQCVCDEGFAGVDCSEKRCPADCHNRGRCVDGRCECDDGFTGADCGELKCPNGCSGHGRCVNGQCVCDEGYTGEDCSQLRCPNDCHSRGRCVEGKCVCEQGFKGYDCSDMSCPNDCHQHGRCVNGMCVCDDGYTGEDCRDRQCPRDCSNRGLCVDGQCVCEDGFTGPDCAELSCPNDCHGQGRCVNGQCVCHEGFMGKDCKEQRCPSDCHGQGRCVDGQCICHEGFTGLDCGQHSCPSDCNNLGQCVSGRCICNEGYSGEDCSEVSPPKDLVVTEVTEETVNLAWDNEMRVTEYLVVYTPTHEGGLEMQFRVPGDQTSTIIQELEPGVEYFIRVFAILENKKSIPVSARVATYLPAPEGLKFKSIKETSVEVEWDPLDIAFETWEIIFRNMNKEDEGEITKSLRRPETSYRQTGLAPGQEYEISLHIVKNNTRGPGLKRVTTTRLDAPSQIEVKDVTDTTALITWFKPLAEIDGIELTYGIKDVPGDRTTIDLTEDENQYSIGNLKPDTEYEVSLISRRGDMSSNPAKETFTTGLDAPRNLRRVSQTDNSITLEWRNGKAAIDSYRIKYAPISGGDHAEVDVPKSQQATTKTTLTGLRPGTEYGIGVSAVKEDKESNPATINAATELDTPKDLQVSETAETSLTLLWKTPLAKFDRYRLNYSLPTGQWVGVQLPRNTTSYVLRGLEPGQEYNVLLTAEKGRHKSKPARVKASTAKEPEIGNLNVSDITPESFNLSWMATDGIFETFTIEIIDSNRLLETVEYNISGAERTAHISGLPPSTDFIVYLSGLAPSIRTKTISATATTEAEPEVDNLLVSDATPDGFRLSWTADEGVFDNFVLKIRDTKKQSEPLEITLLAPERTRDITGLREATEYEIELYGISKGRRSQTVSAIATTAMGSPKEVIFSDITENSATVSWRAPTAQVESFRITYVPITGGTPSMVTVDGTKTQTRLVKLIPGVEYLVSIIAMKGFEESEPVSGSFTTALDGPSGLVTANITDSEALARWQPAIATVDSYVISYTGEKVPEITRTVSGNTVEYALTDLEPATEYTLRIFAEKGPQKSSTITAKFTTDLDSPRDLTATEVQSETALLTWRPPRASVTGYLLVYESVDGTVKEVIVGPDTTSYSLADLSPSTHYTAKIQALNGPLRSNMIQTIFTTIGLLYPFPKDCSQAMLNGDTTSGLYTIYLNGDKAEALEVFCDMTSDGGGWIVFLRRKNGRENFYQNWKAYAAGFGDRREEFWLGLDNLNKITAQGQYELRVDLRDHGETAFAVYDKFSVGDAKTRYKLKVEGYSGTAGDSMAYHNGRSFSTFDKDTDSAITNCALSYKGAFWYRNCHRVNLMGRYGDNNHSQGVNWFHWKGHEHSIQFAEMKLRPSNFRNLEGRRKRA

SEQ ID NO: 66721 - protein, 1838 aa, Homo sapiens
MGAMTQLLAGVFLAFLALATEGGVLKKVIRHKRQSGVNATLPEENQPVVFNHVYNIKLPVGSQCSVDLESASGEKDLAPPSEPSESFQEHTVDGENQIVFTHRINIPRRACGCAAAPDVKELLSRLEELENLVSSLREQCTAGAGCCLQPATGRLDTRPFCSGRGNFSTEGCGCVCEPGWKGPNCSEPECPGNCHLRGRCIDGQCICDDGFTGEDCSQLACPSDCNDQGKCVNGVCICFEGYAGADCSREICPVPCSEEHGTCVDGLCVCHDGFAGDDCNKPLCLNNCYNRGRCVENECVCDEGFTGEDCSELICPNDCFDRGRCINGTCYCEEGFTGEDCGKPTCPHACHTQGRCEEGQCVCDEGFAGVDCSEKRCPADCHNRGRCVDGRCECDDGFTGADCGELKCPNGCSGHGRCVNGQCVCDEGYTGEDCSQLRCPNDCHSRGRCVEGKCVCEQGFKGYDCSDMSCPNDCHQHGRCVNGMCVCDDGYTGEDCRDRQCPRDCSNRGLCVDGQCVCEDGFTGPDCAELSCPNDCHGQGRCVNGQCVCHEGFMGKDCKEQRCPSDCHGQGRCVDGQCICHEGFTGLDCGQHSCPSDCNNLGQCVSGRCICNEGYSGEDCSEVSPPKDLVVTEVTEETVNLAWDNEMRVTEYLVVYTPTHEGGLEMQFRVPGDQTSTIIQELEPGVEYFIRVFAILENKKSIPVSARVATYLPAPEGLKFKSIKETSVEVEWDPLDIAFETWEIIFRNMNKEDEGEITKSLRRPETSYRQTGLAPGQEYEISLHIVKNNTRGPGLKRVTTTRLDAPSQIEVKDVTDTTALITWFKPLAEIDGIELTYGIKDVPGDRTTIDLTEDENQYSIGNLKPDTEYEVSLISRRGDMSSNPAKETFTTGLDAPRNLRRVSQTDNSITLEWRNGKAAIDSYRIKYAPISGGDHAEVDVPKSQQATTKTTLTGLRPGTEYGIGVSAVKEDKESNPATINAATELDTPKDLQVSETAETSLTLLWKTPLAKFDRYRLNYSLPTGQWVGVQLPRNTTSYVLRGLEPGQEYNVLLTAEKGRHKSKPARVKASTAKEPEIGNLNVSDITPESFNLSWMATDGIFETFTIEIIDSNRLLETVEYNISGAERTAHISGLPPSTDFIVYLSGLAPSIRTKTISATATTEPKPQLGTLIFSNITPKSFNMSWTTQAGLFAKIVINVSDAHSLHESQQFTVSGDAKQAHITGLVENTGYDVSVAGTTLAGDPTRPLTAFVITEAEPEVDNLLVSDATPDGFRLSWTADEGVFDNFVLKIRDTKKQSEPLEITLLAPERTRDITGLREATEYEIELYGISKGRRSQTVSAIATTAMGSPKEVIFSDITENSATVSWRAPTAQVESFRITYVPITGGTPSMVTVDGTKTQTRLVKLIPGVEYLVSIIAMKGFEESEPVSGSFTTALDGPSGLVTANITDSEALARWQPAIATVDSYVISYTGEKVPEITRTVSGNTVEYALTDLEPATEYTLRIFAEKGPQKSSTITAKFTTDLDSPRDLTATEVQSETALLTWRPPRASVTGYLLVYESVDGTVKEVIVGPDTTSYSLADLSPSTHYTAKIQALNGPLRSNMIQTIFTTIGLLYPFPKDCSQAMLNGDTTSGLYTIYLNGDKAEALEVFCDMTSDGGGWIVFLRRKNGRENFYQNWKAYAAGFGDRREEFWLGLDNLNKITAQGQYELRVDLRDHGETAFAVYDKFSVGDAKTRYKLKVEGYSGTAGDSMAYHNGRSFSTFDKDTDSAITNCALSYKGAFWYRNCHRVNLMGRYGDNNHSQGVNWFHWKGHEHSIQFAEMKLRPSNFRNLEGRRKRA

SEQ ID NO: 66722 - protein, 1358 aa, Homo sapiens
MGADGETVVLKNMLIGINLILLGSMIKPSECQLEVTTERVQRQSVEEEGGIANYNTSSKEQPVVFNHVYNINVPLDNLCSSGLEASAEQEVSAEDETLAEYMGQTSDHESQVTFTHRINFPKKACPCASSAQVLQELLSRIEMLEREVSVLRDQCNANCCQESAATGQLDYIPHCSGHGNFSFESCGCICNEGWFGKNCSEPYCPLGCSSRGVCVDGQCICDSEYSGDDCSELRCPTDCSSRGLCVDGECVCEEPYTGEDCRELRCPGDCSGKGRCANGTCLCEEGYVGEDCGQRQCLNACSGRGQCEEGLCVCEEGYQGPDCSAVAPPEDLRVAGISDRSIELEWDGPMAVTEYVISYQPTALGGLQLQQRVPGDWSGVTITELEPGLTYNISVYAVISNILSLPITAKVATHLSTPQGLQFKTITETTVEVQWEPFSFSFDGWEISFIPKNNEGGVIAQVPSDVTSFNQTGLKPGEEYIVNVVALKEQARSPPTSASVSTVIDGPTQILVRDVSDTVAFVEWIPPRAKVDFILLKYGLVGGEGGRTTFRLQPPLSQYSVQALRPGSRYEVSVSAVRGTNESDSATTQFTTEIDAPKNLRVGSRTATSLDLEWDNSEAEVQEYKVVYSTLAGEQYHEVLVPRGIGPTTRATLTDLVPGTEYGVGISAVMNSQQSVPATMNARTELDSPRDLMVTASSETSISLIWTKASGPIDHYRITFTPSSGIASEVTVPKDRTSYTLTDLEPGAEYIISVTAERGRQQSLESTVDAFTGFRPISHLHFSHVTSSSVNITWSDPSPPADRLILNYSPRDEEEEMMEVSLDATKRHAVLMGLQPATEYIVNLVAVHGTVTSEPIVGSITTGIDPPKDITISNVTKDSVMVSWSPPVASFDYYRVSYRPTQVGRLDSSVVPNTVTEFTITRLNPATEYEISLNSVRGREESERICTLVHTAMDNPVDLIATNITPTEALLQWKAPVGEVENYVIVLTHFAVAGETILVDGVSEEFRLVDLLPSTHYTATMYATNGPLTSGTISTNFSTLLDPPANLTASEVTRQSALISWQPPRAEIENYVLTYKSTDGSRKELIVDAEDTWIRLEGLLENTDYTVLLQAAQDTTWSSITSTAFTTGGRVFPHPQDCAQHLMNGDTLSGVYPIFLNGELSQKLQVYCDMTTDGGGWIVFQRRQNGQTDFFRKWADYRVGFGNVEDEFWLGLDNIHRITSQGRYELRVDMRDGQEAAFASYDRFSVEDSRNLYKLRIGSYNGTAGDSLSYHQGRPFSTEDRDNDVAVTNCAMSYKGAWWYKNCHRTNLNGKYGESRHSQGINWYHWKGHEFSIPFVEMKMRPYNHRLMAGRKRQSLQF

SEQ ID NO: 66723 - protein, 1268 aa, Homo sapiens
MGADGETVVLKNMLIGINLILLGSMIKPSECQLEVTTERVQRQSVEEEGGIANYNTSSKEQPVVFNHVYNINVPLDNLCSSGLEASAEQEVSAEDETLAEYMGQTSDHESQVTFTHRINFPKKACPCASSAQVLQELLSRIEMLEREVSVLRDQCNANCCQESAATGQLDYIPHCSGHGNFSFESCGCICNEGWFGKNCSEPYCPLGCSSRGVCVDGQCICDSEYSGDDCSELRCPTDCSSRGLCVDGECVCEEPYTGEDCRELRCPGDCSGKGRCANGTCLCEEGYVGEDCGQRQCLNACSGRGQCEEGLCVCEEGYQGPDCSAVAPPEDLRVAGISDRSIELEWDGPMAVTEYVISYQPTALGGLQLQQRVPGDWSGVTITELEPGLTYNISVYAVISNILSLPITAKVATHLSTPQGLQFKTITETTVEVQWEPFSFSFDGWEISFIPKNNEGGVIAQVPSDVTSFNQTGLKPGEEYIVNVVALKEQARSPPTSASVSTVIDGPTQILVRDVSDTVAFVEWIPPRAKVDFILLKYGLVGGEGGRTTFRLQPPLSQYSVQALRPGSRYEVSVSAVRGTNESDSATTQFTTEIDAPKNLRVGSRTATSLDLEWDNSEAEVQEYKVVYSTLAGEQYHEVLVPRGIGPTTRATLTDLVPGTEYGVGISAVMNSQQSVPATMNARTELDSPRDLMVTASSETSISLIWTKASGPIDHYRITFTPSSGIASEVTVPKDRTSYTLTDLEPGAEYIISVTAERGRQQSLESTVDAFTGIDPPKDITISNVTKDSVMVSWSPPVASFDYYRVSYRPTQVGRLDSSVVPNTVTEFTITRLNPATEYEISLNSVRGREESERICTLVHTAMDNPVDLIATNITPTEALLQWKAPVGEVENYVIVLTHFAVAGETILVDGVSEEFRLVDLLPSTHYTATMYATNGPLTSGTISTNFSTLLDPPANLTASEVTRQSALISWQPPRAEIENYVLTYKSTDGSRKELIVDAEDTWIRLEGLLENTDYTVLLQAAQDTTWSSITSTAFTTGGRVFPHPQDCAQHLMNGDTLSGVYPIFLNGELSQKLQVYCDMTTDGGGWIVFQRRQNGQTDFFRKWADYRVGFGNVEDEFWLGLDNIHRITSQGRYELRVDMRDGQEAAFASYDRFSVEDSRNLYKLRIGSYNGTAGDSLSYHQGRPFSTEDRDNDVAVTNCAMSYKGAWWYKNCHRTNLNGKYGESRHSQGINWYHWKGHEFSIPFVEMKMRPYNHRLMAGRKRQSLQF

SEQ ID NO: 66724 - protein, 1358 aa, Homo sapiens; identical to SEQ ID NO: 66722

SEQ ID NO: 66725 - protein, 177 aa, Homo sapiens
  VARIANT 1: note = MOD_RES - Any amino acid
XINFPKKACPCASSAQVLQELLSRIEMLEREVSVLRDQCNANCCQESAATVAPPEDLRVAGISDRSIELEWDGPMAVTEYVISYQPTALGGLQLQQRVPGDWSGVTITELEPGLTYNISVYAVISNILSLPITAKVATHLSTPQGLQFKTITETTVEVQWEPFSFSFDGWEISFIPK

SEQ ID NO: 66726 - protein, 4222 aa, Homo sapiens
MMPAQYALTSSLVLLVLLSTARAGPFSSRSNVTLPAPRPPPQPGGHTVGAGVGSPSSQLYEHTVEGGEKQVVFTHRINLPPSTGCGCPPGTEPPVLASEVQALRVRLEILEELVKGLKEQCTGGCCPASAQAGTGQTDVRTLCSLHGVFDLSRCTCSCEPGWGGPTCSDPTDAEIPPSSPPSASGSCPDDCNDQGRCVRGRCVCFPGYTGPSCGWPSCPGDCQGRGRCVQGVCVCRAGFSGPDCSQRSCPRGCSQRGRCEGGRCVCDPGYTGDDCGMRSCPRGCSQRGRCENGRCVCNPGYAGEDCGVRSCPRGCSQRGRCKDGRCVCDPGYTGEDCGTRSCPWDCGEGGRCVDGRCVCWPGYTGEDCSTRTCPRDCRGRGRCEDGECICDTGYSGDDCGVRSCPGDCNQRGRCEDGRCVCWPGYTGTDCGSRACPRDCRGRGRCENGVCVCNAGYSGEDCGVRSCPGDCRGRGRCESGRCMCWPGYTGRDCGTRACPGDCRGRGRCVDGRCVCNPGFTGEDCGSRRCPGDCRGHGLCEDGVCVCDAGYSGEDCSTRSCPGGCRGRGQCLDGRCVCEDGYSGEDCGVRQCPNDCSQHGVCQDGVCICWEGYVSEDCSIRTCPSNCHGRGRCEEGRCLCDPGYTGPTCATRMCPADCRGRGRCVQGVCLCHVGYGGEDCGQEEPPASACPGGCGPRELCRAGQCVCVEGFRGPDCAIQTCPGDCRGRGECHDGSCVCKDGYAGEDCGEEVPTIEGMRMHLLEETTVRTEWTPAPGPVDAYEIQFIPTTEGASPPFTARVPSSASAYDQRGLAPGQEYQVTVRALRGTSWGLPASKTITTMIDGPQDLRVVAVTPTTLELGWLRPQAEVDRFVVSYVSAGNQRVRLEVPPEADGTLLTDLMPGVEYVVTVTAERGRAVSYPASVRANTGSSPLGLLGTTDEPPPSGPSTTQGAQAPLLQQRPQELGELRVLGRDETGRLRVVWTAQPDTFAYFQLRMRVPEGPGAHEEVLPGDVRQALVPPPPPGTPYELSLHGVPPGGKPSDPIIYQGIMDKDEEKPGKSSGPPRLGELTVTDRTSDSLLLRWTVPEGEFDSFVIQYKDRDGQPQVVPVEGPQRSAVITSLDPGRKYKFVLYGFVGKKRHGPLVAEAKILPQSDPSPGTPPHLGNLWVTDPTPDSLHLSWTVPEGQFDTFMVQYRDRDGRPQVVPVEGPERSFVVSSLDPDHKYRFTLFGIANKKRYGPLTADGTTAPERKEEPPRPEFLEQPLLGELTVTGVTPDSLRLSWTVAQGPFDSFMVQYKDAQGQPQAVPVAGDENEVTVPGLDPDRKYKMNLYGLRGRQRVGPESVVAKTAPQEDVDETPSPTELGTEAPESPEEPLLGELTVTGSSPDSLSLFWTVPQGSFDSFTVQYKDRDGRPRAVRVGGKESEVTVGGLEPGHKYKMHLYGLHEGQRVGPVSAVGVTAPQQEETPPATESPLEPRLGELTVTDVTPNSVGLSWTVPEGQFDSFIVQYKDKDGQPQVVPVAADQREVTVYNLEPERKYKMNMYGLHDGQRMGPLSVVIVTAPLPPAPATEASKPPLEPRLGELTVTDITPDSVGLSWTVPEGEFDSFVVQYKDRDGQPQVVPVAADQREVTIPDLEPSRKYKFLLFGIQDGKRRSPVSVEAKTVARGDASPGAPPRLGELWVTDPTPDSLRLSWTVPEGQFDSFVVQFKDKDGPQVVPVEGHERSVTVTPLDAGRKYRFLLYGLLGKKRHGPLTADGTTEARSAMDDTGTKRPPKPRLGEELQVTTVTQNSVGLSWTVPEGQFDSFVVQYKDRDGQPQVVPVEGSLREVSVPGLDPAHRYKLLLYGLHHGKRVGPISAVAITAGREETETETTAPTPPAPEPHLGELTVEEATSHTLHLSWMVTEGEFDSFEIQYTDRDGQLQMVRIGGDRNDITLSGLESDHRYLVTLYGFSDGKHVGPVHVEALTVPEEEKPSEPPTATPEPPIKPRLGELTVTDATPDSLSLSWTVPEGQFDHFLVQYRNGDGQPKAVRVPGHEEGVTISGLEPDHKYKMNLYGFHGGQRMGPVSVVGVTAAEEETPSPTEPSMEAPEPAEEPLLGELTVTGSSPDSLSLSWTVPQGRFDSFTVQYKDRDGRPQVVRVGGEESEVTVGGLEPGRKYKMHLYGLHEGRRVGPVSAVGVTAPEEESPDAPLAKLRLGQMTVRDITSDSLSLSWTVPEGQFDHFLVQFKNGDGQPKAVRVPGHEDGVTISGLEPDHKYKMNLYGFHGGQRVGPVSAVGLTAPGKDEEMAPASTEPPTPEPPIKPRLEELTVTDATPDSLSLSWTVPEGQFDHFLVQYKNGDGQPKATRVPGHEDRVTISGLEPDNKYKMNLYGFHGGQRVGPVSAIGVTAAEEETPSPTEPSMEAPEPPEEPLLGELTVTGSSPDSLSLSWTVPQGRFDSFTVQYKDRDGRPQVVRVGGEESEVTVGGLEPGRKYKMHLYGLHEGRRVGPVSTVGVTAPQEDVDETPSPTEPGTEAPEPPEEPLLGELTVTGSSPDSLSLSWTVPQGRFDSFTVQYKDRDGRPQAVRVGGQESKVTVRGLEPGRKYKMHLYGLHEGRRLGPVSAVGVTEDEAETTQAVPTMTPEPPIKPRLGELTMTDATPDSLSLSWTVPEGQFDHFLVQYRNGDGQPKAVRVPGHEDGVTISGLEPDHKYKMNLYGFHGGQRVGPISVIGVTAAEEETPSPTELSTEAPEPPEEPLLGELTVTGSSPDSLSLSWTIPQGHFDSFTVQYKDRDGRPQVMRVRGEESEVTVGGLEPGRKYKMHLYGLHEGRRVGPVSTVGVTVPTTTPEPPNKPRLGELTVTDATPDSLSLSWMVPEGQFDHFLVQYRNGDGQPKVVRVPGHEDGVTISGLEPDHKYKMNLYGFHGGQRVGPISVIGVTAAEEETPAPTEPSTEAPEPPEEPLLGELTVTGSSPDSLSLSWTIPQGRFDSFTVQYKDRDGRPQVVRVRGEESEVTVGGLEPGCKYKMHLYGLHEGQRVGPVSAVGVTVPTMTPEPPIKPRLGELTVTDATPDSLSLSWMVPEGQFDHFLVQYRNGDGQPKAVRVPGHEDGVTISGLEPDHKYKMNLYGFHGGQRVGPVSAIGVTEEETPSPTEPSTEAPEAPEEPLLGELTVTGSSPDSLSLSWTVPQGRFDSFTVQYKDRDGQPQVVRVRGEESEVTVGGLEPGRKYKMHLYGLHEGQRVGPVSTVGITAPLPTPLPVEPRLGELAVAAVTSDSVGLSWTVAQGPFDSFLVQYRDAQGQPQAVPVSGDLRAVAVSGLDPARKYKFLLFGLQNGKRHGPVPVEARTAPDTKPSPRLGELTVTDATPDSVGLSWTVPEGEFDSFVVQYKDKDGRLQVVPVAANQREVTVQGLEPSRKYRFLLYGLSGRKRLGPISADSTTAPLEKELPPHLGELTVAEETSSSLRLSWTVAQGPFDSFVVQYRDTDGQPRAVPVAADQRTVTVEDLEPGKKYKFLLYGLLGGKRLGPVSALGMTAPEEDTPAPELAPEAPEPPEEPRLGVLTVTDTTPDSMRLSWSVAQGPFDSFVVQYEDTNGQPQALLVDGDQSKILISGLEPSTPYRFLLYGLHEGKRLGPLSAEGTTGLAPAGQTSEESRPRLSQLSVTDVTTSSLRLNWEAPPGAFDSFLLRFGVPSPSTLEPHPRPLLQRELMVPGTRHSAVLRDLRSGTLYSLTLYGLRGPHKADSIQGTARTLSPVLESPRDLQFSEIRETSAKVNWMPPPSRADSFKVSYQLADGGEPQSVQVDGQARTQKLQGLIPGARYEVTVVSVRGFEESEPLTGFLTTVPDGPTQLRALNLTEGFAVLHWKPPQNPVDTYDVQVTAPGAPPLQAETPGSAVDYPLHDLVLHTNYTATVRGLRGPNLTSPASITFTTGLEAPRDLEAKEVTPRTALLTWTEPPVRPAGYLLSFHTPGGQNQEILLPGGITSHQLLGLFPSTSYNARLQAMWGQSLLPPVSTSFTTGGLRIPFPRDCGEEMQNGAGASRTSTIFLNGNRERPLNVFCDMETDGGGWLVFQRRMDGQTDFWRDWEDYAHGFGNISGEFWLGNEALHSLTQAGDYSMRVDLRAGDEAVFAQYDSFHVDSAAEYYRLHLEGYHGTAGDSMSYHSGSVFSARDRDPNSLLISCAVSYRGAWWYRNCHYANLNGLYGSTVDHQGVSWYHWKGFEFSVPFTEMKLRPRNFRSPAGGG

SEQ ID NO: 66727 - protein, 2149 aa, Homo sapiens
  VARIANT 1: note = MOD_RES - Any amino acid
XAEEETPSPTEPSMEAPEPAEEPLLGELTVTGSSPDSLSLSWTVPQGRFDSFTVQYKDRDGRPQVVRVGGEESEVTVGGLEPGRKYKMHLYGLHEGRRVGPVSAVGVTAPEEESPDAPLAKLRLGQMTVRDITSDSLSLSWTVPEGQFDHFLVQFKNGDGQPKAVRVPGHEDGVTISGLEPDHKYKMNLYGFHGGQRVGPVSAVGLTAPGKDEEMAPASTEPPTPEPPIKPRLEELTVTDATPDSLSLSWTVPEGQFDHFLVQYKNGDGQPKATRVPGHEDRVTISGLEPDNKYKMNLYGFHGGQRVGPVSAIGVTAAEEETPSPTEPSMEAPEPPEEPLLGELTVTGSSPDSLSLSWTVPQGRFDSFTVQYKDRDGRPQVVRVGGEESEVTVGGLEPGRKYKMHLYGLHEGRRVGPVSTVGVTAPQEDVDETPSPTEPGTEAPEPPEEPLLGELTVTGSSPDSLSLSWTVPQGRFDSFTVQYKDRDGRPQAVRVGGQESKVTVRGLEPGRKYKMHLYGLHEGRRLGPVSAVGVTEDEAETTQAVPTMTPEPPIKPRLGELTMTDATPDSLSLSWTVPEGQFDHFLVQYRNGDGQPKAVRVPGHEDGVTISGLEPDHKYKMNLYGFHGGQRVGPISVTGVTAAEEETPSPTELSTEAPEPPEEPLLGELTVTGSSPDSLSLSWTIPQGHFDSFTVQYKDRDGRPQVMRVRGEESEVTVGGLEPGRKYKMHLYGLHEGRRVGPVSTVGVTVPTTTPEPPNKPRLGELTVTDATPDSLSLSWMVPEGQFDHFLVQYRNGDGQPKVVRVPGHEDGVTISGLEPDHKYKMNLYGFHGGQRVGPISVIGVTAAEEETPAPTEPSTEAPEPPEEPLLGELTVTGSSPDSLSLSWTIPQGRFDSFTVQYKDRDGRPQVVRVRGEESEVTVGGLEPGCKYKMHLYGLHEGQRVGPVSAVGVTVPTMTPEPPIKPRLGELTVTDATPDSLSLSWMVPEGQFDHFLVQYRNGDGQPKAVRVPGHEDGVTISGLEPDHKYKMNLYGFHGGQRVGPVSAIGVTEEETPSPTEPSTEAPEAPEEPLLGELTVTGSSPDSLSLSWTVPQGRFDSFTVQYKDRDGQPQVVRVRGEESEVTVGGLEPGRKYKMHLYGLHEGQRVGPVSTVGITAPLPTPLPVEPRLGELAVAAVTSDSVGLSWTVAQGPFDSFLVQYRDAQGQPQAVPVSGDLRAVAVSGLDPARKYKFLLFGLQNGKRHGPVPVEARTAPDTKPSPRLGELTVTDATPDSVGLSWTVPEGEFDSFVVQYKDKDGRLQVVPVAANQREVTVQGLEPSRKYRFLLYGLSGRKRLGPISADSTTAPLEKELPPHLGELTVAEETSSSLRLSWTVAQGPFDSFVVQYRDTDGQPRAVPVAADQRTVTVEDLEPGKKYKFLLYGLLGGKRLGPVSALGMTAPEEDTPAPELAPEAPEPPEEPRLGVLTVTDTTPDSMRLSWSVAQGPFDSFVVQYEDTNGQPQALLVDGDQSKILISGLEPSTPYRFLLYGLHEGKRLGPLSAEGTTGLAPAGQTSEESRPRLSQLSVTDVTTSSLRLNWEAPPGAFDSFLLRFGVPSPSTLEPHPRPLLQRELMVPGTRHSAVLRDLRSGTLYSLTLYGLRGPHKADSIQGTARTLSPVLESPRDLQFSEIRETSAKVNWMPPPSRADSFKVSYQLADGGEPQSVQVDGQARTQKLQGLIPGARYEVTVVSVRGFEESEPLTGFLTTVPDGPTQLRALNLTEGFAVLHWKPPQNPVDTYDIQVTAPGAPPLQAETPGSAVDYPLHDLVLHTNYTATVRGLRGPNLTSPASITFTTGLEAPRDLEAKEVTPRTALLTWTEPPVRPAGYLLSFHTPGGQTQEILLPGGITSHQLLGLFPSTSYNARLQAMWGQSLLPPVSTSFTTGGLRIPFPRDCGEEMQNGAGASRTSTIFLNGNRERPLIVFCDMETDGGGWLVFQRRMDGQTDFWRDWEDYAHGFGNISGEFWLGNEALHSLTQAGDYSMRVDLRAGDEAVFAQYDSFHVDSAAEYYRLHLEGYHGTAGDSMSYHSGSVFSARDRDPNSLLISCAVSYRGAWWYRNCHYANLNGLYGSTVDHQGVSWYHWKGFEFSVPFTEMKLRPRNFRSPAGGG

SEQ ID NO: 66728 - protein, 8 aa, Homo sapiens
MMPAQYAL

SEQ ID NO: 66729 - protein, 8 aa, Homo sapiens
MMPAQYAL

SEQ ID NO: 66730 - protein, 3296 aa, Homo sapiens
  VARIANT 1: note = MOD_RES - Any amino acid
XSSPLGLLGTTDEPPPSGPSTTQGAQAPLLQQRPQELGELRVLGRDETGRLRVVWTAQPDTFAYFQLRMRVPEGPGAHEEVLPGDVRQALVPPPPPGTPYELSLHGVPPGGKPSDPIIYQGIMDKDEEKPGKSSGPPRLGELTVTDRTSDSLLLRWTVPEGEFDSFVIQYKDRDGQPQVVPVEGPQRSAVITSLDPGRKYKFVLYGFVGKKRHGPLVAEAKILPQSDPSPGTPPHLGNLWVTDPTPDSLHLSWTVPEGQFDTFMVQYRDRDGRPQVVPVEGPERSFVVSSLDPDHKYRFTLFGIANKKRYGPLTADGTTAPERKEEPPRPEFLEQPLLGELTVTGVTPDSLRLSWTVAQGPFDSFMVQYKDAQGQPQAVPVAGDENEVTVPGLDPDRKYKMNLYGLRGRQRVGPESVVAKTAPQEDVDETPSPTELGTEAPESPEEPLLGELTVTGSSPDSLSLFWTVPQGSFDSFTVQYKDRDGRPQAVRVGGKESEVTVGGLEPGHKYKMHLYGLHEGQRVGPVSAVGVTAPQQEETPPATESPLEPRLGELTVTDVTPNSVGLSWTVPEGQFDSFIVQYKDKDGQPQVVPVAADQREVTVYNLEPERKYKMNMYGLHDGQRMGPLSVVIVTAPLPPAPATEASKPPLEPRLGELTVTDITPDSVGLSWTVPEGEFDSFVVQYKDRDGQPQVVPVAADQREVTIPDLEPSRKYKFLLFGIQDGKRRSPVSVEAKTVARGDASPGAPPRLGELWVTDPTPDSLRLSWTVPEGQFDSFVVQFKDKDGPQVVPVEGHERSVTVTPLDAGRKYRFLLYGLLGKKRHGPLTADGTTEARSAMDDTGTKRPPKPRLGEELQVTTVTQNSVGLSWTVPEGQFDSFVVQYKDRDGQPQVVPVEGSLREVSVPGLDPAHRYKLLLYGLHHGKRVGPISAVAITAGREETETETTAPTPPAPEPHLGELTVEEATSHTLHLSWMVTEGEFDSFEIQYTDRDGQLQMVRIGGDRNDITLSGLESDHRYLVTLYGFSDGKHVGPVHVEALTVPEEEKPSEPPTATPEPPIKPRLGELTVTDATPDSLSLSWTVPEGQFDHFLVQYRNGDGQPKAVRVPGHEEGVTISGLEPDHKYKMNLYGFHGGQRMGPVSVVGVTAAEEETPSPTEPSMEAPEPAEEPLLGELTVTGSSPDSLSLSWTVPQGRFDSFTVQYKDRDGRPQVVRVGGEESEVTVGGLEPGRKYKMHLYGLHEGRRVGPVSAVGVTAPEEESPDAPLAKLRLGQMTVRDITSDSLSLSWTVPEGQFDHFLVQFKNGDGQPKAVRVPGHEDGVTISGLEPDHKYKMNLYGFHGGQRVGPVSAVGLTAPGKDEEMAPASTEPPTPEPPIKPRLEELTVTDATPDSLSLSWTVPEGQFDHFLVQYKNGDGQPKATRVPGHEDRVTISGLEPDNKYKMNLYGFHGGQRVGPVSAIGVTAAEEETPSPTEPSMEAPEPPEEPLLGELTVTGSSPDSLSLSWTVPQGRFDSFTVQYKDRDGRPQVVRVGGEESEVTVGGLEPGRKYKMHLYGLHEGRRVGPVSTVGVTAPQEDVDETPSPTEPGTEAPGPPEEPLLGELTVTGSSPDSLSLSWTVPQGRFDSFTVQYKDRDGRPQAVRVGGQESKVTVRGLEPGRKYKMHLYGLHEGRRLGPVSAVGVTEDEAETTQAVPTMTPEPPIKPRLGELTMTDATPDSLSLSWTVPEGQFDHFLVQYRNGDGQPKAVRVPGHEDGVTISGLEPDHKYKMNLYGFHGGQRVGPISVIGVTAAEEETPSPTELSTEAPEPPEEPLLGELTVTGSSPDSLSLSWTIPQGHFDSFTVQYKDRDGRPQVMRVRGEESEVTVGGLEPGRKYKMHLYGLHEGRRVGPVSTVGVTVPTTTPEPPNKPRLGELTVTDATPDSLSLSWMVPEGQFDHFLVQYRNGDGQPKVVRVPGHEDGVTISGLEPDHKYKMNLYGFHGGQRVGPISVIGVTAAEEETPAPTEPSTEAPEPPEEPLLGELTVTGSSPDSLSLSWTIPQGRFDSFTVQYKDRDGRPQVVRVRGEESEVTVGGLEPGCKYKMHLYGLHEGQRVGPVSAVGVTVPTMTPEPPIKPRLGELTVTDATPDSLSLSWMVPEGQFDHFLVQYRNGDGQPKAVRVPGHEDGVTISGLEPDHKYKMNLYGFHGGQRVGPVSAIGVTEEETPSPTEPSTEAPEAPEEPLLGELTVTGSSPDSLSLSWTVPQGRFDSFTVQYKDRDGQPQVVRVRVEESEVTVGGLEPGRKYKMHLYGLHEGQRVGPVSTVGITAPLPTPLPVEPRLGELAVAAVTSDSVGLSWTVAQGPFDSFLVQYRDAQGQPQAVPVSGDLRAVAVSGLDPARKYKFLLFGLQNGKRHGPVPVEARTAPDTKPSPRLGELTVTDATPDSVGLSWTVPEGEFDSFVVQYKDKDGRLQVVPVAANQREVTVQGLEPSRKYRFLLYGLSGRKRLGPISADSTTAPLEKELPPHLGELTVAEETSSSLRLSWTVAQGPFDSFVVQYRDTDGQPRAVPVAADQRTVTVEDLEPGKKYKFLLYGLLGGKRLGPVSALGMTAPEEDTPAPELAPEAPEPPEEPRLGVLTVTDTTPDSMRLSWSVAQGPFDSFVVQYEDTNGQPQALLVDGDQSKILISGLEPSTPYRFLLYGLHEGKRLGPLSAEGTTGLAPAGQTSEESRPRLSQLSVTDVTTSSLRLNWEAPPGAFDSFLLRFGVPSPSTLEPHPRPLLQRELMVPGTRHSAVLRDLRSGTLYSLTLYGLRGPHKADSIQGTARTLSPVLESPRDLQFSEIRETSAKVNWMPPPSRADSFKVSYQLADGGEPQSVQVDGQARTQKLQGLIPGARYEVTVVSVRGFEESEPLTGFLTTVPDGPTQLRALNLTEGFAVLHWKPPQNPVDTYDVQVTAPGAPPLQAETPGSAVDYPLHDLVLHTNYTATVRGLRGPNLTSPASITFTTGLEAPRDLEAKEVTPRTALLTWTEPPVRPAGYLLSFHTPGGQNQEILLPGGITSHQLLGLFPSTSYNARLQAMWGQSLLPPVSTSFTTGGLRIPFPRDCGEEMQNGAGASRTSTIFLNGNRERPLNVFCDMETDGGGWLVFQRRMDGQTDFWRDWEDYAHGFGNISGEFWLGNEALHSLTQAGDYSMRVDLRAGDEAVFAQYDSFHVDSAAEYYRLHLEGYHGTAGDSMSYHSGSVFSARDRDPNSLLISCAVSYRGAWWYRNCHYANLNGLYGSTVDHQGVSWYHWKGFEFSVPFTEMKLRPRNFRSPAGGG

SEQ ID NO: 66731 - protein, 4222 aa, Homo sapiens
MMPAQYALTSSLVLLVLLSTARAGPFSSRSNVTLPAPRPPPQPGGHTVGAGVGSPSSQLYEHTVEGGEKQVVFTHRINLPPSTGCGCPPGTEPPVLASEVQALRVRLEILEELVKGLKEQCTGGCCPASAQAGTGQTDVRTLCSLHGVFDLSRCTCSCEPGWGGPTCSDPTDAEIPPSSPPSASGSCPDDCNDQGRCVRGRCVCFPGYTGPSCGWPSCPGDCQGRGRCVQGVCVCRAGFSGPDCSQRSCPRGCSQRGRCEGGRCVCDPGYTGDDCGMRSCPRGCSQRGRCENGRCVCNPGYTGEDCGVRSCPRGCSQRGRCKDGRCVCDPGYTGEDCGTRSCPWDCGEGGRCVDGRCVCWPGYTGEDCSTRTCPRDCRGRGRCEDGECICDTGYSGDDCGVRSCPGDCNQRGRCEDGRCVCWPGYTGTDCGSRACPRDCRGRGRCENGVCVCNAGYSGEDCGVRSCPGDCRGRGRCESGRCMCWPGYTGRDCGTRACPGDCRGRGRCVDGRCVCNPGFTGEDCGSRRCPGDCRGHGLCEDGVCVCDAGYSGEDCSTRSCPGGCRGRGQCLDGRCVCEDGYSGEDCGVRQCPNDCSQHGVCQDGVCICWEGYVSEDCSIRTCPSNCHGRGRCEEGRCLCDPGYTGPTCATRMCPADCRGRGRCVQGVCLCHVGYGGEDCGQEEPPASACPGGCGPRELCRAGQCVCVEGFRGPDCAIQTCPGDCRGRGECHDGSCVCKDGYAGEDCGEEVPTIEGMRMHLLEETTVRTEWTPAPGPVDAYEIQFIPTTEGASPPFTARVPSSASAYDQRGLAPGQEYQVTVRALRGTSWGLPASKTITTMIDGPQDLRVVAVTPTTLELGWLRPQAEVDRFVVSYVSAGNQRVRLEVPPEADGTLLTDLMPGVEYVVTVTAERGRAVSYPASVRANTGSSPLGLLGTTDEPPPSGPSTTQGAQAPLLQQRPQELGELRVLGRDETGRLRVVWTAQPDTFAYFQLRMRVPEGPGAHEEVLPGDVRQALVPPPPPGTPYELSLHGVPPGGKPSDPIIYQGIMDKDEEKPGKSSGPPRLGELTVTDRTSDSLLLRWTVPEGEFDSFVIQYKDRDGQPQVVPVEGPQRSAVITSLDPGRKYKFVLYGFVGKKRHGPLVAEAKILPQSDPSPGTPPRLGNLWVTDPTPDSLHLSWTVPEGQFDTFMVQYRDRDGRPQVVPVEGPERSFVVSSLDPDHKYRFTLFGIANKKRYGPLTADGTTAPERKEEPPRPEFLEQPLLGELTVTGVTPDSLRLSWTVAQGPFDSFMVQYKDAQGQPQAVPVAGDENEVTVPGLDPDRKYKMNLYGLRGRQRVGPESVVAKTAPQEDVDETPSPTELGTEAPESPEEPLLGELTVTGSSPDSLSLFWTVPQGSFDSFTVQYKDRDGRPRAVRVGGKESEVTVGGLEPGHKYKMHLYGLHEGQRVGPVSAVGVTAPQQEETPPATESPLEPRLGELTVTDVTPNSVGLSWTVPEGQFDSFIVQYKDKDGQPQVVPVAADQREVTVYNLEPERKYKMNMYGLHDGQRMGPLSVVIVTAPLPPAPATEASKPPLEPRLGELTVTDITPDSVGLSWTVPEGEFDSFVVQYKDRDGQPQVVPVAADQREVTIPDLEPSRKYKFLLFGIQDGKRRSPVSVEAKTVARGDASPGAPPRLGELWVTDPTPDSLRLSWTVPEGQFDSFVVQFKDKDGPQVVPVEGHERSVTVTPLDAGRKYRFLLYGLLGKKRHGPLTADGTTEARSAMDDTGTKRPPKPRLGEELQVTTVTQNSVGLSWTVPEGQFDSFVVQYKDRDGQPQVVPVEGSLREVSVPGLDPAHRYKLLLYGLHHGKRVGPISAVAITAGREETETETTAPTPPAPEPHLGELTVEEATSHTLHLSWMVTEGEFDSFEIQYTDRDGQLQMVRIGGDRNDITLSGLESDHRYLVTLYGFSDGKHVGPVHVEALTVPEEEKPSEPPTATPEPPIKPRLGELTVTDATPDSLSLSWTVPEGQFDHFLVQYRNGDGQPKAVRVPGHEEGVTISGLEPDHKYKMNLYGFHGGQRMGPVSVVGVTAAEEETPSPTEPSMEAPEPAEEPLLGELTVTGSSPDSLSLSWTVPQGRFDSFTVQYKDRDGRPQVVRVGGEESEVTVGGLEPGRKYKMHLYGLHEGRRVGPVSAVGVTAPEEESPDAPLAKLRLGQMTVRDITSDSLSLSWTVPEGQFDHFLVQFKNGDGQPKAVRVPGHEDGVTISGLEPDHKYKMNLYGFHGGQRVGPVSAVGLTAPGKDEEMAPASTEPPTPEPPIKPRLEELTVTDATPDSLSLSWTVPEGQFDHFLVQYKNGDGQPKATRVPGHEDRVTISGLEPDNKYKMNLYGFHGGQRVGPVSAIGVTAAEEETPSPTEPSMEAPEPPEEPLLGELTVTGSSPDSLSLSWTVPQGRFDSFTVQYKDRDGRPQVVRVGGEESEVTVGGLEPGRKYKMHLYGLHEGRRVGPVSTVGVTAPQEDVDETPSPTEPGTEAPEPPEEPLLGELTVTGSSPDSLSLSWTVPQGRFDSFTVQYKDRDGRPQAVRVGGQESKVTVRGLEPGRKYKMHLYGLHEGRRLGPVSAVGVTEDEAETTQAVPTMTPEPPIKPRLGELTMTDATPDSLSLSWTVPEGQFDHFLVQYRNGDGQPKAVRVPGHEDGVTISGLEPDHKYKMNLYGFHGGQRVGPISVIGVTAAEEETPSPTELSTEAPEPPEEPLLGELTVTGSSPDSLSLSWTIPQGHFDSFTVQYKDRDGRPQVMRVRGEESEVTVGGLEPGRKYKMHLYGLHEGRRVGPVSTVGVTVPTTTPEPPNKPRLGELTVTDATPDSLSLSWMVPEGQFDHFLVQYRNGDGQPKVVRVPGHEDGVTISGLEPDHKYKMNLYGFHGGQRVGPISVIGVTAAEEETPAPTEPSTEAPEPPEEPLLGELTVTGSSPDSLSLSWTIPQGRFDSFTVQYKDRDGRPQVVRVRGEESEVTVGGLEPGCKYKMHLYGLHEGQRVGPVSAVGVTVPTMTPEPPIKPRLGELTVTDATPDSLSLSWMVPEGQFDHFLVQYRNGDGQPKAVRVPGHEDGVTISGLEPDHKYKMNLYGFHGGQRVGPVSAIGVTEEETPSPTEPSTEAPEAPEEPLLGELTVTGSSPDSLSLSWTVPQGRFDSFTVQYKDRDGQPQVVRVRGEESEVTVGGLEPGRKYKMHLYGLHEGQRVGPVSTVGITAPLPTPLPVEPRLGELAVAAVTSDSVGLSWTVAQGPFDSFLVQYRDAQGQPQAVPVSGDLRAVAVSGLDPARKYKFLLFGLQNGKRHGPVPVEARTAPDTKPSPRLGELTVTDATPDSVGLSWTVPEGEFDSFVVQYKDKDGRLQVVPVAANQREVTVQGLEPSRKYRFLLYGLSGRKRLGPISADSTTAPLEKELPPHLGELTVAEETSSSLRLSWTVAQGPFDSFVVQYRDTDGQPRAVPVAADQRTVTVEDLEPGKKYKFLLYGLLGGKRLGPVSALGMTAPEEDTPAPELAPEAPEPPEEPRLGVLTVTDTTPDSMRLSWSVAQGPFDSFVVQYEDTNGQPQALLVDGDQSKILISGLEPSTPYRFLLYGLHEGKRLGPLSAEGTTGLAPAGQTSEESRPRLSQLSVTDVTTSSLRLNWEAPPGAFDSFLLRFGVPSPSTLEPHPRPLLQRELMVPGTRHSAVLRDLRSGTLYSLTLYGLRGPHKADSIQGTARTLSPVLESPRDLQFSEIRETSAKVNWMPPPSRADSFKVSYQLADGGEPQSVQVDGQARTQKLQGLIPGARYEVTVVSVRGFEESEPLTGFLTTVPDGPTQLRALNLTEGFAVLHWKPPQNPVDTYDIQVTAPGAPPLQAETPGSAVDYPLHDLVLHTNYTATVRGLRGPNLTSPASITFTTGLEAPRDLEAKEVTPRTALLTWTEPPVRPAGYLLSFHTPGGQTQEILLPGGITSHQLLGLFPSTSYNARLQAMWGQSLLPPVSTSFTTGGLRIPFPRDCGEEMQNGAGASRTSTIFLNGNRERPLIVFCDMETDGGGWLVFQRRMDGQTDFWRDWEDYAHGFGNISGEFWLGNEALHSLTQAGDYSMRVDLRAGDEAVFAQYDSFHVDSAAEYYRLHLEGYHGTAGDSMSYHSGSVFSARDRDPNSLLISCAVSYRGAWWYRNCHYANLNGLYGSTVDHQGVSWYHWKGFEFSVPFTEMKLRPRNFRSPAGGG

SEQ ID NO: 66732 - protein, 8 aa, Homo sapiens
MMPAQYAL

SEQ ID NO: 66733 - protein, 634 aa, Homo sapiens
  VARIANT 1: note = MOD_RES - Any amino acid
XSSPLGLLGTTDEPPPSGPSTTQGAQAPLLQQRPQELGELRVLGRDETGRLRVVWTAQPDTFAYFQLRMRVPEGPGAHEEVLPGDVRQALVPPPPPGTPYELSLHGVPPGGKPSDPIIYQGIMDKDEEKPGKSSGPPRLGELTVTDRTSDSLLLRWTVPEGEFDSFVIQYKDRDGQPQVVPVEGPQRSAVITSLDPGRKYKFVLYGFVGKKRHGPLVAEAKILPQSDPSPGTPPRLGNLWVTDPTPDSLHLSWTVPEGQFDTFMVQYRDRDGRPQVVPVEGPERSFVVSSLDPDHKYRFTLFGIANKKRYGPLTADGTTAPERKEEPPRPEFLEQPLLGELTVTGVTPDSLRLSWTVAQGPFDSFMVQYKDAQGQPQAVPVAGDENEVTVPGLDPDRKYKMNLYGLRGRQRVGPESVVAKTAPQEDVDETPSPTELGTEAPESPEEPLLGELTVTGSSPDSLSLFWTVPQGSFDSFTVQYKDRDGRPRAVRVGGKESEVTVGGLEPGHKYKMHLYGLHEGQRVGPVSAVGVTAPQQEETPPATESPLEPRLGELTVTDVTPNSVGLSWTVPEGQFDSFIVQYKDKDGQPQVVPVAADQREVTVYNLEPERKYKMNMYGLHDGQRMGPLSVVIVT

SEQ ID NO: 66734 - protein, 8 aa, Homo sapiens
MMPAQYAL

SEQ ID NO: 66735 - protein, 4222 aa, Homo sapiens
MMPAQYALTSSLVLLVLLSTARAGPFSSRSNVTLPAPRPPPQPGGHTVGAGVGSPSSQLYEHTVEGGEKQVVFTHRINLPPSTGCGCPPGTEPPVLASEVQALRVRLEILEELVKGLKEQCTGGCCPASAQAGTGQTDVRTLCSLHGVFDLSRCTCSCEPGWGGPTCSDPTDAEIPPSSPPSASGSCPDDCNDQGRCVRGRCVCFPGYTGPSCGWPSCPGDCQGRGRCVQGVCVCRAGFSGPDCSQRSCPRGCSQRGRCEGGRCVCDPGYTGDDCGMRSCPRGCSQRGRCENGRCVCNPGYTGEDCGVRSCPRGCSQRGRCKDGRCVCDPGYTGEDCGTRSCPWDCGEGGRCVDGRCVCWPGYTGEDCSTRTCPRDCRGRGRCEDGECICDTGYSGDDCGVRSCPGDCNQRGRCEDGRCVCWPGYTGTDCGSRACPRDCRGRGRCENGVCVCNAGYSGEDCGVRSCPGDCRGRGRCESGRCMCWPGYTGRDCGTRACPGDCRGRGRCVDGRCVCNPGFTGEDCGSRRCPGDCRGHGLCEDGVCVCDAGYSGEDCSTRSCPGGCRGRGQCLDGRCVCEDGYSGEDCGVRQCPNDCSQHGVCQDGVCICWEGYVSEDCSIRTCPSNCHGRGRCEEGRCLCDPGYTGPTCATRMCPADCRGRGRCVQGVCLCHVGYGGEDCGQEEPPASACPGGCGPRELCRAGQCVCVEGFRGPDCAIQTCPGDCRGRGECHDGSCVCKDGYAGEDCGEEVPTIEGMRMHLLEETTVRTEWTPAPGPVDAYEIQFIPTTEGASPPFTARVPSSASAYDQRGLAPGQEYQVTVRALRGTSWGLPASKTITTMIDGPQDLRVVAVTPTTLELGWLRPQAEVDRFVVSYVSAGNQRVRLEVPPEADGTLLTDLMPGVEYVVTVTAERGRAVSYPASVRANTGSSPLGLLGTTDEPPPSGPSTTQGAQAPLLQQRPQELGELRVLGRDETGRLRVVWTAQPDTFAYFQLRMRVPEGPGAHEEVLPGDVRQALVPPPPPGTPYELSLHGVPPGGKPSDPIIYQGIMDKDEEKPGKSSGPPRLGELTVTDRTSDSLLLRWTVPEGEFDSFVIQYKDRDGQPQVVPVEGPQRSAVITSLDPGRKYKFVLYGFVGKKRHGPLVAEAKILPQSDPSPGTPPRLGNLWVTDPTPDSLHLSWTVPEGQFDTFMVQYRDRDGRPQVVPVEGPERSFVVSSLDPDHKYRFTLFGIANKKRYGPLTADGTTAPERKEEPPHPEFLEQPLLGELTVTGVTPDSLRLSWTVAQGPFDSFMVQYKDAQGQPQAVPVAGDENEVTVPGLDPDRKYKMNLYGLRGRQRVGPESVVAKTAPQEDVDETPSPTELGTEAPESPEEPLLGELTVTGSSPDSLSLFWTVPQGSFDSFTVQYKDRDGRPRAVRVGGKESEVTVGGLEPGHKYKMHLYGLHEGQRVGPVSAVGVTAPQQEETPPATESPLEPRLGELTVTDVTPNSVGLSWTVPEGQFDSFIVQYKDKDGQPQVVPVAADQREVTVYNLEPERKYKMNMYGLHDGQRMGPLSVVIVTAPLPPAPATEASKPPLEPRLGELTVTDITPDSVGLSWTVPEGEFDSFVVQYKDRDGQPQVVPVAADQREVTIPDLEPSRKYKFLLFGIQDGKRRSPVSVEAKTVARGDASPGAPPRLGELWVTDPTPDSLRLSWTVPEGQFDSFVVQFKDKDGPQVVPVEGHERSVTVTPLDAGRKYRFLLYGLLGKKRHGPLTADGTTEARSAMDDTGTKRPPKPRLGEELQVTTVTQNSVGLSWTVPEGQFDSFVVQYKDRDGQPQVVPVEGSLREVSVPGLDPAHRYKLLLYGLHHGKRVGPISAVAITAGREETETETTAPTPPAPEPHLGELTVEEATSHTLHLSWMVTEGEFDSFEIQYTDRDGQLQMVRIGGDRNDITLSGLESDHRYLVTLYGFSDGKHVGPVHVEALTVPEEEKPSEPPTATPEPPIKPRLGELTVTDATPDSLSLSWTVPEGQFDHFLVQYRNGDGQPKAVRVPGHEEGVTISGLEPDHKYKMNLYGFHGGQRMGPVSVVGVTAAEEETPSPTEPSMEAPEPAEEPLLGELTVTGSSPDSLSLSWTVPQGRFDSFTVQYKDRDGRPQVVRVGGEESEVTVGGLEPGRKYKMHLYGLHEGRRVGPVSAVGVTAPEEESPDAPLAKLRLGQMTVRDITSDSLSLSWTVPEGQFDHFLVQFKNGDGQPKAVRVPGHEDGVTISGLEPDHKYKMNLYGFHGGQRVGPVSAVGLTAPGKDEEMAPASTEPPTPEPPIKPRLEELTVTDATPDSLSLSWTVPEGQFDHFLVQYKNGDGQPKATRVPGHEDRVTISGLEPDNKYKMNLYGFHGGQRVGPVSAIGVTAAEEETPSPTEPSMEAPEPPEEPLLGELTVTGSSPDSLSLSWTVPQGRFDSFTVQYKDRDGRPQVVRVGGEESEVTVGGLEPGRKYKMHLYGLHEGRRVGPVSTVGVTAPQEDVDETPSPTEPGTEAPEPPEEPLLGELTVTGSSPDSLSLSWTVPQGRFDSFTVQYKDRDGRPQAVRVGGQESKVTVRGLEPGRKYKMHLYGLHEGRRLGPVSAVGVTEDEAETTQAVPTMTPEPPIKPRLGELTMTDATPDSLSLSWTVPEGQFDHFLVQYRNGDGQPKAVRVPGHEDGVTISGLEPDHKYKMNLYGFHGGQRVGPISVIGVTAAEEETPSPTELSTEAPEPPEEPLLGELTVTGSSPDSLSLSWTIPQGHFDSFTVQYKDRDGRPQVMRVRGEESEVTVGGLEPGRKYKMHLYGLHEGRRVGPVSTVGVTVPTTTPEPPNKPRLGELTVTDATPDSLSLSWMVPEGQFDHFLVQYRNGDGQPKVVRVPGHEDGVTISGLEPDHKYKMNLYGFHGGQRVGPISVIGVTAAEEETPAPTEPSTEAPEPPEEPLLGELTVTGSSPDSLSLSWTIPQGRFDSFTVQYKDRDGRPQVVRVRGEESEVTVGGLEPGCKYKMHLYGLHEGQRVGPVSAVGVTVPTMTPEPPIKPRLGELTVTDATPDSLSLSWMVPEGQFDHFLVQYRNGDGQPKAVRVPGHEDGVTISGLEPDHKYKMNLYGFHGGQRVGPVSAIGVTEEETPSPTEPSTEAPEAPEEPLLGELTVTGSSPDSLSLSWTIPQGRFDSFTVQYKDRDGQPQVVRVRGEESEVTVGGLEPGRKYKMHLYGLHEGQRVGPVSTVGITAPLPTPLPVEPRLGELAVAAVTSDSVGLSWTVAQGPFDSFLVQYRDAQGQPQAVPVSGDLRAVAVSGLDPARKYKFLLFGLQNGKRHGPVPVEARTAPDTKPSPRLGELTVTDATPDSVGLSWTVPEGEFDSFVVQYKDKDGRLQVVPVAANQREVTVQGLEPSRKYRFLLYGLSGRKRLGPISADSTTAPLEKELPPHLGELTVAEETSSSLRLSWTVAQGPFDSFVVQYRDTDGQPRAVPVAADQRTVTVEDLEPGKKYKFLLYGLLGGKRLGPVSALGMTAPEEDTPAPELAPEAPEPPEEPRLGVLTVTDTTPDSMRLSWSVAQGPFDSFVVQYEDTNGQPQALLVDGDQSKILISGLEPSTPYRFLLYGLHEGKRLGPLSAEGTTGLAPAGQTSEESRPRLSQLSVTDVTTSSLRLNWEAPPGAFDSFLLRFGVPSPSTLEPHPRPLLQRELMVPGTRHSAVLRDLRSGTLYSLTLYGLRGPHKADSIQGTARTLSPVLESPRDLQFSEIRETSAKVNWMPPPSRADSFKVSYQLADGGEPQSVQVDGQARTQKLQGLIPGARYEVTVVSVRGFEESEPLTGFLTTVPDGPTQLRALNLTEGFAVLHWKPPQNPVDTYDIQVTAPGAPPLQAETPGSAVDYPLHDLVLHTNYTATVRGLRGPNLTSPASITFTTGLEAPRDLEAKEVTPRTALLTWTEPPVRPAGYLLSFHTPGGQTQEILLPGGITSHQLLGLFPSTSYNARLQATWGQSLLPPVSTSFTTGGLRIPFPRDCGEEMQNGAGASRTSTIFLNGNRERPLNVFCDMETDGGGWLVFQRRMDGQTDFWRDWEDYAHGFGNISGEFWLGNEALHSLTQAGDYSMRVDLRAGDEAVFAQYDSFHVDSAAEYYRLHLEGYHGTAGDSMSYHSGSVFSARDRDPNSLLISCAVSYRGAWWYRNCHYANLNGLYGSTVDHQGVSWYHWKGFEFSVPFTEMKLRPRNFRSPAGGG

SEQ ID NO: 66736 - protein, 8 aa, Homo sapiens
MMPAQYAL

SEQ ID NO: 66737 - protein, 2280 aa, Homo sapiens
MMPAQYALTSSLVLLVLLSTARAGPFSSRSNVTLPAPRPPPQPGGHTVGAGVGSPSSQLYEHTVEGGEKQVVFTHRINLPPSTGCGCPPGTEPPVLASEVQALRVRLEILEELVKGLKEQCTGGCCPASAQAGTGQTDVRTLCSLHGVFDLSRCTCSCEPGWGGPTCSDPTDAEIPPSSPPSASGSCPDDCNDQGRCVRGRCVCFPGYTGPSCGWPSCPGDCQGRGRCVQGVCVCRAGFSGPDCSQRSCPRGCSQRGRCEGGRCVCDPGYTGDDCGMRSCPRGCSQRGRCENGRCVCNPGYTGEDCGVRSCPRGCSQRGRCKDGRCVCDPGYTGEDCGTRSCPWDCGEGGRCVDGRCVCWPGYTGEDCSTRTCPRDCRGRGRCEDGECICDTGYSGDDCGVRSCPGDCNQRGRCEDGRCVCWPGYTGTDCGSRACPRDCRGRGRCENGVCVCNAGYSGEDCGVRSCPGDCRGRGRCESGRCMCWPGYTGRDCGTRACPGDCRGRGRCVDGRCVCNPGFTGEDCGSRRCPGDCRGHGLCEDGVCVCDAGYSGEDCSTRSCPGGCRGRGQCLDGRCVCEDGYSGEDCGVRQCPNDCSQHGVCQDGVCICWEGYVSEDCSIRTCPSNCHGRGRCEEGRCLCDPGYTGPTCATRMCPADCRGRGRCVQGVCLCHVGYGGEDCGQEEPPASACPGGCGPRELCRAGQCVCVEGFRGPDCAIQTCPGDCRGRGECHDGSCVCKDGYAGEDCGEEVPTIEGMRMHLLEETTVRTEWTPAPGPVDAYEIQFIPTTEGASPPFTARVPSSASAYDQRGLAPGQEYQVTVRALRGTSWGLPASKTITTMIDGPQDLRVVAVTPTTLELGWLRPQAEVDRFVVSYVSAGNQRVRLEVPPEADGTLLTDLMPGVEYVVTVTAERGRAVSYPASVRANTGSSPLGLLGTTDEPPPSGPSTTQGAQAPLLQQRPQELGELRVLGRDETGRLRVVWTAQPDTFAYFQLRMRVPEGPGAHEEVLPGDVRQALVPPPPPGTPYELSLHGVPPGGKPSDPIIYQGIMDKDEEKPGKSSGPPRLGELTVTDRTSDSLLLRWTVPEGEFDSFVIQYKDRDGQPQVVPVEGPQRSAVITSLDPGRKYKFVLYGFVGKKRHGPLVAEAKILPQSDPSPGTPPHLGNLWVTDPTPDSLHLSWTVPEGQFDTFMVQYRDRDGRPQVVPVEGPERSFVVSSLDPDHKYRFTLFGIANKKRYGPLTADGTTAPERKEEPPRPEFLEQPLLGELTVTGVTPDSLRLSWTVAQGPFDSFMVQYKDAQGQPQAVPVAGDENEVTVPGLDPDRKYKMNLYGLRGRQRVGPESVVAKTAPQEDVDETPSPTELGTEAPESPEEPLLGELTVTGSSPDSLSLFWTVPQGSFDSFTVQYKDRDGRPRAVRVGGKESEVTVGGLEPGHKYKMHLYGLHEGQRVGPVSAVGVTAPQQEETPPATESPLEPRLGELTVTDVTPNSVGLSWTVPEGQFDSFIVQYKDKDGQPQVVPVAADQREVTVYNLEPERKYKMNMYGLHDGQRMGPLSVVIVTAPLPPAPATEASKPPLEPRLGELTVTDITPDSVGLSWTVPEGEFDSFVVQYKDRDGQPQVVPVAADQREVTIPDLEPSRKYKFLLFGIQDGKRRSPVSVEAKTVARGDASPGAPPRLGELWVTDPTPDSLRLSWTVPEGQFDSFVVQFKDKDGPQVVPVEGHERSVTVTPLDAGRKYRFLLYGLLGKKRHGPLTADGTTEARSAMDDTGTKRPPKPRLGEELQVTTVTQNSVGLSWTVPEGQFDSFVVQYKDRDGQPQVVPVEGSLREVSVPGLDPAHRYKLLLYGLHHGKRVGPISAVAITAGREETETETTAPTPPAPEPHLGELTVEEATSHTLHLSWMVTEGEFDSFEIQYTDRDGQLQMVRIGGDRNDITLSGLESDHRYLVTLYGFSDGKHVGPVHVEALTVPEEEKPSEPPTATPEPPIKPRLGELTVTDATPDSLSLSWTVPEGQFDHFLVQYRNGDGQPKAVRVPGHEEGVTISGLEPDHKYKMNLYGFHGGQRMGPVSVVGVTAAEEETPSPTEPSMEAPEPAEEPLLGELTVTGSSPDSLSLSWTVPQGRFDSFTVQYKDRDGRPQVVRVGGEESEVTVGGLEPGRKYKMHLYGLHEGRRVGPVSAVGVTAPEEESPDAPLAKLRLGQMTVRDITSDSLSLSWTVPEGQFDHFLVQFKNGDGQPKAVRVPGHEDGVTISGLEPDHKYKMNLYGFHGGQRVGPVSAVGLT

SEQ ID NO: 66738 - protein, 673 aa, Homo sapiens
MRLSWSVAQGPFDSFVVQYEDTNGQPQALLVDGDQSKILISGLEPSTPYRFLLYGLHEGKRLGPLSAEGTTGLAPAGQTSEESRPRLSQLSVTDVTTSSLRLNWEAPPGAFDSFLLRFGVPSPSTLEPHPRPLLQRELMVPGTRHSAVLRDLRSGTLYSLTLYGLRGPHKADSIQGTARTLSPVLESPRDLQFSEIRETSAKVNWMPPPSRADSFKVSYQLADGGEPQSVQVDGQARTQKLQGLIPGARYEVTVVSVRGFEESEPLTGFLTTVPDGPTQLRALNLTEGFAVLHWKPPQNPVDTYDIQVTAPGAPPLQAETPGSAVDYPLHDLVLHTNYTATVRGLRGPNLTSPASITFTTGLEAPRDLEAKEVTPRTALLTWTEPPVRPAGYLLSFHTPGGQTQEILLPGGITSHQLLGLFPSTSYNARLQAMWGQSLLPPVSTSFTTGGLRIPFPRDCGEEMQNGAGASRTSTIFLNGNRERPLIVFCDMETDGGGWLVFQRRMDGQTDFWRDWEDYAHGFGNISGEFWLGNEALHSLTQAGDYSMRVDLRAGDEAVFAQYDSFHVDSAAEYYRLHLEGYHGTAGDSMSYHSGSVFSARDRDPNSLLISCAVSYRGAWWYRNCHYANLNGLYGSTVDHQGVSWYHWKGFEFSVPFTEMKLRPRNFRSPAGGG

SEQ ID NO: 66739 - protein, 217 aa, Homo sapiens
APGKDEEMAPASTEPPTPEPPIKPRLEELTVTDATPDSLSLSWTVPEGQFDHFLVQYKNGDGQPKATRVPGHEDRVTISGLEPDNKYKMNLYGFHGGQRVGPVSAIGVTAAEEETPSPTEPSMEAPEPPEEPLLGELTVTGSSPDSLSLSWTVPQGRFDSFTVQYKDRDGRPQVVRVGGEESEVTVGGLEPGRKYKMHLYGLHEGRRVGPVSTVGVT

SEQ ID NO: 66740 - protein, 4242 aa, Homo sapiens
MMPAQYALTSSLVLLVLLSTARAGPFSSRSNVTLPAPRPPPQPGGHTVGAGVGSPSSQLYEHTVEGGEKQVVFTHRINLPPSTGCGCPPGTEPPVLASEVQALRVRLEILEELVKGLKEQCTGGCCPASAQAGTGQTDVRTLCSLHGVFDLSRCTCSCEPGWGGPTCSDPTDAEIPPSSPPSASGSCPDDCNDQGRCVRGRCVCFPGYTGPSCGWPSCPGDCQGRGRCVQGVCVCRAGFSGPDCSQRSCPRGCSQRGRCEGGRCVCDPGYTGDDCGMRSCPRGCSQRGRCENGRCVCNPGYTGEDCGVRSCPRGCSQRGRCKDGRCVCDPGYTGEDCGTRSCPWDCGEGGRCVDGRCVCWPGYTGEDCSTRTCPRDCRGRGRCEDGECICDTGYSGDDCGVRSCPGDCNQRGRCEDGRCVCWPGYTGTDCGSRACPRDCRGRGRCENGVCVCNAGYSGEDCGVRSCPGDCRGRGRCESGRCMCWPGYTGRDCGTRACPGDCRGRGRCVDGRCVCNPGFTGEDCGSRRCPGDCRGHGLCEDGVCVCDAGYSGEDCSTRSCPGGCRGRGQCLDGRCVCEDGYSGEDCGVRQCPNDCSQHGVCQDGVCICWEGYVSEDCSIRTCPSNCHGRGRCEEGRCLCDPGYTGPTCATRMCPADCRGRGRCVQGVCLCHVGYGGEDCGQEEPPASACPGGCGPRELCRAGQCVCVEGFRGPDCAIQTCPGDCRGRGECHDGSCVCKDGYAGEDCGEEVPTIEGMRMHLLEETTVRTEWTPAPGPVDAYEIQFIPTTEGASPPFTARVPSSASAYDQRGLAPGQEYQVTVRALRGTSWGLPASKTITTMIDGPQDLRVVAVTPTTLELGWLRPQAEVDRFVVSYVSAGNQRVRLEVPPEADGTLLTDLMPGVEYVVTVTAERGRAVSYPASVRANTGSSPLGLLGTTDEPPPSGPSTTQGAQAPLLQQRPQELGELRVLGRDETGRLRVVWTAQPDTFAYFQLRMRVPEGPGAHEEVLPGDVRQALVPPPPPGTPYELSLHGVPPGGKPSDPIIYQGIMDKDEEKPGKSSGPPRLGELTVTDRTSDSLLLRWTVPEGEFDSFVIQYKDRDGQPQVVPVEGPQRSAVITSLDPGRKYKFVLYGFVGKKRHGPLVAEAKILPQSDPSPGTPPRLGNLWVTDPTPDSLHLSWTVPEGQFDTFMVQYRDRDGRPQVVPVEGPERSFVVSSLDPDHKYRFTLFGIANKKRYGPLTADGTTAPERKEEPPRPEFLEQPLLGELTVTGVTPDSLRLSWTVAQGPFDSFMVQYKDAQGQPQAVPVAGDENEVTVPGLDPDRKYKMNLYGLRGRQRVGPESVVAKTAPQEDVDETPSPTELGTEAPESPEEPLLGELTVTGSSPDSLSLFWTVPQGSFDSFTVQYKDRDGRPRAVRVGGKESEVTVGGLEPGHKYKMHLYGLHEGQRVGPVSAVGVTAPQQEETPPATESPLEPRLGELTVTDVTPNSVGLSWTVPEGQFDSFIVQYKDKDGQPQVVPVAADQREVTVYNLEPERKYKMNMYGLHDGQRMGPLSVVIVTAPLPPAPATEASKPPLEPRLGELTVTDITPDSVGLSWTVPEGEFDSFVVQYKDRDGQPQVVPVAADQREVTIPDLEPSRKYKFLLFGIQDGKRRSPVSVEAKTVARGDASPGAPPRLGELWVTDPTPDSLRLSWTVPEGQFDSFVVQFKDKDGPQVVPVEGHERSVTVTPLDAGRKYRFLLYGLLGKKRHGPLTADGTTEARSAMDDTGTKRPPKPRLGEELQVTTVTQNSVGLSWTVPEGQFDSFVVQYKDRDGQPQVVPVEGSLREVSVPGLDPAHRYKLLLYGLHHGKRVGPISAVAITAGREETETETTAPTPPAPEPHLGELTVEEATSHTLHLSWMVTEGEFDSFEIQYTDRDGQLQMVRIGGDRNDITLSGLESDHRYLVTLYGFSDGKHVGPVHVEALTVPEEEKPSEPPTATPEPPIKPRLGELTVTDATPDSLSLSWTVPEGQFDHFLVQYRNGDGQPKAVRVPGHEEGVTISGLEPDHKYKMNLYGFHGGQRMGPVSVVGVTAAEEETPSPTEPSMEAPEPAEEPLLGELTVTGSSPDSLSLSWTVPQGRFDSFTVQYKDRDGRPQVVRVGGEESEVTVGGLEPGRKYKMHLYGLHEGRRVGPVSAVGVTAPEEESPDAPLAKLRLGQMTVRDITSDSLSLSWTVPEGQFDHFLVQFKNGDGQPKAVRVPGHEDGVTISGLEPDHKYKMNLYGFHGGQRVGPVSAVGLTAPGKDEEMAPASTEPPTPEPPIKPRLEELTVTDATPDSLSLSWTVPEGQFDHFLVQYKNGDGQPKATRVPGHEDRVTISGLEPDNKYKMNLYGFHGGQRVGPVSAIGVTAAEEETPSPTEPSMEAPEPPEEPLLGELTVTGSSPDSLSLSWTVPQGRFDSFTVQYKDRDGRPQVVRVGGEESEVTVGGLEPGRKYKMHLYGLHEGRRVGPVSTVGVTAPQEDVDETPSPTEPGTEAPEPPEEPLLGELTVTGSSPDSLSLSWTVPQGRFDSFTVQYKDRDGRPQAVRVGGQESKVTVRGLEPGRKYKMHLYGLHEGRRLGPVSAVGVTEDEAETTQAVPTMTPEPPIKPRLGELTMTDATPDSLSLSWTVPEGQFDHFLVQYRNGDGQPKAVRVPGHEDGVTISGLEPDHKYKMNLYGFHGGQRVGPISVIGVTAAEEETPSPTELSTEAPEPPEEPLLGELTVTGSSPDSLSLSWTIPQGHFDSFTVQYKDRDGRPQVMRVRGEESEVTVGGLEPGRKYKMHLYGLHEGRRVGPVSTVGVTEDEAETTQAVPTTTPEPPNKPRLGELTVTDATPDSLSLSWMVPEGQFDHFLVQYRNGDGQPKVVRVPGHEDGVTISGLEPDHKYKMNLYGFHGGQRVGPISVIGVTAAEEETPAPTEPSTEAPEPPEEPLLGELTVTGSSPDSLSLSWTIPQGRFDSFTVQYKDRDGRPQVVRVRGEESEVTVGGLEPGCKYKMHLYGLHEGQRVGPVSAVGVTAPKDEAETTQAVPTMTPEPPIKPRLGELTVTDATPDSLSLSWMVPEGQFDHFLVQYRNGDGQPKAVRVPGHEDGVTISGLEPDHKYKMNLYGFHGGQRVGPVSAIGVTEEETPSPTEPSTEAPEAPEEPLLGELTVTGSSPDSLSLSWTVPQGRFDSFTVQYKDRDGQPQVVRVRGEESEVTVGGLEPGRKYKMHLYGLHEGQRVGPVSTVGITAPLPTPLPVEPRLGELAVAAVTSDSVGLSWTVAQGPFDSFLVQYRDAQGQPQAVPVSGDLRAVAVSGLDPARKYKFLLFGLQNGKRHGPVPVEARTAPDTKPSPRLGELTVTDATPDSVGLSWTVPEGEFDSFVVQYKDKDGRLQVVPVAANQREVTVQGLEPSRKYRFLLYGLSGRKRLGPISADSTTAPLEKELPPHLGELTVAEETSSSLRLSWTVAQGPFDSFVVQYRDTDGQPRAVPVAADQRTVTVEDLEPGKKYKFLLYGLLGGKRLGPVSALGMTAPEEDTPAPELAPEAPEPPEEPRLGVLTVTDTTPDSMRLSWSVAQGPFDSFVVQYEDTNGQPQALLVDGDQSKILISGLEPSTPYRFLLYGLHEGKRLGPLSAEGTTGLAPAGQTSEESRPRLSQLSVTDVTTSSLRLNWEAPPGAFDSFLLRFGVPSPSTLEPHPRPLLQRELMVPGTRHSAVLRDLRSGTLYSLTLYGLRGPHKADSIQGTARTLSPVLESPRDLQFSEIRETSAKVNWMPPPSRADSFKVSYQLADGGEPQSVQVDGQARTQKLQGLIPGARYEVTVVSVRGFEESEPLTGFLTTVPDGPTQLRALNLTEGFAVLHWKPPQNPVDTYDIQVTAPGAPPLQAETPGSAVDYPLHDLVLHTNYTATVRGLRGPNLTSPASITFTTGLEAPRDLEAKEVTPRTALLTWTEPPVRPAGYLLSFHTPGGQTQEILLPGGITSHQLLGLFPSTSYNARLQAMWGQSLLPPVSTSFTTGGLRIPFPRDCGEEMQNGAGASRTSTIFLNGNRERPLIVFCDMETDGGGWLVFQRRMDGQTDFWRDWEDYAHGFGNISGEFWLGNEALHSLTQAGDYSMRVDLRAGDEAVFAQYDSFHVDSAAEYYRLHLEGYHGTAGDSMSYHSGSVFSARDRDPNSLLISCAVSYRGAWWYRNCHYANLNGLYGSTVDHQGVSWYHWKGFEFSVPFTEMKLRPRNFRSPAGGG

SEQ ID NO: 66741 - protein, 4242 aa, Homo sapiens
MMPAQYALTSSLVLLVLLSTARAGPFSSRSNVTLPAPRPPPQPGGHTVGAGVGSPSSQLYEHTVEGGEKQVVFTHRINLPPSTGCGCPPGTEPPVLASEVQALRVRLEILEELVKGLKEQCTGGCCPASAQAGTGQTDVRTLCSLHGVFDLSRCTCSCEPGWGGPTCSDPTDAEIPPSSPPSASGSCPDDCNDQGRCVRGRCVCFPGYTGPSCGWPSCPGDCQGRGRCVQGVCVCRAGFSGPDCSQRSCPRGCSQRGRCEGGRCVCDPGYTGDDCGMRSCPRGCSQRGRCENGRCVCNPGYAGEDCGVRSCPRGCSQRGRCKDGRCVCDPGYTGEDCGTRSCPWDCGEGGRCVDGRCVCWPGYTGEDCSTRTCPRDCRGRGRCEDGECICDTGYSGDDCGVRSCPGDCNQRGRCEDGRCVCWPGYTGTDCGSRACPRDCRGRGRCENGVCVCNAGYSGEDCGVRSCPGDCRGRGRCESGRCMCWPGYTGRDCGTRACPGDCRGRGRCVDGRCVCNPGFTGEDCGSRRCPGDCRGHGLCEDGVCVCDAGYSGEDCSTRSCPGGCRGRGQCLDGRCVCEDGYSGEDCGVRQCPNDCSQHGVCQDGVCICWEGYVSEDCSIRTCPSNCHGRGRCEEGRCLCDPGYTGPTCATRMCPADCRGRGRCVQGVCLCHVGYGGEDCGQEEPPASACPGGCGPRELCRAGQCVCVEGFRGPDCAIQTCPGDCRGRGECHDGSCVCKDGYAGEDCGEEVPTIEGMRMHLLEETTVRTEWTPAPGPVDAYEIQFIPTTEGASPPFTARVPSSASAYDQRGLAPGQEYQVTVRALRGTSWGLPASKTITTMIDGPQDLRVVAVTPTTLELGWLRPQAEVDRFVVSYVSAGNQRVRLEVPPEADGTLLTDLMPGVEYVVTVTAERGRAVSYPASVRANTGSSPLGLLGTTDEPPPSGPSTTQGAQAPLLQQRPQELGELRVLGRDETGRLRVVWTAQPDTFAYFQLRMRVPEGPGAHEEVLPGDVRQALVPPPPPGTPYELSLHGVPPGGKPSDPIIYQGIMDKDEEKPGKSSGPPRLGELTVTDRTSDSLLLRWTVPEGEFDSFVIQYKDRDGQPQVVPVEGPQRSAVITSLDPGRKYKFVLYGFVGKKRHGPLVAEAKILPQSDPSPGTPPHLGNLWVTDPTPDSLHLSWTVPEGQFDTFMVQYRDRDGRPQVVPVEGPERSFVVSSLDPDHKYRFTLFGIANKKRYGPLTADGTTAPERKEEPPRPEFLEQPLLGELTVTGVTPDSLRLSWTVAQGPFDSFMVQYKDAQGQPQAVPVAGDENEVTVPGLDPDRKYKMNLYGLRGRQRVGPESVVAKTAPQEDVDETPSPTELGTEAPESPEEPLLGELTVTGSSPDSLSLFWTVPQGSFDSFTVQYKDRDGRPRAVRVGGKESEVTVGGLEPGHKYKMHLYGLHEGQRVGPVSAVGVTAPQQEETPPATESPLEPRLGELTVTDVTPNSVGLSWTVPEGQFDSFIVQYKDKDGQPQVVPVAADQREVTVYNLEPERKYKMNMYGLHDGQRMGPLSVVIVTAPLPPAPATEASKPPLEPRLGELTVTDITPDSVGLSWTVPEGEFDSFVVQYKDRDGQPQVVPVAADQREVTIPDLEPSRKYKFLLFGIQDGKRRSPVSVEAKTVARGDASPGAPPRLGELWVTDPTPDSLRLSWTVPEGQFDSFVVQFKDKDGPQVVPVEGHERSVTVTPLDAGRKYRFLLYGLLGKKRHGPLTADGTTEARSAMDDTGTKRPPKPRLGEELQVTTVTQNSVGLSWTVPEGQFDSFVVQYKDRDGQPQVVPVEGSLREVSVPGLDPAHRYKLLLYGLHHGKRVGPISAVAITAGREETETETTAPTPPAPEPHLGELTVEEATSHTLHLSWMVTEGEFDSFEIQYTDRDGQLQMVRIGGDRNDITLSGLESDHRYLVTLYGFSDGKHVGPVHVEALTVPEEEKPSEPPTATPEPPIKPRLGELTVTDATPDSLSLSWTVPEGQFDHFLVQYRNGDGQPKAVRVPGHEEGVTISGLEPDHKYKMNLYGFHGGQRMGPVSVVGVTAAEEETPSPTEPSMEAPEPAEEPLLGELTVTGSSPDSLSLSWTVPQGRFDSFTVQYKDRDGRPQVVRVGGEESEVTVGGLEPGRKYKMHLYGLHEGRRVGPVSAVGVTAPEEESPDAPLAKLRLGQMTVRDITSDSLSLSWTVPEGQFDHFLVQFKNGDGQPKAVRVPGHEDGVTISGLEPDHKYKMNLYGFHGGQRVGPVSAVGLTAPGKDEEMAPASTEPPTPEPPIKPRLEELTVTDATPDSLSLSWTVPEGQFDHFLVQYKNGDGQPKATRVPGHEDRVTISGLEPDNKYKMNLYGFHGGQRVGPVSAIGVTAAEEETPSPTEPSMEAPEPPEEPLLGELTVTGSSPDSLSLSWTVPQGRFDSFTVQYKDRDGRPQVVRVGGEESEVTVGGLEPGRKYKMHLYGLHEGRRVGPVSTVGVTAPQEDVDETPSPTEPGTEAPEPPEEPLLGELTVTGSSPDSLSLSWTVPQGRFDSFTVQYKDRDGRPQAVRVGGQESKVTVRGLEPGRKYKMHLYGLHEGRRLGPVSAVGVTEDEAETTQAVPTMTPEPPIKPRLGELTMTDATPDSLSLSWTVPEGQFDHFLVQYRNGDGQPKAVRVPGHEDGVTISGLEPDHKYKMNLYGFHGGQRVGPISVIGVTAAEEETPSPTELSTEAPEPPEEPLLGELTVTGSSPDSLSLSWTIPQGHFDSFTVQYKDRDGRPQVMRVRGEESEVTVGGLEPGRKYKMHLYGLHEGRRVGPVSTVGVTEDEAETTQAVPTTTPEPPNKPRLGELTVTDATPDSLSLSWMVPEGQFDHFLVQYRNGDGQPKVVRVPGHEDGVTISGLEPDHKYKMNLYGFHGGQRVGPISVIGVTAAEEETPAPTEPSTEAPEPPEEPLLGELTVTGSSPDSLSLSWTIPQGRFDSFTVQYKDRDGRPQVVRVRGEESEVTVGGLEPGCKYKMHLYGLHEGQRVGPVSAVGVTAPKDEAETTQAVPTMTPEPPIKPRLGELTVTDATPDSLSLSWMVPEGQFDHFLVQYRNGDGQPKAVRVPGHEDGVTISGLEPDHKYKMNLYGFHGGQRVGPVSAIGVTEEETPSPTEPSTEAPEAPEEPLLGELTVTGSSPDSLSLSWTVPQGRFDSFTVQYKDRDGQPQVVRVRGEESEVTVGGLEPGRKYKMHLYGLHEGQRVGPVSTVGITAPLPTPLPVEPRLGELAVAAVTSDSVGLSWTVAQGPFDSFLVQYRDAQGQPQAVPVSGDLRAVAVSGLDPARKYKFLLFGLQNGKRHGPVPVEARTAPDTKPSPRLGELTVTDATPDSVGLSWTVPEGEFDSFVVQYKDKDGRLQVVPVAANQREVTVQGLEPSRKYRFLLYGLSGRKRLGPISADSTTAPLEKELPPHLGELTVAEETSSSLRLSWTVAQGPFDSFVVQYRDTDGQPRAVPVAADQRTVTVEDLEPGKKYKFLLYGLLGGKRLGPVSALGMTAPEEDTPAPELAPEAPEPPEEPRLGVLTVTDTTPDSMRLSWSVAQGPFDSFVVQYEDTNGQPQALLVDGDQSKILISGLEPSTPYRFLLYGLHEGKRLGPLSAEGTTGLAPAGQTSEESRPRLSQLSVTDVTTSSLRLNWEAPPGAFDSFLLRFGVPSPSTLEPHPRPLLQRELMVPGTRHSAVLRDLRSGTLYSLTLYGLRGPHKADSIQGTARTLSPVLESPRDLQFSEIRETSAKVNWMPPPSRADSFKVSYQLADGGEPQSVQVDGQARTQKLQGLIPGARYEVTVVSVRGFEESEPLTGFLTTVPDGPTQLRALNLTEGFAVLHWKPPQNPVDTYDVQVTAPGAPPLQAETPGSAVDYPLHDLVLHTNYTATVRGLRGPNLTSPASITFTTGLEAPRDLEAKEVTPRTALLTWTEPPVRPAGYLLSFHTPGGQNQEILLPGGITSHQLLGLFPSTSYNARLQAMWGQSLLPPVSTSFTTGGLRIPFPRDCGEEMQNGAGASRTSTIFLNGNRERPLNVFCDMETDGGGWLVFQRRMDGQTDFWRDWEDYAHGFGNISGEFWLGNEALHSLTQAGDYSMRVDLRAGDEAVFAQYDSFHVDSAAEYYRLHLEGYHGTAGDSMSYHSGSVFSARDRDPNSLLISCAVSYRGAWWYRNCHYANLNGLYGSTVDHQGVSWYHWKGFEFSVPFTEMKLRPRNFRSPAGGG

SEQ ID NO: 66742 - protein, 280 aa, Homo sapiens
MVTEGEFDSFEIQYTDRDGQLQMVRIGGDRNDITLSGLESDHRYLVTLYGFSDGKHVGPVHVEALTVPEEEKPSEPPTATPEPPIKPRLGELTVTDATPDSLSLSWTVPEGQFDHFLVQYRNGDGQPKAVRVPGHEEGVTISGLEPDHKYKMNLYGFHGGQRMGPVSVVGVTAAEEETPSPTEPSMEAPEPAEEPLLGELTVTGSSPDSLSLSWTVPQGRFDSFTVQYKDRDGRPQVVRVGGEESEVTVGGLEPGRKYKMHLYGLHEGRRVGPVSAVGVT

SEQ ID NO: 66743 - protein, 4242 aa, Homo sapiens
MMPAQYALTSSLVLLVLLSTARAGPFSSRSNVTLPAPRPPPQPGGHTVGAGVGSPSSQLYEHTVEGGEKQVVFTHRINLPPSTGCGCPPGTEPPVLASEVQALRVRLEILEELVKGLKEQCTGGCCPASAQAGTGQTDVRTLCSLHGVFDLSRCTCSCEPGWGGPTCSDPTDAEIPPSSPPSASGSCPDDCNDQGRCVRGRCVCFPGYTGPSCGWPSCPGDCQGRGRCVQGVCVCRAGFSGPDCSQRSCPRGCSQRGRCEGGRCVCDPGYTGDDCGMRSCPRGCSQRGRCENGRCVCNPGYTGEDCGVRSCPRGCSQRGRCKDGRCVCDPGYTGEDCGTRSCPWDCGEGGRCVDGRCVCWPGYTGEDCSTRTCPRDCRGRGRCEDGECICDTGYSGDDCGVRSCPGDCNQRGRCEDGRCVCWPGYTGTDCGSRACPRDCRGRGRCENGVCVCNAGYSGEDCGVRSCPGDCRGRGRCESGRCMCWPGYTGRDCGTRACPGDCRGRGRCVDGRCVCNPGFTGEDCGSRRCPGDCRGHGLCEDGVCVCDAGYSGEDCSTRSCPGGCRGRGQCLDGRCVCEDGYSGEDCGVRQCPNDCSQHGVCQDGVCICWEGYVSEDCSIRTCPSNCHGRGRCEEGRCLCDPGYTGPTCATRMCPADCRGRGRCVQGVCLCHVGYGGEDCGQEEPPASACPGGCGPRELCRAGQCVCVEGFRGPDCAIQTCPGDCRGRGECHDGSCVCKDGYAGEDCGEEVPTIEGMRMHLLEETTVRTEWTPAPGPVDAYEIQFIPTTEGASPPFTARVPSSASAYDQRGLAPGQEYQVTVRALRGTSWGLPASKTITTMIDGPQDLRVVAVTPTTLELGWLRPQAEVDRFVVSYVSAGNQRVRLEVPPEADGTLLTDLMPGVEYVVTVTAERGRAVSYPASVRANTGSSPLGLLGTTDEPPPSGPSTTQGAQAPLLQQRPQELGELRVLGRDETGRLRVVWTAQPDTFAYFQLRMRVPEGPGAHEEVLPGDVRQALVPPPPPGTPYELSLHGVPPGGKPSDPIIYQGIMDKDEEKPGKSSGPPRLGELTVTDRTSDSLLLRWTVPEGEFDSFVIQYKDRDGQPQVVPVEGPQRSAVITSLDPGRKYKFVLYGFVGKKRHGPLVAEAKILPQSDPSPGTPPRLGNLWVTDPTPDSLHLSWTVPEGQFDTFMVQYRDRDGRPQVVPVEGPERSFVVSSLDPDHKYRFTLFGIANKKRYGPLTADGTTAPERKEEPPHPEFLEQPLLGELTVTGVTPDSLRLSWTVAQGPFDSFMVQYKDAQGQPQAVPVAGDENEVTVPGLDPDRKYKMNLYGLRGRQRVGPESVVAKTAPQEDVDETPSPTELGTEAPESPEEPLLGELTVTGSSPDSLSLFWTVPQGSFDSFTVQYKDRDGRPRAVRVGGKESEVTVGGLEPGHKYKMHLYGLHEGQRVGPVSAVGVTAPQQEETPPATESPLEPRLGELTVTDVTPNSVGLSWTVPEGQFDSFIVQYKDKDGQPQVVPVAADQREVTVYNLEPERKYKMNMYGLHDGQRMGPLSVVIVTAPLPPAPATEASKPPLEPRLGELTVTDITPDSVGLSWTVPEGEFDSFVVQYKDRDGQPQVVPVAADQREVTIPDLEPSRKYKFLLFGIQDGKRRSPVSVEAKTVARGDASPGAPPRLGELWVTDPTPDSLRLSWTVPEGQFDSFVVQFKDKDGPQVVPVEGHERSVTVTPLDAGRKYRFLLYGLLGKKRHGPLTADGTTEARSAMDDTGTKRPPKPRLGEELQVTTVTQNSVGLSWTVPEGQFDSFVVQYKDRDGQPQVVPVEGSLREVSVPGLDPAHRYKLLLYGLHHGKRVGPISAVAITAGREETETETTAPTPPAPEPHLGELTVEEATSHTLHLSWMVTEGEFDSFEIQYTDRDGQLQMVRIGGDRNDITLSGLESDHRYLVTLYGFSDGKHVGPVHVEALTVPEEEKPSEPPTATPEPPIKPRLGELTVTDATPDSLSLSWTVPEGQFDHFLVQYRNGDGQPKAVRVPGHEEGVTISGLEPDHKYKMNLYGFHGGQRMGPVSVVGVTAAEEETPSPTEPSMEAPEPAEEPLLGELTVTGSSPDSLSLSWTVPQGRFDSFTVQYKDRDGRPQVVRVGGEESEVTVGGLEPGRKYKMHLYGLHEGRRVGPVSAVGVTAPEEESPDAPLAKLRLGQMTVRDITSDSLSLSWTVPEGQFDHFLVQFKNGDGQPKAVRVPGHEDGVTISGLEPDHKYKMNLYGFHGGQRVGPVSAVGLTAPGKDEEMAPASTEPPTPEPPIKPRLEELTVTDATPDSLSLSWTVPEGQFDHFLVQYKNGDGQPKATRVPGHEDRVTISGLEPDNKYKMNLYGFHGGQRVGPVSAIGVTAAEEETPSPTEPSMEAPEPPEEPLLGELTVTGSSPDSLSLSWTVPQGRFDSFTVQYKDRDGRPQVVRVGGEESEVTVGGLEPGRKYKMHLYGLHEGRRVGPVSTVGVTAPQEDVDETPSPTEPGTEAPEPPEEPLLGELTVTGSSPDSLSLSWTVPQGRFDSFTVQYKDRDGRPQAVRVGGQESKVTVRGLEPGRKYKMHLYGLHEGRRLGPVSAVGVTEDEAETTQAVPTMTPEPPIKPRLGELTMTDATPDSLSLSWTVPEGQFDHFLVQYRNGDGQPKAVRVPGHEDGVTISGLEPDHKYKMNLYGFHGGQRVGPISVIGVTAAEEETPSPTELSTEAPEPPEEPLLGELTVTGSSPDSLSLSWTIPQGHFDSFTVQYKDRDGRPQVMRVRGEESEVTVGGLEPGRKYKMHLYGLHEGRRVGPVSTVGVTEDEAETTQAVPTTTPEPPNKPRLGELTVTDATPDSLSLSWMVPEGQFDHFLVQYRNGDGQPKVVRVPGHEDGVTISGLEPDHKYKMNLYGFHGGQRVGPISVIGVTAAEEETPAPTEPSTEAPEPPEEPLLGELTVTGSSPDSLSLSWTIPQGRFDSFTVQYKDRDGRPQVVRVRGEESEVTVGGLEPGCKYKMHLYGLHEGQRVGPVSAVGVTAPKDEAETTQAVPTMTPEPPIKPRLGELTVTDATPDSLSLSWMVPEGQFDHFLVQYRNGDGQPKAVRVPGHEDGVTISGLEPDHKYKMNLYGFHGGQRVGPVSAIGVTEEETPSPTEPSTEAPEAPEEPLLGELTVTGSSPDSLSLSWTIPQGRFDSFTVQYKDRDGQPQVVRVRGEESEVTVGGLEPGRKYKMHLYGLHEGQRVGPVSTVGITAPLPTPLPVEPRLGELAVAAVTSDSVGLSWTVAQGPFDSFLVQYRDAQGQPQAVPVSGDLRAVAVSGLDPARKYKFLLFGLQNGKRHGPVPVEARTAPDTKPSPRLGELTVTDATPDSVGLSWTVPEGEFDSFVVQYKDKDGRLQVVPVAANQREVTVQGLEPSRKYRFLLYGLSGRKRLGPISADSTTAPLEKELPPHLGELTVAEETSSSLRLSWTVAQGPFDSFVVQYRDTDGQPRAVPVAADQRTVTVEDLEPGKKYKFLLYGLLGGKRLGPVSALGMTAPEEDTPAPELAPEAPEPPEEPRLGVLTVTDTTPDSMRLSWSVAQGPFDSFVVQYEDTNGQPQALLVDGDQSKILISGLEPSTPYRFLLYGLHEGKRLGPLSAEGTTGLAPAGQTSEESRPRLSQLSVTDVTTSSLRLNWEAPPGAFDSFLLRFGVPSPSTLEPHPRPLLQRELMVPGTRHSAVLRDLRSGTLYSLTLYGLRGPHKADSIQGTARTLSPVLESPRDLQFSEIRETSAKVNWMPPPSRADSFKVSYQLADGGEPQSVQVDGQARTQKLQGLIPGARYEVTVVSVRGFEESEPLTGFLTTVPDGPTQLRALNLTEGFAVLHWKPPQNPVDTYDIQVTAPGAPPLQAETPGSAVDYPLHDLVLHTNYTATVRGLRGPNLTSPASITFTTGLEAPRDLEAKEVTPRTALLTWTEPPVRPAGYLLSFHTPGGQTQEILLPGGITSHQLLGLFPSTSYNARLQATWGQSLLPPVSTSFTTGGLRIPFPRDCGEEMQNGAGASRTSTIFLNGNRERPLNVFCDMETDGGGWLVFQRRMDGQTDFWRDWEDYAHGFGNISGEFWLGNEALHSLTQAGDYSMRVDLRAGDEAVFAQYDSFHVDSAAEYYRLHLEGYHGTAGDSMSYHSGSVFSARDRDPNSLLISCAVSYRGAWWYRNCHYANLNGLYGSTVDHQGVSWYHWKGFEFSVPFTEMKLRPRNFRSPAGGG

SEQ ID NO: 66744 - protein, 673 aa, Homo sapiens
MRLSWSVAQGPFDSFVVQYEDTNGQPQALLVDGDQSKILISGLEPSTPYRFLLYGLHEGKRLGPLSAEGTTGLAPAGQTSEESRPRLSQLSVTDVTTSSLRLNWEAPPGAFDSFLLRFGVPSPSTLEPHPRPLLQRELMVPGTRHSAVLRDLRSGTLYSLTLYGLRGPHKADSIQGTARTLSPVLESPRDLQFSEIRETSAKVNWMPPPSRADSFKVSYQLADGGEPQSVQVDGQARTQKLQGLIPGARYEVTVVSVRGFEESEPLTGFLTTVPDGPTQLRALNLTEGFAVLHWKPPQNPVDTYDVQVTAPGAPPLQAETPGSAVDYPLHDLVLHTNYTATVRGLRGPNLTSPASITFTTGLEAPRDLEAKEVTPRTALLTWTEPPVRPAGYLLSFHTPGGQNQEILLPGGITSHQLLGLFPSTSYNARLQAMWGQSLLPPVSTSFTTGGLRIPFPRDCGEEMQNGAGASRTSTIFLNGNRERPLNVFCDMETDGGGWLVFQRRMDGQTDFWRDWEDYAHGFGNISGEFWLGNEALHSLTQAGDYSMRVDLRAGDEAVFAQYDSFHVDSAAEYYRLHLEGYHGTAGDSMSYHSGSVFSARDRDPNSLLISCAVSYRGAWWYRNCHYANLNGLYGSTVDHQGVSWYHWKGFEFSVPFTEMKLRPRNFRSPAGGG

SEQ ID NO: 66745 - protein, 217 aa, Homo sapiens; identical to SEQ ID NO: 66739

SEQ ID NO: 66746 - protein, 313 aa, Homo sapiens
TEPGTEAPGPPEEPLLGELTVTGSSPDSLSLSWTVPQGRFDSFTVQYKDRDGRPQAVRVGGQESKVTVRGLEPGRKYKMHLYGLHEGRRLGPVSAVGVTEDEAETTQAVPTMTPEPPIKPRLGELTMTDATPDSLSLSWTVPEGQFDHFLVQYRNGDGQPKAVRVPGHEDGVTISGLEPDHKYKMNLYGFHGGQRVGPISVIGVTAAEEETPSPTELSTEAPEPPEEPLLGELTVTGSSPDSLSLSWTIPQGHFDSFTVQYKDRDGRPQVMRVRGEESEVTVGGLEPGRKYKMHLYGLHEGRRVGPVSTVGVT

SEQ ID NO: 66747 - protein, 313 aa, Homo sapiens
MTPEPPIKPRLGELTMTDATPDSLSLSWTVPEGQFDHFLVQYRNGDGQPKAVRVPGHEDGVTISGLEPDHKYKMNLYGFHGGQRVGPISVTGVTAAEEETPSPTELSTEAPEPPEEPLLGELTVTGSSPDSLSLSWTIPQGHFDSFTVQYKDRDGRPQVMRVRGEESEVTVGGLEPGRKYKMHLYGLHEGRRVGPVSTVGVTAPEDEEEETPAPTEPSTEAPEPPEEPLLGELTVTGSSPDSLSLSWTIPQGRFDSFTVQYKDRDGRPQVVRVRGEESEVTVGGLEPGCKYKMHLYGLHEGQRVGPVSAVGVT

SEQ ID NO: 66748 - protein, 426 aa, Homo sapiens
AGEDCGEEVPTIEGMRMHLLEETTVRTEWTPAPGPVDAYEIQFIPTTEGASPPFTARVPSSASAYDQRGLAPGQEYQVTVRALRGTSWGLPASKTITTMIDGPQDLRVVAVTPTTLELGWLRPQAEVDRFVVSYVSAGNQRVRLEVPPEADGTLLTDLMPGVEYVVTVTAERGRAVSYPASVRANTGSSPLGLLGTTDEPPPSGPSTTQGAQAPLLQQRPQELGELRVLGRDETGRLRVVWTAQPDTFAYFQLRMRVPEGPGAHEEVLPGDVRQALVPPPPPGTPYELSLHGVPPGGKPSDPIIYQGIMDKDEEKPGKSSGPPRLGELTVTDRTSDSLLLRWTVPEGEFDSFVIQYKDRDGQPQVVPVEGPQRSAVITSLDPGRKYKFVLYGFVGKKRHGPLVAEAKILPQSDPSPGTPPHLGNLW

SEQ ID NO: 66749 - protein, 865 aa, Homo sapiens
LYGLRGRQRVGPESVVAKTAPQEDVDETPSPTELGTEAPESPEEPLLGELTVTGSSPDSLSLFWTVPQGSFDSFTVQYKDRDGRPRAVRVGGKESEVTVGGLEPGHKYKMHLYGLHEGQRVGPVSAVGVTAPQQEETPPATESPLEPRLGELTVTDVTPNSVGLSWTVPEGQFDSFIVQYKDKDGQPQVVPVAADQREVTVYNLEPERKYKMNMYGLHDGQRMGPLSVVIVTAPLPPAPATEASKPPLEPRLGELTVTDITPDSVGLSWTVPEGEFDSFVVQYKDRDGQPQVVPVAADQREVTIPDLEPSRKYKFLLFGIQDGKRRSPVSVEAKTVARGDASPGAPPRLGELWVTDPTPDSLRLSWTVPEGQFDSFVVQFKDKDGPQVVPVEGHERSVTVTPLDAGRKYRFLLYGLLGKKRHGPLTADGTTEARSAMDDTGTKRPPKPRLGEELQVTTVTQNSVGLSWTVPEGQFDSFVVQYKDRDGQPQVVPVEGSLREVSVPGLDPAHRYKLLLYGLHHGKRVGPISAVAITAGREETETETTAPTPPAPEPHLGELTVEEATSHTLHLSWMVTEGEFDSFEIQYTDRDGQLQMVRIGGDRNDITLSGLESDHRYLVTLYGFSDGKHVGPVHVEALTVPEEEKPSEPPTATPEPPIKPRLGELTVTDATPDSLSLSWTVPEGQFDHFLVQYRNGDGQPKAVRVPGHEEGVTISGLEPDHKYKMNLYGFHGGQRMGPVSVVGVTAAEEETPSPTEPSMEAPEPAEEPLLGELTVTGSSPDSLSLSWTVPQGRFDSFTVQYKDRDGRPQVVRVGGEESEVTVGGLEPGRKYKMHLYGLHEGRRVGPVSAVGVTAPEEESPDAPLA

SEQ ID NO: 66750 - protein, 1735 aa, Homo sapiens
MSVSRTMEDSCELDLVYVTERIIAVSFPSTANEENFRSNLREVAQMLKSKHGGNYLLFNLSERRPDITKLHAKVLEFGWPDLHTPALEKICSICKAMDTWLNADPHNVVVLHNKGNRGRIGVVIAAYMHYSNISASADQALDRFAMKRFYEDKIVPIGQPSQRRYVHYFSGLLSGSIKMNNKPLFLHHVIMHGIPNFESKGGCRPFLRIYQAMQPVYTSGIYNIPGDSQTSVCITIEPGLLLKGDILLKCYHKKFRSPARDVIFRVQFHTCAIHDLGVVFGKEDLDDAFKDDRFPEYGKVEFVFSYGPEKIQGMEHLENGPSVSVDYNTSDPLIRWDSYDNFSGHRDDGMEEVVGHTQGPLDGSLYAKVKKKDSLHGSTGAVNATRPTLSATPNHVEHTLSVSSDSGNSTASTKTDKTDEPVPGASSATAALSPQEKRELDRLLSGFGLEREKQGAMYHTQHLRSRPAGGSAVPSSGRHVVPAQVHVNGGALASERETDILDDELPNQDGHSAGSMGTLSSLDGVTNTSEGGYPEALSPLTNGLDKSYPMEPMVNGGGYPYESASRAGPAHAGHTAPMRPSYSAQEGLAGYQREGPHPAWPQPVTTSHYAHDPSGMFRSQSFSEAEPQLPPAPVRGGSSREAVQRGLNSWQQQQQQQQQPRPPPRQQERAHLESLVASRPSPQPLAETPIPSLPEFPRAASQQEIEQSIETLNMLMLDLEPASAAAPLHKSQSVPGAWPGASPLSSQPLSGSSRQSHPLTQSRSGYIPSGHSLGTPEPAPRASLESVPPGRSYSPYDYQPCLAGPNQDFHSKSPASSSLPAFLPTTHSPPGPQQPPASLPGLTAQPLLSPKEATSDPSRTPEEEPLNLEGLVAHRVAGVQAREKQPAEPPAPLRRRAASDGQYENQSPEATSPRSPGVRSPVQCVSPELALTIALNPGGRPKEPHLHSYKEAFEEMEGTSPSSPPPSGVRSPPGLAKTPLSALGLKPHNPADILLHPTGVTRRRIQPEEDEGKVVVRLSEEPRSYVESVARTAVAGPRAQDSEPKSFSAPATQAYGHEIPLRNGTLGGSFVSPSPLSTSSPILSADSTSVGSFPSGESSDQGPRTPTQPLLESGFRSGSLGQPSPSAQRNYQSSSPLPTVGSSYSSPDYSLQHFSSSPESQARAQFSVAGVHTVPGSPQARHRTVGTNTPPSPGFGWRAINPSMAAPSSPSLSHHQMMGPPGTGFHGSTVSSPQSSAATTPGSPSLCRHPAGVYQVSGLHNKVATTPGSPSLGRHPGAHQGNLASGLHSNAIASPGSPSLGRHLGGSGSVVPGSPCLDRHVAYGGYSTPEDRRPTLSRQSSASGYQAPSTPSFPVSPAYYPGLSSPATSPSPDSAAFRQGSPTPALPEKRRMSVGDRAGSLPNYATINGKVSSPVASGMSSPSGGSTVSFSHTLPDFSKYSMPDNSPETRAKVKFVQDTSKYWYKPEISREQAIALLKDQEPGAFIIRDSHSFRGAYGLAMKVSSPPPTIMQQNKKGDMTHELVRHFLIETGPRGVKLKGCPNEPNFGSLSALVYQHSIIPLALPCKLVIPNRDPTDESKDSSGPANSTADLLKQGAACNVLFVNSVDMESLTGPQAISKATSETLAADPTPAATIVHFKVSAQGITLTDNQRKLFFRRHYPLNTVTFCDLDPQERKWMKTEGGAPAKLFGFVARKQGSTTDNACHLFAELDPNQPASAIVNFVSKVMLNAGQKR

SEQ ID NO: 66751 - protein, 416 aa, Homo sapiens
MVPFQQRKDCVLEGSTRVTPSVQPHLQPIRNMSVSRTMEDSCELDLVYVTERIIAVSFPSTANEENFRSNLREVAQMLKSKHGGNYLLFNLSERRPDITKLHAKVLEFGWPDLHTPALEKICSICKAMDTWLNADPHNVVVLHNKGNRGRIGVVIAAYMHYSNISASADQALDRFAMKRFYEDKIVPIGQPSQRRYVHYFSGLLSGSIKMNNKPLFLHHVIMHGIPNFESKGGCRPFLRIYQAMQPVYTSGIYNIPGDSQTSVCITIEPGLLLKGDILLKCYHKKFRSPARDVIFRVQFHTCAIHDLGVVFGKEDLDDAFKDDRFPEYGKVEFVFSYGPEKIQGMEHLENGPSVSVDYNTSDPLIRWDSYDNFSGHRDDGMEDGNKQNTNSQSIGSISGGLEDQYTWPDTHWPSQS

SEQ ID NO: 66752 - protein, 103 aa, Homo sapiens
MSVSRTMEDSCELDLVYVTERIIAVSFPSTANEENFRSNLREVAQMLKSKHGGNYLLFNLSERRPDITKLHAKVLEFGWPDLHTPALEKICSICKAMDTWLNA

SEQ ID NO: 66753 - protein, 1714 aa, Homo sapiens
MSVSRTMEDSCELDLVYVTERIIAVSFPSTANEENFRSNLREVAQMLKSKHGGNYLLFNLSERRPDITKLHAKVLEFGWPDLHTPALEKICSICKAMDTWLNADPHNVVVLHNKGNRGRIGVVIAAYMHYSNISASADQALDRFAMKRFYEDKIVPIGQPSQRRYVHYFSGLLSGSIKMNNKPLFLHHVIMHGIPNFESKGGCRPFLRIYQAMQPVYTSGIYNIPGDSQTSVCITIEPGLLLKGDILLKCYHKKFRSPARDVIFRVQFHTCAIHDLGVVFGKEDLDDAFKDDRFPEYGKVEFVFSYGPEKIQGMEHLENGPSVSVDYNTSDPLIRWDSYDNFSGHRDDGMEEVVGHTQGPLDGSLYAKVKKKDSLHGSTGAVNATRPTLSATPNHVEHTLSVSSDSGNSTASTKTDKTDEPVPGASSATAALSPQEKRELDRLLSGFGLEREKQGAMYHTQHLRSRPAGGSAVPSSGRHVVPAQVHVNGGALASERETDILDDELPNQDGHSAGSMGTLSSLDGVTNTSEGGYPEALSPLTNGLDKSYPMEPMVNGGGYPYESASRAGPAHAGHTAPMRPSYSAQEGLAGYQREGPHPAWPQPVTTSHYAHDPSGMFRSQSFSEAEPQLPPAPVRGGSSREAVQRGLNSWQQQQQQQQQPRPPPRQQERAHLESLVASRPSPQPLAETPIPSLPEFPRAASQQEIEQSIETLNMLMLDLEPASAAAPLHKSQSVPGAWPGASPLSSQPLSGSSRQSHPLTQSRSGYIPSGHSLGTPEPAPRASLESVPPGRSYSPYDYQPCLAGPNQDFHSKSPASSSLPAFLPTTHSPPGPQQPPASLPGLTAQPLLSPKEATSDPSRTPEEEPLNLEGLVAHRVAGVQAREKQPAEPPAPLRRRAASDGQYENQSPEATSPRSPGVRSPVQCVSPELALTIALNPGGRPKEPHLHSYKEAFEEMEGTSPSSPPPSGVRSPPGLAKTPLSALGLKPHNPADILLHPTGEPRSYVESVARTAVAGPRAQDSEPKSFSAPATQAYGHEIPLRNGTLGGSFVSPSPLSTSSPILSADSTSVGSFPSGESSDQGPRTPTQPLLESGFRSGSLGQPSPSAQRNYQSSSPLPTVGSSYSSPDYSLQHFSSSPESQARAQFSVAGVHTVPGSPQARHRTVGTNTPPSPGFGWRAINPSMAAPSSPSLSHHQMMGPPGTGFHGSTVSSPQSSAATTPGSPSLCRHPAGVYQVSGLHNKVATTPGSPSLGRHPGAHQGNLASGLHSNAIASPGSPSLGRHLGGSGSVVPGSPCLDRHVAYGGYSTPEDRRPTLSRQSSASGYQAPSTPSFPVSPAYYPGLSSPATSPSPDSAAFRQGSPTPALPEKRRMSVGDRAGSLPNYATINGKVSSPVASGMSSPSGGSTVSFSHTLPDFSKYSMPDNSPETRAKVKFVQDTSKYWYKPEISREQAIALLKDQEPGAFIIRDSHSFRGAYGLAMKVSSPPPTIMQQNKKGDMTHELVRHFLIETGPRGVKLKGCPNEPNFGSLSALVYQHSIIPLALPCKLVIPNRDPTDESKDSSGPANSTADLLKQGAACNVLFVNSVDMESLTGPQAISKATSETLAADPTPAATIVHFKVSAQGITLTDNQRKLFFRRHYPLNTVTFCDLDPQERKWMKTEGGAPAKLFGFVARKQGSTTDNACHLFAELDPNQPASAIVNFVSKVMLNAGQKR

SEQ ID NO: 66754 - protein, 61 aa, Homo sapiens
MSVSRTMEDSCELDLVYVTERIIAVSFPSTANEENFRSNLREVAQMLKSKHGGNYLLFNLS

SEQ ID NO: 66755 - protein, 24 aa, Homo sapiens
MSVSRTMEDSCELDLVYVTERIIA

SEQ ID NO: 66756 - protein, 1445 aa, Homo sapiens
MEEGHGLDLTYITERIIAVSFPAGCSEESYLHNLQEVTRMLKSKHGDNYLVLNLSEKRYDLTKLNPKIMDVGWPELHAPPLDKMCTICKAQESWLNSNLQHVVVIHCRGGKGRIGVVISSYMHFTNVSASADQALDRFAMKKFYDDKVSALMQPSQKRYVQFLSGLLSGSVKMNASPLFLHFVILHGTPNFDTGGVCRPFLKLYQAMQPVYTSGIYNVGPENPSRICIVIEPAQLLKGDVMVKCYHKKYRSATRDVIFRLQFHTGAVQGYGLVFGKEDLDNASKDDRFPDYGKVELVFSATPEKIQGSEHLYNDHGVIVDYNTTDPLIRWDSYENLSADGEVLHTQGPVDGSLYAKVRKKSSSDPGIPGGPQAIPATNSPDHSDHTLSVSSDSGHSTASARTDKTEERLAPGTRRGLSAQEKAELDQLLSGFGLEDPGSSLKEMTDARSKYSGTRHVVPAQVHVNGDAALKDRETDILDDEMPHHDLHSVDSLGTLSSSEGPQSAHLGPFTCHKSSQNSLLSDGFGSNVGEDPQGTLVPDLGLGMDGPYERERTFGSREPKQPQPLLRKPSVSAQMQAYGQSSYSTQTWVRQQQMVVAHQYSFAPDGEARLVSRCPADNPGLVQAQPRVPLTPTRGTSSRVAVQRGVGSGPHPPDTQQPSPSKAFKPRFPGDQVVNGAGPELSTGPSPGSPTLDIDQSIEQLNRLILELDPTFEPIPTHMNALGSQANGSVSPDSVGGGLRASSRLPDTGEGPSRATGRQGSSAEQPLGGRLRKLSLGQYDNDAGGQLPFSKCAWGKAGVDYAPNLPPFPSPADVKETMTPGYPQDLDIIDGRILSSKESMCSTPAFPVSPETPYVKTALRHPPFSPPEPPLSSPASQHKGGREPRSCPETLTHAVGMSESPIGPKSTMLRADASSTPSFQQAFASSCTISSNGPGQRRESSSSAERQWVESSPKPMVSLLGSGRPTGSPLSAEFSGTRKDSPVLSCFPPSELQAPFHSHELSLAEPPDSLAPPSSQAFLGFGTAPVGSGLPPEEDLGALLANSHGASPTPSIPLTATGAADNGFLSHNFLTVAPGHSSHHSPGLQGQGVTLPGQPPLPEKKRASEGDRSLGSVSPSSSGFSSPHSGSTISIPFPNVLPDFSKASEAASPLPDSPGDKLVIVKFVQDTSKFWYKADISREQAIAMLKDKEPGSFIVRDSHSFRGAYGLAMKVATPPPSVLQLNKKAGDLANELVRHFLIECTPKGVRLKGCSNEPYFGSLTALVCQHSITPLALPCKLLIPERDPLEEIAESSPQTAANSAAELLKQGAACNVWYLNSVEMESLTGHQAIQKALSITLVQEPPPVSTVVHFKVSAQGITLTDNQRKLFFRRHYPVNSVIFCALDPQDRKWIKDGPSSKVFGFVARKQGSATDNVCHLFAEHDPEQPASAIVNFVSKVMIGSPKKV

SEQ ID NO: 66757 - protein, 1205 aa, Homo sapiens
MEEGHGLDLTYITERIIAVSFPAGCSEESYLHNLQEVTRMLKSKHGDNYLVLNLSEKRYDLTKLNPKIMDVGWPELHAPPLDKMCTICKAQESWLNSNLQHVVVIHCRGGKGRIGVVISSYMHFTNVSASADQALDRFAMKKFYDDKVSALMQPSQKRYVQFLSGLLSGSVKMNASPLFLHFVILHGTPNFDTGGVCRPFLKLYQAMQPVYTSGIYNVGPENPSRICIVIEPAQLLKGDVMMPHHDLHSVDSLGTLSSSEGPQSAHLGPFTCHKSSQNSLLSDGFGSNVGEDPQGTLVPDLGLGMDGPYERERTFGSREPKQPQPLLRKPSVSAQMQAYGQSSYSTQTWVRQQQMVVAHQYSFAPDGEARLVSRCPADNPGLVQAQPRVPLTPTRGTSSRVAVQRGVGSGPHPPDTQQPSPSKAFKPRFPGDQVVNGAGPELSTGPSPGSPTLDIDQSIEQLNRLILELDPTFEPIPTHMNALGSQANGSVSPDSVGGGLRASSRLPDTGEGPSRATGRQGSSAEQPLGGRLRKLSLGQYDNDAGGQLPFSKCAWGKAGVDYAPNLPPFPSPADVKETMTPGYPQDLDIIDGRILSSKESMCSTPAFPVSPETPYVKTALRHPPFSPPEPPLSSPASQHKGGREPRSCPETLTHAVGMSESPIGPKSTMLRADASSTPSFQQAFASSCTISSNGPGQRRESSSSAERQWVESSPKPMVSLLGSGRPTGSPLSAEFSGTRKDSPVLSCFPPSELQAPFHSHELSLAEPPDSLAPPSSQAFLGFGTAPVGSGLPPEEDLGALLANSHGASPTPSIPLTATGAADNGFLSHNFLTVAPGHSSHHSPGLQGQGVTLPGQPPLPEKKRASEGDRSLGSVSPSSSGFSSPHSGSTISIPFPNVLPDFSKASEAASPLPDSPGDKLVIVKFVQDTSKFWYKADISREQAIAMLKDKEPGSFIVRDSHSFRGAYGLAMKVATPPPSVLQLNKKAGDLANELVRHFLIECTPKGVRLKGCSNEPYFGSLTALVCQHSITPLALPCKLLIPERDPLEEIAESSPQTAANSAAELLKQGAACNVWYLNSVEMESLTGHQAIQKALSITLVQEPPPVSTVVHFKVSAQGITLTDNQRKLFFRRHYPVNSVIFCALDPQDRKWIKDGPSSKVFGFVARKQGSATDNVCHLFAEHDPEQPASAIVNFVSKVMIGSPKKV

SEQ ID NO: 66758 - protein, 1445 aa, Homo sapiens; identical to SEQ ID NO: 66756

SEQ ID NO: 66759 - protein, 108 aa, Homo sapiens
MEEGHGLDLTYITERIIAVSFPAGCSEESYLHNLQEVTRMLKSKHGDNYLVLNLSEKRYDLTKLNPKIMDVGWPELHAPPLDKMCTICKAQESWLNSNLQHVVVIHCR

SEQ ID NO: 66760 - protein, 138 aa, Homo sapiens
MEEGHGLDLTYITERIIAVSFPAGCSEESYLHNLQEVTRMLKSKHGDNYLVLNLSEKRYDLTKLNPKIMDVGWPELHAPPLDKMCTICKAQESWLNSNLQHVVVIHCRGGKGRIGVVISSYMHFTNVSASADQALDRF

SEQ ID NO: 66761 - protein, 250 aa, Homo sapiens
MEEGHGLDLTYITERIIAVSFPAGCSEESYLHNLQEVTRMLKSKHGDNYLVLNLSEKRYDLTKLNPKIMDVGWPELHAPPLDKMCTICKAQESWLNSNLQHVVVIHCRGGKGRIGVVISSYMHFTNVSASADQALDRFAMKKFYDDKVSALMQPSQKRYVQFLSGLLSGSVKMNASPLFLHFVILHGTPNFDTGGVCRPFLKLYQAMQPVYTSGIYNVGPENPSRICIVIEPAQLLKGDVMVMNYNIANI

SEQ ID NO: 66762 - protein, 250 aa, Homo sapiens; identical to SEQ ID NO: 66761

SEQ ID NO: 66763 - protein, 1271 aa, Homo sapiens
SQALNERMNWLCRNQDPNPPPQPEELTSSLHAFKNKAFKKSKVCGVCKQIIDGQGISCRACKYSCHKKCEAKVVIPCGVQVRLEQAPGSSTLSSSLCRDKPLRPVILSPTMEEGHGLDLTYITERIIAVSFPAGCSEESYLHNLQEVTRMLKSKHGDNYLVLNLSEKRYDLTKLNPKIMDVGWPELHAPPLDKMCTICKAQESWLNSNLQHVVVIHCRGGKGRIGVVISSYMHFTNVSASADQALDRFAMKKFYDDKVSALMQPSQKRYVQFLSGLLSGSVKMNASPLFLHFVILHGTPNFDTGGVCRPFLKLYQAMQPVYTSGIYNVGPENPSRICIVIEPAQLLKGDVMVKCYHKKYRSATRDVIFRLQFHTGAVQGYGLVFGKEDLDNASKDDRFPDYGKVELVFSATPEKIQGSEHLYNDHGVIVDYNTTDPLIRWDSYENLSADGEVLHTQGPVDGSLYAKVRKKSSSDPGIPGGPQAIPATNSPDHSDHTLSVSSDSGHSTASARTDKTEERLAPGTRRGLSAQEKAELDQLLSGFGLEDPGSSLKEMTDARSKYSGTRHVVPAQVHVNGDAALKDRETDILDDEMPHHDLHSVDSLGTLSSSEGPQSAHLGPFTCHKSSQNSLLSDGFGSNVGEDPQGTLVPDLGLGMDGPYERERTFGSREPKQPQPLLRKPSVSAQMQAYGQSSYSTQTWVRQQQMVVAHQYSFAPDGEARLVSRCPADNPGLVQAQPRVPLTPTRGTSSRVAVQRGVGSGPHPPDTQQPSPSKAFKPRFPGDQVVNGAGPELSTGPSPGSPTLDIDQSIEQLNRLILELDPTFEPIPTHMNALGSQANGSVSPDSVGGGLRASSRLPDTGEGPSRATGRQGSSAEQPLGGRLRKLSLGQYDNDAGGQLPFSKCAWGKAGVDYAPNLPPFPSPADVKETMTPGYPQDLDIIDGRILSSKESMCSTPAFPVSPETPYVKTALRHPPFSPPEPPLSSPASQHKGGREPRSCPETLTHAVGMSESPIGPKSTMLRADASSTPSFQQAFASSCTISSNGPGQRRESSSSAERQWVESSPKPMVSLLGSGRPTGSPLSAEFSGTRKDSPVLSCFPPSELQAPFHSHELSLAEPPDSLAPPSSQAFLGFGTAPVGSGLPPEEDLGALLANSHGASPTPSIPLTATGAADNGFLSHNFLTVAPGHSSHHSPGLQGQGVTLPGQPPLPEKKRASEGDRSLGSVSPSSSGFSSPHSGSTISIPFPNVLPDFSKASEAPTFYQTSKPDIPGP

SEQ ID NO: 66764 - protein, 919 aa, Homo sapiens
MDGPYERERTFGSREPKQPQPLLRKPSVSAQMQAYGQSSYSTQTWVRQQQMVVAHQYSFAPDGEARLVSRCPADNPGLVQAQPRVPLTPTRGTSSRVAVQRGVGSGPHPPDTQQPSPSKAFKPRFPGDQVVNGAGPELSTGPSPGSPTLDIDQSIEQLNRLILELDPTFEPIPTHMNALGSQANGSVSPDSVGGGLRASSRLPDTGEGPSRATGRQGSSAEQPLGGRLRKLSLGQYDNDAGGQLPFSKCAWGKAGVDYAPNLPPFPSPADVKETMTPGYPQDLDIIDGRILSSKESMCSTPAFPVSPETPYVKTALRHPPFSPPEPPLSSPASQHKGGREPRSCPETLTHAVGMSESPIGPKSTMLRADASSTPSFQQAFASSCTISSNGPGQRRESSSSAERQWVESSPKPMVSLLGSGRPTGSPLSAEFSGTRKDSPVLSCFPPSELQAPFHSHELSLAEPPDSLAPPSSQAFLGFGTAPVGSGLPPEEDLGALLANSHGASPTPSIPLTATGAADNGFLSHNFLTVAPGHSSHHSPGLQGQGVTLPGQPPLPEKKRASEGDRSLGSVSPSSSGFSSPHSGSTISIPFPNVLPDFSKASEAASPLPDSPGDKLVIVKFVQDTSKFWYKADISREQAIAMLKDKEPGSFIVRDSHSFRGAYGLAMKVATPPPSVLQLNKKAGDLANELVRHFLIECTPKGVRLKGCSNEPYFGSLTALVCQHSITPLALPCKLLIPERDPLEEIAESSPQTAANSAAELLKQGAACNVWYLNSVEMESLTGHQAIQKALSITLVQEPPPVSTVVHFKVSAQGITLTDNQRKLFFRRHYPVNSVIFCALDPQDRKWIKDGPSSKVFGFVARKQGSATDNVCHLFAEHDPEQPARESQRHRGARDGPHEAMPRRHSGSPANVLFELIGQV

SEQ ID NO: 66765 - protein, 715 aa, Homo sapiens
MSQVMSSPLLAGGHAVSLAPCDEPRRTLHPAPSPSLPPQCSYYTTEGWGAQALMAPVPCMGPPGRLQQAPQVEAKATCFLPSPGEKALGTPEDLDSYIDFSLESLNQMILELDPTFQLLPPGTGGSQAELAQSTMSMRKKEESEALDIKYIEVTSARSRCHDGPQHCSSPSVTPPFGSLRSGGLLLSRDVPRETRSSSESLIFSGNQGRGHQRPLPPSEGLSPRPPNSPSISIPCMGSKASSPHGLGSPLVASPRLEKRLGGLAPQRGSRISVLSASPVSDVSYMFGSSQSLLHSSNSSHQSSSRSLESPANSSSSLHSLGSVSLCTRPSDFQAPRNPTLTMGQPRTPHSPPLAKEHASSCPPSITNSMVDIPIVLINGCPEPGSSPPQRTPGHQNSVQPGAASPSNPCPATRSNSQTLSDAPFTTCPEGPARDMQPTMKFVMDTSKYWFKPNITREQAIELLRKEEPGAFVIRDSSSYRGSFGLALKVQEVPASAQSRPGEDSNDLIRHFLIESSAKGVHLKGADEEPYFGSLSAFVCQHSIMALALPCKLTIPQRELGGADGASDSTDSPASCQKKSAGCHTLYLSSVSVETLTGALAVQKAISTTFERDILPTPTVVHFKVTEQGITLTDVQRKVFFRRHYPLTTLRFCGMDPEQRKWQKYCKPSWIFGFVAKSQTEPQENVCHLFAEYDMVQPASQVIGLVTALLQDAERM

SEQ ID NO: 66766 - protein, 715 aa, Homo sapiens; identical to SEQ ID NO: 66765

SEQ ID NO: 66767 - protein, 128 aa, Homo sapiens
MRPVPVRGVHSLHPRPFGGPVSLPWLRTGRCRWGLGLYRQPSLLPEEICGVFFRRHYPLTTLRFCGMDPEQRKWQKYCKPSWIFGFVAKSQTEPQENVCHLFAEYDMVQPASQVIGLVTALLQDAERM

SEQ ID NO: 66768 - protein, 1409 aa, Homo sapiens
MKSSGPVERLLRALGRRDSSRAASRPRKAEPHSFREKVFRKKPPVCAVCKVTIDGTGVSCRVCKVATHRKCEAKVTSACQALPPVELRRNTAPVRRIEHLGSTKSLNHSKQRSTLPRSFSLDPLMERRWDLDLTYVTERILAAAFPARPDEQRHRGHLRELAHVLQSKHRDKYLLFNLSEKRHDLTRLNPKVQDFGWPELHAPPLDKLCSICKAMETWLSADPQHVVVLYCKGNKGKLGVIVSAYMHYSKISAGADQALATLTMRKFCEDKVATELQPSQRRYISYFSGLLSGSIRMNSSPLFLHYVLIPMLPAFEPGTGFQPFLKIYQSMQLVYTSGVYHIAGPGPQQLCISLEPALLLKGDVMVTCYHKGGRGTDRTLVFRVQFHTCTIHGPQLTFPKDQLDEAWTDERFPFQASVEFVFSSSPEKIKGSTPRNDPSVSVDYNTTEPAVRWDSYENFNQHHEDSVDGSLTHTRGPLDGSPYAQVQRPPRQTPPAPSPEPPPPPMLSVSSDSGHSSTLTTEPAAESPGRPPPTAAERQELDRLLGGCGVASGGRGAGRETAILDDEEQPTVGGGPHLGVYPGHRPGLSRHCSCRQGYREPCGVPNGGYYRPEGTLERRRLAYGGYEGSPQGYAEASMEKRRLCRSLSEGLYPYPPEMGKPATGDFGYRAPGYREVVILEDPGLPALYPCPACEEKLALPTAALYGLRLEREAGEGWASEAGKPLLHPVRPGHPLPLLLPACGHHHAPMPDYSCLKPPKAGEEGHEGCSYTMCPEGRYGHPGYPALVTYSYGGAVPSYCPAYGRVPHSCGSPGEGRGYPSPGAHSPRAGSISPGSPPYPQSRKLSYEIPTEEGGDRYPLPGHLASAGPLASAESLEPVSWREGPSGHSTLPRSPRDAPCSASSELSGPSTPLHTSSPVQGKESTRRQDTRSPTSAPTQRLSPGEALPPVSQAGTGKAPELPSGSGPEPLAPSPVSPTFPPSSPSDWPQERSPGGHSDGASPRSPVPTTLPGLRHAPWQGPRGPPDSPDGSPLTPVPSQMPWLVASPEPPQSSPTPAFPLAASYDTNGLSQPPLPEKRHLPGPGQQPGPWGPEQASSPARGISHHVTFAPLLSDNVPQTPEPPTQESQSNVKFVQDTSKFWYKPHLSRDQAIALLKDKDPGAFLIRDSHSFQGAYGLALKVATPPPSAQPWKGDPVEQLVRHFLIETGPKGVKIKGCPSEPYFGSLSALVSQHSISPISLPCCLRIPSKDPLEETPEAPVPTNMSTAADLLRQGAACSVLYLTSVETESLTGPQAVARASSAALSCSPRPTPAVVHFKVSAQGITLTDNQRKLFFRRHYPVNSITFSSTDPQDRRWTNPDGTTSKIFGFVAKKPGSPWENVCHLFAELDPDQPAGAIVTFITKVLLGQRK

SEQ ID NO: 66769 - protein, 1419 aa, Homo sapiens
MDGGGVCVGRGDLLSSPQALGQLLRKESRPRRAMKPRKAEPHSFREKVFRKKPPVCAVCKVTIDGTGVSCRVCKVATHRKCEAKVTSACQALPPVELRRNTAPVRRIEHLGSTKSLNHSKQRSTLPRSFSLDPLMERRWDLDLTYVTERILAAAFPARPDEQRHRGHLRELAHVLQSKHRDKYLLFNLSEKRHDLTRLNPKVQDFGWPELHAPPLDKLCSICKAMETWLSADPQHVVVLYCKGNKGKLGVIVSAYMHYSKISAGADQALATLTMRKFCEDKVATELQPSQRRYISYFSGLLSGSIRMNSSPLFLHYVLIPMLPAFEPGTGFQPFLKIYQSMQLVYTSGVYHIAGPGPQQLCISLEPALLLKGDVMVTCYHKGGRGTDRTLVFRVQFHTCTIHGPQLTFPKDQLDEAWTDERFPFQASVEFVFSSSPEKIKGSTPRNDPSVSVDYNTTEPAVRWDSYENFNQHHEDSVDGSLTHTRGPLDGSPYAQVQRPPRQTPPAPSPEPPPPPMLSVSSDSGHSSTLTTEPAAESPGRPPPTAAERQELDRLLGGCGVASGGRGAGRETAILDDEEQPTVGGGPHLGVYPGHRPGLSRHCSCRQGYREPCGVPNGGYYRPEGTLERRRLAYGGYEGSPQGYAEASMEKRRLCRSLSEGLYPYPPEMGKPATGDFGYRAPGYREVVILEDPGLPALYPCPACEEKLALPTAALYGLRLEREAGEGWASEAGKPLLHPVRPGHPLPLLLPACGHHHAPMPDYSCLKPPKAGEEGHEGCSYTMCPEGRYGHPGYPALVTYSYGGAVPSYCPAYGRVPHSCGSPGEGRGYPSPGAHSPRAGSISPGSPPYPQSRKLSYEIPTEEGGDRYPLPGHLASAGPLASAESLEPVSWREGPSGHSTLPRSPRDAPCSASSELSGPSTPLHTSSPVQGKESTRRQDTRSPTSAPTQRLSPGEALPPVSQAGTGKAPELPSGSGPEPLAPSPVSPTFPPSSPSDWPQERSPGGHSDGASPRSPVPTTLPGLRHAPWQGPRGPPDSPDGSPLTPVPSQMPWLVASPEPPQSSPTPAFPLAASYDTNGLSQPPLPEKRHLPGPGQQPGPWGPEQASSPARGISHHVTFAPLLSDNVPQTPEPPTQESQSNVKFVQDTSKFWYKPHLSRDQAIALLKDKDPGAFLIRDSHSFQGAYGLALKVATPPPSAQPWKGDPVEQLVRHFLIETGPKGVKIKGCPSEPYFGSLSALVSQHSISPISLPCCLRIPSKDPLEETPEAPVPTNMSTAADLLRQGAACSVLYLTSVETESLTGPQAVARASSAALSCSPRPTPAVVHFKVSAQGITLTDNQRKLFFRRHYPVNSITFSSTDPQDRRWTNPDGTTSKIFGFVAKKPGSPWENVCHLFAELDPDQPAGAIVTFITKVLLGQRK

SEQ ID NO: 66770 - protein, 1285 aa, Homo sapiens
MERRWDLDLTYVTERILAAAFPARPDEQRHRGHLRELAHVLQSKHRDKYLLFNLSEKRHDLTRLNPKVQDFGWPELHAPPLDKLCSICKAMETWLSADPQHVVVLYCKGNKGKLGVIVSAYMHYSKISAGADQALATLTMRKFCEDKVATELQPSQRRYISYFSGLLSGSIRMNSSPLFLHYVLIPMLPAFEPGTGFQPFLKIYQSMQLVYTSGVYHIAGPGPQQLCISLEPALLLKGDVMVTCYHKGGRGTDRTLVFRVQFHTCTIHGPQLTFPKDQLDEAWTDERFPFQASVEFVFSSSPEKIKGSTPRNDPSVSVDYNTTEPAVRWDSYENFNQHHEDSVDGSLTHTRGPLDGSPYAQVQRPPRQTPPAPSPEPPPPPMLSVSSDSGHSSTLTTEPAAESPGRPPPTAAERQELDRLLGGCGVASGGRGAGRETAILDDEEQPTVGGGPHLGVYPGHRPGLSRHCSCRQGYREPCGVPNGGYYRPEGTLERRRLAYGGYEGSPQGYAEASMEKRRLCRSLSEGLYPYPPEMGKPATGDFGYRAPGYREVVILEDPGLPALYPCPACEEKLALPTAALYGLRLEREAGEGWASEAGKPLLHPVRPGHPLPLLLPACGHHHAPMPDYSCLKPPKAGEEGHEGCSYTMCPEGRYGHPGYPALVTYSYGGAVPSYCPAYGRVPHSCGSPGEGRGYPSPGAHSPRAGSISPGSPPYPQSRKLSYEIPTEEGGDRYPLPGHLASAGPLASAESLEPVSWREGPSGHSTLPRSPRDAPCSASSELSGPSTPLHTSSPVQGKESTRRQDTRSPTSAPTQRLSPGEALPPVSQAGTGKAPELPSGSGPEPLAPSPVSPTFPPSSPSDWPQERSPGGHSDGASPRSPVPTTLPGLRHAPWQGPRGPPDSPDGSPLTPVPSQMPWLVASPEPPQSSPTPAFPLAASYDTNGLSQPPLPEKRHLPGPGQQPGPWGPEQASSPARGISHHVTFAPLLSDNVPQTPEPPTQESQSNVKFVQDTSKFWYKPHLSRDQAIALLKDKDPGAFLIRDSHSFQGAYGLALKVATPPPSAQPWKGDPVEQLVRHFLIETGPKGVKIKGCPSEPYFGSLSALVSQHSISPISLPCCLRIPSKDPLEETPEAPVPTNMSTAADLLRQGAACSVLYLTSVETESLTGPQAVARASSAALSCSPRPTPAVVHFKVSAQGITLTDNQRKLFFRRHYPVNSITFSSTDPQDRRWTNPDGTTSKIFGFVAKKPGSPWENVCHLFAELDPDQPAGAIVTFITKVLLGQRK

SEQ ID NO: 66771 - protein, 781 aa, Homo sapiens
MKSSGPVERLLRALGRRDSSRAASRPRKAEPHSFREKVFRKKPPVCAVCKVTIDGTGVSCRVCKVATHRKCEAKVTSACQALPPVELRRNTAPVRRIEHLGSTKSLNHSKQRSTLPRSFSLDPLMERRWDLDLTYVTERILAAAFPARPDEQRHRGHLRELAHVLQSKHRDKYLLFNLSEKRHDLTRLNPKVQDFGWPELHAPPLDKLCSICKAMETWLSADPQHVVVLYCKGNKGKLGVIVSAYMHYSKISAGADQALATLTMRKFCEDKVATELQPSQRRYISYFSGLLSGSIRMNSSPLFLHYVLIPMLPAFEPGTGFQPFLKIYQSMQLVYTSGVYHIAGPGPQQLCISLEPALLLKGDVMVTCYHKGGRGTDRTLVFRVQFHTCTIHGPQLTFPKDQLDEAWTDERFPFQASVEFVFSSSPEKIKGSTPRNDPSVSVDYNTTEPAVRWDSYENFNQHHEDSVDGSLTHTRGPLDGSPYAQVQRPPRQTPPAPSPEPPPPPMLSVSSDSGHSSTLTTEPAAESPGRPPPTAAERQELDRLLGGCGVASGGRGAGRETAILDDEEQPTVGGGPHLGVYPGHRPGLSRHCSCRQGYREPCGVPNGGYYRPEGTLERRRLAYGGYEGSPQGYAEASMEKRRLCRSLSEGLYPYPPEMGKPATGDFGYRASSAALSCSPRPTPAVVHFKVSAQGITLTDNQRKLFFRRHYPVNSITFSSTDPQDRRWTNPDGTTSKIFGFVAKKPGSPWENVCHLFAELDPDQPAGAIVTFITKVLLGQRK

SEQ ID NO: 66772 - protein, 1399 aa, Homo sapiens
MKSSGPVERLLRALGRRDSSRAASRPRKAEPHSFREKVFRKKPPVCAVCKVTIDGTGVSCRVCKVATHRKCEAKVTSACQALPPVELRRNTAPVRRIEHLGSTKSLNHSKQRSTLPRSFSLDPLMERRWDLDLTYVTERILAAAFPARPDEQRHRGHLRELAHVLQSKHRDKYLLFNLSEKRHDLTRLNPKVQDFGWPELHAPPLDKLCSICKAMETWLSADPQHVVVLYCKGNKGKLGVIVSAYMHYSKISAGADQALATLTMRKFCEDKVATELQPSQRRYISYFSGLLSGSIRMNSSPLFLHYVLIPMLPAFEPGTGFQPFLKIYQSMQLVYTSGVYHIAGPGPQQLCISLEPALLLKGDVMVTCYHKGGRGTDRTLVFRVQFHTCTIHGPQLTFPKDQLDEAWTDERFPFQASVEFVFSSSPEKIKGSTPRNDPSVSVDYNTTEPAVRWDSYENFNQHHEDSVDGSLTHTRGPLDGSPYAQVQRPPRQTPPAPSPEPPPPPMLSVSSDSGHSSTLTTEPAAESPGRPPPTAAERQELDRLLGGCGVASGGRGAGRETAILDDEEQPTVGGGPHLGVYPGHRPGLSRHCSCRQGYREPCGVPNGGYYRPEGTLERRRLAYGGYEGSPQGYAEASMEKRRLCRSLSEGLYPYPPEMGKPATGDFGYRAPGYREVVILEDPGLPALYPCPASLYGLRLEREAGEGWASEAGKPLLHPVRPGHPLPLLLPACGHHHAPMPDYSCLKPPKAGEEGHEGCSYTMCPEGRYGHPGYPALVTYSYGGAVPSYCPAYGRVPHSCGSPGEGRGYPSPGAHSPRAGSISPGSPPYPQSRKLSYEIPTEEGGDRYPLPGHLASAGPLASAESLEPVSWREGPSGHSTLPRSPRDAPCSASSELSGPSTPLHTSSPVQGKESTRRQDTRSPTSAPTQRLSPGEALPPVSQAGTGKAPELPSGSGPEPLAPSPVSPTFPPSSPSDWPQERSPGGHSDGASPRSPVPTTLPGLRHAPWQGPRGPPDSPDGSPLTPVPSQMPWLVASPEPPQSSPTPAFPLAASYDTNGLSQPPLPEKRHLPGPGQQPGPWGPEQASSPARGISHHVTFAPLLSDNVPQTPEPPTQESQSNVKFVQDTSKFWYKPHLSRDQAIALLKDKDPGAFLIRDSHSFQGAYGLALKVATPPPSAQPWKGDPVEQLVRHFLIETGPKGVKIKGCPSEPYFGSLSALVSQHSISPISLPCCLRIPSKDPLEETPEAPVPTNMSTAADLLRQGAACSVLYLTSVETESLTGPQAVARASSAALSCSPRPTPAVVHFKVSAQGITLTDNQRKLFFRRHYPVNSITFSSTDPQDRRWTNPDGTTSKIFGFVAKKPGSPWENVCHLFAELDPDQPAGAIVTFITKVLLGQRK

SEQ ID NO: 66773 - protein, 188 aa, Homo sapiens
MDCRKMARFSYSVIWIMAISKVFELGLVAGLGHQEFARPSRGYLAFRDDSIWPQEEPAIRPRSSQRVPPMGIQHSKELNRTCCLNGGTCMLGSFCACPPSFYGRNCEHDVRKENCGSVPHDTWLPKKCSLCKCWHGQLRCFPQAFLPGCDGLVMDEHLVASRTPELPPSARTTTFMLVGICLSIQSYY

SEQ ID NO: 66774 - protein, 172 aa, Homo sapiens
MAISKVFELGLVAGLGHQEFARPSRGYLAFRDDSIWPQEEPAIRPRSSQRVPPMGIQHSKELNRTCCLNGGTCMLGSFCACPPSFYGRNCEHDVRKENCGSVPHDTWLPKKCSLCKCWHGQLRCFPQAFLPGCDGLVMDEHLVASRTPELPPSARTTTFMLVGICLSIQSYY

SEQ ID NO: 66775 - protein, 214 aa, Homo sapiens
MGAAHSASEEVRELEGKTGFSSDQIEQLHRRFKQLSGDQPTIRKENFNNVPDLELNPIRSKIVRAFFDNRNLRKGPSGLADEINFEDFLTIMSYFRPIDTTMDEEQVELSRKEKLRFLFHMYDSDSDGRITLEEYRNVVEELLSGNPHIEKESARSIADGAMMEAASVCMGQMEPDQVYEGITFEDFLKIWQGIDIETKMHVRFLNMETMALCH

SEQ ID NO: 66776 - protein, 267 aa, Homo sapiens
MRPRSGPTRNPRLRAFAGVPTRGRTRGQSRRCAAEASAGPERDARPGAPAAGTMGAAHSASEEVRELEGKTGFSSDQIEQLHRRFKQLSGDQPTIRKENFNNVPDLELNPIRSKIVRAFFDNRNLRKGPSGLADEINFEDFLTIMSYFRPIDTTMDEEQVELSRKEKLRFLFHMYDSDSDGRITLEEYRNVVEELLSGNPHIEKESARSIADGAMMEAASVCMGQMEPDQVYEGITFEDFLKIWQGIDIETKMHVRFLNMETMALCH

SEQ ID NO: 66777 - protein, 187 aa, Homo sapiens
MGAAHSASEEVRELEGKTGFSSDQIEQLHRRFKQLSGDQPTIRNLRKGPSGLADEINFEDFLTIMSYFRPIDTTMDEEQVELSRKEKLRFLFHMYDSDSDGRITLEEYRNVVEELLSGNPHIEKESARSIADGAMMEAASVCMGQMEPDQVYEGITFEDFLKIWQGIDIETKMHVRFLNMETMALCH

SEQ ID NO: 66778 - protein, 421 aa, Homo sapiens
LNLEVKFKKMGLGHEQGFGAPCLKCKEKCEGFELHFWRKICRNCKCGQEEHDVLLSNEEDRKVGKLFEDTKYTTLIAKLKSDGIPMYKRNVMILTNPVAAKKNVSINTVTYEWAPPVQNQALARQYMQMLPKEKQPVAGSEGAQYRKKQLAKQLPAHDQDPSKCHELSPREVKEMEQFVKKYKSEALGVGDVKLPCEMDAQGPKQMNIPGGDRSTPAAVGAMEDKSAEHKRTQYSCYCCKLSMKEGDPAIYAERAGYDKLWHPACFVCSTCHELLVDMIYFWKNEKLYCGRHYCDSEKPRCAGCDELIFSNEYTQAENQNWHLKHFCCFDCDSILAGEIYVMVNDKPVCKPCYVKNHAVVCQGCHNAIDPEVQRVTYNNFSWHASTECFLCSCCSKCLIGQKFMPVEGMVFCSVECKKRMS

SEQ ID NO: 66779 - protein, 421 aa, Homo sapiens
MDLENKVKKMGLGHEQGFGAPCLKCKEKCEGFELHFWRKICRNCKCGQEEHDVLLSNEEDRKVGKLFEDTKYTTLIAKLKSDGIPMYKRNVMILTNPVAAKKNVSINTVTYEWAPPVQNQALARQYMQMLPKEKQPVAGSEGAQYRKKQLAKQLPAHDQDPSKCHELSPREVKEMEQFVKKYKSEALGVGDVKLPCEMDAQGPKQMNIPGGDRSTPAAVGAMEDKSAEHKRTQYSCYCCKLSMKEGDPAIYAERAGYDKLWHPACFVCSTCHELLVDMIYFWKNEKLYCGRHYCDSEKPRCAGCDELIFSNEYTQAENQNWHLKHFCCFDCDSILAGEIYVMVNDKPVCKPCYVKNHAVVCQGCHNAIDPEVQRVTYNNFSWHASTECFLCSCCSKCLIGQKFMPVEGMVFCSVECKKRMS

SEQ ID NO: 66780 - protein, 412 aa, Homo sapiens
MGLGHEQGFGAPCLKCKEKCEGFELHFWRKICRNCKCGQEEHDVLLSNEEDRKVGKLFEDTKYTTLIAKLKSDGIPMYKRNVMILTNPVAAKKNVSINTVTYEWAPPVQNQALARQYMQMLPKEKQPVAGSEGAQYRKKQLAKQLPAHDQDPSKCHELSPREVKEMEQFVKKYKSEALGVGDVKLPCEMDAQGPKQMNIPGGDRSTPAAVGAMEDKSAEHKRTQYSCYCCKLSMKEGDPAIYAERAGYDKLWHPACFVCSTCHELLVDMIYFWKNEKLYCGRHYCDSEKPRCAGCDELIFSNEYTQAENQNWHLKHFCCFDCDSILAGEIYVMVNDKPVCKPCYVKNHAVVCQGCHNAIDPEVQRVTYNNFSWHASTECFLCSCCSKCLIGQKFMPVEGMVFCSVECKKRMS

SEQ ID NO: 66781 - protein, 179 aa, Homo sapiens
MKEGDPAIYAERAGYDKLWHPACFVCSTCHELLVDMIYFWKNEKLYCGRHYCDSEKPRCAGCDELIFSNEYTQAENQNWHLKHFCCFDCDSILAGEIYVMVNDKPVCKPCYVKNHAVVCQGCHNAIDPEVQRVTYNNFSWHASTECFLCSCCSKCLIGQKFMPVEGMVFCSVECKKRMS

SEQ ID NO: 66782 - protein, 267 aa, Homo sapiens
MGARQIQTSSSQTSPEEAMGTPRIQHLLILLVLGASLLTSGLELYCQKGLSMTVEADPANMFNWTTEEVETCDKGALCQETILIIKAGTETAILATKGCIPEGEEAITIVQHSSPPGLIVTSYSNYCEDSFCNDKDSLSQFWEFSETTASTVSTTLHCPTCVALGTCFSAPSLPCPNGTTRCYQGKLEITGGGIESSVEVKGCTAMIGCRLMSGILAVGPMFVREACPHQLLTQPRKTENGATCLPIPVWGLQLLLPLLLPSFIHFS

SEQ ID NO: 66783 - protein, 262 aa, Homo sapiens
IQTSSSQTSPEEAMGTPRIQHLLILLVLGASLLTSGLELYCQKGLSMTVEADPANMFNWTTEEVETCDKGALCQETILIIKAGTETAILATKGCIPEGEEAITIVQHSSPPGLIVTSYSNYCEDSFCNDKDSLSQFWEFSETTASTVSTTLHCPTCVALGTCFSAPSLPCPNGTTRCYQGKLEITGGGIESSVEVKGCTAMIGCRLMSGILAVGPMFVREACPHQLLTQPRKTENGATCLPIPVWGLQLLLPLLLPSFIHFS

SEQ ID NO: 66784 - protein, 249 aa, Homo sapiens
MGTPRIQHLLILLVLGASLLTSGLELYCQKGLSMTVEADPANMFNWTTEEVETCDKGALCQETILIIKAGTETAILATKGCIPEGEEAITIVQHSSPPGLIVTSYSNYCEDSFCNDKDSLSQFWEFSETTASTVSTTLHCPTCVALGTCFSAPSLPCPNGTTRCYQGKLEITGGGIESSVEVKGCTAMIGCRLMSGILAVGPMFVREACPHQLLTQPRKTENGATCLPIPVWGLQLLLPLLLPSFIHFS

SEQ ID NO: 66785 - protein, 267 aa, Homo sapiens; identical to SEQ ID NO: 66782

SEQ ID NO: 66786 - protein, 940 aa, Homo sapiens
MISAHCNLRLLCSSDSSASASQVAGTTEVVENLVTNDNSPNIPEAIDRLFSDIANINRESMAEITDIQIEEMAVNLWNWALTIGGGWLVNEEQKIRLHYVACKLLSMCEASFASEQSIQRLIMMNMRIGKEWLDAGNFLIADECFQAAVASLEQLYVKLIQRSSPEADLTMEKITVESDHFRVLSYQAESAVAQGDFQRASMCVLQCKDMLMRLPQMTSSLHHLCYNFGVETQKNNKYEESSFWLSQSYDIGKMDKKSTGPEMLAKVLRLLATNYLDWDDTKYYDKALNAVNLANKEHLSSPGLFLKMKILLKGETSNEELLEAVMEILHLDMPLDFCLNIAKLLMDHERESVGFHFLTIIHERFKSSENIGKVLILHTDMLLQRKEELLAKEKIEEIFLAHQTGRQLTAESMNWLHNILWRQAASSFEVQNYTDALQWYYYSLRFYSTDEMDLDFTKLQRNMACCYLNLQQLDKAKEAVAEAERHDPRNVFTQFYIFKIAVIEGNSERALQAIITLENILTDEESEDNDLVAERGSPTMLLSLAAQFALENGQQIVAEKALEYLAQHSEDQEQVLTAVKCLLRFLLPKIAEMPESEDKKKEMDRLLTCLNRAFVKLSQPFGEEALSLESRANEAQWFRKTAWNLAVQCDKDPVMMREFFILSYKMSQFCPSDQVILIARKTCLLMAVAVDLEQGRKASTAFEQTMFLSRALEEIQTCNDIHNFLKQTGTFSNDSCEKLLLLYEFEVRAKLNDPLLESFLESVWELPHLETKTFETIAIIAMEKPAHYPLIALKALKKALLLYKKEEPIDISQYSKCMHNLVNLSVPDGASNVELCPLEEVWGYFEDALSHISRTKDYPEMEILWLMVKSWNTGVLMFSRSKYASAEKWCGLALRFLNHLTSFKESYETQMNMLYSQLVEALSNNKGPVFHEHGYWSKSD

SEQ ID NO: 66787 - protein, 615 aa, Homo sapiens
MEILHLDMPLDFCLNIAKLLMDHERESVGFHFLTIIHERFKSSENIGKVLILHTDMLLQRKEELLAKEKIEEIFLAHQTGRQLTAESMNWLHNILWRQAASSFEVQNYTDALQWYYYSLRFYSTDEMDLDFTKLQRNMACCYLNLQQLDKAKEAVAEAERHDPRNVFTQFYIFKIAVIEGNSERALQAIITLENILTDEESEDNDLVAERGSPTMLLSLAAQFALENGQQIVAEKALEYLAQHSEDQEQVLTAVKCLLRFLLPKIAEMPESEDKKKEMDRLLTCLNRAFVKLSQPFGEEALSLESRANEAQWFRKTAWNLAVQCDKDPVMMREFFILSYKMSQFCPSDQVILIARKTCLLMAVAVDLEQGRKASTAFEQTMFLSRALEEIQTCNDIHNFLKQTGTFSNDSCEKLLLLYEFEVRAKLNDPLLESFLESVWELPHLETKTFETIAIIAMEKPAHYPLIALKALKKALLLYKKEEPIDISQYSKCMHNLVNLSVPDGASNVELCPLEEVWGYFEDALSHISRTKDYPEMEILWLMVKSWNTGVLMFSRSKYASAEKWCGLALRFLNHLTSFKESYETQMNMLYSQLVEALSNNKGPVFHEHGYWSKSD

SEQ ID NO: 66788 - protein, 925 aa, Homo sapiens
MDNDDFFSMDFKEVVENLVTNDNSPNIPEAIDRLFSDIANINRESMAEITDIQIEEMAVNLWNWALTIGGGWLVNEEQKIRLHYVACKLLSMCEASFASEQSIQRLIMMNMRIGKEWLDAGNFLIADECFQAAVASLEQLYVKLIQRSSPEADLTMEKITVESDHFRVLSYQAESAVAQGDFQRASMCVLQCKDMLMRLPQMTSSLHHLCYNFGVETQKNNKYEESSFWLSQSYDIGKMDKKSTGPEMLAKVLRLLATNYLDWDDTKYYDKALNAVNLANKEHLSSPGLFLKMKILLKGETSNEELLEAVMEILHLDMPLDFCLNIAKLLMDHERESVGFHFLTIIHERFKSSENIGKVLILHTDMLLQRKEELLAKEKIEEIFLAHQTGRQLTAESMNWLHNILWRQAASSFEVQNYTDALQWYYYSLRFYSTDEMDLDFTKLQRNMACCYLNLQQLDKAKEAVAEAERHDPRNVFTQFYIFKIAVIEGNSERALQAIITLENILTDEESEDNDLVAERGSPTMLLSLAAQFALENGQQIVAEKALEYLAQHSEDQEQVLTAVKCLLRFLLPKIAEMPESEDKKKEMDRLLTCLNRAFVKLSQPFGEEALSLESRANEAQWFRKTAWNLAVQCDKDPVMMREFFILSYKMSQFCPSDQVILIARKTCLLMAVAVDLEQGRKASTAFEQTMFLSRALEEIQTCNDIHNFLKQTGTFSNDSCEKLLLLYEFEVRAKLNDPLLESFLESVWELPHLETKTFETIAIIAMEKPAHYPLIALKALKKALLLYKKEEPIDISQYSKCMHNLVNLSVPDGASNVELCPLEEVWGYFEDALSHISRTKDYPEMEILWLMVKSWNTGVLMFSRSKYASAEKWCGLALRFLNHLTSFKESYETQMNMLYSQLVEALSNNKGPVFHEHGYWSKSD

SEQ ID NO: 66789 - protein, 940 aa, Homo sapiens; identical to SEQ ID NO: 66786

SEQ ID NO: 66790 - protein, 123 aa, Homo sapiens
MMANHLVKPDNRNCKRPRELESPVPDSPQLSSLGKSDSSFSEISGLFYKDEALEKDLNDVSKEINLMLSTYAKLLSERAAVDASYIDEIDELFKEANAIENFLIQKREFLRQRFTVIANTLHR

SEQ ID NO: 66791 - protein, 123 aa, Homo sapiens; identical to SEQ ID NO: 66790

SEQ ID NO: 66792 - protein, 352 aa, Homo sapiens
MALRPEDPSSGFRHSNVVAFINEKMARHTKGPEFYLENISLSWEKVEDKLRAILEDSEVPSEVKEACTWGSLALGVRFAHRQAQLQRHRVRWLHGFAKLHKSAAQALASDLKKLREQQETERKEAASRLRMAQTSLVEVQKERDKELVSPHEWEQGAGWPGLATAGGVCTEGAAEEEEEAAVAAAGAAGGKGAEEEQRGCWRLWLPLWRPWLPLWRLGLPPWRPSSPTWRPGLPPWRPQRSWRESSCSSLEMLIRKSTPIGGRRREISGRSKQPHLISLEPRTPGPEPHQNLFLSSSLPHTHTHTQALFPPSQTYPLYPLHKQQSQHQFRLSCLPTGRPLILACGLMGGPTE

SEQ ID NO: 66793 - protein, 352 aa, Homo sapiens; identical to SEQ ID NO: 66792

SEQ ID NO: 66794 - protein, 409 aa, Homo sapiens
MALRPEDPSSGFRHSNVVAFINEKMARHTKGPEFYLENISLSWEKVEDKLRAILEDSEVPSEVKEACTWGSLALGVRFAHRQAQLQRHRVRWLHGFAKLHKSAAQALASDLKKLREQQETERKEAASRLRMAQTSLVEVQKERDKELVSPHEWEQGAGWPGLATAGGVCTEGAAEEEEEAAVAAAGAAGGKGAEEEQRDVEVVAAPVEAMAPPVEAGAAPMETQFPHVEARAASMETTEKLERILLQLLGDADQEKYTYWGQKEGDLRSVETATSYFSGTTNPWSRASSEPLPVQLPASYSYSYSSPFSSFSDIPTISPPQATVTAPVPPQLPSDWEAFDTSLWSDGGPHRIDHQEHPRDRRYSEPHQQRPPVYRRPGDWDCPWCNAVNFSRRDTCFDCGKGIWLQKPH

SEQ ID NO: 66795 - protein, 312 aa, Homo sapiens
MALRPEDPSSGFRHGNVVAFIIEKMARHTKGPEFYFENISLSWEEVEDKLRAILEDSEVPSEVKEACTWGSLALGVRFAHRQGQLQNRRVQWLQGFAKLHRSAALVLASNLTELKEQQEMECNEATFQLQLTETSLAEVQRERDMLRWKLFHAELAPPQGQGQATVFPGLATAGGDWTEGAGEQEKEAVAAAGAAGGKGEERYAEAGPAPAEVLQGLGGGFRQPLGAIVAGKLHLCGAEGERSQVSTNSHVCLLWAWVHSLTGASSCPAPYLIHILIPMPFVRLLSHTQYTPFTSKGHRTGSNSDAFQLGGL

SEQ ID NO: 66796 - protein, 1497 aa, Homo sapiens
MSRAVRLPVPCPVQLGTLRNDSLEAQLHEYVKQGNYVKVKKILKKGIYVDAVNSLGQTALFVAALLGLRKFVDVLVDYGSDPNHRCFDGSTPVHAAAFSGNQWILSKLLDAGGDLRLHDERGQNPKTWALTAGKERSTQIVEFMQRCASHMQAIIQGFSYDLLKKIDSPQRLVYSPSWCGGLVQGNPNGSPNRLLKAGVISAQNIYSFGFGKAMPWFQFYLTGATQMAYLGSLPVIGEKEVIQADDEPTFSFFSGPYMVMTNLVWNGSRVTVKELNLPTHPHCSRLRLADLLIAEQEHSSKLRHPYLLQLMAVCLSQDLEKTRLVYERITIGTLFSVLHERRSQFPVLHMEVIVHLLLQISDALRYLHFQGFIHRSLSSYAVHIISPGEARLTNLEYMLESEDRGVQRDLTRVPLPTQLYNWAAPEVILQKAATVKSDIYSFSMIMQEILTDDIPWKGLDGSVVKKAVVSGNYLEADVRLPKPYYDIVKSGIHVKQKDRTMNLQDIRYILKNDLKDFTGAQRTQPTESPRVQRYGLHPDVNVYLGLTSEHPRETPDMEIIELKEMGSQPHSPRVHSLFTEGTLDPQAPDPCLMARETQNQDAPCPAPFMAEEASSPSTGQPSLCSFEINEIYSGCLILEDDIEEPPGAASSLEADGPNQVDELKSMEEELDKMEREACCFGSEDESSSKAETEYSFDDWDWQNGSLSSLSLPESTREAKSNLNNMSTTEEYLISKCVLDLKIMQTIMHENDDRLRNIEQILDEVEMKQKEQEERMSLWATSREFTNAYKLPLAVGPPSLNYIPPVLQLSGGQKPDTSGNYPTLPRFPRMLPTLCDPGKQNTDEQFQCTQGAKDSLETSRIQNTSSQGRPRESTAQAKATQFNSALFTLSSHRQGPSASPSCHWDSTRMSVEPVSSEIYNAESRNKDDGKVHLKWKMEVKEMAKKAATGQLTVPPWHPQSSLTLESEAENEPDALLQPPIRSPENTDWQRVIEYHRENDEPRGNGKFDKTGNNDCDSDQHGRQPRLGSFTSIRHPSPRQKEQPEHSEAFQASSDTLVAVEKSYSHQSMQSTCSPESSEDITDEFLTPDGEYFYSSTAQENLALETSSPIEEDFEGIQGAFAQPQVSGEEKFQMRKILGKNAEILPRSQFQPVRSTEDEQEETSKESPKELKEKDISLTDIQDLSSISYEPDSSFKEASCKTPKINHAPTSVSTPLSPGSVSSAASQYKDCLESITFQVKTEFASCWNSQEFIQTLSDDFISVRERAKKLDSLLTSSETPPSRLTGLKRLSSFIGAGSPSLVKACDSSPPHATQRRSLPKVEAFSQHHIDELPPPSQELLDDIELLKQQQGSSTVLHENTASDGGGTANDQRHLEEQETDSKKEDSSMLLSKETEDLGEDTERAHSTLDEDLERWLQPPEESVELQDLPKGSERETNIKDQKVGEEKRKREDSITPERRKSEGVLGTSEEDELKSCFWKRLGWSESSRIIVLDQSDLSD

SEQ ID NO: 66797 - protein, 1451 aa, Homo sapiens
MSRAVRLPVPCPVQLGTLRNDSLEAQLHEYVKQGNYVKVKKILKKGIYVDAVNSLGQTALFVAALLGLRKFVDVLVDYGSDPNHRCFDGSTPVHAAAFSGNQWILSKLLDAGGDLRLHDERGQNPKTWALTAGKERSTQIVEFMQRCASHMQAIIQGFSYDLLKKIDSPQRLVYSPSWCGGLVQGNPNGSPNRLLKAGVISAQNIYSFGFGKFYLTGATQMAYLGSLPVIGEKEVIQADDEPTFSFFSGPYMVMTNLVWNGSRVTVKELNLPTHPHCSRLRLADLLIAEQEHSSKLRHPYLLQLMAVCLSQDLEKTRLVYERITIGTLFSVLHERRSQFPVLHMEVIVHLLLQISDALRYLHFQGFIHRSLSSYAVHIISPGEARLTNLEYMLESEDRGVQRDLTRVPLPTQLYNWAAPEVILQKAATVKSDIYSFSMIMQEILTDDIPWKGLDGSVVKKAVVSGNYLEADVRLPKPYYDIVKSGIHVKQKDRTMNLQDIRYILKNDLKDFTGAQRTQPTESPRVQRYGLHPDVNVYLGLTSEHPRETPDMEIIELKEMGSQPHSPRVHSLFTEGTLDPQAPDPCLMARETQNQDAPCPAPFMAEEASSPSTGQPSLCSFEINEIYSGCLILEDDIEEPPGAASSLEADGPNQVDELKSMEEELDKMEREACCFGSEDESSSKAETEYSFDDWDWQNGSLSSLSLPESTREAKSNLNNMSTTEEYLISKCVLDLKIMQTIMHENDDRLRNIEQILDEVEMKQKEQEERMSLWATSREFTNAYKLPLAVGPPSLNYIPPVLQLSGGQKPDTSGNYPTLPRFPRMLPTLCDPGKQNTDEQFQCTQGAKDSLETSRIQNTSSQGRPRESTAQAKATQFNSALFTLSSHRQGPSASPSCHWDSTRMSVEPVSSEIYNAESRNKDDGKVHLKWKMEVKEMAKKAATGQLTVPPWHPQSSLTLESEAENEPDALLQPPIRSPENTDWQRVIEYHRENDEPRGNGKFDKTGNNDCDSDQHGRQPRLGSFTSIRHPSPRQKEQPEHSEAFQASSDTLVAVEKSYSTSSPIEEDFEGIQGAFAQPQVSGEEKFQMRKILGKNAEILPRSQFQPVRSTEDEQEETSKESPKELKEKDISLTDIQDLSSISYEPDSSFKEASCKTPKINHAPTSVSTPLSPGSVSSAASQYKDCLESITFQVKTEFASCWNSQEFIQTLSDDFISVRERAKKLDSLLTSSETPPSRLTGLKRLSSFIGAGSPSLVKACDSSPPHATQRRSLPKVEAFSQHHIDELPPPSQELLDDIELLKQQQGSSTVLHENTASDGGGTANDQRHLEEQETDSKKEDSSMLLSKETEDLGEDTERAHSTLDEDLERWLQPPEESVELQDLPKGSERETNIKDQKVGEEKRKREDSITPERRKSEGVLGTSEEDELKSCFWKRLGWSESSRIIVLDQSDLSD

SEQ ID NO: 66798 - protein, 1491 aa, Homo sapiens
MSRAVRLPVPCPVQLGTLRNDSLEAQLHEYVKQGNYVKVKKILKKGIYVDAVNSLGQTALFVAALLGLRKFVDVLVDYGSDPNHRCFDGSTPVHAAAFSGNQWILSKLLDAGGDLRLHDERGQNPKTWALTAGKERSTQIVEFMQRCASHMQAIIQGFSYDLLKKIDSPQRLVYSPSWCGGLVQGNPNGSPNRLLKAGVISAQNIYSFGFGKFYLTGATQMAYLGSLPVIGEKEVIQADDEPTFSFFSGPYMVMTNLVWNGSRVTVKELNLPTHPHCSRLRLADLLIAEQEHSSKLRHPYLLQLMAVCLSQDLEKTRLVYERITIGTLFSVLHERRSQFPVLHMEVIVHLLLQISDALRYLHFQGFIHRSLSSYAVHIISPGEARLTNLEYMLESEDRGVQRDLTRVPLPTQLYNWAAPEVILQKAATVKSDIYSFSMIMQEILTDDIPWKGLDGSVVKKAVVSGNYLEADVRLPKPYYDIVKSGIHVKQKDRTMNLQDIRYILKNDLKDFTGAQRTQPTESPRVQRYGLHPDVNVYLGLTSEHPRETPDMEIIELKEMGSQPHSPRVHSLFTEGTLDPQAPDPCLMARETQNQDAPCPAPFMAEEASSPSTGQPSLCSFEINEIYSGCLILEDDIEEPPGAASSLEADGPNQVDELKSMEEELDKMEREACCFGSEDESSSKAETEYSFDDWDWQNGSLSSLSLPESTREAKSNLNNMSTTEEYLISKCVLDLKIMQTIMHENDDRLRNIEQILDEVEMKQKEQEERMSLWATSREFTNAYKLPLAVGPPSLNYIPPVLQLSGGQKPDTSGNYPTLPRFPRMLPTLCDPGKQNTDEQFQCTQGAKDSLETSRIQNTSSQGRPRESTAQAKATQFNSALFTLSSHRQGPSASPSCHWDSTRMSVEPVSSEIYNAESRNKDDGKVHLKWKMEVKEMAKKAATGQLTVPPWHPQSSLTLESEAENEPDALLQPPIRSPENTDWQRVIEYHRENDEPRGNGKFDKTGNNDCDSDQHGRQPRLGSFTSIRHPSPRQKEQPEHSEAFQASSDTLVAVEKSYSHQSMQSTCSPESSEDITDEFLTPDGEYFYSSTAQENLALETSSPIEEDFEGIQGAFAQPQVSGEEKFQMRKILGKNAEILPRSQFQPVRSTEDEQEETSKESPKELKEKDISLTDIQDLSSISYEPDSSFKEASCKTPKINHAPTSVSTPLSPGSVSSAASQYKDCLESITFQVKTEFASCWNSQEFIQTLSDDFISVRERAKKLDSLLTSSETPPSRLTGLKRLSSFIGAGSPSLVKACDSSPPHATQRRSLPKVEAFSQHHIDELPPPSQELLDDIELLKQQQGSSTVLHENTASDGGGTANDQRHLEEQETDSKKEDSSMLLSKETEDLGEDTERAHSTLDEDLERWLQPPEESVELQDLPKGSERETNIKDQKVGEEKRKREDSITPERRKSEGVLGTSEEDELKSCFWKRLGWSESSRIIVLDQSDLSD

SEQ ID NO: 66799 - protein, 2789 aa, Homo sapiens
MPSDAKDSVNGDLLLNWTSLKNILSGLNASFPLHNNTGSSTVTTSKSIKDPRLMRREESMGEQSSTAGLNEVLQFEKSSDNVNSEIKSTPSNSASSSEVVPGDCAVLTNGLDTPCFKTSVNDSQSWAHNMGSEDYDCIPPNKVTMAGQCKDQGNFSFPISVSNVVSEVENQNHSEEKAQRAQQESGNAYTKEYSSHIFQDSQSSDLKTIYQTGCQTSTVFPLKKKVSIDEYLQNTGKMKNFADLEDSSKHEEKQTSWKEIDNDFTNETKISPIDNYIVLHQEYKESESHNSFGKSCDKILITQELEITKSSTSTIKDKDELDHLALEWQITPSFESLSQKHPQHSVEYEGNIHTSLAIAQKLMELKLGKINQNYASIITEAFPKPKDIPQAKEMFIDTVISSYNIETAHDSSNCSITREHICVHRKNENEPVSLENIQRDYKETAYVEDRGQDHNLFCNSQLSNDIWLNVNFKKQTDRENQNEAKENSASCVENNIENIYGDKKQDSHTNENFSNIDEKEDKNYHNIEILSSEEFSTKFNLICREDNAVSAATALLESEEDTISAVKQKDTENTGRSVEHLASTTFPKTASSSVCVASNAAIQIASATMPALSLNNDDHQIYQFKETCSSESPDFGLLVKHRVSDCEIDTDKNKSQESFHQSINENLVLQSIELESEIEIELEDCDDAFIFQQDTHSHENMLCEEFVTSYKALKSRISWEGLLALDNGEMEVLESTTGRENSDQHYSKESNYFYSSTQNNETELTSPILLPDLQIKITNIFRPGFSPTADSLALKDSFCTHVTEATKPEINKEDGEILGFDIYSQPFGENADYPCEDKVDNIRQESGPVSNSEISLSFDLSRNTDVNHTSENQNSESLFTEPSNVTTIDDGSRCFFTKSKTDYNDTKNKKEVESRISKRKLHISSRDQNIPHKDLRRHKIYGRKRRLTSQDSSECFSSLSQGRIKTFSQSEKHIKSVLNILSDEASLCKSKCLSRKLDKAVVHLKKAHRRVHTSLQLITKVGEERKGPLPKSYAIICNNFWESCDLQGYSSVSQRKYYSTKHFSSKRKYDKRRKKRAPKADISKSLTHVSKHKSYKTSGEKKCLSRKSMASSVSKSHPTTSHMGEFCNQEHPESQLPVSSTSQSTSQSVYYNSSVSNPSLSEEHQPFSGKTAYLFSPDHSDEKLIEKENQIDTAFLSSTSKYEKLEKHSANHNVKDATKENSCDANEVINESNSVSLSCIKENINSSTGNDCDATCIGHTKAKTDVLISVLDSNVKHFLNDLYQQGNLILSDCKRNLEVKWTDPIERPKQNIITGNFLMGPLNLTLIASKKYSIPQLSAAAVTDSEGESSKSYLDKQRILTVDSFAASSTVPHCEQSCREKELLKTEQCSSGNCLHTDGNETNVTENYELDVASGTEEDKSYGENIVELSSSDSSLLLKDNVKGSSSETCIVKKDTEDRITWKVKQAEKAKDSVYKRSMTEGSTVNTEYKNQKNQISEESCLNEKIITTNLIDSHLSTKNTTTESVPLKNTVSNPLNKREKKGEIKVSKDSQSDLTLHSEIAYISKPGILGVNHTPILPAHSETCKVPTLLKKPASYVSDFKEKHCSANHTALIANLSQILQRADEASSLQILQEETKVCLNILPLFVEAFERKQECSVEQILISRELLVDQNLWNNCKHTLKPCAVDTLVELQMMMETIQFIENKKRHLEGEPTLRSLLWYDETLYAELLGKPRGFQQQSNFYPGFQGRLKYNAFCELQTYHDQLVELLEETKREKNSYYVFLKYKRQVNECEAIMEHCSDCFDFSLSVPFTCGVNFGDSLEDLEILRKSTLKLINVCGDSPKVHSYPGKQDHLWIIIEMISSKVNFIKNNEAVRVKISLYGLEHIFFDAAKNLVWKERTQSFSKKYSQKKDEERLLRVNKCAFSKLQKIYDTLSKDLNNEPISPIGLEEDTIIASRKSDHPINEATISIENSKFNSNLLAHPDICCISEILDQAEFADLKKLQDLTLRCTDHLEILKKYFQMLQDNNMDNIFITEENVLDVVINHSHEAIILKPEAIEMYIEIVMVSETIHFLKNSIAKKLDKQRFRGMLWFDLSLLPELVQCQEKMASFSFLKDNSTDVCLWKVIETAVSELKKDLDIICKYNEAVNCSYAIHLLSRELQELSEIKKLLKKSKYFISTYIDFVPYIASINYGSTVTELEYNYNQFSTLLKNVMSAPRKDLGKMAHIRKVMKTIEHMKMICTKNAELTISFFLCQMLYNRRKILQLKRKEKMNIHIVKPGENNNKFSISTMLPPVSECINKNISNSSKKRPSTVDKCEDSQEQQQDTTVSSCKKLKVDMKDVTKINREKATFKHPRTTGSHPKSENKIVPSSCDSLKRNHLTPKKVEMQRSLPGSLLPLENPKDTCASKSESKIDLTVSSDHFSGQQENLNSMKKRNVNFSAAETKSDKKDCAAFAICDQKSVHGTFSPDHGTLLQKFLKNSPDPTQKSCLSDINPETDVSLVPDASVLSKPIFCFVKDVHPDLEMNDTVFELQDNDIVNSSIKNSSCMTSPEPICIQNKIPTLQINKLQPTETESEDKYMKDTLNPNTVHTFGASGHITLNVNQGAEYSLSEQQNDKNSKVLMQNAATYWNELPQSACNPTYNSSEHLFGTSYPYSAWCVYQYSNSNGNAITQTYQGITSYEVQPSPSGLLTTVASTAQGTHSNLLYSQYFTYFAGEPQANGFVPVNGYFQSQIPASNFRQPIFSQYASHQPLPQATYPYLPNRFVPPEVPWVYAPWHQESFHPGH

SEQ ID NO: 66800 - protein, 410 aa, Homo sapiens
MVLKAEHTRSPSATLPSNVPSCRSLSSSEDGPSGPSSLADGGLAHNLQDSVRHRILYLSEQLRVEKASRDGNTVSYLKLVSKADRHQVPHIQQAFEKVNQRASATIAQIEHRLHQCHQQLQELEEGCRPEGLLLMAESDPANCEPPSEKALLSEPPEPGGEDGPVNLPHASRPFILESRFQSLQQGTCLETEDVAQQQNLLLQKVKAELEEAKRFHISLQESYHSLKERSLTDLQLLLESLQEEKCRQALMEEQVNGRLQGQLNEIYNLKHNLACSEERMAYLSYERAKEIWEITETFKSRISKLEMLQQVTQLEAAEHLQSRPPQMLFKFLSPRLSLATVLLVFVSTLCACPSSLISSRLCTCTMLMLIGLGVLAWQRWRAIPATDWQEWVPSRCRLYSKDSGPPADGP

SEQ ID NO: 66801 - protein, 410 aa, Homo sapiens; identical to SEQ ID NO: 66800

SEQ ID NO: 66802 - protein, 314 aa, Homo sapiens
MRPEGSLTYRVPERLRQGFCGVGRAAQALVCASAKEGTAFRMEAVQEGAAGVESEQAALGEEAVLLLDDIMAEVEVVAEVEVVAEEEGLVERREEAQRAQQAVPGPGPMTPESAPEELLAVQVELEPVNAQARKAFSRQREKMERRRKPHLDRRGAVIQSVPGFWANVIANHPQMSALITDEDEDMLSYMVSLEVGEEKHPVHLCKIMLFFRSNPYFQNKVITKEYLVNITEYRASHSTPIEWYPDYEVEAYRRRHHNSSLNFFNWFSDHNFAGSNKIAEILCKDLWRNPLQYYKRMKPPEEGTETSGDSQLLS

SEQ ID NO: 66803 - protein, 308 aa, Homo sapiens
MRPEGSLTYRVPERLRQGFCGVGRAAQALVCASAKEGTAFRMEAVQEGAAGVESEQAALGEEAVLLLDDIMAEVEVVAEEEGLVERREEAQRAQQAVPGPGPMTPESAPEELLAVQVELEPVNAQARKAFSRQREKMERRRKPHLDRRGAVIQSVPGFWANVIANHPQMSALITDEDEDMLSYMVSLEVGEEKHPVHLCKIMLFFRSNPYFQNKVITKEYLVNITEYRASHSTPIEWYPDYEVEAYRRRHHNSSLNFFNWFSDHNFAGSNKIAEILCKDLWRNPLQYYKRMKPPEEGTETSGDSQLLS

SEQ ID NO: 66804 - protein, 698 aa, Homo sapiens
MMRSRSKSPRRPSPTARGANCDVELLKTTTRDREELKCMLEKYERHLAEIQGNVKVLKSERDKIFLLYEQAQEEITRLRREMMKSCKSPKSTTAHAILRRVETERDVAFTDLRRMTTERDSLRERLKIAQETAFNEKAHLEQRIEELECTVHNLDDERMEQMSNMTLMKETISTVEKEMKSLARKAMDTESELGRQKAENNSLRLLYENTEKDLSDTQRHLAKKKYELQLTQEKIMCLDEKIDNFTRQNIAQREEISILGGTLNDLAKEKECLQACLDKKSENIASLGESLAMKEKTISGMKNIIAEMEQASRQCTEALIVCEQDVSRMRRQLDETNDELAQIARERDILAHDNDNLQEQFAKAKQENQALSKKLNDTHNELNDIKQKVQDTNLEVNKLKNILKSEESENRQMMEQLRKANEDAENWENKARQSEADNNTLKLELITAEAEGNRLKEKVDSLNREVEQHLNAERSYKSQISTLHKSVVKMEEELQKVQFEKVSALADLSSTRELCIKLDSSKELLNRQLVAKDQEIEMRENELDSAHSEIELLRSQMANERISMQNLEALLVANRDKEYQSQIALQEKESEIQLLKEHLCLAENKMAIQSRDVAQFRNVVTQLEADLDITKRQLGTERFERERAVQELRRQNYSSNAYHMSSTMKPNTKCHSPERAHHRSPDRGLDRSLEENLCYRDF

SEQ ID NO: 66805 - protein, 690 aa, Homo sapiens
MMRSRSKSPRRPSPTARGANCDVELLKTTTRDREELKCMLEKYERHLAEIQGNVKVLKSERDKIFLLYEQAQEEITRLRREMMKSCKSPKSTTAHAILRRVETERDVAFTDLRRMTTERDSLRERLKIAQETAFNEKAHLEQRIEELECTVHNLDDERMEQMSNMTLMKETISTVEKEMKSLARKAMDTESELGRQKAENNSLRLLYENTEKDLSDTQRHLAKKKYELQLTQEKIMCLDEKIDNFTRQNIAQREEISILGGTLNDLAKEKECLQACLDKKSENIASLGESLAMKEKTISGMKNIIAEMEQASRQCTEALIVCEQDVSRMRRQLDETNDELAQIARERDILAHDNDNLQEQFAKAKQENQALSKKLNDTHNELNDIKQKVQDTNLEVNKLKNILKSEESENRQMMEQLRKANEDAENWENKARQSEADNNTLKLELITAEAEGNRLKEKVDSLNREVEQHLNAERSYKSQISTLHKSVVKMEEELQKVQFEKVSALADLSSTRELCIKLDSSKELLNRQLVAKDQEIEMRENELDSAHSEIELLRSQMANERISMQNLEALLVANRDKEYQSQIALQEKESEIQLLKEHLCLAENKMAIQSRDVAQFRNVVTQLEADLDITKRQLGTERFERERAVQELRRQNYSSNAYHMSSTMKPNTKCHSPERAHHRSPDRGLDRSLE

SEQ ID NO: 66806 - protein, 698 aa, Homo sapiens; identical to SEQ ID NO: 66804

SEQ ID NO: 66807 - protein, 698 aa, Homo sapiens; identical to SEQ ID NO: 66804

SEQ ID NO: 66808 - protein, 698 aa, Homo sapiens; identical to SEQ ID NO: 66804

SEQ ID NO: 66809 - protein, 297 aa, Homo sapiens
MMRSRSKSPRRPSPTARGANCDVELLKTTTRDREELKCMLEKYERHLAEIQGNVKVLKSERDKIFLLYEQAQEEITRLRREMMKSCKSPKSTTAHAILRRVETERDVAFTDLRRMTTERDSLRERLKIAQETAFNEKAHLEQRIEELECTVHNLDDERMEQMSNMTLMKETISTVEKEMKSLARKAMDTESELGRQKAENNSLRLLYENTEKDLSDTQRHLAKKKYELQLTQEKIMCLDEKIDNFTRQNIAQREEISILGGTLNDLAKEKECLQACLDKKSENIASLGESLAMKTVY

SEQ ID NO: 66810 - protein, 626 aa, Homo sapiens
MAGERPPLRGPGPGPGEVPGEGPPGPGGTGGGPGRGRPSSYRALRSAVSSLARVDDFHCAEKIGAGFFSEVYKVRHRQSGQVMVLKMNKLPSNRGNTLREVQLMNRLRHPNILRFMGVCVHQGQLHALTEYMNGGTLEQLLSSPEPLSWPVRLHLALDIARGLRYLHSKGVFHRDLTSKNCLVRREDRGFTAVVGDFGLAEKIPVYREGARKEPLAVVGSPYWMAPEVLRGELYDEKADVFAFGIVLCELIARVPADPDYLPRTEDFGLDVPAFRTLVGDDCPLPFLLLAIHCCNLEPSTRAPFTEITQHLEWILEQLPEPAPLTRTALTHNQGSVARGGPSATLPRPDPRLSRSRSDLFLPPSPESPPNWGDNLTRVNPFSLREDLRGGKIKLLDTPSKPVLPLVPPSPFPSTQLPLVTTPETLVQPGTPARRCRSLPSSPELPRRMETALPGPGPPAVGPSAEEKMECEGSSPEPEPPGPAPQLPLAVATDNFISTCSSASQPWSPRSGPVLNNNPPAVVVNSPQGWAGEPWNRAQHSLPRAAALERTEPSPPPSAPREPDEGLPCPGCCLGPFSFGFLSMCPRPTPAVARYRNLNCEAGSLLCHRGHHAKPPTPSLQLPGARS

SEQ ID NO: 66811 - protein, 157 aa, Homo sapiens
SARAAALSRNLQGQRPLPLAVATDNFISTCSSASQPWSPRSGPVLNNNPPAVVVNSPQGWAGEPWNRAQHSLPRAAALERTEPSPPPSAPREPDEGLPCPGCCLGPFSFGFLSMCPRPTPAVARYRNLNCEAGSLLCHRGHHAKPPTPSLQLPGARS

SEQ ID NO: 66812 - protein, 358 aa, Homo sapiens
MDDATVLRKKGYIVGINLGKGSYAKVKSAYSERLKFNVAVKIIDRKKTPTDFVERFLPREMDILATVNHGSIIKTYEIFETSDGRIYIIMELGVQGDLLEFIKCQGALHEDVARKMFRQLSSAVKYCHDLDIVHRDLKCENLLLDKDFNIKLSDFGFSKRCLRDSNGRIILSKTFCGSAAYAAPEVLQSIPYQPKVYDIWSLGVILYIMVCGSMPYDDSDIRKMLRIQKEHRVDFPRSKNLTCECKDLIYRMLQPDVSQRLHIDEILSHSWLQPPKPKATSSASFKREGEGKYRAECKLDTKTGLRPDHRPDHKLGAKTQHRLLVVPENENRMEDRLAETSRAKDHHISGAEVGKAST

SEQ ID NO: 66813 - protein, 268 aa, Homo sapiens
MEDFLLSNGYQLGKTIGEGTYSKVKEAFSKKHQRKVAIKVIDKMGGPEEFIQRFLPRELQIVRTLDHKNIIQVYEMLESADGKICLVMELAEGGDVFDCVLNGGPLPESRAKALFRQMVEAIRYCHGCGVAHRDLKCENALLQGFNLKLTDFGFAKVLPKSHRELSQTFCGSTAYAAPEVLQGIPHDSKKGDVWSMGVVLYVMLCASLPFDDTDIPKMLWQQQKGVSFPTHLSISADCQDLLKRLLEPDMILRPSIEEVSWHPWLAST

SEQ ID NO: 66814 - protein, 328 aa, Homo sapiens
MGKGDVLEAAPTTTAYHSLMDEYGYEVGKAIGHGSYGSVYEAFYTKQKVMVAVKIISKKKASDDYLNKFLPREIQVMKVLRHKYLINFYRAIESTSRVYIILELAQGGDVLEWIQRYGACSEPLAGKWFSQLTLGIAYLHSKSIVHRDLKLENLLLDKWENVKISDFGFAKMVPSNQPVGCSPSYRQVNCFSHLSQTYCGSFAYACPEILRGLPYNPFLSDTWSMGVILYTLVVAHLPFDDTNLKKLLRETQKEVTFPANHTISQECKNLILQMLRQATKRATILDIIKDSWVLKFQPEQPTHEIRLLEAMCQLHNTTKQHQSLQITT

SEQ ID NO: 66815 - protein, 338 aa, Homo sapiens
MGKGDVLEAAPTTTAYHSLMDEYGYEVGKAIGHGSYGSVYEAFYTKQKVMVAVKIISKKKASDDYLNKFLPREIQVMKVLRHKYLINFYRAIESTSRVYIILELAQGGDVLEWIQRYGACSEPLAGKWFSQLTLGIAYLHSKSIVHRLMPSLSAAGRDLKLENLLLDKWENVKISDFGFAKMVPSNQPVGCSPSYRQVNCFSHLSQTYCGSFAYACPEILRGLPYNPFLSDTWSMGVILYTLVVAHLPFDDTNLKKLLRETQKEVTFPANHTISQECKNLILQMLRQATKRATILDIIKDSWVLKFQPEQPTHEIRLLEAMCQLHNTTKQHQSLQITT

SEQ ID NO: 66816 - protein, 252 aa, Homo sapiens
MKVLRHKYLINFYRAIESTSRVYIILELAQGGDVLEWIQRYGACSEPLAGKWFSQLTLGIAYLHSKSIVHRDLKLENLLLDKWENVKISDFGFAKMVPSNQPVGCSPSYRQVNCFSHLSQTYCGSFAYACPEILRGLPYNPFLSDTWSMGVILYTLVVAHLPFDDTNLKKLLRETQKEVTFPANHTISQECKNLILQMLRQATKRATILDIIKDSWVLKFQPEQPTHEIRLLEAMCQLHNTTKQHQSLQITT

SEQ ID NO: 66817 - protein, 273 aa, Homo sapiens
MSGDKLLSELGYKLGRTIGEGSYSKVKVATSKKYKGTVAIKVVDRRRAPPDFVNKFLPRELSILRGVRHPHIVHVFEFIEVCNGKLYIVMEAAATDLLQAVQRNGRIPGVQARDLFAQIAGAVRYLHDHHLVHRDLKCENVLLSPDERRVKLTDFGFGRQAHGYPDLSTTYCGSAAYASPEVLLGIPYDPKKYDVWSMGVVLYVMVTGCMPFDDSDIAGLPRRQKRGVLYPEGLELSERCKALIAELLQFSPSARPSAGQVARNCWLRAGDSG

SEQ ID NO: 66818 - protein, 273 aa, Homo sapiens; identical to SEQ ID NO: 66817

SEQ ID NO: 66819 - protein, 2136 aa, Homo sapiens
MSRSRHARPSRLVRKEDVNKKKKNSQLRKTTKGANKNVASVKTLSPGKLKQLIQERDVKKKTEPKPPVPVRSLLTRAGAARMNLDRTEVLFQNPESLTCNGFTMALRSTSLSRRLSQPPLVVAKSKKVPLSKGLEKQHDCDYKILPALGVKHSENDSVPMQDTQVLPDIETLIGVQNPSLLKGKSQETTQFWSQRVEDSKINIPTHSGPAAEILPGPLEGTRCGEGLFSEETLNDTSGSPKMFAQDTVCAPFPQRATPKVTSQGNPSIQLEELGSRVESLKLSDSYLDPIKSEHDCYPTSSLNKVIPDLNLRNCLALGGSTSPTSVIKFLLAGSKQATLGAKPDHQEAFEATANQQEVSDTTSFLGQAFGAIPHQWELPGADPVHGEALGETPDLPEIPGAIPVQGEVFGTILDQQETLGMSGSVVPDLPVFLPVPPNPIATFNAPSKWPEPQSTVSYGLAVQGAIQILPLGSGHTPQSSSNSEKNSLPPVMAISNVENEKQVHISFLPANTQGFPLAPERGLFHASLGIAQLSQAGPSKSDRGSSQVSVTSTVHVVNTTVVTMPVPMVSTSSSSYTTLLPTLEKKKRKRCGVCEPCQQKTNCGECTYCKNRKNSHQICKKRKCEELKKKPSVVVPLEVIKENKRPQREKKPKVLKADFDNKPVNGPKSESMDYSRCGHGEEQKLELNPHTVENVTKNEDSMTGIEVEKWTQNKKSQLTDHVKGDFSANVPEAEKSKNSEVDKKRTKSPKLFVQTVRNGIKHVHCLPAETNVSFKKFNIEEFGKTLENNSYKFLKDTANHKNAMSSVATDMSCDHLKGRSNVLVFQQPGFNCSSIPHSSHSIINHHASIHNEGDQPKTPENIPSKEPKDGSPVQPSLLSLMKDRRLTLEQVVAIEALTQLSEAPSENSSPSKSEKDEESEQRTASLLNSCKAILYTVRKDLQDPNLQGEPPKLNHCPSLEKQSSCNTVVFNGQTTTLSNSHINSATNQASTKSHEYSKVTNSLSLFIPKSNSSKIDTNKSIAQGIITLDNCSNDLHQLPPRNNEVEYCNQLLDSSKKLDSDDLSCQDATHTQIEEDVATQLTQLASIIKINYIKPEDKKVESTPTSLVTCNVQQKYNQEKGTIQQKPPSSVHNNHGSSLTKQKNPTQKKTKSTPSRDRRKKKPTVVSYQENDRQKWEKLSYMYGTICDIWIASKFQNFGQFCPHDFPTVFGKISSSTKIWKPLAQTRSIMQPKTVFPPLTQIKLQRYPESAEEKVKVEPLDSLSLFHLKTESNGKAFTDKAYNSQVQLTVNANQKAHPLTQPSSPPNQCANVMAGDDQIRFQQVVKEQLMHQRLPTLPGISHETPLPESALTLRNVNVVCSGGITVVSTKSEEEVCSSSFGTSEFSTVDSAQKNFNDYAMNFFTNPTKNLVSITKDSELPTCSCLDRVIQKDKGPYYTHLGAGPSVAAVREIMENRYGQKGNAIRIEIVVYTGKEGKSSHGCPIAKWVLRRSSDEEKVLCLVRQRTGHHCPTAVMVVLIMVWDGIPLPMADRLYTELTENLKSYNGHPTDRRCTLNENRTCTCQGIDPETCGASFSFGCSWSMYFNGCKFGRSPSPRRFRIDPSSPLHEKNLEDNLQSLATRLAPIYKQYAPVAYQNQVEYENVARECRLGSKEGRPFSGVTACLDFCAHPHRDIHNMNNGSTVVCTLTREDNRSLGVIPQDEQLHVLPLYKLSDTDEFGSKEGMEAKIKSGAIEVLAPRRKKRTCFTQPVPRSGKKRAAMMTEVLAHKIRAVEKKPIPRIKRKNNSTTTNNSKPSSLPTLGSNTETVQPEVKSETEPHFILKSSDNTKTYSLMPSAPHPVKEASPGFSWSPKTASATPAPLKNDATASCGFSERSSTPHCTMPSGRLSGANAAAADGPGISQLGEVAPLPTLSAPVMEPLINSEPSTGVTEPLTPHQPNHQPSFLTSPQDLASSPMEEDEQHSEADEPPSDEPLSDDPLSPAEEKLPHIDEYWSDSEHIFLDANIGGVAIAPAHGSVLIECARRELHATTPVEHPNRNHPTRLSLVFYQHKNLNKPQHGFELNKIKFEAKEAKNKKMKASEQKDQAANEGPEQSSEVNELNQIPSHKALTLTHDNVVTVSPYALTHVAGPYNHWV

SEQ ID NO: 66820 - protein, 109 aa, Homo sapiens
MADRLYTELTENLKSYNGHPTDRRCTLNENRTCTCQGIDPETCGASFSFGCSWSMYFNGCKFGRSPSPRRFRIDPSSPLHTYYERITKGRNPERRYMKPERISPGHEAM

SEQ ID NO: 66821 - protein, 241 aa, Homo sapiens
MQCFSFIKTMMILFNLLIFLCGAALLAVGIWVSIDGASFLKIFGPLSSSAMQFVNVGYFLIAAGVVVFALGFLGCYGAKTESKCALVTFFFILLLIFIAEVAAAVVALVYTTMAEHFLTLLVVPAIKKDYGSQEDFTQVWNTTMKGLKCCGFTNYTDFEDSPYFKENSAFPPFCCNDNVTNTANETCTKQKAHDQKVEGCFNQLLYDIRTNAVTVGGVAAGIGGLELAAMIVSMYLYCNLQ

SEQ ID NO: 66822 - protein, 305 aa, Homo sapiens
MAREDSVKCLRCLLYALNLLFWLMSISVLAVSAWMRDYLNNVLTLTAETRVEEAVILTYFPVVHPVMIAVCCFLIIVGMLGYCGTVKRNLLLLAWYFGSLLVIFCVELACGVWTYEQELMVPVQWSDMVTLKARMTNYGLPRYRWLTHAWNFFQREFKCCGVVYFTDWLEMTEMDWPPDSCCVREFPGCSKQAHQEDLSDLYQEGCGKKMYSFLRGTKQLQVLRFLGISIGVTQILAMILTITLLWALYYDRREPGTDQMMSLKNDNSQHLSCPSVELLKPSLSRIFEHTSMANSFNTHFEMEEL

SEQ ID NO: 66823 - protein, 305 aa, Homo sapiens; identical to SEQ ID NO: 66822

SEQ ID NO: 66824 - protein, 112 aa, Homo sapiens
MAREDSVKCLRCLLYALNLLFWLMSISVLAVSAWMRDYLNNVLTLTAETRVEEAVILTYFPVVHPVMIAVCCFLIIVGMLGYCGTVKRNLLLLAWYFGSLLVIFCVELACGV

SEQ ID NO: 66825 - protein, 95 aa, Homo sapiens
MAREDSVKCLRCLLYALNLLFWLMSISVLAVSAWMRDYLNNVLTLTAETRVEEAVILTYFPVVHPVMIAVCCFLIIVGMLGYCGTVKRNLLLLAW

SEQ ID NO: 66826 - protein, 120 aa, Homo sapiens
MAREDSVKCLRCLLYALNLLFWLMSISVLAVSAWMRDYLNNVLTLTAETRVEEAVILTYFPVVHPVMIAVCCFLIIVGMLGYCGTVKRNLLLLAWYFGSLLVIFCVELACGVWTYEQELM

SEQ ID NO: 66827 - protein, 147 aa, Homo sapiens
MAREDSVKCLRCLLYALNLLFWLMSISVLAVSAWMRDYLNNVLTLTAETRVEEAVILTYFPVVHPVMIAVCCFLIIVGMLGYCGTVKRNLLLLAWYFGSLLVIFCVELACGVWTYEQELMVPVQWSDMVTLKARMTNYGLPRYRWLT

SEQ ID NO: 66828 - protein, 294 aa, Homo sapiens
MPRGDSEQVRYCARFSYLWLKFSLIIYSTVFWLIGALVLSVGIYAEVERQKYKTLESAFLAPAIILILLGVVMFMVSFIGVLASLRDNLYLLQAFMYILGICLIMELIGGVVALTFRNQTIDFLNDNIRRGIENYYDDLDFKNIMDFVQKKFKCCGGEDYRDWSKNQYHDCSAPGPLACGVPYTCCIRNTTEVVNTMCGYKTIDKERFSVQDVIYVRGCTNAVIIWFMDNYTIMAGILLGILLPQFLGVLLTLLYITRVEDIIMEHSVTDGLLGPGAKPSVEAAGTGCCLCYPN

SEQ ID NO: 66829 - protein, 193 aa, Homo sapiens
MGRFRGGLRCIKYLLLGFNLLFWLAGSAVIAFGLWFRFGGAIKELSSEDKSPEYFYVGLYVLVGAGALMMAVGFFGCCGAMRESQCVLGSFFTCLLVIFAAEVTTGVFAFIGKGVAIRHVQTMYEEAYNDYLKDRGKGNGTLITFHSTFQCCGKESSEQVQPTCPKELLGHKIFGMIFSMVLCCAIRNSRDVI

SEQ ID NO: 66830 - protein, 196 aa, Homo sapiens
MGRFRGGLRCIKYLLLGFNLLFWLAGSAVIAFGLWFRFGGAIKELSSEDKSPEYFYVGLYVLVGAGALMMAVGFFGCCGAMRESQCVLGSAIRHVQTMYEEAYNDYLKDRGKGNGTLITFHSTFQCCGKESSEQVQPTCPKELLGHKNCIDEIETIISVKLQLIGIVGIGIAGLTIFGMIFSMVLCCAIRNSRDVI

SEQ ID NO: 66831 - protein, 221 aa, Homo sapiens
MGRFRGGLRCIKYLLLGFNLLFWLAGSAVIAFGLWFRFGGAIKELSSEDKSPEYFYVGLYVLVGAGALMMAVGFFGCCGAMRESQCVLGSFFTCLLVIFAAEVTTGVFAFIGKGVAIRHVQTMYEEAYNDYLKDRGKGNGTLITFHSTFQCCGKESSEQVQPTCPKELLGHKNCIDEIETIISVKLQLIGIVGIGIAGLTIFGMIFSMVLCCAIRNSRDVI

SEQ ID NO: 66832 - protein, 187 aa, Homo sapiens
GLRCIKYLLLGFNLLFWLAGSAVIAFGLWFRFGGAIKELSSEDKSPEYFYVGLYVLVGAGALMMAVGFFGCCGAMRESQCVLGSFFTCLLVIFAAEVTTGVFAFIGKGVAIRHVQTMYEEAYNDYLKDRGKGNGTLITFHSTFQCCGKESSEQVQPTCPKELLGHKIFGMIFSMVLCCAIRNSRDVI

SEQ ID NO: 66833 - protein, 253 aa, Homo sapiens
MGQCGITSSKTVLVFLNLIFWGAAGILCYVGAYVFITYDDYDHFFEDVYTLIPAVVIIAVGALLFIIGLIGCCATIRESRCGLATFVIILLLVFVTEVVVVVLGYVYRAKVENEVDRSIQKVYKTYNGTNPDAASRAIDYVQRQLHCCGIHNYSDWENTDWFKETKNQSVPLSCCRETASNCNGSLAHPSDLYAEGCEALVVKKLQEIMMHVIWAALAFAAIQLLGMLCACIVLCRRSRDPAYELLITGGTYA

SEQ ID NO: 66834 - protein, 228 aa, Homo sapiens
MGQCGITSSKTVLVFLNLIFWGAAGILCYVGAYVFITYDDYDHFFEDVYTLIPAVVIIAVGALLFIIGLIGCCATIRESRCGLATVENEVDRSIQKVYKTYNGTNPDAASRAIDYVQRQLHCCGIHNYSDWENTDWFKETKNQSVPLSCCRETASNCNGSLAHPSDLYAEGCEALVVKKLQEIMMHVIWAALAFAAIQLLGMLCACIVLCRRSRDPAYELLITGGTYA

SEQ ID NO: 66835 - protein, 216 aa, Homo sapiens
MWEPMSSSLMMTMTTSLKMCTRSSLLFIIGLIGCCATIRESRCGLATFVIILLLVFVTEVVVVVLGYVYRAKVENEVDRSIQKVYKTYNGTNPDAASRAIDYVQRQLHCCGIHNYSDWENTDWFKETKNQSVPLSCCRETASNCNGSLAHPSDLYAEGCEALVVKKLQEIMMHVIWAALAFAAIQQLLGMLCACIVLCRRSRDPAYELLITGGTYA

SEQ ID NO: 66836 - protein, 189 aa, Homo sapiens
MGQCGITSSKTVLVFLNLIFWFVIILLLVFVTEVVVVVLGYVYRAKVENEVDRSIQKVYKTYNGTNPDAASRAIDYVQRQLHCCGIHNYSDWENTDWFKETKNQSVPLSCCRETASNCNGSLAHPSDLYAEGCEALVVKKLQEIMMHVIWAALAFAAIQLLGMLCACIVLCRRSRDPAYELLITGGTYA

SEQ ID NO: 66837 - protein, 210 aa, Homo sapiens
MVCGGFACSKNALCALNVVYMLVSLLLIGVAAWGKGLGLVSSIHIIGGVIAVGVFLLLIAVAGLVGAVNHHQVLLFFYMIILGLVFIFQFVISCSCLAINRSKQTDVINASWWVMSNKTRDELERSFDCCGLFNLTTLYQQDYDFCTAICKSQSPTCQMCGEKFLKHSDEALKILGGVGLFFSFTEILGVWLAMRFRNQKDPRANPSAFL

SEQ ID NO: 66838 - protein, 320 aa, Homo sapiens
MGPWSRVRVAKCQMLVTCFFILLLGLSVATMVTLTYFGAHFAVIRRASLEKNPYQAVHQWAFSAGLSLVGLLTLGAVLSAAATVREAQGLMAGGFLCFSLAFCAQVQVVFWRLHSPTQVEDAMLDTYDLVYEQAMKGTSHVRRQELAAIQDVFLCCGKKSPFSRLGSTEADLCQGEEAAREDCLQGIRSFLRTHQQVASSLTSIGLALTVSALLFSSFLWFAIRCGCSLDRKGKYTLTPRACGRQPQEPSLLRCSQGGPTHCLHSEAVAIGPRGCSGSLRWLQESDAAPLPLSCHLAAHRALQGRSRGGLSGCPERGLSD

SEQ ID NO: 66839 - protein, 253 aa, Homo sapiens
MGPWSRVRVAKCQMLVTCFFILLLGLSVATMVTLTYFGAHFAVIRRASLEKNPYQAVHQWAFSAGLSLVGLLTLGAVLSAAATVREAQGLMAGGFLCFSLAFCAQVQVVFWRLHSPTQVEDAMLDTYDLVYEQAMKGTSHVRRQELAAIQDVFLCCGKKSPFSRLGSTEADLCQGEEAAREDCLQGIRSFLRTHQQVASSLTSIGLALTVSALLFSSFLWFAIRCGCSLDRKGKYTLTPRSPGQKSRWAQWVP

SEQ ID NO: 66840 - protein, 174 aa, Homo sapiens
MAIGFVGCLGAIKENKCLLLTFFLLLLLVFLLEATIAILFFAYTDKIDRYAQQDLKKGLHLYGTQGNVGLTNAWSIIQTDFRCCGVSNYTDWFEVYNATRVPDSCCLEFSESCGLHAPGTWWKAPCYETVKVWLQENLLAVGIFGLCTALVQILGLTFAMTMYCQVVKADTYCA

SEQ ID NO: 66841 - protein, 238 aa, Homo sapiens
MARACLQAVKYLMFAFNLLFWLGGCGVLGVGIWLAATQGSFATLSSSFPSLSAANLLIITGAFVMAIGFVGCLGAIKENKCLLLTFFLLLLLVFLLEATIAILFFAYTDKIDRYAQQDLKKGLHLYGTQGNVGLTNAWSIIQTDFRCCGVSNYTDWFEVYNATRVPDSCCLEFSESCGLHAPGTWWKAPCYETVKVWLQENLLAVGIFGLCTALVQILGLTFAMTMYCQVVKADTYCA

SEQ ID NO: 66842 - protein, 238 aa, Homo sapiens; identical to SEQ ID NO: 66841

SEQ ID NO: 66843 - protein, 238 aa, Homo sapiens; identical to SEQ ID NO: 66841

SEQ ID NO: 66844 - protein, 238 aa, Homo sapiens; identical to SEQ ID NO: 66841

SEQ ID NO: 66845 - protein, 238 aa, Homo sapiens; identical to SEQ ID NO: 66841

SEQ ID NO: 66846 - protein, 257 aa, Homo sapiens
MTPRSAGTSAHGAELKRCGMARACLQAVKYLMFAFNLLFWLGGCGVLGVGIWLAATQGSFATLSSSFPSLSAANLLIITGAFVMAIGFVGCLGAIKENKCLLLTFFLLLLLVFLLEATIAILFFAYTDKIDRYAQQDLKKGLHLYGTQGNVGLTNAWSIIQTDFRCCGVSNYTDWFEVYNATRVPDSCCLEFSESCGLHAPGTWWKAPCYETVKVWLQENLLAVGIFGLCTALVQILGLTFAMTMYCQVVKADTYCA

SEQ ID NO: 66847 - protein, 238 aa, Homo sapiens; identical to SEQ ID NO: 66841

SEQ ID NO: 66848 - protein, 174 aa, Homo sapiens; identical to SEQ ID NO: 66840

SEQ ID NO: 66849 - protein, 100 aa, Homo sapiens
MAIGFVGCLGAIKENKCLLLTFFLLLLLVFLLEATIAILFFAYTDKIDRYAQQDLKKGLHLYGTQGNVGLTNAWSIIQTDFRCCGVSNYTDWFEVYNATR

SEQ ID NO: 66850 - protein, 159 aa, Homo sapiens
MARACLQAVKYLMFAFNLLFWLGGCGVLGVGIWLAATQGSFATLSSSFPSLSAANLLIITGAFVMAIGFVGCLGAIKENKCLLLTFFLLLLLVFLLEATIAILFFAYTDKIDRYAQQDLKKGLHLYGTQGNVGLTNAWSIIQTDFRCCGVSNYTDWFEV

SEQ ID NO: 66851 - protein, 85 aa, Homo sapiens
MARACLQAVKYLMFAFNLLFWLGGCGVLGVGIWLAATQGSFATLSSSFPSLSAANLLIITGAFVMAIGFVGCLGAIKENKCLLLT

SEQ ID NO: 66852 - protein, 268 aa, Homo sapiens
MSGKHYKGPEVSCCIKYFIFGFNVIFWFLGITFLGIGLWAWNEKGVLSNISSITDLGGFDPVWLFLVVGGVMFILGFAGCIGALRENTFLLKFFSVFLGIIFFLELTAGVLAFVFKDWIKDQLYFFINNNIRAYRDDIDLQNLIDFTQEYWQCCGAFGADDWNLNIYFNCTDSNASRERCGVPFSCCTKDPAEDVINTQCGYDARQKPEVDQQIVIYTKGCVPQFEKWLQDNLTIVAGIFIGIALLQIFGICLAQNLVSDIEAVRASW

SEQ ID NO: 66853 - protein, 197 aa, Homo sapiens
MFILGFAGCIGALRENTFLLKFFSVFLGIIFFLELTAGVLAFVFKDWIKDQLYFFINNNIRAYRDDIDLQNLIDFTQEYWQCCGAFGADDWNLNIYFNCTDSNASRERCGVPFSCCTKDPAEDVINTQCGYDARQKPEVDQQIVIYTKGCVPQFEKWLQDNLTIVAGIFIGIALLQIFGICLAQNLVSDIEAVRASW

SEQ ID NO: 66854 - protein, 266 aa, Homo sapiens
MASRRMETKPVITCLKTLLIIYSFVFWKEKAAGFCGRQDVAMALITGVILLAVGVWGKLTLGTYISLIAENSTNAPYVLIGTGTTIVVFGLFGCFATCRGSPWMLKLYAMFLSLVFLAELVAGISGFVFRHEIKDTFLRTYTDAMQTYNGNDERSRAVDHVQRSLSCCGVQNYTNWSTSPYFLEHGIPPSCCMNETDCNPQDLHNLTVAATKVNQKGCYDLVTSFMETNMGIIAGVAFGIAFSQLIGMLLACCLSRFITANQYEMV

SEQ ID NO: 66855 - protein, 249 aa, Homo sapiens
MASRRMETKPVITCLKTLLIIYSFVFWITGVILLAVGVWGKLTLGTYISLIAENSTNAPYVLIGTGTTIVVFGLFGCFATCRGSPWMLKLYAMFLSLVFLAELVAGISGFVFRHEIKDTFLRTYTDAMQTYNGNDERSRAVDHVQRSLSCCGVQNYTNWSTSPYFLEHGIPPSCCMNETDCNPQDLHNLTVAATKVNQKGCYDLVTSFMETNMGIIAGVAFGIAFSQLIGMLLACCLSRFITANQYEMV

SEQ ID NO: 66856 - protein, 275 aa, Homo sapiens
MANRTVCNGQGRSRDLLRIKNIPNAPGHFLIAGVGGSSSQGRSIEEEGKTHLGITGVILLAVGVWGKLTLGTYISLIAENSTNAPYVLIGTGTTIVVFGLFGCFATCRGSPWMLKLYAMFLSLVFLAELVAGISGFVFRHEIKDTFLRTYTDAMQTYNGNDERSRAVDHVQRSLSCCGVQNYTNWSTSPYFLEHGIPPSCCMNETDCNPQDLHNLTVAATKVNQKGCYDLVTSFMETNMGIIAGVAFGIAFSQLIGMLLACCLSRFITANQYEMV

SEQ ID NO: 66857 - protein, 223 aa, Homo sapiens
MITGVILLAVGVWGKLTLGTYISLIAENSTNAPYVLIGTGTTIVVFGLFGCFATCRGSPWMLKLYAMFLSLVFLAELVAGISGFVFRHEIKDTFLRTYTDAMQTYNGNDERSRAVDHVQRSLSCCGVQNYTNWSTSPYFLEHGIPPSCCMNETDCNPQDLHNLTVAATKVNQKGCYDLVTSFMETNMGIIAGVAFGIAFSQLIGMLLACCLSRFITANQYEMV

SEQ ID NO: 66858 - protein, 237 aa, Homo sapiens
MAGVSACIKYSMFTFNFLFWLCGILILALAIWVRVSNDSQAIFGSEDVGSSSYVAVDILIAVGAIIMILGFLGCCGAIKESRCMLLLFFIGLLLILLLQVATGILGAVFKSKSDRIVNETLYENTKLLSATGESEKQFQEAIIVFQEEFKCCGLVNGAADWGNNFQHYPELCACLDKQRPCQSYNGKQVYKETCISFIKDFLAKNLIIVIGISFGLAVIEILGLVFSMVLYCQIGNK

SEQ ID NO: 66859 - protein, 237 aa, Homo sapiens; identical to SEQ ID NO: 66858

SEQ ID NO: 66860 - protein, 237 aa, Homo sapiens; identical to SEQ ID NO: 66858

SEQ ID NO: 66861 - protein, 239 aa, Homo sapiens
MARGCLCCLKYMMFLFNLIFWLCGCGLLGVGIWLSVSQGNFATFSPSFPSLSAANLVIAIGTIVMVTGFLGCLGAIKENKCLLLSFFIVLLVILLAELILLILFFVYMDKVNENAKKDLKEGLLLYHTENNVGLKNAWNIIQAEMRCCGVTDYTDWYPVLGENTVPDRCCMENSQGCGRNATTPLWRTGCYEKVKMWFDDNKHVLGTVGMCILIMQILGMAFSMTLFQHIHRTGKKYDA

SEQ ID NO: 66862 - protein, 239 aa, Homo sapiens; identical to SEQ ID NO: 66861

SEQ ID NO: 66863 - protein, 292 aa, Homo sapiens
MGEKSENCGVPEDLLNGLKVTDTQEAECAGPPVPDPKNQHSQSKLLRDDEAHLQEDQGEEECFHDCSASFEEEPGADKVENKSNEDVNSSELDEEYLIELEKNMSDEEKQKRREESTRLKEEGNEQFKKGDYIEAESSYSRALEMCPSCFQKERSILFSNRAAARMKQDKKEMAINDCSKAIQLNPSYIRAILRRAELYEKTDKLDEALEDYKSILEKDPSIHQAREACMRLPKQIEERNERLKEEMLGKLKDLGNLVLRPFGLSTENFQIKQDSSTGSYSINFVQNPNNNR

SEQ ID NO: 66864 - protein, 292 aa, Homo sapiens; identical to SEQ ID NO: 66863

SEQ ID NO: 66865 - protein, 732 aa, Homo sapiens
MDADKEKDLQKFLKNVDEISNLIQEMNSDDPVVQQKAVLETEKRLLLMEEDQEEDECRTTLNKTMISPPQTAMKSAEEINSEAFLASVEKDAKERAKRRRENKVLADALKEKGNEAFAEGNYETAILRYSEGLEKLKDMKVLYTNRAQAYMKLEDYEKALVDCEWALKCDEKCTKAYFHMGKANLALKNYSVSRECYKKILEINPKLQTQVKGYLNQVDLQEKADLQEKEAHELLDSGKNTAVTTKNLLETLSKPDQIPLFYAGGIEILTEMINECTEQTLFRMHNGFSIISDNEVIRRCFSTAGNDAVEEMVCVSVLKLWQAVCSRNEENQRVLVIHHDRARLLAALLSSKVLAIRQQSFALLLHLAQTESGRSLIINHLDLTRLLEALVSFLDFSDKEANTAMGLFTDLALEERFQVWFQANLPGVLPALTGVLKTDPKVSSSSALCQCIAIMGNLSAEPTTRRHMAACEEFGDGCLSLLARCEEDVDLFREVIYTLLGLMMNLCLQAPFVSEVWAVEVSRRCLSLLNSQDGGILTRAAGVLSRTLSSSLKIVEEALRAGVVKKMMKFLKTGGETASRYAIKILAICTNSYHEAREEVIRLDKKLSVMMKLLSSEDEVLVGNAALCLGNCMEVPNVASSLLKTDLLQVLLKLAGSDTQKTAVQVNAGIALGKLCTAEPRVPAESSHLQFGRESAAPEALSPRRWEEMFHMLVFSLSSVDPPPPPPQTCYP

SEQ ID NO: 66866 - protein, 107 aa, Homo sapiens
MDADKEKDLQKFLKNVDEISNLIQEMNSDDPVVQQKAVLETEKRLLLMEEDQEEDECRTTLNKTMISPPQTAMKSAEEINSEAFLASVEKDAKERAKRRRENKVLAD

SEQ ID NO: 66867 - protein, 202 aa, Homo sapiens
MDADKEKDLQKFLKNVDEISNLIQEMNSDDPVVQQKAVLETEKRLLLMEEDQEEDECRTTLNKTMISPPQTAMKSAEEINSEAFLASVEKDAKERAKRRRENKVLADALKEKGNEAFAEGNYETAILRYSEGLEKLKDMKVLYTNRAQAYMKLEDYEKALVDCEWALKCDEKCTKAYFHMGKANLALKNYSVSRECYKKILE

SEQ ID NO: 66868 - protein, 167 aa, Homo sapiens
MDADKEKDLQKFLKNVDEISNLIQEMNSDDPVVQQKAVLETEKRLLLMEEDQEEDECRTTLNKTMISPPQTAMKSAEEINSEAFLASVEKDAKERAKRRRENKVLADALKEKGNEAFAEGNYETAILRYSEGLEKLKDMKVLYTNRAQAYMKLEDYEKALVDCEWAL

SEQ ID NO: 66869 - protein, 705 aa, Homo sapiens
MDADKEKDLQKFLKNVDEISNLIQEMNSDDPVVQQKAVLETEKRLLLMEEDQEEDECRTTLNKTMISPPQTAMKSAEEINSEAFLASVEKDAKERAKRRRENKVLADALKEKGNEAFAEGNYETAILRYSEGLEKLKDMKVLYTNRAQAYMKLEDYEKALVDCEWALKCDEKCTKAYFHMGKANLALKNYSVSRECYKKILEINPKLQTQVKGYLNQVDLQEKADLQEKEAHELLDSGKNTAVTTKNLLETLSKPDQIPLFYAGGIEILTEMINECTEQTLFRMHNGFSIISDNEVIRRCFSTAGNDAVEEMVCVSVLKLWQAVCSRNEENQRVLVIHHDRARLLAALLSSKVLAIRQQSFALLLHLAQTESGRSLIINHLDLTRLLEALVSFLDFSDKEANTAMGLFTDLALEERFQVWFQANLPGVLPALTGVLKTDPKVSSSSALCQCIAIMGNLSAEPTTRRHMAACEEFGDGCLSLLARCEEDVDLFREVIYTLLGLMMNLCLQAPFVSEVWAVEVSRRCLSLLNSQDGGILTRAAGVLSRTLSSSLKIVEEALRAGVVKKMMKFLKTGGETASRYAIKILAICTNSYHEAREEVIRLDKKLSVMMKLLSSEDEVLVGNAALCLGNCMEVPNVASSLLKTDLLQVLLKLAGSDTQKTAVQVNAGIALGKLCTAEPRFAAQLRKLHGLEILNSTMKYISDS

SEQ ID NO: 66870 - protein, 380 aa, Homo sapiens
MFRLLSWSLGRGFLRAAGRRCRGCSARLLPGLAGGPGPEVQVPPSRVAPHGRGPGLLPLLAALAWFSRPAAAEEEEQQGADGAAAEDGADEAEAEIIQLLKRAKLSIMKDEPEEAELILHDALRLAYQTDNKKAITYTYDLMANLAFIRGQLENAEQLFKATMSYLLGGGMKQEDNAIIEISLKLASIYAAQNRQEFAVAGYEFCISTLEEKIEREKELAEDIMSVEEKANTHLLLGMCLDACARYLLFSKQPSQAQRMYEKALQISEEIQGERHPQTIVLMSDLATTLDAQGRFDEAYIYMQRASDLARQINHPELHMVLSNLAAVLMHRERYTQAKEIYQEALKQAKLKKDEISVQHIREELAELSKKSRPLTNSVKL

SEQ ID NO: 66871 - protein, 380 aa, Homo sapiens; identical to SEQ ID NO: 66870

SEQ ID NO: 66872 - protein, 501 aa, Homo sapiens
MAQPHTTSVPYFARSPAPPPPSRSGAPPQPPATLRPSRRRTRPPRPADRRDAPADCAYLWRILTPRRGRARRSDVGARHRACGRRDVLLSRQGPANPEGARRVVGGQERVWPAVRRGRGGSMFRLLSWSLGRGFLRAAGRRCRGCSARLLPGLAGGPGPEVQVPPSRVAPHGRGPGLLPLLAALAWFSRPAAAEEEEQQGADGAAAEDGADEAEAEIIQLLKRAKLSIMKDEPEEAELILHDALRLAYQTDNKKAITYTYDLMANLAFIRGQLENAEQLFKATMSYLLGGGMKQEDNAIIEISLKLASIYAAQNRQEFAVAGYEFCISTLEEKIEREKELAEDIMSVEEKANTHLLLGMCLDACARYLLFSKQPSQAQRMYEKALQISEEIQGERHPQTIVLMSDLATTLDAQGRFDEAYIYMQRASDLARQINHPELHMVLSNLAAVLMHRERYTQAKEIYQEALKQAKLKKDEISVQHIREELAELSKKSRPLTNSVKL

SEQ ID NO: 66873 - protein, 166 aa, Homo sapiens
  VARIANT 1: note = MOD_RES - Any amino acid
XQERVWPAVRRGRGGSMFRLLSWSLGRGFLRAAGRRCRGCSARLLPGLAGGPGPEVQVPPSRVAPHGRGPGLLPLLAALAWFSRPAAAEEEEQQGADGAAAEDGADEAEAEIIQLLKRAKVRRLRALRPAERGSLCERGLGVAAHYSLRLAEEWMEAPRVKLPRMS

SEQ ID NO: 66874 - protein, 1316 aa, Homo sapiens
MDSQELKTLINYYCQERYFHHVLLVASEGIKRYGSDPVFRFYHAYGTLMEGKTQEALREFEAIKNKQDVSLCSLLALIYAHKMSPNPDREAILESDARVKEQRKGAGEKALYHAGLFLWHIGRHDKAREYIDRMIKISDGSKQGHVLKAWLDITRGKEPYTKKALKYFEEGLQDGNDTFALLGKAQCLEMRQNYSGALETVNQIIVNFPSFLPAFVKKMKLQLALQDWDQTVETAQRLLLQDSQNVEALRMQALYYVCREGDIEKASTKLENLGNTLDAMEPQNAQLFYNITLAFSRTCGRSQLILQKIQTLLERAFSLNPQQSEFATELGYQMILQGRVKEALKWYKTAMTLDETSVSALVGFIQCQLIEGQLQDADQQLEFLNEIQQSIGKSAELIYLHAVLAMKKNKRQEEVINLLNDVLDTHFSQLEGLPLGIQYFEKLNPDFLLEIVMEYLSFCPMQPASPGQPLCPLLRRCISVLETVVRTVPGLLQTVFLIAKVKYLSGDIEAAFNNLQHCLEHNPSYADAHLLLAQVYLSQEKVKLCSQSLELCLSYDFKVRDYPLYHLIKAQSQKKMGEIADAIKTLHMAMSLPGMKRIGASTKSKDRKTEVDTSHRLSIFLELIDVHRLNGEQHEATKVLQDAIHEFSGTSEEVRVTIANADLALAQGDIERALSILQNVTAEQPYFIEAREKMADIYLKHRKDKMLYITCFREIAERMANPRSFLLLGDAYMNILEPEEAIVAYEQALNQNPKDGTLASKMGKALIKTHNYSMAITYYEAALKTGQKNYLCYDLAELLLKLKWYDKAEKVLQHALAHEPVNELSALMEDGRCQVLLAKVYSKMEKLGDAITALQQARELQARVLKRVQMEQPDAVPAQKHLAAEICAEIAKHSVAQRDYEKAIKFYREALVHCETDNKIMLELARLYLAQDDPDSCLRQCALLLQSDQDNEAATMMMADLMFRKQDYEQAVFHLQQLLERKPDNYMTLSRLIDLLRRCGKLEDVPRFFSMAEKRNSRAKLEPGFQYCKGLYLWYTGEPNDALRHFNKARKDRDWGQNALYNMIEICLNPDNETVGGEVFENLDGDLGNSTEKQESVQLAVRTAEKLLKELKPQTVQGHVQLRIMENYCLMATKQKSNVEQALNTFTEIAASEKEHIPALLGMATAYMILKQTPRARNQLKRIAKMNWNAIDAEEFEKSWLLLADIYIQSAKYDMAEDLLKRCLRHNRSCCKAYEYMGYIMEKEQAYTDAALNYEMAWKYSNRTNPAVGYKLAFNYLKAKRYVDSIDICHQVLEAHPTYPKIRKDILDKARASLRP

SEQ ID NO: 66875 - protein, 254 aa, Homo sapiens
MIEICLNPDNETVGGEVFENLDGDLGNSTEKQESVQLAVRTAEKLLKELKPQTVQGHVQLRIMENYCLMATKQKSNVEQALNTFTEIAASEKEHIPALLGMATAYMILKQTPRARNQLKRIAKMNWNAIDAEEFEKSWLLLADIYIQSAKYDMAEDLLKRCLRHNRSCCKAYEYMGYIMEKEQAYTDAALNYEMAWKYSNRTNPAVGYKLAFNYLKAKRYVDSIDICHQVLEAHPTYPKIRKDILDKARASLRP

SEQ ID NO: 66876 - protein, 2025 aa, Homo sapiens
MDNFAEGDFTVADYALLEDCPHVDDCVFAAEFMSNDYVRVTQLYCDGVGVQYKDYIQSERNLEFDICSIWCSKPISVLQDYCDAIKINIFWPLLFQHQNSSVISRLHPCVDANNSRASEINLKKLQHLELMEDIVDLAKKVANDSFLIGGLLRIGCKIENKILAMEEALNWIKYAGDVTILTKLGSIDNCWPMLSIFFTEYKYHITKIVMEDCNLLEELKTQSCMDCIEEGELMKMKGNEEFSKERFDIAIIYYTRAIEYRPENYLLYGNRALCFLRTGQFRNALGDGKRATILKNTWPKGHYRYCDALSMLGEYDWALQANIKAQKLCKNDPEGIKDLIQQHVKLQKQIEDLQGRTANKDPIKAFYENRAYTPRSLSAPIFTTSLNFVEKERDFRKINHEMANGGNQNLKVADEALKVDDCDCHPEFSPPSSQPPKHKGKQKSRNNESEKFSSSSPLTLPADLKNILEKQFSKSSRAAHQDFANIMKMLRSLIQDGYMALLEQRCRSAAQAFTELLNGLDPQKIKQLNLAMINYVLVVYGLAISLLGIGQPEELSEAENQFKRIIEHYPSEGLDCLAYCGIGKVYLKKNRFLEALNHFEKARTLIYRLPGVLTWPTSNVIIEESQPQKIKMLLEKFVEECKFPPVPDAICCYQKCHGYSKIQIYITDPDFKGFIRISCCQYCKIEFHMNCWKKLKTTTFNDKIDKDFLQGICLTPDCEGVISKIIIFSSGGEVKCEFEHKVIKEKVPPRPILKQKCSSLEKLRLKEDKKLKRKIQKKEAKKLAQERMEEDLRESNPPKNEEQKETVDNVQRCQFLDDRILQCIKQYADKIKSGIQNTAMLLKELLSWKVLSTEDYTTCFSSRNFLNEAVDYVIRHLIQENNRVKTRIFLHVLSELKEVEPKLAAWIQKLNSFGLDATGTFFSRYGASLKLLDFSIMTFLWNEKYGHKLDSIEGKQLDYFSEPASLKEARCLIWLLEEHRDKFPALHSALDEFFDIMDSRCTVLRKQDSGEAPFSSTKVKNKSKKKKPKDSKPMLVGSGTTSVTSNNEIITSSEDHSNRNSDSAGPFAVPDHLRQDVEEFEALYDQHSNEYVVRNKKLWDMNPKQKCSTLYDYFSQFLEEHGPLDMSNKMFSAEYEFFPEETRQILEKAGGLKPFLLGCPRFVVIDNCIALKKVASRLKKKRKKKNIKTKVEEISKAGEYVRVKLQLNPAAREFKPDVKSKPVSDSSSAPAFENVKPKPVSANSPKPACEDVKAKPVSDNSSRQVSEDGQPKGVSSNSPKPGSEDANYKRVSCNSPKPVLEDVKPTYWAQSHLVTGYCTYLPFQRFDITQTPPAYINVLPGLPQYTSIYTPLASLSPEYQLPRSVPVVPSFVANDRADKNAAAYFEGHHLNAENVAGHQIASETQILEGSLGISVKSHCSTGDAHTVLSESNRNDEHCGNSNNKCEVIPESTSAVTNIPHVQMVAIQVSWNIIHQEVNTEPYNPFEERQGEISRIEKEHQVLQDQLQEVYENYEQIKLKGLEETRDLEEKLKRHLEENKISKTELDWFLQDLEREIKKWQQEKKEIQERLKSLKKKIKKVSNASEMYTQKNDGKEKEHELHLDQSLEISNTLTNEKMKIEEYIKKGKEDYEESHQRAVAAEVSVLENWKESEVYKLQIMESQAEAFLKKLGLISRDPAAYPDMESDIRSWELFLSNVTKEIEKAKSQFEEQIKAIKNGSRLSELSKVQISELSFPACNTVHPELLPESSGDDGQGLVTSASDVTGNHAALHRDPSVFSAGDSPGEAPSALLPGPPPGQPEATQLTGPKRAGQAALSERSPVADRKQPVPPGRAARSSQSPKKPFNSIIEHLSVVFPCYNSTELAGFIKKVRSKNKNSLSGLSIDEIVQRVTEHILDEQKKKKPNPGKDKRTYEPSSATPVTRSSQGSPSVVVAPSPKTKGQKAEDVPVRIALGASSCEICHEVFKSKNVRVLKCGHKYHKGCFKQWLKGQSACPACQGRDLLTEESPSGRGWPSQNQELPSCSSR

SEQ ID NO: 66877 - protein, 2025 aa, Homo sapiens; identical to SEQ ID NO: 66876

SEQ ID NO: 66878 - protein, 2025 aa, Homo sapiens; identical to SEQ ID NO: 66876

SEQ ID NO: 66879 - protein, 1179 aa, Homo sapiens
MDNFAEGDFTVADYALLEDCPHVDDCVFAAEFMSNDYVRVTQLYCDGVGVQYKDYIQSERNLEFDICSIWCSKPISVLQDYCDAIKINIFWPLLFQHQNSSVISRLHPCVDANNSRASEINLKKLQHLELMEDIVDLAKKVANDSFLIGGLLRIGCKIENKILAMEEALNWIKYAGDVTILTKLGSIDNCWPMLSIFFTEYKYHITKIVMEDCNLLEELKTQSCMDCIEEGELMKMKGNEEFSKERFDIAIIYYTRAIEYRPENYLLYGNRALCFLRTGQFRNALGDGKRATILKNTWPKGHYRYCDALSMLGEYDWALQANIKAQKLCKNDPEGIKDLIQQHVKLQKQIEDLQGRTANKDPIKAFYENRAYTPRSLSAPIFTTSLNFVEKERDFRKINHEMANGGNQNLKVADEALKVDDCDCHPEFSPPSSQPPKHKGKQKSRNNESEKFSSSSPLTLPADLKNILEKQFSKSSRAAHQDFANIMKMLRSLIQDGYMALLEQRCRSAAQAFTELLNGLDPQKIKQLNLAMINYVLVVYGLAISLLGIGQPEELSEAENQFKRIIEHYPSEGLDCLAYCGIGKVYLKKNRFLEALNHFEKARTLIYRLPGVLTWPTSNVIIEESQPQKIKMLLEKFVEECKFPPVPDAICCYQKCHGYSKIQIYITDPDFKGFIRISCCQYCKIEFHMNCWKKLKTTTFNDKIDKDFLQGICLTPDCEGVISKIIIFSSGGEVKCEFEHKVIKEKVPPRPILKQKCSSLEKLRLKEDKKLKRKIQKKEAKKLAQERMEEDLRESNPPKNEEQKETVDNVQRCQFLDDRILQCIKQYADKIKSGIQNTAMLLKELLSWKVLSTEDYTTCFSSRNFLNEAVDYVIRHLIQENNRVKTRIFLHVLSELKEVEPKLAAWIQKLNSFGLDATGTFFSRYGASLKLLDFSIMTFLWNEKYGHKLDSIEGKQLDYFSEPASLKEARCLIWLLEEHRDKFPALHSALDEFFDIMDSRCTVLRKQDSGEAPFSSTKVKNKSKKKKPKDSKPMLVGSGTTSVTSNNEIITSSEDHSNRNSDSAGPFAVPDHLRQDVEEFEALYDQHSNEYVVRNKKLWDMNPKQKCSTLYDYFSQFLEEHGPLDMSNKMFSAEYEFFPEETRQILEKAGGLKPFLLGCPRFVVIDNCIALKKVASRLK

SEQ ID NO: 66880 - protein, 780 aa, Homo sapiens
MDNFAEGDFTVADYALLEDCPHVDDCVFAAEFMSNDYVRVTQLYCDGVGVQYKDYIQSERNLEFDICSIWCSKPISVLQDYCDAIKINIFWPLLFQHQNSSVISRLHPCVDANNSRASEINLKKLQHLELMEDIVDLAKKVANDSFLIGGLLRIGCKIENKILAMEEALNWIKYAGDVTILTKLGSIDNCWPMLSIFFTEYKYHITKIVMEDCNLLEELKTQSCMDCIEEGELMKMKGNEEFSKERFDIAIIYYTRAIEYRPENYLLYGNRALCFLRTGQFRNALGDGKRATILKNTWPKGHYRYCDALSMLGEYDWALQANIKAQKLCKNDPEGIKDLIQQHVKLQKQIEDLQGRTANKDPIKAFYENRAYTPRSLSAPIFTTSLNFVEKERDFRKINHEMANGGNQNLKVADEALKVDDCDCHPEFSPPSSQPPKHKGKQKSRNNESEKFSSSSPLTLPADLKNILEKQFSKSSRAAHQDFANIMKMLRSLIQDGYMALLEQRCRSAAQAFTELLNGLDPQKIKQLNLAMINYVLVVYGLAISLLGIGQPEELSEAENQFKRIIEHYPSEGLDCLAYCGIGKVYLKKNRFLEALNHFEKARTLIYRLPGVLTWPTSNVIIEESQPQKIKMLLEKFVEECKFPPVPDAICCYQKCHGYSKIQIYITDPDFKGFIRISCCQYCKIEFHMNCWKKLKTTTFNDKIDKDFLQGICLTPDCEGVISKIIIFSSGGEVKCEFEHKVIKEKVPPRPILKQKCSSLEKLRLKEDKKLKRKIQKKEA

SEQ ID NO: 66881 - protein, 612 aa, Homo sapiens
MLGEYDWALQANIKAQKLCKNDPEGIKDLIQQHVKLQKQIEDLQGRTANKDPIKAFYENRAYTPRSLSAPIFTTSLNFVEKERDFRKINHEMANGGNQNLKVADEALKVDDCDCHPEFSPPSSQPPKHKGKQKSRNNESEKFSSSSPLTLPADLKNILEKQFSKSSRAAHQDFANIMKMLRSLIQDGYMALLEQRCRSAAQAFTELLNGLDPQKIKQLNLAMINYVLVVYGLAISLLGIGQPEELSEAENQFKRIIEHYPSEGLDCLAYCGIGKVYLKKNRFLEALNHFEKARTLIYRLPGVLTWPTSNVIIEESQPQKIKMLLEKFVEECKFPPVPDAICCYQKCHGYSKIQIYITDPDFKGFIRISCCQYCKIEFHMNCWKKLKTTTFNDKIDKDFLQGICLTPDCEGVISKIIIFSSGGEVKCEFEHKVIKEKVPPRPILKQKCSSLEKLRLKEDKKLKRKIQKKEAKKLAQERMEEDLRESNPPKNEEQKETVDNVQRCQFLDDRILQCIKQYADKIKSGIQNTAMLLKELLSWKVLSTEDYTTCFSSRNFLNEAVDYVIRHLIQENNRVKTRIFLHVLSELKEVEPKLAAWIQKLNSFGMSLYIPEQ

SEQ ID NO: 66882 - protein, 613 aa, Homo sapiens
MDAVLACRLRGRGNRVAALRPRPRPGGSAGPSPFALLCAGLSPEPRAGVGSEFPAWFLGGSSQRRNMALLGSRAELEADEDVFEDALETISMAKESMYHALGYSTIVVLQAVLTFEQQDIQNGISAMKDALQTCQKYRKKYTVVESFSSLLSRGSLEQLSEEEMHAEICYAECLLQKAALTFVQDENMINFIKGGLKIRTSYQIYKECLSILHEIQKNKLQQEFFYEFEGGVKLGSGAFNLMLSLLPARIIRLLEFIGFSGNRELGLLQLREGASGRSMRSALCCLTILAFHTYISLILGTGEVNVAEAERLLAPFLQQFPNGSLVLFYHARIELLKGNLEEAQEVFQKCISVQEEWKQFHHLCYWELMWINVFQQNWMQAYYYSDLLCKESKWSKATYVFLKAAILSMLPEEDVVATNENVVTLFRQVDSLKQRIAGKSIPTEKFAVRKARRYSASLPAPVKLILPALEMMYVWNGFSIVSKRKDLSENLLVTVEKAEAALQSQNFNSFSVDDECLVKLLKGCCLKNLQRPLQAELCYNHVVESEKLLKYDHYLVPFTLFELASLYKSQGEIDKAIKFLETARNNYKDYSLESRLHFRIQAALHLWRKPSSD

SEQ ID NO: 66883 - protein, 616 aa, Homo sapiens
MALLGSRAELEADEDVFEDALETISISSHSDMATSSLHFASCDTQQAPRQRGASTVSSSSSTKVDLKSGLEECAVALNLFLSNKFTDALELLRPWAKESMYHALGYSTIVVLQAVLTFEQQDIQNGISAMKDALQTCQKYRKKYTVVESFSSLLSRGSLEQLSEEEMHAEICYAECLLQKAALTFVQDENMINFIKGGLKIRTSYQIYKECLSILHEIQKNKLQQEFFYEFEGGVKLGSGAFNLMLSLLPARIIRLLEFIGFSGNRELGLLQLREGASGRSMRSALCCLTILAFHTYISLILGTGEVNVAEAERLLAPFLQQFPNGSLVLFYHARIELLKGNLEEAQEVFQKCISVQEEWKQFHHLCYWELMWINVFQQNWMQAYYYSDLLCKESKWSKATYVFLKAAILSMLPEEDVVATNENVVTLFRQVDSLKQRIAGKSIPTEKFAVRKARRYSASLPAPVKLILPALEMMYVWNGFSIVSKRKDLSENLLVTVEKAEAALQSQNFNSFSVDDECLVKLLKGCCLKNLQRPLQAELCYNHVVESEKLLKYDHYLVPFTLFELASLYKSQGEIDKAIKFLETARNNYKDYSLESRLHFRIQAALHLWRKPSSD

SEQ ID NO: 66884 - protein, 669 aa, Homo sapiens
MDAVLACRLRGRGNRVAALRPRPRPGGSAGPSPFALLCAGLSPEPRAGVGSEFPAWFLGGSSQRRNMALLGSRAELEADEDVFEDALETISISSHSDMATSSLHFASCDTQQAPRQRGASTVSSSSSTKVDLKSGLEECAVALNLFLSNKFTDALELLRPWAKESMYHALGYSTIVVLQAVLTFEQQDIQNGISAMKDALQTCQKYRKKYTVVESFSSLLSRGSLEQLSEEEMHAEICYAECLLQKAALTFVQDENMINFIKGGLKIRTSYQIYKECLSILHEIQKNKLQQEFFYEFEGGVKLGSGAFNLMLSLLPARIIRLLEFIGFSGNRELGLLQLREGASGRSMRSALCCLTILAFHTYISLILGTGEVNVAEAERLLAPFLQQFPNVRSVFQSAQEVFQKCISVQEEWKQFHHLCYWELMWINVFQQNWMQAYYYSDLLCKESKWSKATYVFLKAAILSMLPEEDVVATNENVVTLFRQVDSLKQRIAGKSIPTEKFAVRKARRYSASLPAPVKLILPALEMMYVWNGFSIVSKRKDLSENLLVTVEKAEAALQSQNFNSFSVDDECLVKLLKGCCLKNLQRPLQAELCYNHVVESEKLLKYDHYLVPFTLFELASLYKSQGEIDKAIKFLETARNNYKDYSLESRLHFRIQAALHLWRKPSSD

SEQ ID NO: 66885 - protein, 682 aa, Homo sapiens
MDAVLACRLRGRGNRVAALRPRPRPGGSAGPSPFALLCAGLSPEPRAGVGSEFPAWFLGGSSQRRNMALLGSRAELEADEDVFEDALETISISSHSDMATSSLHFASCDTQQAPRQRGASTVSSSSSTKVDLKSGLEECAVALNLFLSNKFTDALELLRPWAKESMYHALGYSTIVVLQAVLTFEQQDIQNGISAMKDALQTCQKYRKKYTVVESFSSLLSRGSLEQLSEEEMHAEICYAECLLQKAALTFVQDENMINFIKGGLKIRTSYQIYKECLSILHEIQKNKLQQEFFYEFEGGVKLGSGAFNLMLSLLPARIIRLLEFIGFSGNRELGLLQLREGASGRSMRSALCCLTILAFHTYISLILGTGEVNVAEAERLLAPFLQQFPNGSLVLFYHARIELLKGNLEEAQEVFQKCISVQEEWKQFHHLCYWELMWINVFQQNWMQAYYYSDLLCKESKWSKATYVFLKAAILSMLPEEDVVATNENVVTLFRQVDSLKQRIAGKSIPTEKFAVRKARRYSASLPAPVKLILPALEMMYVWNGFSIVSKRKDLSENLLVTVEKAEAALQSQNFNSFSVDDECLVKLLKGCCLKNLQRPLQAELCYNHVVESEKLLKYDHYLVPFTLFELASLYKSQGEIDKAIKFLETARNNYKDYSLESRLHFRIQAALHLWRKPSSD

SEQ ID NO: 66886 - protein, 194 aa, Homo sapiens [sequence omitted]

SEQ ID NO: 66887 - protein, 387 aa, Homo sapiens
MEQPGQDPTSDDVMDSFLEKFQSQPYRGGFHEDQWEKEFEKVPLFMSRAPSEIDPRENPDLACLQSIIFDEERSPEEQAKTYKDEGNDYFKEKDYKKAVISYTEGLKKKCADPDLNAVLYTNRAAAQYYLGNFRSALNDVTAARKLKPCHLKAIIRGALCHLELKHFAEAVNWCDEGLQIDAKEKKLLEMRAKADKLKRIEQRDVRKANLKEKKERNQNEALLQAIKARNIRLSEAACEDEDSASEGLGELFLDGLSTENPHGARLSLDGQGRLSWPVLFLYPEYAQSDFISAFHEDSRFIDHLMVMFGETPSWDLEQKYCPDNLEVYFEDEDRAELYRVPAKSTLLQVLQHQRYFVKALTPAFLVCVGSSPFCKNFLRGRKVYQIR

SEQ ID NO: 66888 - protein, 504 aa, Homo sapiens
MATRDVVLSRVPEQEEDRTVSLQNAAAIYDLLSITLGRRGQYVMLSECLERAMKFAFGEFHLWYQVALSMVACGKSAYAVSLLRECVKLRPSDPTVPLMAAKVCIGSLRWLEEAEHFAMMVISLGEEAGEFLPKGYLALGLTYSLQATDATLKSKQDELHRKALQTLERAQQLAPSDPQVILYVSLQLALVRQISSAMEQLQEALKVRKDDAHALHLLALLFSAQKHHQHALDVVNMAITEHPENFNLMFTKVKLEQVLKGPEEALVTCRQVLRLWQTLYSFSQLGGLEKDGSFGEGLTMKKQSGMHLTLPDAHDADSGSRRASSIAASRLEEAMSELTMPSSVLKQGPMQLWTTLEQIWLQAAELFMEQQHLKEAGFCIQEAAGLFPTSHSVLYMRGRLAEVKGNLEEAKQLYKEALTVNPDGVRIMHSLGLMLSRLGHKSLAQKVLRDAVERQSTCHEAWQGLGEVLQAQGQNEAAVDCFLTALELEASSPVLPFSIIPREL

SEQ ID NO: 66889 - protein, 858 aa, Homo sapiens
MAAKGAHGSYLKVESELERCRAEGHWDRMPELVRQLQTLSMPGGGGNRRGSPSAAFTFPDTDDFGKLLLAEALLEQCLKENHAKIKDSMPLLEKNEPKMSEAKNYLSSILNHGRLSPQYMCEAMLILGKLHYVEGSYRDAISMYARAGIDDMSMENKPLYQMRLLSEAFVIKGLSLERLPNSIASRFRLTEREEEVITCFERASWIAQVFLQELEKTTNNSTSRHLKGCHPLDYELTYFLEAALQSAYVKNLKKGNIVKGMRELREVLRTVETKATQNFKVMAAKHLAGVLLHSLSEECYWSPLSHPLPEFMGKEESSFATQALRKPHLYEGDNLYCPKDNIEEALLLLLISESMATRDVVLSRVPEQEEDRTVSLQNAAAIYDLLSITLGRRGQYVMLSECLERAMKFAFGEFHLWYQVALSMVACGKSAYAVSLLRECVKLRPSDPTVPLMAAKVCIGSLRWLEEAEHFAMMVISLGEEAGEFLPKGYLALGLTYSLQATDATLKSKQDELHRKALQTLERAQQLAPSDPQVILYVSLQLALVRQISSAMEQLQEALKVRKDDAHALHLLALLFSAQKHHQHALDVVNMAITEHPENFNLMFTKVKLEQVLKGPEEALVTCRQVLRLWQTLYSFSQLGGLEKDGSFGEGLTMKKQSGMHLTLPDAHDADSGSRRASSIAASRLEEAMSELTMPSSVLKQGPMQLWTTLEQIWLQAAELFMEQQHLKEAGFCIQEAAGLFPTSHSVLYMRGRLAEVKGNLEEAKQLYKEALTVNPDGVRIMHSLGLMLSRLGHKSLAQKVLRDAVERQSTCHEAWQGLGEVLQAQGQNEAAVDCFLTALELEASSPVLPFSIIPREL

SEQ ID NO: 66890 - protein, 685 aa, Homo sapiens
KKKINFFKKPHSLSLRKKREEEVITCFERASWIAQVFLQELEKTTNNSTSRHLKGCHPLDYELTYFLEAALQSAYVKNLKKGNIVKGMRELREVLRTVETKATQNFKVMAAKHLAGVLLHSLSEECYWSPLSHPLPEFMGKEESSFATQALRKPHLYEGDNLYCPKDNIEEALLLLLISESMATRDVVLSRVPEQEEDRTVSLQNAAAIYDLLSITLGRRGQYVMLSECLERAMKFAFGEFHLWYQVALSMVACGKSAYAVSLLRECVKLRPSDPTVPLMAAKVCIGSLRWLEEAEHFAMMVISLGEEAGEFLPKGYLALGLTYSLQATDATLKSKQDELHRKALQTLERAQQLAPSDPQVILYVSLQLALVRQISSAMEQLQEALKVRKDDAHALHLLALLFSAQKHHQHALDVVNMAITEHPENFNLMFTKVKLEQVLKGPEEALVTCRQVLRLWQTLYSFSQLGGLEKDGSFGEGLTMKKQSGMHLTLPDAHDADSGSRRASSIAASRLEEAMSELTMPSSVLKQGPMQLWTTLEQIWLQAAELFMEQQHLKEAGFCIQEAAGLFPTSHSVLYMRGRLAEVKGNLEEAKQLYKEALTVNPDGVRIMHSLGLMLSRLGHKSLAQKVLRDAVERQSTCHEAWQGLGEVLQAQGQNEAAVDCFLTALELEASSPVLPFSIIPREL

SEQ ID NO: 66891 - protein, 146 aa, Homo sapiens
MAAKGAHGSYLKVESELERCRAEGHWDRMPELVRQLQTLSMPGGGGNRRGSPSAAFTFPDTDDFGKLLLAEALLEQCLKENHAKIKDSMPLLEKNEPKMSEAKNYLSSILNHGRLSGLAVLLRLVSNSWAQAILLLQPPEALGLQE

SEQ ID NO: 66892 - protein, 531 aa, Homo sapiens
MSSEMEPLLLAWSYFRRRKFQLCADLCTQMLEKSPYDQAAWILKARALTEMVYIDEIDVDQEGIAEMMLDENAIAQVPRPGTSLKLPGTNQTGGPSQAVRPITQAGRPITGFLRPSTQSGRPGTMEQAIRTPRTAYTARPITSSSGRFVRLGTASMLTSPDGPFINLSRLNLTKYSQKPKLAKALFEYIFHHENDVKTIHLEDVVLHLGIYPFLLRNKNHIEKNALDLAALSTEHSQYKDWWWKVQIGKCYYRLGMYREAEKQFKSALKQQEMVDTFLYLAKVYVSLDQPVTALNLFKQGLDKFPGEVTLLCGIARIYEEMNNMSSAAEYYKEVLKQDNTHVEAIACIGSNHFYSDQPEIALRFYRRLLQMGIYNGQLFNNLGLCCFYAQQYDMTLTSFERALSLAENEEEAADVWYNLGHVAVGIGDTNLAHQCFRLALVNNNNHAEAYNNLAVLEMRKGHVEQARALLQTASSLAPHMYEPHFNFATISDKIGDLQRSYVAAQKSEAAFPDHVDTQHLIKQLRQHFAML

SEQ ID NO: 66893 - protein, 211 aa, Homo sapiens
MSSEMEPLLLAWSYFRRRKFQLCADLCTQMLEKSPYDQKISWAWWHVPVIPATWEAEAGELLEPRKRRLQQAEITPLYSSLGNKSKTPSQKAAWILKARALTEMVYIDEIDVDQEGIAEMMLDENAIAQVPRPGTSLKLPGTNQTGGPSQAANHTSWKTHYRFPQAQHAEWKARHYGTGYQNTQNRLHSPPYHQLLRKICQAGNGFHAYKS

SEQ ID NO: 66894 - protein, 505 aa, Homo sapiens
MSSEMEPLLLAWSYFRRRKFQLCADLCTQMLEKSPYDQAAWILKARALTEMVYIDEIDVDQEGIAEMMLDENAIAQVPRPGTSLKLPGTNQTGGPSQAVRPITQAGRPITGFLRPSTQSGRPGTMEQAIRTPRTAYTARPITSSSGRFVRLGTASMLTSPDGPFINLSRLNLTKYSQKPKLAKALFEYIFHHENDVKTALDLAALSTEHSQYKDWWWKVQIGKCYYRLGMYREAEKQFKSALKQQEMVDTFLYLAKVYVSLDQPVTALNLFKQGLDKFPGEVTLLCGIARIYEEMNNMSSAAEYYKEVLKQDNTHVEAIACIGSNHFYSDQPEIALRFYRRLLQMGIYNGQLFNNLGLCCFYAQQYDMTLTSFERALSLAENEEEAADVWYNLGHVAVGIGDTNLAHQCFRLALVNNNNHAEAYNNLAVLEMRKGHVEQARALLQTASSLAPHMYEPHFNFATISDKIGDLQRSYVAAQKSEAAFPDHVDTQHLIKQLRQHFAML

SEQ ID NO: 66895 - protein, 475 aa, Homo sapiens
MSSEMEPLLLAWSYFRRRKFQLCADLCTQMLEKSPYDQAAWILKARALTEMVYIDEIDVDQEGIAEMMLDENAIAQVPRPGTSLKLPGTNQTGGPSQAVRPITQAGRPITGFLRPSTQSGRPGTMEQAIRTPRTAYTARPITSSSGRFVRLGTALFEYIFHHENDVKTALDLAALSTEHSQYKDWWWKVQIGKCYYRLGMYREAEKQFKSALKQQEMVDTFLYLAKVYVSLDQPVTALNLFKQGLDKFPGEVTLLCGIARIYEEMNNMSSAAEYYKEVLKQDNTHVEAIACIGSNHFYSDQPEIALRFYRRLLQMGIYNGQLFNNLGLCCFYAQQYDMTLTSFERALSLAENEEEAADVWYNLGHVAVGIGDTNLAHQCFRLALVNNNNHAEAYNNLAVLEMRKGHVEQARALLQTASSLAPHMYEPHFNFATISDKIGDLQRSYVAAQKSEAAFPDHVDTQHLIKQLRQHFAML

SEQ ID NO: 66896 - protein, 250 aa, Homo sapiens
MSSEMEPLLLAWSYFRRRKFQLCADLCTQMLEKSPYDQEMNNMSSAAEYYKEVLKQDNTHVEAIACIGSNHFYSDQPEIALRFYRRLLQMGIYNGQLFNNLGLCCFYAQQYDMTLTSFERALSLAENEEEAADVWYNLGHVAVGIGDTNLAHQCFRLALVNNNNHAEAYNNLAVLEMRKGHVEQARALLQTASSLAPHMYEPHFNFATISDKIGDLQRSYVAAQKSEAAFPDHVDTQHLIKQLRQHFAML

SEQ ID NO: 66897 - protein, 317 aa, Homo sapiens
MILSYEVILHALDLAALSTEHSQYKDWWWKVQIGKCYYRLGMYREAEKQFKSALKQQEMVDTFLYLAKVYVSLDQPVTALNLFKQGLDKFPGEVTLLCGIARIYEEMNNMSSAAEYYKEVLKQDNTHVEAIACIGSNHFYSDQPEIALRFYRRLLQMGIYNGQLFNNLGLCCFYAQQYDMTLTSFERALSLAENEEEAADVWYNLGHVAVGIGDTNLAHQCFRLALVNNNNHAEAYNNLAVLEMRKGHVEQARALLQTASSLAPHMYEPHFNFATISDKIGDLQRSYVAAQKSEAAFPDHVDTQHLIKQLRQHFAML

SEQ ID NO: 66898 - protein, 515 aa, Homo sapiens
MSSEMEPLLLAWSYFRRRKFQLCADLCTQMLEKSPYDQEPDPELPVHQAAWILKARALTEMVYIDEIDVDQEGIAEMMLDENAIAQVPRPGTSLKLPGTNQTGGPSQAVRPITQAGRPITGFLRPSTQSGRPGTMEQAIRTPRTAYTARPITSSSGRFVRLGTASMLTSPDGPFINLSRLNLTKYSQKPKLAKALFEYIFHHENDVKTALDLAALSTEHSQYKDWWWKVQIGKCYYRLGMYREAEKQFKSALKQQEMVDTFLYLAKVYVSLDQPVTALNLFKQGLDKFPGEVTLLCGIARIYEEMNNMSSAAEYYKEVLKQDNTHVEAIACIGSNHFYSDQPEIALRFYRRLLQMGIYNGQLFNNLGLCCFYAQQYDMTLTSFERALSLAENEEEAADVWYNLGHVAVGIGDTNLAHQCFRLALVNNNNHAEAYNNLAVLEMRKGHVEQARALLQTASSLAPHMYEPHFNFATISDKIGDLQRSYVAAQKSEAAFPDHVDTQHLIKQLRQHFAML

SEQ ID NO: 66899 - protein, 276 aa, Homo sapiens
MYREAEKQFKSALKQQEMVDTFLYLAKVYVSLDQPVTALNLFKQGLDKFPGEVTLLCGIARIYEEMNNMSSAAEYYKEVLKQDNTHVEAIACIGSNHFYSDQPEIALRFYRRLLQMGIYNGQLFNNLGLCCFYAQQYDMTLTSFERALSLAENEEEAADVWYNLGHVAVGIGDTNLAHQCFRLALVNNNNHAEAYNNLAVLEMRKGHVEQARALLQTASSLAPHMYEPHFNFATISDKIGDLQRSYVAAQKSEAAFPDHVDTQHLIKQLRQHFAML

SEQ ID NO: 66900 - protein, 115 aa, Homo sapiens
MSSPSSPFREQSFLCAAGDAGEESRVQVLKNEVRRGSPVLLGWVEQAYADKCVCGPSAPPAPTPPSLSQRVMCNDLFKVNPFQLQQFRADPSTASLLLCPGGLDHKLNLRGKAWG

SEQ ID NO: 66901 - protein, 115 aa, Homo sapiens; identical to SEQ ID NO: 66900

SEQ ID NO: 66902 - protein, 504 aa, Homo sapiens
MAAQRRSLLQSEQQPSWTDDLPLCHLSGVGSASNRSYSADGKGTESHPPEDSWLKFRSENNCFLYGVFNGYDGNRVTNFVAQRLSAELLLGQLNAEHAEADVRRVLLQAFDVVERSFLESIDDALAEKASLQSQLPEGVPQHQLPPQYQKILERLKTLEREISGGAMAVVAVLLNNKLYVANVGTNRALLCKSTVDGLQVTQLNVDHTTENEDELFRLSQLGLDAGKIKQVGIICGQESTRRIGDYKVKYGYTDIDLLSAAKSKPIIAEPEIHGAQPLDGVTGFLVLMSEGLYKALEAAHGPGQANQEIAAMIDTEFAKQTSLDAVAQAVVDRVKRIHSDTFASGGERARFCPRHEDMTLLVRNFGYPLGEMSQPTPSPAPAAGGRVYPVSVPYSSAQSTSKTSVTLSLVMPSQGQMVNGAHSASTLDEATPTLTNQSPTLTLQSTNTHTQSSSSSSDGGLFRSRPAHSLPPGEDGRVEPYVDFAEFYRLWSVDHGEQSVVTAP

SEQ ID NO: 66903 - protein, 462 aa, Homo sapiens
MAAQRRSLLQSEQQPSWTDDLPLCHLSGVGSASNRSYSADGKGTESHPPEDSWLKFRSENNCFLYGVFNGYDGNRVTNFVAQRLSAELLLGQLNAEHAEADVRRVLLQAFDVVERSFLESIDDALAEKASLQSQLPEGVPQHQLPPQYQKILERLKTLEREISGGAMAVVAVLLNNKLYVANVGTNRALLCKSTVDGLQVTQLNVDHTTENEDELFRLSQLGLDAGKIKQVGIICGQESTRRIGDYKVKYGYTDIDLLSAAKSKPIIAEPEIHGAQPLDGVTGFLVLMSEGLYKALEAAHGPGQANQEIAAMIDTEFAKQTSLDAVAQAVVDRVKRIHSDTFASGGERARFCPRHEDMTLLVRNFGYPLGEMSQPTPSPAPAAGGRVYPVSVPYSSAQSTSKTSVTLSLVMPSQGQMVNGAHSASTLDEATPTLTKDPSRPASDLTAIPQCQLNLLGSLTPG

SEQ ID NO: 66904 - protein, 693 aa, Homo sapiens
MAQGSHQIDFQVLHDLRQKFPEVPEVVVSRCMLQNNNNLDACCAVLSQESTRYLYGEGDLNFSDDSGISGLRNHMTSLNLDLQSQNIYHHGREGSRMNGSRTLTHSISDGQLQGGQSNSELFQQEPQTAPAQVPQGFNVFGMSSSSGASNSAPHLGFHLGSKGTSSLSQQTPRFNPIMVTLAPNIQTGRNTPTSLHIHGVPPPVLNSPQGNSIYIRPYITTPGGTTRQTQQHSGWVSQFNPMNPQQVYQPSQPGPWTTCPASNPLSHTSSQQPNQQGHQTSHVYMPISSPTTSQPPTIHSSGSSQSSAHSQYNIQNISTGPRKNQIEIKLEPPQRNNSSKLRSSGPRTSSTSSSVNSQTLNRNQPTVYIAASPPNTDELMSRSQPKVYISANAATGDEQVMRNQPTLFISTNSGASAASRNMSGQVSMGPAFIHHHPPKSRAIGNNSATSPRVVVTQPNTKYTFKITVSPNKPPAVSPGVVSPTFELTNLLNHPDHYVETENIQHLTDPTLAHVDRISETRKLSMGSDDAAYTQALLVHQKARMERLQRELEIQKKKLDKLKSEVNEMENNLTRRRLKRSNSISQIPSLEEMQQLRSCNRQLQIDIDCLTKEIDLFQARGPHFNPSAIHNFYDNIGFVGPVPPKPKDQRSIIKTPKTQDTEDDEGAQWNCTACTFLNHPALIRCEQCEMPRHF

SEQ ID NO: 66905 - protein, 693 aa, Homo sapiens; identical to SEQ ID NO: 66904

SEQ ID NO: 66906 - protein, 536 aa, Homo sapiens
MAQGSHQIDFQVLHDLRQKFPEVPEVVVSRCMLQNNNNLDACCAVLSQESTRYLYGEGDLNFSDDSGISGLRNHMTSLNLDLQSQNIYHHGREGSRMNGSRTLTHSISDGQLQGGQSNSELFQQEPQTAPAQVPQGFNVFGMSSSSGASNSAPHLGFHLGSKGTSSLSQQTPRFNPIMVTLAPNIQTGRNTPTSLHIHGVPPPVLNSPQGNSIYIRPYITTPGGTTRQTQQHSGWVSQFNPMNPQQVYQPSQPGPWTTCPASNPLSHTSSQQPNQQGHQTSHVYMPISSPTTSQPPTIHSSGSSQSSAHSQYNIQNISTGPRKNQIEIKLEPPQRNNSSKLRSSGPRTSSTSSSVNSQTLNRNQPTVYIAASPPNTDELMSRSQPKVYISANAATGDEQVMRNQPTLFISTNSGASAASRNMSGQVSMGPAFIHHHPPKSRAIGNNSATSPRVVVTQPNTKYTFKITVSPNKPPAVSPGVVSPTFELTNLLNHPDHYVETENIQHLTDPTLAHVDRISETRKLSMGSDDAAYTQDI

SEQ ID NO: 66907 - protein, 661 aa, Homo sapiens
MQNNNNLDACCAVLSQESTRYLYGEGDLNFSDDSGISGLRNHMTSLNLDLQSQNIYHHGREGSRMNGSRTLTHSISDGQLQGGQSNSELFQQEPQTAPAQVPQGFNVFGMSSSSGASNSAPHLGFHLGSKGTSSLSQQTPRFNPIMVTLAPNIQTGRNTPTSLHIHGVPPPVLNSPQGNSIYIRPYITTPGGTTRQTQQHSGWVSQFNPMNPQQVYQPSQPGPWTTCPASNPLSHTSSQQPNQQGHQTSHVYMPISSPTTSQPPTIHSSGSSQSSAHSQYNIQNISTGPRKNQIEIKLEPPQRNNSSKLRSSGPRTSSTSSSVNSQTLNRNQPTVYIAASPPNTDELMSRSQPKVYISANAATGDEQVMRNQPTLFISTNSGASAASRNMSGQVSMGPAFIHHHPPKSRAIGNNSATSPRVVVTQPNTKYTFKITVSPNKPPAVSPGVVSPTFELTNLLNHPDHYVETENIQHLTDPTLAHVDRISETRKLSMGSDDAAYTQALLVHQKARMERLQRELEIQKKKLDKLKSEVNEMENNLTRRRLKRSNSISQIPSLEEMQQLRSCNRQLQIDIDCLTKEIDLFQARGPHFNPSAIHNFYDNIGFVGPVPPKPKDQRSIIKTPKTQDTEDDEGAQWNCTACTFLNHPALIRCEQCEMPRHF

SEQ ID NO: 66908 - protein, 693 aa, Homo sapiens; identical to SEQ ID NO: 66904

SEQ ID NO: 66909 - protein, 237 aa, Homo sapiens
MSDSDLGEDEGLLSLAGKRKRRGNLPKESVKILRDWLYLHRYNAYPSEQEKLSLSGQTNLSVLQICNWFINARRRLLPDMLRKDGKDPNQFTISRRGGKASDVALPRGSSPSVLAVSVPAPTNVLSLSVCSMPLHSGQGEKPAAPFPRGELESPKPLVTPGSTLTLLTRAEAGSPTGGLFNTPPPTPPEQDKEDFSSFQLLVEVALQRAAEMELQKQQDPSLPLLHTPIPLVSENPQ

SEQ ID NO: 66910 - protein, 237 aa, Homo sapiens; identical to SEQ ID NO: 66909

SEQ ID NO: 66911 - protein, 174 aa, Homo sapiens
MSDSDLGEDEGLLSLAGKRKRRGNLPKESVKILRDWLYLHRYNAYPSEQEKLSLSGQTNLSVLQICNWFINARRRLLPDMLRKDGKDPNQFTISRRGGKASDVALPRGSSPSVLAVSVPAPTNVLSLSVCSMPLHSGQGEKPAAPFPRGELESPKPLVTPGSTLTLLTRAEAGS

SEQ ID NO: 66912 - protein, 237 aa, Homo sapiens; identical to SEQ ID NO: 66909

SEQ ID NO: 66913 - protein, 241 aa, Homo sapiens
MEAAADGPAETQSPVEKDSPAKTQSPAQDTSIMSRNNADTGRVLALPEHKKKRKGNLPAESVKILRDWMYKHRFKAYPSEEEKQMLSEKTNLSLLQISNWFINARRRILPDMLQQRRNDPIIGHKTGKDAHATHLQSTEASVPAKSGPSGPDNVQSLPLWPLPKGQMSREKQPDPESAPSQKLTGIAQPKKKVKVSVTSPSSPELVSPEEHADFSSFLLLVDAAVQRAAELELEKKQEPNP

SEQ ID NO: 66914 - protein, 241 aa, Homo sapiens; identical to SEQ ID NO: 66913

SEQ ID NO: 66915 - protein, 185 aa, Homo sapiens
MEAAADGPAETQSPVEKDSPAKTQSPAQDTSIMSRNNADTGRVLALPEHKKKRKGNLPAESVKILRDWMYKHRFKAYPSEEEKQMLSEKTNLSLLRISNWFINARRRILPDMLQQRRNDPIIGHKTGKDAHATHLQSTEASVPAKSGPVVQTMYKACPCGPCQRARCQERSNQIRSRPLARSSPE

SEQ ID NO: 66916 - protein, 185 aa, Homo sapiens; identical to SEQ ID NO: 66915

SEQ ID NO: 66917 - protein, 590 aa, Homo sapiens
MAGAVPGAIMDEDYYGSAAEWGDEADGGQQEDDSGEGEDDAEVQQECLHKFSTRDYIMEPSIFNTLKRYFQAGGSPENVIQLLSENYTAVAQTVNLLAEWLIQTGVEPVQVQETVENHLKSLLIKHFDPRKADSIFTEEGETPAWLEQMIAHTTWRDLFYKLAEAHPDCLMLNFTVKLISDAGYQGEITSVSTACQQLEVFSRVLRTSLATILDGGEENLEKNLPEFAKMVCHGEHTYLFAQAMMSVLAQEEQGGSAVRRIAQEVQRFAQEKGHDASQITLALGTAASYPRACQALGAMLSKGALNPADITVLFKMFTSMDPPPVELIRVPAFLDLFMQSLFKPGARINQDHKHKYIHILAYAASVVETWKKNKRVSINKDELKSTSKAVETVHNLCCNENKGASELVAELSTLYQCIRFPVVAMGVLKWVDWTVSEPRYFQLQTDHTPVHLALLDEISTCHQLLHPQVLQLLVKLFETEHSQLDVMEQLELKKTLLDRMVHLLSRGYVLPVVSYIRKCLEKLDTDISLIRYFVTEVLDVIAPPYTSDFVQLFLPILENDSIAGTIKTEGEHDPVTEFIAHCKSNFIMVN

SEQ ID NO: 66918 - protein, 590 aa, Homo sapiens; identical to SEQ ID NO: 66917

SEQ ID NO: 66919 - protein, 257 aa, Homo sapiens
MPARCVAAHCGNTTKSGKSLFRFPKDRAVRLLWDRFVRGCRADWYGGNDRSVICSDHFAPACFDVSSVIQKNLRFSQRLRLVAGAVPTLHRVPAPAPKRGEEGDQAGRLDTRGELQAARHSEAAPGPVSCTRPRAGKQAAASQITCENELVQTQPHADNPSNTVTSVPTHCEEGPVHKSTQISLKRPRHRSVGIQAKVKAFGKRLCNATTQTEELWSRTSSLFDIYSSDSETDTDWDIKSEQSDLSYMAVQVKEETC

SEQ ID NO: 66920 - protein, 165 aa, Homo sapiens
MEPPKMNPVVEPLSWMLGTWLSDPPGAGTYPTLQPFQYLEEVHISHVGQPMLNFSFNSFHPDTRKPMHRECGFIRLKPDTNKVAFVSAQNTGVVEVEEGEVNGQELCIASHSIARISFAKEPHVEQITRKFRLNSEGKLEQTVSMATTTQPMTQHLHVTYKKVTP

SEQ ID NO: 66921 - protein, 577 aa, Homo sapiens
MVICCAAVNCSNRQGKGEKRAVSFHRFPLKDSKRLIQWLKAVQRDNWTPTKYSFLCSEHFTKDSFSKRLEDQHRLLKPTAVPSIFHLTEKKRGAGGHGRTRRKDASKATGGVRGHSSAATSRGAAGWSPSSSGNPMAKPESRRLKQAALQGEATPRAAQEAASQEQAQQALERTPGDGLATMVAGSQGKAEASATDAGDESATSSIEGGVTDKSGISMDDFTPPGSGACKFIGSLHSYSFSSKHTRERPSVPREPIDRKRLKKDVEPSCSGSSLGPDKGLAQSPPSSSLTATPQKPSQSPSAPPADVTPKPATEAVQSEHSDASPMSINEVILSASGACKLIDSLHSYCFSSRQNKSQVCCLREQVEKKNGELKSLRQRVSRSDSQVRKLQEKLDELRRVSVPYPSSLLSPSREPPKMNPVVEPLSWMLGTWLSDPPGAGTYPTLQPFQYLEEVHISHVGQPMLNFSFNSFHPDTRKPMHRECGFIRLKPDTNKVAFVSAQNTGVVEVEEGEVNGQELCIASHSIARISFAKEPHVEQITRKFRLNSEGKLEQTVSMATTTQPMTQHLHVTYKKVTP

SEQ ID NO: 66922 - protein, 169 aa, Homo sapiens [sequence omitted]

SEQ ID NO: 66923 - protein, 353 aa, Homo sapiens
MKRDSWVPSKYQFLCSDHFTPDSLDIRWGIRYLKQTAVPTIFSLPEDNQGKDPSKKKSQKKNLEDEKEVCPKAKSEESFVLNETKKNIVNTDVPHQHPELLHSSSLVKPPAPKTGSIQNNMLTLNLVKQHTGKPESTLETSVNQDTGRGGFHTCFENLNSTTITLTTSNSESIHQSLETQEVLEVTTSHLANPNFTSNSMEIKSAQENPFLFSTINQTVEELNTNKESVIAIFVPAENSKPSVNSFISAQKETTEMEDTDIEDSLYKDVDYGTEVLQIEHSYCRQDINKEHLWQKVSKLHSKITLLELKEQQTLGRLKSLEALIRQLKQENWLSEENVKIIENHFTTYEVTMI

SEQ ID NO: 66924 - protein, 395 aa, Homo sapiens
MPRYCAAICCKNRRGRNNKDRKLSFYPFPLHDKERLEKWLKNMKRDSWVPSKYQFLCSDHFTPDSLDIRWGIRYLKQTAVPTIFSLPEDNQGKDPSKKKSQKKNLEDEKEVCPKAKSEESFVLNETKKNIVNTDVPHQHPELLHSSSLVKPPAPKTGSIQNNMLTLNLVKQHTGKPESTLETSVNQDTGRGGFHTCFENLNSTTITLTTSNSESIHQSLETQEVLEVTTSHLANPNFTSNSMEIKSAQENPFLFSTINQTVEELNTNKESVIAIFVPAENSKPSVNSFISAQKETTEMEDTDIEDSLYKDVDYGTEVLQIEHSYCRQDINKEHLWQKVSKLHSKITLLELKEQQTLGRLKSLEALIRQLKQENWLSEENVKIIENHFTTYEVTMI

SEQ ID NO: 66925 - protein, 222 aa, Homo sapiens
MVKCCSAIGCASRCLPNSKLKGLTFHVFPTDENIKRKWVLAMKRLDVNAAGIWEPKKGDVLCSRHFKKTDFDRSAPNIKLKPGVIPSIFDSPYHLQGKREKLHCRKNFTLKTVPATNYNHHLVGASSCIEEFQSQFIFEHSYSVMDSPKKLKHKLDHVIGELEDTKESLRNVLDREKRFQKSLRKTIRELKDECLISQETANRLDTFCWDCCQESIEQDYIS

SEQ ID NO: 66926 - protein, 32 aa, Homo sapiens
MVKCCSAIGCASRCLPNSKLKGLTFHVFPTDE

SEQ ID NO: 66927 - protein, 80 aa, Homo sapiens
MVKCCSAIGCASRCLPNSKLKGLTFHVFPTDENIKRKWVLAMKRLDVNAAGIWEPKKGDVLCSRHFKKTDFDRSAPNIKL

SEQ ID NO: 66928 - protein, 222 aa, Homo sapiens; identical to SEQ ID NO: 66925

SEQ ID NO: 66929 - protein, 274 aa, Homo sapiens
MPKYCRAPNCSNTAGRLGADNRPVSFYKFPLKDGPRLQAWLQHMGCEHWVPSCHQHLCSEHFTPSCFQWRWGVRYLRPDAVPSIFSRGPPAKSQRRTRSTQKPVSPPPPLQKNTPLPQSPAIPVSGPVRLVVLGPTSGSPKTVATMLLTPLAPAPTPERSQPEVPAQQAQTGLGPVLGALQRRVRRLQRCQERHQAQLQALERLAQQLHGESLLARARRGLQRLTTAQTLGPEESQTFTIICGGPDIAMVLAQDPAPATVDAKPELLDTRIPSA

SEQ ID NO: 66930 - protein, 274 aa, Homo sapiens; identical to SEQ ID NO: 66929

SEQ ID NO: 66931 - protein, 129 aa, Homo sapiens
MLLTPLAPAPTPERSQPEVPAQQAQTGLGPVLGALQRRVRRLQRCQERHQAQLQALERLAQQLHGESLLARARRGLQRLTTAQTLGPEESQTFTIICGGPDIAMVLAQDPAPATVDAKPELLDTRIPSA

SEQ ID NO: 66932 - protein, 903 aa, Homo sapiens
MTRSCSAVGCSTRDTVLSRERGLSFHQFPTDTIQRSKWIRAVNRVDPRSKKIWIPGPGAILCSKHFQESDFESYGIRRKLKKGAVPSVSLYKIPQGVHLKGKARQKILKQPLPDNSQEVATEDHNYSLKTPLTIGAEKLAEVQQMLQVSKKRLISVKNYRMIKKRKGLRLIDALVEEKLLSEETECLLRAQFSDFKWELYNWRETDEYSAEMKQFACTLYLCSSKVYDYVRKILKLPHSSILRTWLSKCQPSPGFNSNIFSFLQRRVENGDQLYQYCSLLIKSMPLKQQLQWDPSSHSLQGFMDFGLGKLDADETPLASETVLLMAVGIFGHWRTPLGYFFVNRASGYLQAQLLRLTIGKLSDIGITVLAVTSDATAHSVQMAKALGIHIDGDDMKCTFQHPSSSSQQIAYFFDSCHLLRLIRNAFQNFQSIQFINGIAHWQHLVELVALEEQELSNMERIPSTLANLKNHVLKVNSATQLFSESVASALEYLLSLDLPPFQNCIGTIHFLRLINNLFDIFNSRNCYGKGLKGPLLPETYSKINHVLIEAKTIFVTLSDTSNNQIIKGKQKLGFLGFLLNAESLKWLYQNYVFPKVMPFPYLLTYKFSHDHLELFLKMLRQVLVTSSSPTCMAFQKAYYNLETRYKFQDEVFLSKVSIFDISIARRKDLALWTVQRQYGVSVTKTVFHEEGICQDWSHCSLSEALLDLSDHRRNLICYAGYVANKLSALLTCEDCITALYASDLKASKIGSLLFVKKKNGLHFPSESLCRVINICERVVRTHSRMAIFELVSKQRELYLQQKILCELSGHINLFVDVNKHLFDGEVCAINHFVKLLKDIIICFLNIRAKNVAQNPLKHHSERTDMKTLSRKHWSSVQDYKCSSFANTSSKFRHLLSNDGYPFK

SEQ ID NO: 66933 - protein, 903 aa, Homo sapiens; identical to SEQ ID NO: 66932

SEQ ID NO: 66934 - protein, 213 aa, Homo sapiens
MVQSCSAYGCKNRYDKDKPVSFHKFPLTRPSLCKEWEAAVRRKNFKPTKYSSICSEHFTPDCFKRECNNKLLKENAVPTIFLCTEPHDKKEDLLEPQEQLPPPPLPPPVSQVDAAIGLLMPPLQTPVNLSVFCDHNYTVEDTMHQRKRIHQLEQQVEKLRKKLKTAQQRCRRQERQLEKLKEVVHFQKEKDDVSERGYVILPNDYFEIVEVPA

SEQ ID NO: 66935 - protein, 53 aa, Homo sapiens
MVQSCSAYGCKNRYDKDKPVSFHKKKIFWSHRNSFPHLLYRLLFPRLMLLLDY

SEQ ID NO: 66936 - protein, 228 aa, Homo sapiens
MPTNCAAAGCATTYNKHINISFHRFPLDPKRRKEWVRLVRRKNFVPGKHTFLCSKHFEASCFDLTGQTRRLKMDAVPTIFDFCTHIKSMKLKSRNLLKKNNSCSPAGPSNLKSNISSQQVLLEHSYAFRNPMEAKKRIIKLEKEIASLRRKMKTCLQKERRATRRWIKATCLVKNLEANSVLPKGTSEHMLPTALSSLPLEDFKILEQDQQDKTLLSLNLKQTKSTFI

SEQ ID NO: 66937 - protein, 239 aa, Homo sapiens
MPKSCAARQCCNRYSSRRKQLTFHRFPFSRPELLKEWVLNIGRGNFKPKQHTVICSEHFRPECFSAFGNRKNLKHNAVPTVFAFQDPTQQVRENTDPASERGNASSSQKEKVLPEAGAGEDSPGRNMDTALEELQLPPNAEGHVKQVSPRRPQATEAVGRPTGPAGLRRTPNKQPSDHSYALLDLDSLKKKLFLTLKENEKLRKRLQAQRLVMRRMSSRLRACKGHQGLQARLGPEQQS

SEQ ID NO: 66938 - protein, 238 aa, Homo sapiens
MPKSCAARQCCNRYSSRRKQLTFHRFPFSRPELLKEWVLNIGRGNFKPKQHTVICSEHFRPECFSAFGNRKNLKHNAVPTVFAFQDPTQVRENTDPASERGNASSSQKEKVLPEAGAGEDSPGRNMDTALEELQLPPNAEGHVKQVSPRRPQATEAVGRPTGPAGLRRTPNKQPSDHSYALLDLDSLKKKLFLTLKENEKLRKRLQAQRLVMRRMSSRLRACKGHQGLQARLGPEQQS

SEQ ID NO: 66939 - protein, 175 aa, Homo sapiens
MPKSCAARQCCNRYSSRRKQLTFHRFPFSRPELLKEWVLNIGRGNFKPKQHTVICSEHFRPECFSAFGNRKNLKHNAVPTVFAFQDPTQQVRENTDPASERGNASSSQKEKTSPCRSQVLPEAGAGEDSPGRNMDTALEELQLPPNAEGHVKQAMLFNVENGTPASREALWLSEE

SEQ ID NO: 66940 - protein, 243 aa, Homo sapiens [sequence omitted]

SEQ ID NO: 66941 - protein, 194 aa, Homo sapiens
MEHAFTPLEPLLSTGNLKYCLVILNQPLDNYFRHLWNKALLRACADGGANRLYDITEGERESFLPEFINGDFDSIRPEVREYYATKGCELISTPDQDHTDFTKCLKMLQKKIEEKDLKGKHRLHVDTGMEGDWCGLIPVGQPCMQVTTTGLKWNLTNDVLAFGTLVSTSNTYDGSGVVTVETDHPLLWTMAIKS

SEQ ID NO: 66942 - protein, 124 aa, Homo sapiens
MVDVIVTLGGLAGRFDQIMASVNTLFQATHITPFPIIIIQEESLIYLLQPGKHRLHVDTGMEGDWCGLIPVGQPCMQVTTTGLKWNLRTCDYTRTTWIAKDNPVPRLIRLIRLNHICKVPLAIK

SEQ ID NO: 66943 - protein, 167 aa, Homo sapiens
MEHAFTPLEPLLSTGNLKYCLVILNQPLDNYFRHLWNKALLRACADGGANRLYDITEGERESFLPEFINGDFDSIRPEVREYYATKGCELISTPDQDHTDFTKCLKMLQKKIEEKDLKVDVIVTLGGLAGRFDQIMASVNTLFQATHITPFPIIIIQEESLIYLLQP

SEQ ID NO: 66944 - protein, 230 aa, Homo sapiens
MAQGLIEVERKFLPGPGTEERLQELGGTLEYRVTFRDTYYDTPELSLMQADHWLRRREDSGWELKCPGAAGVLGPHTEYKELTAEPTIVAQLCKVLRADGLGAGDVAAVLGPLGLQEVASFVTKRSAWKLVLLGADEEEPQLRVDLDTADFGYAVGEVEALVHEEAEVPTALEKIHRLSSMLGVPAQETAPAKLIVYLQRFRPQDYQRLLEVNSSRERPQETEDPDHCLG

SEQ ID NO: 66945 - protein, 230 aa, Homo sapiens; identical to SEQ ID NO: 66944

SEQ ID NO: 66946 - protein, 123 aa, Homo sapiens
MAQGLIEVERKFLPGPGTEERLQELGGTLEYRVTFRDTYYDTPELSLMQADHWLRRREDSGWELKCPGAAGVLGPHTEYKELTAEPTIVAQLCKVLRADGLGAGDVAAVLGPLGLQEVASFVT

SEQ ID NO: 66947 - protein, 689 aa, Homo sapiens
MKPPAACAGDMADAASPCSVVNDLRWDLSAQQIEERTRELIEQTKRVYDQVGTQEFEDVSYESTLKALADVEVTYTVQRNILDFPQHVSPSKDIRTASTEADKKLSEFDVEMSMREDVYQRIVWLQEKVQKDSLRPEAARYLERLIKLGRRNGLHLPRETQENIKRIKKKLSLLCIDFNKNLNEDTTFLPFTLQELGGLPEDFLNSLEKMEDGKLKVTLKYPHYFPLLKKCHVPETRRKVEEAFNCRCKEENCAILKELVTLRAQKSRLLGFHTHADYVLEMNMAKTSQTVATFLDELAQKLKPLGEQERAVILELKRAECERRGLPFDGRIRAWDMRYYMNQVEETRYCVDQNLLKEYFPVQVVTHGLLGIYQELLGLAFHHEEGASAWHEDVRLYTARDAASGEVVGKFYLDLYPREGKYGHAACFGLQPGCLRQDGSRQIAIAAMVANFTKPTADAPSLLQHDEVETYFHEFGHVMHQLCSQAEFAMFSGTHVERDFVEAPSQMLENWVWEQEPLLRMSRHYRTGSAVPRELLEKLIESRQANTGLFNLRQIVLAKVDQALHTQTDADPAEEYARLCQEILGVPATPGTNMPATFGHLAGGYDAQYYGYLWSEVYSMDMFHTRFKQEGVLNSKVGMDYRSCILRPGGSEDASAMLRRFLGRDPKQDAFLLSKGLQVGGCEPEPQVC

SEQ ID NO: 66948 - protein, 258 aa, Homo sapiens
MFSGTHVERDFVEAPSQMLENWVWEQEPLLRMSRHYRTGSAVPRELLEKLIESRQANTGLFNLRQIVLAKVDQALHTQTDADPAEEYARLCQEILGVPATPGTNMPATFGHLAGGYDAQYYGYLWSEVYSMDMFHTRFKQEGVLNSKFPHYEVRPLRHVSLCLPLTWCDPGSGQPPESLTRNRWLPALRAGPALPGCNIALGSLQVGMDYRSCILRPGGSEDASAMLRRFLGRDPKQDAFLLSKGLQVGGCEPEPQVC

SEQ ID NO: 66949 - protein, 245 aa, Homo sapiens
MDGTRTSLDIEEYSDTEVQKNQVLTLEEWQDKWVNGKTAFHQEQGHQLLKKHLDTFLKGKSGLRVFFPLCGKAVEMKWFADRGHSVVGVEISELGIQEFFTEQNLSYSEEPITEIPGTKVFKSSSGNISLYCCSIFDLPRTNIGKFDMIWDRGALVAINPGDRKCYADTMFSLLGKKFQYLLCVLSYDPTKHPGPPFYVPHAEIERLFGKICNIRCLEKVDAFEERHKSWGIDCLFEKLYLLTEK

SEQ ID NO: 66950 - protein, 172 aa, Homo sapiens
METRPRLGATCLLGFSFLLLVISSDGHNGLGKGFGDHIHWRTLEDGKKEAAASGLPLMVIIHKSWCGACKALKPKFAESTEISELSHNFVMVNLEDEEEPKDEDFSPDGGYIPRILFLDPSGKVHPEIINENGNPSYKYFYVSAEQVVQGMKEAQERLTGDAFRKKHLEDEL

SEQ ID NO: 66951 - protein, 588 aa, Homo sapiens
MASKKREVQLQTVINNQSLWDEMLQNKGLTVIDVYQAWCGPCRAMQPLFRKLKNELNEDEILHFAVAEADNIVTLQPFRDKCEPVFLFSVNGKIIEKIQGANAPLVNKKVINLIDEERKIAAGEMARPQYPEIPLVDSDSEVSEESPCESVQELYSIAIIKPDAVISKKVLEIKRKITKAGFIIEAEHKTVLTEEQVVNFYSRIADQCDFEEFVSFMTSGLSYILVVSQGSKHNPPSEETEPQTDTEPNERSEDQPEVEAQVTPGMMKNKQDSLQEYLERQHLAQLCDIEEDAANVAKFMDAFFPDFKKMKSMKLEKTLALLRPNLFHERKDDVLRIIKDEDFKILEQRQVVLSEKEAQALCKEYENEDYFNKLIENMTSGPSLALVLLRDNGLQYWKQLLGPRTVEEAIEYFPESLCAQFAMDSLPVNQLYGSDSLETAEREIQHFFPLQSTLGLIKPHATSEQREQILKIVKEAGFDLTQVKKMFLTPEQIEKIYPKVTGKDFYKDLLEMLSVGPSMVMILTKWNAVAEWRRLMGPTDPEEAKLLSPDSIRAQFGISKLKNIVHGASNAYEAKEVVNRLFEDPEEN

SEQ ID NO: 66952 - protein, 588 aa, Homo sapiens; identical to SEQ ID NO: 66951

SEQ ID NO: 66953 - protein, 226 aa, Homo sapiens
MEADASVDMFSKVLEHQLLQTTKLVEEHLDSEIQKLDQMDEDELERLKEKRLQALRKAQQQKQEWLSKGHGEYREIPSERDFFQEVKESENVVCHFYRDSTFRCKILDRHLAILSKKHLETKFLKLNVEKAPFLCERLHIKVIPTLALLKDGKTQDYVVGFTDLGNTDDFTTETLEWRLGSSDILNYSGNLMEPPFQNQKKFGTNFTKLEKKTIRGKKYDSDSDDD

SEQ ID NO: 66954 - protein, 135 aa, Homo sapiens
MEADASVDMFSKVLEHQLLQTTKLVEEHLDSEIQKLDQMDEDELERLKEKRLQALRKAQQQKQEWLSKGHGEYREIPSERDFFQEVKESENVVCHFYRDSTFRCKILDRHLAILSKKHLETKFLKLNVEKAPFLC

SEQ ID NO: 66955 - protein, 208 aa, Homo sapiens
MSQKSLAPRLNSVPFGRMEADASVDMFSKVLEHQLLQTTKLVEEHLDSEIQKLDQMDEDELERLKEKRLQALRKAQQQKQEWLSKGHGEYREIPSERDFFQEVKESENVVCHFYRDSTFRCKILDRHLAILSKKHLETKFLKLNVEKAPFLCERLHIKVIPTLALLKDGKTQDYVVGFTDLGNTDDFTTETLEWRLGSSDILNYRWWP

SEQ ID NO: 66956 - protein, 338 aa, Homo sapiens
MAAMAVALRGLGGRFRWRTQAVAGGVRGAARGAAAGQRDYDLLVVGGGSGGLACAKEAAQLGRKVAVVDYVEPSPQGTRWGLGGTCVNVGCIPKKLMHQAALLGGLIQDAPNYGWEVAQPVPHDWRKMAEAVQNHVKSLNWGHRVQLQDRKVKYFNIKASFVDEHTVCGVAKGGKEILLSADHIIIATGGRPRYPTHIEGALEYGITSDDIFWLKESPGKTLVVGASYVALECAGFLTGIGLDTTIMMRSIPLRGFDQQMSSMVIEHMASHGTRFLRGCAPSRVRRLPDGQLQVTWEDSTTGKEDTGTFDTVLWAIAPCISACLPTTVGHAGKNQRRD

SEQ ID NO: 66957 - protein, 494 aa, Homo sapiens
MEDQAGQRDYDLLVVGGGSGGLACAKEAAQLGRKVAVVDYVEPSPQGTRWGLGGTCVNVGCIPKKLMHQAALLGGLIQDAPNYGWEVAQPVPHDWRKMAEAVQNHVKSLNWGHRVQLQDRKVKYFNIKASFVDEHTVCGVAKGGKEILLSADHIIIATGGRPRYPTHIEGALEYGITSDDIFWLKESPGKTLVVGASYVALECAGFLTGIGLDTTIMMRSIPLRGFDQQMSSMVIEHMASHGTRFLRGCAPSRVRRLPDGQLQVTWEDSTTGKEDTGTFDTVLWAIGRVPDTRSLNLEKAGVDTSPDTQKILVDSREATSVPHIYAIGDVVEGRPELTPIAIMAGRLLVQRLFGGSSDLMDYDNVPTTVFTPLEYGCVGLSEEEAVARHGQEHVEVYHAHYKPLEFTVAGRDASQCYVKMVCLREPPQLVLGLHFLGPNAGEVTQGFALGIKCGASYAQVMRTVGIHPTCSEEVVKLRISKRSGLDPTVTGCUG

SEQ ID NO: 66958 - protein, 524 aa, Homo sapiens
MAAMAVALRGLGGRFRWRTQAVAGGVRGAARGAAAGQRDYDLLVVGGGSGGLACAKEAAQLGRKVAVVDYVEPSPQGTRWGLGGTCVNVGCIPKKLMHQAALLGGLIQDAPNYGWEVAQPVPHDWRKMAEAVQNHVKSLNWGHRVQLQDRKVKYFNIKASFVDEHTVCGVAKGGKEILLSADHIIIATGGRPRYPTHIEGALEYGITSDDIFWLKESPGKTLVVGASYVALECAGFLTGIGLDTTIMMRSIPLRGFDQQMSSMVIEHMASHGTRFLRGCAPSRVRRLPDGQLQVTWEDSTTGKEDTGTFDTVLWAIGRVPDTRSLNLEKAGVDTSPDTQKILVDSREATSVPHIYAIGDVVEGRPELTPIAIMAGRLLVQRLFGGSSDLMDYDNVPTTVFTPLEYGCVGLSEEEAVARHGQEHVEVYHAHYKPLEFTVAGRDASQCYVKMVCLREPPQLVLGLHFLGPNAGEVTQGFALGIKCGASYAQVMRTVGIHPTCSEEVVKLRISKRSGLDPTVTGCUG

SEQ ID NO: 66959 - protein, 521 aa, Homo sapiens
MAAMAVALRGLGGRFRWRTQAVAGGVRGAARGAAGQRDYDLLVVGGGSGGLACAKEAAQLGRKVAVVDYVEPSPQGTRWGLGGTCVNVGCIPKKLMHQAALLGGLIQDAPNYGWEVAQPVPHDWRKMAEAVQNHVKSLNWGHRVQLQDRKVKYFNIKASFVDEHTVCGVAKGGKEILLSADHIIIATGGRPRYPTHIEGALEYGITSDDIFWLKESPGKTLVVGASYVALECAGFLTGIGLDTTIMMRSIPLRGFDQQMSSMVIEHMASHGTRFLRGCAPSRVRRLPDGQLQVTWEDSTTGKEDTGTFDTVLWAIGRVPDTRSLNLEKAGVDTSPDTQKILVDSREATSVPHIYAIGDVVEGRPELTPIAIMAGRLLVQRLFGGSSDLMDYDNVPTTVFTPLEYGCVGLSEEEAVARHGQEHVEVYHAHYKPLEFTVAGRDASQCYVKMVCLREPPQLVLGLHFLGPNAGEVTQGFALGIKCGASYAQVMRTVGIHPTCSEEVVKLRISKRSGLDPTVTGC

SEQ ID NO: 66960 - protein, 522 aa, Homo sapiens
MAAMAVALRGLGGRFRWRTQAVAGGVRGAARGAAAGQRDYDLLVVGGGSGGLACAKEAAQLGRKVAVVDYVEPSPQGTRWGLGGTCVNVGCIPKKLMHQAALLGGLIQDAPNYGWEVAQPVPHDWRKMAEAVQNHVKSLNWGHRVQLQDRKVKYFNIKASFVDEHTVCGVAKGGKEILLSADHIIIATGGRPRYPTHIEGALEYGITSDDIFWLKESPGKTLPVSVSYVALECAGFLTGIGLDTTIMMRSIPLRGFDQQMSSMVIEHMASHGTRFLRGCAPSRVRRLPDGQLQVTWEDSTTGKEDTGTFDTVLWAIGRVPDTRSLNLEKAGVDTSPDTQKILVDSREATSVPHIYAIGDVVEGRPELTPIAIMAGRLLVQRLFGGSSDLMDYDNVPTTVFTPLEYGCVGLSEEEAVARHGQEHVEVYHAHYKPLEFTVAGRDASQCYVKMVCLREPPQLVLGLHFLGPNAGEVTQGFALGIKCGASYAQVMRTVGIHPTCSEEVVKLRISKRSGLDPTVTGC

SEQ ID NO: 66961 - protein, 426 aa, Homo sapiens
MHQAALLGGLIQDAPNYGWEVAQPVPHDWRKMAEAVQNHVKSLNWGHRVQLQDRKVKYFNIKASFVDEHTVCGVAKGGKEILLSADHIIIATGGRPRYPTHIEGALEYGITSDDIFWLKESPGKTCVVAHAYVALECAGFLTGIGLDTTIMMRSIPLRGFDQQMSSMVIEHMASHGTRFLRGCAPSRVRRLPDGQLQVTWEDSTTGKEDTGTFDTVLWAIGRVPDTRSLNLEKAGVDTSPDTQKILVDSREATSVPHIYAIGDVVEGRPELTPIAIMAGRLLVQRLFGGSSDLMDYDNVPTTVFTPLEYGCVGLSEEEAVARHGQEHVEVYHAHYKPLEFTVAGRDASQCYVKMVCLREPPQLVLGLHFLGPNAGEVTQGFALGIKCGASYAQVMRTVGIHPTCSEEVVKLRISKRSGLDPTVTGC

SEQ ID NO: 66962 - protein, 492 aa, Homo sapiens
MEDQAGQRDYDLLVVGGGSGGLACAKEAAQLGRKVAVVDYVEPSPQGTRWGLGGTCVNVGCIPKKLMHQAALLGGLIQDAPNYGWEVAQPVPHDWRKMAEAVQNHVKSLNWGHRVQLQDRKVKYFNIKASFVDEHTVCGVAKGGKEILLSADHIIIATGGRPRYPTHIEGALEYGITSDDIFWLKESPGKTLVVGASYVALECAGFLTGIGLDTTIMMRSIPLRGFDQQMSSMVIEHMASHGTRFLRGCAPSRVRRLPDGQLQVTWEDSTTGKEDTGTFDTVLWAIGRVPDTRSLNLEKAGVDTSPDTQKILVDSREATSVPHIYAIGDVVEGRPELTPIAIMAGRLLVQRLFGGSSDLMDYDNVPTTVFTPLEYGCVGLSEEEAVARHGQEHVEVYHAHYKPLEFTVAGRDASQCYVKMVCLREPPQLVLGLHFLGPNAGEVTQGFALGIKCGASYAQVMRTVGIHPTCSEEVVKLRISKRSGLDPTVTGC

SEQ ID NO: 66963 - protein, 142 aa, Homo sapiens
MSYMLPHLHNGWQVDQAILSEEDRVVVIRFGHDWDPTCMKMDEVLYSIAEKVKNFAVIYLVDITEVPDFNKMYELYDPCTVMFFFRNKHIMIDLGTGNNNKINWAMEDKQEMVDIIETVYRGARKGRGLVVSPKDYSTKYRY

SEQ ID NO: 66964 - protein, 91 aa, Homo sapiens
MSYMLPHLHNGWQVDQAILSEEDRVVVIRFGHDWDPTCMKMDEVLYSIAEKVKNFAVIYLVDITEVPDFNKMYELYDPCTVMFFFSYHRGW

SEQ ID NO: 66965 - protein, 297 aa, Homo sapiens
MVHQVLYRALVSTKWLAESIRTGKLGPGLRVLDASWYSPGTREARKEYLERHVPGASFFDIEECRDTASPYEMMLPSEAGFAEYVGRLGISNHTHVVVYDGEHLGSFYAPRVWWMFRVFGHRTVSVLNGGFRNWLKEGHPVTSEPSRPEPAVFKATLDRSLLKTYEQVLENLESKRFQLVDSRSQGRFLGTEPEPDAVGLDSGHIRGAVNMPFMDFLTEDGFEKGPEELRALFQTKKVDLSQPLIATCRKGVTACHVALAAYLCGKPDVAVYDGSWSEWFRRAPPESRVSQGKSEKA

SEQ ID NO: 66966 - protein, 297 aa, Homo sapiens; identical to SEQ ID NO: 66965

SEQ ID NO: 66967 - protein, 244 aa, Homo sapiens
MVHQVLYRALVSTKWLAESIRTGKLGPGLRVLDASWYSPGTREARKEYLERHVPGASFFDIEECRDTASPYEMMLPSEAGFAEYVGRLGISNHTHVVVYDGEHLGSFYAPRVWWMFRVFGHRTVSVLNGGFRNWLKEGHPVTSEPSRPEPAVFKATLDRSLLKTYEQVLENLESKRFQLVDSRSQGRFLGTEPEPDAVGLDSGHIRGAVNMPFMDFLTEDGSWSEWFRRAPPESRVSQGKSEKA

SEQ ID NO: 66968 - protein, 124 aa, Homo sapiens
MVHQVLYRALVSTKWLAESIRTGKLGPGLRVLDASWYSPGTREARKEYLERHVPGASFFDIEECRDTASPYEMMLPSEAGFAEYVGRLGISNHTHVVVYDGEHLGSFYAPRVWWMFRVFGHRTV

SEQ ID NO: 66969 - protein, 657 aa, Homo sapiens
MSPTPPLFSLPEARTRFTKSTREALNNKNIKPLLSTFSQVPGSENEKKCTLDQAFRGILEEEIINHSSCENVLAIISLAIGGVTEGICTASTPFVLLGDVLDCLPLDQCDTIFTFVEKNVATWKSNTFYSAGKNYLLRMCNDLLRRLSKSQNTVFCGRIQLFLARLFPLSEKSGLNLQSQFNLENVTVFNTNEQESTLGQKHTEDREEGMDVEEGEMGDEEAPTTCSIPIDYNLYRKFWSLQDYFRNPVQCYEKISWKTFLKYSEEVLAVFKSYKLDDTQASRKKMEELKTGGEHVYFAKFLTSEKLMDLQLSDSNFRRHILLQYLILFQYLKGQVKFKSSNYVLTDEQSLWIEDTTKSVYQLLSENPPDGERFSKMVEHILNTEENWNSWKNEGCPSFVKERTSDTKPTRIIRKRTAPEDFLGKGPTKKILMGNEELTRLWNLCPDNMEACKSETREHMPTLEEFFEEAIEQADPENMVENEYKAVNNSNYGWRALRLLARRSPHFFQPTNQQFKSLPEYLENMVIKLAKELPPPSEEIKTGEDEDEEDNDALLKENESPDVRRDKPVTGEQIEVFANKLGEQWKILAPYLEMKDSEIRQIECDSEDMKMRAKQLLVAWQDQEGVHATPENLINALNKSGLSDLAESLTNDNETNS

SEQ ID NO: 66970 - protein, 1593 aa, Homo sapiens
MAAAAVVVPAEWIKNWEKSGRGEFLHLCRILSENKSHDSSTYRDFQQALYELSYHVIKGNLKHEQASNVLSDISEFREDMPSILADVFCILDIETNCLEEKSKRDYFTQLVLACLYLVSDTVLKERLDPETLESLGLIKQSQQFNQKSVKIKTKLFYKQQKFNLLREENEGYAKLIAELGQDLSGSITSDLILENIKSLIGCFNLDPNRVLDVILEVFECRPEHDDFFISLLESYMSMCEPQTLCHILGFKFKFYQEPNGETPSSLYRVAAVLLQFNLIDLDDLYVHLLPADNCIMDEHKREIAEAKQIVRKLTMVVLSSEKMDEREKEKEKEEEKVEKPPDNQKLGLLEALLKIGDWQHAQNIMDQMPPYYAASHKLIALAICKLIHITIEPLYRRVGVPKGAKGSPVNALQNKRAPKQAESFEDLRRDVFNMFCYLGPHLSHDPILFAKVVRIGKSFMKEFQSDGSKQEDKEKTEVILSCLLSITDQVLLPSLSLMDCNACMSEELWGMFKTFPYQHRYRLYGQWKNETYNSHPLLVKVKAQTIDRAKYIMKRLTKENVKPSGRQIGKLSHSNPTILFDYILSQIQKYDNLITPVVDSLKYLTSLNYDVLAYCIIEALANPEKERMKHDDTTISSWLQSLASFCGAVFRKYPIDLAGLLQYVANQLKAGKSFDLLILKEVVQKMAGIEITEEMTMEQLEAMTGGEQLKAEGGYFGQIRNTKKSSQRLKDALLDHDLALPLCLLMAQQRNGVIFQEGGEKHLKLVGKLYDQCHDTLVQFGGFLASNLSTEDYIKRVPSIDVLCNEFHTPHDAAFFLSRPMYAHHISSKYDELKKSEKGSKQQHKVHKYITSCEMVMAPVHEAVVSLHVSKVWDDISPQFYATFWSLTMYDLAVPHTSYEREVNKLKVQMKAIDDNQEMPPNKKKKEKERCTALQDKLLEEEKKQMEHVQRVLQRLKLEKDNWLLAKSTKNETITKFLQLCIFPRCIFSAIDAVYCARFVELVHQQKTPNFSTLLCYDRVFSDIIYTVASCTENEASRYGRFLCCMLETVTRWHSDRATYEKECGNYPGFLTILRATGFDGGNKADQLDYENFRHVVHKWHYKLTKASVHCLETGEYTHIRNILIVLTKILPWYPKVLNLGQALERRVHKICQEEKEKRPDLYALAMGYSGQLKSRKSYMIPENEFHHKDPPPRNAVASVQNGPGGGPSSSSIGSASKSDESSTEETDKSRERSQCGVKAVNKASSTTPKGNSSNGNSGSNSNKAVKENDKEKGKEKEKEKKEKTPATTPEARVLGKDGKEKPKEERPNKDEKARETKERTPKSDKEKEKFKKEEKAKDEKFKTTVPNAESKSTQEREREKEPSRERDIAKEMKSKENVKGGEKTPVSGSLKSPVPRSDIPEPEREQKRRKIDTHPSPSHSSTVKDSLIELKESSAKLYINHTPPPLSKSKEREMDKKDLDKSRERSREREKKDEKDRKERKRDHSNNDREVPPDLTKRRKEENGTMGVSKHKSESPCESPYPNEKDKEKNKSKSSGKEKGSDSFKSEKMDKISSGGKKESRHDKEKIEKKEKRDSSGGKEEKKHHKSSDKHR

SEQ ID NO: 66971 - protein, 1593 aa, Homo sapiens; identical to SEQ ID NO: 66970

SEQ ID NO: 66972 - protein, 848 aa, Homo sapiens
MPSILADVFCILDIETNCLEEKSKRDYFTQLVLACLYLVSDTVLKERLDPETLESLGLIKQSQQFNQKSVKIKTKLFYKQQKFNLLREENEGYAKLIAELGQDLSGSITSDLILENIKSLIGCFNLDPNRVLDVILEVFECRPEHDDFFISLLESYMSMCEPQTLCHILGFKFKFYQEPNGETPSSLYRVAAVLLQFNLIDLDDLYVHLLPADNCIMDEHKREIAEAKQIVRKLTMVVLSSEKMDEREKEKEKEEEKVEKPPDNQKLGLLEALLKIGDWQHAQNIMDQMPPYYAASHKLIALAICKLIHITIEPLYRRVGVPKGAKGSPVNALQNKRAPKQAESFEDLRRDVFNMFCYLGPHLSHDPILFAKVVRIGKSFMKEFQSDGSKQEDKEKTEVILSCLLSITDQVLLPSLSLMDCNACMSEELWGMFKTFPYQHRYRLYGQWKNETYNSHPLLVKVKAQTIDRAKYIMKRLTKENVKPSGRQIGKLSHSNPTILFDYVCFEILSQIQKYDNLITPVVDSLKYLTSLNYDVLAYCIIEALANPEKERMKHDDTTISSWLQSLASFCGAVFRKYPIDLAGLLQYVANQLKAGKSFDLLILKEVVQKMAGIEITEEMTMEQLEAMTGGEQLKAEGGYFGQIRNTKKSSQRLKDALLDHDLALPLCLLMAQQRNGVIFQEGGEKHLKLVGKLYDQCHDTLVQFGGFLASNLSTEDYIKRVPSIDVLCNEFHTPHDAAFFLSRPMYAHHISSKYDELKKSEKGSKQQHKVHKYITSCEMVMAPVHEAVVSLHVSKVWDDISPQFYATFWSLTMYDLAVPHTSYEREVNKLKVQMKAIDDNQEMIPPQ

SEQ ID NO: 66973 - protein, 189 aa, Homo sapiens
  VARIANT 1: note = MOD_RES - Any amino acid
XEQKRRKIDTHPSPSHSSTVKDSLIELKESSAKLYINHTPPPLSKSKEREMDKKDLDKSRERSREREKKDEKDRKERKRDHSNNDREVPPDLTKRRKEENGTMGVSKHKSESPCESPYPNEKDKEKNKSKSSGKEKGSDSFKSEKMDKISSGGKKESRHDKEKIEKKEKRDSSGGKEEKKHHKSSDKHR

SEQ ID NO: 66974 - protein, 351 aa, Homo sapiens
MAVPAAAMGPSALGQSGPGSMAPWCSVSSGPSRYVLGMQELFRGHSKTREFLAHSAKVHSVAWSCDGRRLASGSFDKTASVFLLEKDRLVKENNYRGHGDSVDQLCWHPSNPDLFVTASGDKTIRIWDVRTTKCIATVNTKGENINICWSPDGQTIAVGNKDDVVTFIDAKTHRSKAEEQFKFEVNEISWNNDNNMFFLTNGNGCINILSYPELKPVQSINAHPSNCICIKFDPMGKYFATGSADALVSLWDVDELVCVRCFSRLDWPVRTLSFSHDGKMLASASEDHFIDIAEVETGDKLWEVQCESPTFTVAWHPKRPLLAFACDDKDGKYDSSREAGTVKLFGLPNDS

SEQ ID NO: 66975 - protein, 683 aa, Homo sapiens
MSSESSKKRKPKVIRSDGAPAEGKRNRSDTEQEGKYYSEEAEVDLRDPGRDYELYKYTCQELQRLMAEIQDLKSRGGKDVAIEIEERRIQSCVHFMTLKKLNRLAHIRLKKGRDQTHEAKQKVDAYHLQLQNLLYEVMHLQKEITKCLEFKSKHEEIDLVSLEEFYKEAPPDISKAEVTMGDPHQQTLARLDWELEQRKRLAEKYRECLSNKEKILKEIEVKKEYLSSLQPRLNSIMQASLPVQEYLFMPFDQAHKQYETARHLPPPLYVLFVQATAYGQACDKTLSVAIEGSVDEAKALFKPPEDSQDDESDSDAEEEQTTKRRRPTLGVQLDDKRKEMLKRHPLSVMLDLKCKDDSVLHLTFYYLMNLNIMTVKAKVTTAMELITPISAGDLLSPDSVLSCLYPGDHGKKTPNPANQYQFDKVGILTLSDYVLELGHPYLWVQKLGGLHFPKEQPQQTVIADHSLSASHMETTMKLLKTRVQSRLALHKQFASLEHGIVPVTSDCQYLFPAKVVSRLVKWVTVAHEDYMELHFTKDIVDAGLAGDTNLYYMALIERGTAKLQAAVVLNPGYSSIPPVFQLCLNWKGEKTNSNDDNIRAMEGEVNVCYKELCGPWPSHQLLTNQLQRLCVLLDVYLETESHDDSVEGPKEFPQEKMCLRLFRGPSRMKPFKYNHPQGFFSHR

SEQ ID NO: 66976 - protein, 683 aa, Homo sapiens; identical to SEQ ID NO: 66975

SEQ ID NO: 66977 - protein, 683 aa, Homo sapiens; identical to SEQ ID NO: 66975

SEQ ID NO: 66978 - protein, 93 aa, Homo sapiens
MSSESSKKRKPKVIRSDGAPAEGKRNRSDTEQEGKYYSEEAEVDLRDPGRDYELYKYTCQELQRLMAEIQDLKSRGGKDVAIEIEERRIQSCV

SEQ ID NO: 66979 - protein, 161 aa, Homo sapiens
MSSESSKKRKPKVIRSDGAPAEGKRNRSDTEQEGKYYSEEAEVDLRDPGRDYELYKYTCQELQRLMAEIQDLKSRGGKDVAIEIEERRIQSCVHFMTLKKLNRLAHIRLKKGRDQTHEAKQKVDAYHLQLQNLLYEVMHLQKEITKCLEFKSKHEEIDLVS

SEQ ID NO: 66980 - protein, 223 aa, Homo sapiens
MSSESSKKRKPKVIRSDGAPAEGKRNRSDTEQEGKYYSEEAEVDLRDPGRDYELYKYTCQELQRLMAEIQDLKSRGGKDVAIEIEERRIQSCVHFMTLKKLNRLAHIRLKKGRDQTHEAKQKVDAYHLQLQNLLYEVMHLQKEITKCLEFKSKHEEIDLVSLEEFYKEAPPDISKAEVTMGDPHQQTLARLDWELEQRKRLAEKYRECLSNKEKILKEIEVKK

SEQ ID NO: 66981 - protein, 683 aa, Homo sapiens; identical to SEQ ID NO: 66975

SEQ ID NO: 66982 - protein, 204 aa, Homo sapiens
MGAVTDDEVIRKRLLIDGDGAGDDRRINLLVKSFIKWCNSGSQEEGYSQYQRMLSTLSQCEFSMGKTLLVYDMNLREMENYEKIYKEIECSIAGAHEKIAECKKQILQAKRIRKNRQEYDALAKVIQHHPDRHETLKELEALGKELEHLSHIKESVEDKLELRRKQFHVLLSTIHELQQTLENDEKLSEVEEAQEASMETDPKP

SEQ ID NO: 66983 - protein, 236 aa, Homo sapiens
MSEAPRAETFVFLDLEATGLPSVEPEIAELSLFAVHRSSLENPEHDESGALVLPRVLDKLTLCMCPERPFTAKASEITGLSSEGLARCRKAGFDGAVVRTLQAFLSRQAGPICLVAHNGFDYDFPLLCAELRRLGARLPRDTVCLDTLPALRGLDRAHSHGTRARGRQGYSLGSLFHRYFRAEPSAAHSAEGDVHTLLLIFLHRAAELLAWADEQARGWAHIEPMYLPPDDPSLEA

SEQ ID NO: 66984 - protein, 279 aa, Homo sapiens
MGRAGSPLPRSSWPRMDDCGSRSRCSPTLCSSLRTCYPRGNITMSEAPRAETFVFLDLEATGLPSVEPEIAELSLFAVHRSSLENPEHDESGALVLPRVLDKLTLCMCPERPFTAKASEITGLSSEGLARCRKAGFDGAVVRTLQAFLSRQAGPICLVAHNGFDYDFPLLCAELRRLGARLPRDTVCLDTLPALRGLDRAHSHGTRARGRQGYSLGSLFHRYFRAEPSAAHSAEGDVHTLLLIFLHRAAELLAWADEQARGWAHIEPMYLPPDDPSLEA

SEQ ID NO: 66985 - protein, 236 aa, Homo sapiens; identical to SEQ ID NO: 66983

SEQ ID NO: 66986 - protein, 236 aa, Homo sapiens; identical to SEQ ID NO: 66983

SEQ ID NO: 66987 - protein, 279 aa, Homo sapiens; identical to SEQ ID NO: 66984

SEQ ID NO: 66988 - protein, 236 aa, Homo sapiens; identical to SEQ ID NO: 66983

SEQ ID NO: 66989 - protein, 279 aa, Homo sapiens; identical to SEQ ID NO: 66984

SEQ ID NO: 66990 - protein, 278 aa, Homo sapiens
MIVAAEAVAAPRCALVGDRSGADAPRAKGHSLRTCYPRGNITMSEAPRAETFVFLDLEATGLPSVEPEIAELSLFAVHRSSLENPEHDESGALVLPRVLDKLTLCMCPERPFTAKASEITGLSSEGLARCRKAGFDGAVVRTLQAFLSRQAGPICLVAHNGFDYDFPLLCAELRRLGARLPRDTVCLDTLPALRGLDRAHSHGTRARGRQGYSLGSLFHRYFRAEPSAAHSAEGDVHTLLLIFLHRAAELLAWADEQARGWAHIEPMYLPPDDPSLEA

SEQ ID NO: 66991 - protein, 723 aa, Homo sapiens
MFEEKASSPSGKMGGEEKPIGAGEEKQKEGGKKKNKEGSGDGGRAELNPWPEYIYTRLEMYNILKAEHDSILAEKAEKDSKPIKVTLPDGKQVDAESWKTTPYQIACGISQGLADNTVIAKVNNVVWDLDRPLEEDCTLELLKFEDEEAQAVYWHSSAHIMGEAMERVYGGCLCYGPPIENGFYYDMYLEEGGVSSNDFSSLEALCKKIIKEKQAFERLEVKKETLLAMFKYNKFKCRILNEKVNTPTTTVYRCGPLIDLCRGPHVRHTGKIKALKIHKNSSTYWEGKADMETLQRIYGISFPDPKMLKEWEKFQEEAKNRDHRKIGRDQELYFFHELSPGSCFFLPKGAYIYNALIEFIRSEYRKRGFQEVVTPNIFNSRLWMTSGHWQHYSENMFSFEVEKELFALKPMNCPGHCLMFDHRPRSWRELPLRLADFGVLHRNELSGALTGLTRVRRFQQDDAHIFCAMEQIEDEIKGCLDFLRTVYSVFGFSFKLNLSTRPEKFLGDIEVWDQAEKQLENSLNEFGEKWELNSGDGAFYGPKIDIQIKDAIGRYHQCATIQLDFQLPIRFNLTYVSHDGDDKKRPVIVHRAILGSVERMIAILTENYGGKWPFWLSPRQVMVVPVGPTCDEYAQKVRQQFHDAKFMADIDLDPGCTLNKKIRNAQLAQYNFILVVGEKEKISGTVNIRTRDNKVHGERTISETIERLQQLKEFRSKQAEEEF

SEQ ID NO: 66992 - protein, 602 aa, Homo sapiens
MIPFWQKRQKKIASQLKSLCLMVNRLMRNLGKLHHIKLPVELAMERVYGGCLCYGPPIENGFYYDMYLEEGGVSSNDFSSLEALCKKIIKEKQAFERLEVKKETLLAMFKYNKFKCRILNEKVNTPTTTVYRCGPLIDLCRGPHVRHTGKIKALKIHKNSSTYWEGKADMETLQRIYGISFPDPKMLKEWEKFQEEAKNRDHRKIGRDQELYFFHELSPGSCFFLPKGAYIYNALIEFIRSEYRKRGFQEVVTPNIFNSRLWMTSGHWQHYSENMFSFEVEKELFALKPMNCPGHCLMFDHRPRSWRELPLRLADFGVLHRNELSGALTGLTRVRRFQQDDAHIFCAMEQIEDEIKGCLDFLRTVYSVFGFSFKLNLSTRPEKFLGDIEVWDQAEKQLENSLNEFGEKWELNSGDGAFYGPKIDIQIKDAIGRYHQCATIQLDFQLPIRFNLTYVSHDGDDKKRPVIVHRAILGSVERMIAILTENYGGKWPFWLSPRQVMVVPVGPTCDEYAQKVRQQFHDAKFMADIDLDPGCTLNKKIRNAQLAQYNFILVVGEKEKISGTVNIRTRDNKVHGERTISETIERLQQLKEFRSKQAEEEF

SEQ ID NO: 66993 - protein, 756 aa, Homo sapiens
MFEEKASSPSGKMGGEEKPIGAGEEKQKEGGKKKNKEGSGDGGRAELNPWPEYIYTRLEMYNILKAEHDSILAEKAEKDSKPIKVTLPDGKQVDAESWKTTPYQIACGISHTASCKNLSSLASLLASVAIPSSGMPWPPLFFLQGLADNTVIAKVNNVVWDLDRPLEEDCTLELLKFEDEEAQAVYWHSSAHIMGEAMERVYGGCLCYGPPIENGFYYDMYLEEGGVSSNDFSSLEALCKKIIKEKQAFERLEVKKETLLAMFKYNKFKCRILNEKVNTPTTTVYRCGPLIDLCRGPHVRHTGKIKALKIHKNSSTYWEGKADMETLQRIYGISFPDPKMLKEWEKFQEEAKNRDHRKIGRDQELYFFHELSPGSCFFLPKGAYIYNALIEFIRSEYRKRGFQEVVTPNIFNSRLWMTSGHWQHYSENMFSFEVEKELFALKPMNCPGHCLMFDHRPRSWRELPLRLADFGVLHRNELSGALTGLTRVRRFQQDDAHIFCAMEQIEDEIKGCLDFLRTVYSVFGFSFKLNLSTRPEKFLGDIEVWDQAEKQLENSLNEFGEKWELNSGDGAFYGPKIDIQIKDAIGRYHQCATIQLDFQLPIRFNLTYVSHDGDDKKRPVIVHRAILGSVERMIAILTENYGGKWPFWLSPRQVMVVPVGPTCDEYAQKVRQQFHDAKFMADIDLDPGCTLNKKIRNAQLAQYNFILVVGEKEKISGTVNIRTRDNKVHGERTISETIERLQQLKEFRSKQAEEEF

SEQ ID NO: 66994 - protein, 723 aa, Homo sapiens; identical to SEQ ID NO: 66991

SEQ ID NO: 66995 - protein, 129 aa, Homo sapiens
MFEEKASSPSGKMGGEEKPIGAGEEKQKEGGKKKNKEGSGDGGRAELNPWPEYIYTRLEMYNILKAEHDSILAEKAEKDSKPIKVTLPDGKQVDAESWKTTPYQIACGISQGLADNTVIAKVNNVVWDL

SEQ ID NO: 66996 - protein, 619 aa, Homo sapiens
MEVELSQGLADNTVIAKVNNVVWDLDRPLEEDCTLELLKFEDEEAQAVYWHSSAHIMGEAMERVYGGCLCYGPPIENGFYYDMYLEEGGVSSNDFSSLEALCKKIIKEKQAFERLEVKKETLLAMFKYNKFKCRILNEKVNTPTTTVYRCGPLIDLCRGPHVRHTGKIKALKIHKNSSTYWEGKADMETLQRIYGISFPDPKMLKEWEKFQEEAKNRDHRKIGRDQELYFFHELSPGSCFFLPKGAYIYNALIEFIRSEYRKRGFQEVVTPNIFNSRLWMTSGHWQHYSENMFSFEVEKELFALKPMNCPGHCLMFDHRPRSWRELPLRLADFGVLHRNELSGALTGLTRVRRFQQDDAHIFCAMEQIEDEIKGCLDFLRTVYSVFGFSFKLNLSTRPEKFLGDIEVWDQAEKQLENSLNEFGEKWELNSGDGAFYGPKIDIQIKDAIGRYHQCATIQLDFQLPIRFNLTYVSHDGDDKKRPVIVHRAILGSVERMIAILTENYGGKWPFWLSPRQVMVVPVGPTCDEYAQKVRQQFHDAKFMADIDLDPGCTLNKKIRNAQLAQYNFILVVGEKEKISGTVNIRTRDNKVHGERTISETIERLQQLKEFRSKQAEEEF

SEQ ID NO: 66997 - protein, 443 aa, Homo sapiens
MEHNPLPTSPADQFNTGRYCSGPSTEYGFYHDFFLGKERCGTLVDLCQGPHLRHTGQIGGLKLLSAEYAHRGFSEVKTPTLFSTKLWEQSGHWEHYQEDMFAVQPPGSDRPPSSQSDDSTRHITDTLALKPMNCPAHCLMFAHRPRSWRELPLRLADFGALHRAEASGGLGGLTRLRCFQQDDAHIFCTTDQLEAEIQSCLDFLRSVYAVLGFSFRLALSTRPSGFLGDPCLWDQAEQVLKQALKEFGEPWDLNSGDGAFYGPKIDVHLHDALGRPHQCGTIQLDFQLPLRFDLQYKGQAGALERPVLIHRAVLGSVERLLGVLAESCGGKWPLWLSPFQVVVIPVGSEQEEYAKEAQQSLRAAGLVSDLDADSGLTLSRRIRRAQLAHYNFQFVVGQKEQSKRTVNIRTRDNRRLGEWDLPEAVQRLVELQNTRVPNAEEIF

SEQ ID NO: 66998 - protein, 443 aa, Homo sapiens [sequence omitted]

SEQ ID NO: 66999 - protein, 178 aa, Homo sapiens [sequence omitted]

SEQ ID NO: 67000 - protein, 588 aa, Homo sapiens
MALYQRWRCLRLQGLQACRLHTAVVSTPPRWLAERLGLFEELWAAQVKRLASMAQKEPRTIKISLPGGQKIDAVAWNTTPYQLARQISSTLADTAVAAQVNGEPYDLERPLETDSDLRFLTFDSPEGKAVFWHSSTHVLGAAAEQFLGAVLCRGPSTEYGFYHDFFLGKERTIRGSELPVLERICQELTAAARPFRRLEASRDQLRQLFKAEYAHRGFSEVKTPTLFSTKLWEQSGHWEHYQEDMFAVQPPGSDRPPSSQSDDSTRHITDTLALKPMNCPAHCLMFAHRPRSWRELPLRLADFGALHRAEASGGLGGLTRLRCFQQDDAHIFCTTDQLEAEIQSCLDFLRSVYAVLGFSFRLALSTRPSGFLGDPCLWDQAEQVLKQALKEFGEPWDLNSGDGAFYGPKIDVHLHDALGRPHQCGTIQLDFQLPLRFDLQYKGQAGALERPVLIHRAVLGSVERLLGVLAESCGGKWPLWLSPFQVVVIPVGSEQEEYAKEAQQSLRAAGLVSDLDADSGLTLSRRIRRAQLAHYNFQFVVGQKEQSKRTVNIRTRDNRRLGEWDLPEAVQRLVELQNTRVPNAEEIF

SEQ ID NO: 67001 - protein, 718 aa, Homo sapiens
MALYQRWRCLRLQGLQACRLHTAVVSTPPRWLAERLGLFEELWAAQVKRLASMAQKEPRTIKISLPGGQKIDAVAWNTTPYQLARQISSTLADTAVAAQVNGEPYDLERPLETDSDLRFLTFDSPEGKAVFWHSSTHVLGAAAEQFLGAVLCRGPSTEYGFYHDFFLGKERTIRGSELPVLERICQELTAAARPFRRLEASRDQLRQLFKDNPFKLHLIEEKVTGPTATVYGCGTLVDLCQGPHLRHTGQIGGLKLLSNSSSLWRSSGAPETLQRVSGISFPTTELLRVWEAWREEAELRDHRRIGKEQELFFFHELSPGSCFFLPRGTRVYNALVAFIRAEYAHRGFSEVKTPTLFSTKLWEQSGHWEHYQEDMFAVQPPGSDRPPSSQSDDSTRHITDTLALKPMNCPAHCLMFAHRPRSWRELPLRLADFGALHRAEASGGLGGLTRLRCFQQDDAHIFCTTDQLEAEIQSCLDFLRSVYAVLGFSFRLALSTRPSGFLGDPCLWDQAEQVLKQALKEFGEPWDLNSGDGAFYGPKIDVHLHDALGRPHQCGTIQLDFQLPLRFDLQYKGQAGALERPVLIHRAVLGSVERLLGVLAESCGGKWPLWLSPFQVVVIPVGSEQEEYAKEAQQSLRAAGLVSDLDADSGLTLSRRIRRAQLAHYNFQFVVGQKEQSKRTVNIRTRDNRRLGEWDLPEAVQRLVELQNTRVPNAEEIF

SEQ ID NO: 67002 - protein, 169 aa, Homo sapiens
MALYQRWRCLRLQGLQACRLHTAVVSTPPRWLAERLGLFEELWAAQVKRLASMAQKEPRTIKISLPGGQKIDAVAWNTTPYQLARQISSTLADTAVAAQVNGEPYDLERPLETDSDLRFLTFDSPEGKADNPGLRAACFGADLPGTYSCCSTLPEARGFTGSASPVVQG

SEQ ID NO: 67003 - protein, 1657 aa, Homo sapiens
MGLQARRWASGSRGAAGPRRGVLQLLPLPLPLPLLLLLLLRPGAGRAAAQGEAEAPTLYLWKTGPWGRCMGDECGPGGIQTRAVWCAHVEGWTTLHTNCKQAERPNNQQNCFKVCDWHKELYDWRLGPWNQCQPVISKSLEKPLECIKGEEGIQVREIACIQKDKDIPAEDIICEYFEPKPLLEQACLIPCQQDCIVSEFSAWSECSKTCGSGLQHRTRHVVAPPQFGGSGCPNLTEFQVCQSSPCEAEELRYSLHVGPWSTCSMPHSRQVRQARRRGKNKEREKDRSKGVKDPEARELIKKKRNRNRQNRQENKYWDIQIGYQTREVMCINKTGKAADLSFCQQEKLPMTFQSCVITKECQVSEWSEWSPCSKTCHDMVSPAGTRVRTRTIRQFPIGSEKECPEFEEKEPCLSQGDGVVPCATYGWRTTEWTECRVDPLLSQQDKRRGNQTALCGGGIQTREVYCVQANENLLSQLSTHKNKEASKPMDLKLCTGPIPNTTQLCHIPCPTECEVSPWSAWGPCTYENCNDQQGKKGFKLRKRRITNEPTGGSGVTGNCPHLLEAIPCEEPACYDWKAVRLGNCEPDNGKECGPGTQVQEVVCINSDGEEVDRQLCRDAIFPIPVACDAPCPKDCVLSTWSTWSSCSHTCSGKTTEGKQIRARSILAYAGEEGGIRCPNSSALQEVRSCNEHPCTVYHWQTGPWGQCIEDTSVSSFNTTTTWNGEASCSVGMQTRKVICVRVNVGQVGPKKCPESLRPETVRPCLLPCKKDCIVTPYSDWTSCPSSCKEGDSSIRKQSRHRVIIQLPANGGRDCTDPLYEEKACEAPQACQSYRWKTHKWRRCQLVPWSVQQDSPGAQEGCGPGRQARAITCRKQDGGQAGIHECLQYAGPVPALTQACQIPCQDDCQLTSWSKFSSCNGDCGAVRTRKRTLVGKSKKKEKCKNSHLYPLIETQYCPCDKYNAQPVGNWSDCILPEGKVEVLLGMKVQGDIKECGQGYRYQAMACYDQNGRLVETSRCNSHGYIEEACIIPCPSDCKLSEWSNWSRCSKSCGSGVKVRSKWLREKPYNGGRPCPKLDHVNQFQVYEVVPCHSDCNQYLWVTEPWSICKVTFVNMRENCGEGVQTRKVRCMQNTADGPSEHVEDYLCDPEEMPLGSRVCKLPCPEDCVISEWGPWTQCVLPCNQSSFRQRSADPIRQPADEGRSCPNAVEKEPCNLNKNCYHYDYNVTDWSTCQLSEKAVCGNGIKTRMLDCVRSDGKSVDLKYCEALGLEKNWQMNTSCMVECPVNCQLSDWSPWSECSQTCGLTGKMIRRRTVTQPFQGDGRPCPSLMDQSKPCPVKPCYRWQYGQWSPCQVQEAQCGEGTRTRNISCVVSDGSADDFSKVVDEEFCADIELIIDGNKNMVLEESCSQPCPGDCYLKDWSSWSLCQLTCVNGEDLGFGGIQVRSRPVIIQELENQHLCPEQMLETKSCYDGQCYEYKWMASAWKGSSRTVWCQRSDGINVTGGCLVMSQPDADRSCNPPCSQPHSYCSETKTCHCEEGYTEVMSSNSTLEQCTLIPVVVLPTMEDKRGDVKTSRAVHPTQPSSNPAGRGRTWFLQPFGPDGRLKTWVYGVAAGAFVLLIFIVSMIYLACKKPKKPQRRQNNRLKPLTLAYDGDADM

SEQ ID NO: 67004 - protein, 1657 aa, Homo sapiens
MGLQARRWASGSRGAAGPRRGVLQLLPLPLPLPLLLLLLLRPGAGRAAAQGEAEAPTLYLWKTGPWGRCMGDECGPGGIQTRAVWCAHVEGWTTLHTNCKQAERPNNQQNCFKVCDWHKELYDWRLGPWNQCQPVISKSLEKPLECIKGEEGIQVREIACIQKDKDIPAEDIICEYFEPKPLLEQACLIPCQQDCIVSEFSAWSECSKTCGSGLQHRTRHVVAPPQFGGSGCPNLTEFQVCQSSPCEAEELRYSLHVGPWSTCSMPHSRQVRQARRRGKNKEREKDRSKGVKDPEARELIKKKRNRNRQNRQENKYWDIQIGYQTREVMCINKTGKAADLSFCQQEKLPMTFQSCVITKECQVSEWSEWSPCSKTCHDMVSPAGTRVRTRTIRQFPIGSEKECPEFEEKEPCLSQGDGVVPCATYGWRTTEWTECRVDPLLSQQDKRRGNQTALCGGGIQTREVYCVQANENLLSQLSTHKNKEASKPMDLKLCTGPIPNTTQLCHIPCPTECEVSPWSAWGPCTYENCNDQQGKKGFKLRKRRITNEPTGGSGVTGNCPHLLEAIPCEEPACYDWKAVRLGNCEPDNGKECGPGTQVQEVVCINSDGEEVDRQLCRDAIFPIPVACDAPCPKDCVLSTWSTWSSCSHTCSGKTTEGKQIRARSILAYAGEEGGIRCPNSSALQEVRSCNEHPCTVYHWQTGPWGQCIEDTSVSSFNTTTTWNGEASCSVGMQTRKVICVRVNVGQVGPKKCPESLRPETVRPCLLPCKKDCIVTPYSDWTSCPSSCKEGDSSIRKQSRHRVIIQLPANGGRDCTDPLYEEKACEAPQACQSYRWKTHKWRRCQLVPWSVQQDSPGAQEGCGPGRQARAITCRKQDGGQAGIHECLQYAGPVPALTQACQIPCQDDCQLTSWSKFSSCNGDCGAVRTRKRTLVGKSKKKEKCKNSHLYPLIETQYCPCDKYNAQPVGNWSDCILPEGKVEVLLGMKVQGDIKECGQGYRYQAMACYDQNGRLVETSRCNSHGYIEEACIIPCPSDCKLSEWSNWSRCSKSCGSGVKVRSKWLREKPYNGGRPCPKLDHVNQAQVYEVVPCHSDCNQYLWVTEPWSICKVTFVNMRENCGEGVQTRKVRCMQNTADGPSEHVEDYLCDPEEMPLGSRVCKLPCPEDCVISEWGPWTQCVLPCNQSSFRQRSADPIRQPADEGRSCPNAVEKEPCNLNKNCYHYDYNVTDWSTCQLSEKAVCGNGIKTRMLDCVRSDGKSVDLKYCEALGLEKNWQMNTSCMVECPVNCQLSDWSPWSECSQTCGLTGKMIRRRTVTQPFQGDGRPCPSLMDQSKPCPVKPCYRWQYGQWSPCQVQEAQCGEGTRTRNISCVVSDGSADDFSKVVDEEFCADIELIIDGNKNMVLEESCSQPCPGDCYLKDWSSWSLCQLTCVNGEDLGFGGIQVRSRPVIIQELENQHLCPEQMLETKSCYDGQCYEYKWMASAWKGSSRTVWCQRSDGINVTGGCLVMSQPDADRSCNPPCSQPHSYCSETKTCHCEEGYTEVMSSNSTLEQCTLIPVVVLPTMEDKRGDVKTSRAVHPTQPSSNPAGRGRTWFLQPFGPDGRLKTWVYGVAAGAFVLLIFIVSMIYLACKKPKKPQRRQNNRLKPLTLAYDGDADM

SEQ ID NO: 67005 - protein, 669 aa, Homo sapiens
MSALLSLCFVLPLAAPGHGTQGWEPCTDLRPLDILAEVVPSDGATSGIRIVQVHGARGLQLSVAAPRTMSFPASRIFSQCDLFPEEFSIVVTLRVPNLPPKRNEYLLTVVAEESDLLLLGLRLSPAQLHFLFLREDTAGAWQTRVSFRSPALVDGRWHTLVLAVSAGVFSLTTDCGLPVDIMADVPFPATLSVKGARFFVGSRRRAKGLFMGLVRQLVLLPGSDATPRLCPSRNAPLAVLSIPRVLQALTGKPEDNEVLKYPYETNIRVTLGPQPPCTEVEDAQFWFDASRKGLYLCVGNEWVSVLAAKERLDYVEEHQNLSTNSETLGIEVFRIPQVGLFVATANRKATSAVYKWTEEKFVSYQNIPTHQAQAWRHFTIGKKIFLAVANFEPDEKGQEFSVIYKWSHRKLKFTPYQSIATHSARDWEAFEVDGEHFLAVANHREGDNHNIDSVIYKWNPATRLFEANQTIATSGAYDWEFFSVGPYSFLVVANTFNGTSTKVHSHLYIRLLGSFQLFQSFPTFGAADWEVFQIGERIFLAVANSHSYDVEMQVQNDSYVINSVIYELNVTAQAFVKFQDILTCSALDWEFFSVGEDYFLVVANSFDGRTFSVNSIIYRWQGYEGFVAVHSLPTVGCRDWEAFSTTAGAYLIYSSAKEPLSRVLRLRTR

SEQ ID NO: 67006 - protein, 599 aa, Homo sapiens
MSALLSLCFVLPLAAPGHGTQGWEPCTDLRPLDILAEVVPSDGATSGIRIVQVHGARGLQLSVAAPRTMSFPASRIFSQCDLFPEEFSIVVTLRVPNLPPKRNEYLLTVVAEESDLLLLGLRLSPAQLHFLFLREDTAGAWQTRVSFRSPALVDGRWHTLVLAVSAGVFSLTTDCGLPVDIMADVPFPATLSVKGARFFVGSRRRAKGLFMGLVRQLVLLPGSDATPRLCPSRNAPLAVLSIPRVLQALTGKPEDNEVLKYPYETNIRVTLGPQPPCTEVEDAQFWFDASRKGLYLCVGNEWVSVLAEAKERLDYVEEHQNLSTNSETLGIEVFRIPQVGLFVATANRKATSAVYKWTEEKFVSYQNIPTHQAQAWRHFTIGKKIFLAVANFEPDEKGQEFSVIYKWSHRKLKFTPYQSIATHSARDWEAFEVDGEHFLAVANHREGDNHNIDSVIYKWNPATRLFEANQTIATSGAYDWEFFSVGPYSFLVVANTFNGTSTKVHSHLYIRLLGSFQLFQSFPTFGAADWEVFQIGERIFLAVANSHSYDVEMQVQNDSYVINSVIYELNVTAQAFVKFQDILTCSGGRRGLHARRAEG

SEQ ID NO: 67007 - protein, 522 aa, Homo sapiens
MSALLSLCFVLPLAAPGHGTQGWEPCTDLRPLDILAEVVPSDGATSGIRIVQVHGARGLQLSVAAPRTMSFPASRIFSQCDLFPEEFSIVVTLRVPNLPPKRNEYLLTVVAEESDLLLLGLRLSPAQPPCTEVEDAQFWFDASRKGLYLCVGNEWVSVLAAKERLDYVEEHQNLSTNSETLGIEVFRIPQVGLFVATANRKATSAVYKWTEEKFVSYQNIPTHQAQAWRHFTIGKKIFLAVANFEPDEKGQEFSVIYKWSHRKLKFTPYQSIATHSARDWEAFEVDGEHFLAVANHREGDNHNIDSVIYKWNPATRLFEANQTIATSGAYDWEFFSVGPYSFLVVANTFNGTSTKVHSHLYIRLLGSFQLFQSFPTFGAADWEVFQIGERIFLAVANSHSYDVEMQVQNDSYVINSVIYELNVTAQAFVKFQDILTCSALDWEFFSVGEDYFLVVANSFDGRTFSVNSIIYRWQGYEGFVAVHSLPTVGCRDWEAFSTTAGAYLIYSSAKEPLSRVLRLRTR

SEQ ID NO: 67008 - protein, 534 aa, Homo sapiens
MMEALGFLKLEVNGPMVTVALSVALLALLKWYSTSAFSRLEKLGLRHPKPSPFIGNLTFFRQGFWESQMELRKLYGPLCGYYLGRRMFIVISEPDMIKQVLVENFSNFTNRMASGLEFKSVADSVLFLRDKRWEEVRGALMSAFSPEKLNEMVPLISQACELLLAHLKRYAESGDAFDIQRCYCNYTTDVVASVAFGTPVDSWQAPEDPFVKHCKRFFEFCIPRPILVLLLSFPSIMVPLARILPNKNRDELNGFFNKLIRNVIALRDQQAAEERRRDFLQMVLDARHSASPMGVQDFDIVRDVFSSTGCKPNPSRQHQPSPMARPLTVDEIVGQAFIFLIAGYEIITNTLSFATYLLATNPDCQEKLLREVDVFKEKHMAPEFCSLEEGLPYLDMVIAETLRMYPPAFRFTREAAQDCEVLGQRIPAGAVLEMAVGALHHDPEHWPSPETFNPERFTAEARQQHRPFTYLPFGAGPRSCLGVRLGLLEVKLTLLHVLHKFRFQACPETQVPLQLESKSALGPKNGVYIKIVSR

SEQ ID NO: 67009 - protein, 533 aa, Homo sapiens [sequence omitted]

SEQ ID NO: 67010 - protein, 459 aa, Homo sapiens
MEALGFLKLEVNGPMVTVALSVALLALLKWYSTSAFSRLEKLGLRHPKPSPFIGNLTFFRQGFWESQMELRKLYGPLCGYYLGRRMFIVISEPDMIKQVLVENFSNFTNRMASGLEFKSVADSVLFLRDKRWEEVRGALMSAFSPEKLNEMVPLISQACELLLAHLKRYAESGDAFDIQRCYCNYTTDVVASVAFGTPVDSWQAPEDPFVKHCKRFFEFCIPRPILVLLLSFPSIMVPLARILPNKNRDELNGFFNKLIRNVIALRDQQAAEERRRDFLQMVLDARHSASPMGVQDFDIVRDVFSSTGCKPNPSRQHQPSPMARPLTVDEIVGQAFIFLIAGYEIITNTLSFATYLLATNPDCQEKLLREVDVFKEKHMAPEFCSLEEGLPYLDMVIAETLRMYPPAFRFTREAAQDCEVLGQRIPAGAVLEMAVGALHHDPEHWPSPETFNPERYRCS

SEQ ID NO: 67011 - protein, 460 aa, Homo sapiens
MMEALGFLKLEVNGPMVTVALSVALLALLKWYSTSAFSRLEKLGLRHPKPSPFIGNLTFFRQGFWESQMELRKLYGPLCGYYLGRRMFIVISEPDMIKQVLVENFSNFTNRMASGLEFKSVADSVLFLRDKRWEEVRGALMSAFSPEKLNEMVPLISQACELLLAHLKRYAESGDAFDIQRCYCNYTTDVVASVAFGTPVDSWQAPEDPFVKHCKRFFEFCIPRPILVLLLSFPSIMVPLARILPNKNRDELNGFFNKLIRNVIALRDQQAAEERRRDFLQMVLDARHSASPMGVQDFDIVRDVFSSTGCKPNPSRQHQPSPMARPLTVDEIVGQAFIFLIAGYEIITNTLSFATYLLATNPDCQEKLLREVDVFKEKHMAPEFCSLEEGLPYLDMVIAETLRMYPPAFRFTREAAQDCEVLGQRIPAGAVLEMAVGALHHDPEHWPSPETFNPERYRCS

SEQ ID NO: 67012 - protein, 580 aa, Homo sapiens
MMEALGFLKLEVNGPMVTVALSVALLALLKWYSTSAFSRLEKLGLRHPKPSPFIGNLTFFRQGFWESQMELRKLYGPLCGYYLGRRMFIVISEPDMIKQVLVENFSNFTNRMASGLEFKSVADSVLFLRDKRWEEVRGALMSAFSPEKLNELGLLIMQERIKGHMGGQQAPQRIPPTRLSKPSGIYVNLHYATLPFCMVPLISQACELLLAHLKRYAESGDAFDIQRCYCNYTTDVVASVAFGTPVDSWQAPEDPFVKHCKRFFEFCIPRPILVLLLSFPSIMVPLARILPNKNRDELNGFFNKLIRNVIALRDQQAAEERRRDFLQMVLDARHSASPMGVQDFDIVRDVFSSTGCKPNPSRQHQPSPMARPLTVDEIVGQAFIFLIAGYEIITNTLSFATYLLATNPDCQEKLLREVDVFKEKHMAPEFCSLEEGLPYLDMVIAETLRMYPPAFRFTREAAQDCEVLGQRIPAGAVLEMAVGALHHDPEHWPSPETFNPERFTAEARQQHRPFTYLPFGAGPRSCLGVRLGLLEVKLTLLHVLHKFRFQACPETQVPLQLESKSALGPKNGVYIKIVSR

SEQ ID NO: 67013 - protein, 534 aa, Homo sapiens; identical to SEQ ID NO: 67008

SEQ ID NO: 67014 - protein, 150 aa, Homo sapiens
MEALGFLKLEVNGPMVTVALSVALLALLKWYSTSAFSRLEKLGLRHPKPSPFIGNLTFFRQGFWESQMELRKLYGPLCGYYLGRRMFIVISEPDMIKQVLVENFSNFTNRMASGLEFKSVADSVLFLRDKRWEEVRGALMSAFSPEKLNE

SEQ ID NO: 67015 - protein, 533 aa, Homo sapiens [sequence omitted]

SEQ ID NO: 67016 - protein, 152 aa, Homo sapiens
MMEALGFLKLEVNGPMVTVALSVALLALLKWYSTSAFSRLEKLGLRHPKPSPFIGNLTFFRQGFWESQMELRKLYGPLCGYYLGRRMFIVISEPDMIKQVLVENFSNFTNRMPQSIMPNSRHHVASRGMWPGGRRLACYLHPFRMAEGIAEV

SEQ ID NO: 67017 - protein, 466 aa, Homo sapiens
MELRKLYGPLCGYYLGRRMFIVISEPDMIKQVLVENFSNFTNRMASGLEFKSVADSVLFLRDKRWEEVRGALMSAFSPEKLNEMVPLISQACELLLAHLKRYAESGDAFDIQRCYCNYTTDVVASVAFGTPVDSWQAPEDPFVKHCKRFFEFCIPRPILVLLLSFPSIMVPLARILPNKNRDELNGFFNKLIRNVIALRDQQAAEERRRDFLQMVLDARHSASPMGVQDFDIVRDVFSSTGCKPNPSRQHQPSPMARPLTVDEIVGQAFIFLIAGYEIITNTLSFATYLLATNPDCQEKLLREVDVFKEKHMAPEFCSLEEGLPYLDMVIAETLRMYPPAFRFTREAAQDCEVLGQRIPAGAVLEMAVGALHHDPEHWPSPETFNPERFTAEARQQHRPFTYLPFGAGPRSCLGVRLGLLEVKLTLLHVLHKFRFQACPETQVPLQLESKSALGPKNGVYIKIVSR

SEQ ID NO: 67018 - protein, 343 aa, Homo sapiens
MWPNGSSLGPCFRPTNITLEERRLIASPWFAASFCVVGLASNLLALSVLAGARQGGSHTRSSFLTFLCGLVLTDFLGLLVTGTIVVSQHAALFEWHAVDPGCRLCRFMGVVMIFFGLSPLLLGAAMASERYLGITRPFSRPAVASQRRAWATVGLVWAAALALGLLPLLGVGRYTVQYPGSWCFLTLGAESGDVAFGLLFSMLGGLSVGLSFLLNTVSVATLCHVYHGQEAAQQRPRDSEVEMMAQLLGIMVVASVCWLPLLVFIAQTVLRNPPAMSPAGQLSRTTEKELLIYLRVATWNQILDPWVYILFRRAVLRRLQPRLSTRPRSLSLQPQLTQRSGLQ

SEQ ID NO: 67019 - protein, 407 aa, Homo sapiens
MWPNGSSLGPCFRPTNITLEERRLIASPWFAASFCVVGLASNLLALSVLAGARQGGSHTRSSFLTFLCGLVLTDFLGLLVTGTIVVSQHAALFEWHAVDPGCRLCRFMGVVMIFFGLSPLLLGAAMASERYLGITRPFSRPAVASQRRAWATVGLVWAAALALGLLPLLGVGRYTVQYPGSWCFLTLGAESGDVAFGLLFSMLGGLSVGLSFLLNTVSVATLCHVYHGQEAAQQRPRDSEVEMMAQLLGIMVVASVCWLPLLVFIAQTVLRNPPAMSPAGQLSRTTEKELLIYLRVATWNQILDPWVYILFRRAVLRRLQPRLSTRPRRSLTLWPSLEYSGTISAHCNLRLPGSSDSRASASRAAGITGVSHCARPCMLFDPEFDLLAGVQLLPFEPPTGKALSRKD

SEQ ID NO: 67020 - protein, 473 aa, Homo sapiens
MREVRARLAATQVEYISGKVFFTTCSDLNMLKKLKSAERLFLLIKKQFPLIISSVSKGKIFNEMQRLINEDPGSWLNAISIWKNLLELDAKKEKLSQRDDNQLKRKVGENEIIAKKLKIEQMQKIEENRDCQLEKQIKEETLEQRDFTTKSEKFQEEEFQNDIEKAIDTHNQNDLTFRVSCRCSGTIGKAFTAQEVGKVIGIAIMKHFGWKADLRNPQLEIFIHLNDIYSVVGIPVFRVSLASRAYIKTAGLRSTIAWAMASLADIKAGAFVLDPMCGLGTILLEAAKEWPDVYYVGADVSDSQLLGTWDNLKAAGLEDKIELLKISVIELPLPSESVDIIISDIPFGKKFKLGKDIKSILQEMERVLHVGGTIVLLLSEDHHRRLTDCKESNIPFNSKDSHTDEPGIKKCLNPEEKTGAFKTASTSFEASNHKFLDRMSPFGSLVPVECYKVSLGKTDAFICKYKKSHSSGL

SEQ ID NO: 67021 - protein, 290 aa, Homo sapiens [sequence omitted]

SEQ ID NO: 67022 - protein, 503 aa, Homo sapiens
MSEARGEPGSGPEAGARFFCTAGRGLEPFVMREVRARLAATQVEYISGKVFFTTCSDLNMLKKLKSAERLFLLIKKQFPLIISSVSKGKIFNEMQRLINEDPGSWLNAISIWKNLLELDAKKEKLSQRDDNQLKRKVGENEIIAKKLKIEQMQKIEENRDCQLEKQIKEETLEQRDFTTKSEKFQEEEFQNDIEKAIDTHNQNDLTFRVSCRCSGTIGKAFTAQEVGKVIGIAIMKHFGWKADLRNPQLEIFIHLNDIYSVVGIPVFRVSLASRAYIKTAGLRSTIAWAMASLADIKAGAFVLDPMCGLGTILLEAAKEWPDVYYVGADVSDSQLLGTWDNLKAAGLEDKIELLKISVIELPLPSESVDIIISDIPFGKKFKLGKDIKSILQEMERVLHVGGTIVLLLSEDHHRRLTDCKESNIPFNSKDSHTDEPGIKKCLNPEEKTGAFKTASTSFEASNHKFLDRMSPFGSLVPVECYKVSLGKTDAFICKYKKSHSSGL

SEQ ID NO: 67023 - protein, 161 aa, Homo sapiens
MNLAISIALLLTVLQVSRGQKVTSLTACLVDQSLRLDCRHENTSSSPIQYEFSLTRETKKHVLFGTVGVPEHTYRSRTNFTSKYNMKVLYLSAFTSKDEGTYTCALHHSGHSPPISSQNVTVLRDKLVKCEGISLLAQNTSWLLLLLLSLSLLQATDFMSL

SEQ ID NO: 67024 - protein, 161 aa, Homo sapiens; identical to SEQ ID NO: 67023

SEQ ID NO: 67025 - protein, 159 aa, Homo sapiens
MFPFALLYVLSVSFRKIFILQLVGLVLTYDFTNCDFEKIKAAYLSTISKDLITYMSGTKSTEFNNTVSCSNRPHCLTEIQSLTFNPTAGCASLAKEMFAMKTKAALAIWCPGYSETQINATQAMKKRRKRKVTTNKCLEQVSQLQGLWRRFNRPLLKQQ

SEQ ID NO: 67026 - protein, 63 aa, Homo sapiens
MFAMKTKAALAIWCPGYSETQINATQAMKKRRKRKVTTNKCLEQVSQLQGLWRRFNRPLLKQQ

SEQ ID NO: 67027 - protein, 234 aa, Homo sapiens
MSCINLPTVLPGSPSKTRGQIQVILGPMFSGKSTELMRRVRRFQIAQYKCLVIKYAKDTRYSSSFCTHDRNTMEALPACLLRDVAQEALGVAVIGIDEGQFFPDIVEFCEAMANAGKTVIVAALDGTFQRKPFGAILNLVPLAESVVKLTAVCMECFREAAYTKRLGTEKEVEVIGGADKYHSVCRLCYFKKASGQPAGPDNKENCPVPGKPGEAVAARKLFAPQQILQCSPAN

SEQ ID NO: 67028 - protein, 234 aa, Homo sapiens; identical to SEQ ID NO: 67027

SEQ ID NO: 67029 - protein, 307 aa, Homo sapiens
MRPGLFKGQAPGSRRRPTAGLAVVRADSHKKEPRASGSARPAMLLWPLRGWAARALRCFGPGSRGSPASGPGPRRVQRRAWPPDKEQEKEKKSVICVEGNIASGKTTCLEFFSNATDVEVLTEPVSKWRNVRGHNPLGLMYHDASRWGLTLQTYVQLTMLDRHTRPQVSSVRLMERSIHSARYIFVENLYRSGKMPEVDYVVLSEWFDWILRNMDVSVDLIVYLRTNPETCYQRLKKRCREEEKVIPLEYLEAIHHLHEEWLIKGSLFPMAAPVLVIEADHHMERMLELFEQNRDRILTPENRKHCP

SEQ ID NO: 67030 - protein, 247 aa, Homo sapiens
MLLWPLRGWAARALRCFGPGSRGSPASGPGPRRVQRRAWPPDKEQEKEKKSVICVEGNIASGKTTCLEFFSNATDVEGLMYHDASRWGLTLQTYVQLTMLDRHTRPQVSSVRLMERSIHSARYIFVENLYRSGKMPEVDYVVLSEWFDWILRNMDVSVDLIVYLRTNPETCYQRLKKRCREEEKVIPLEYLEAIHHLHEEWLIKGSLFPMAAPVLVIEADHHMERMLELFEQNRDRILTPENRKHCP

SEQ ID NO: 67031 - protein, 265 aa, Homo sapiens
MLLWPLRGWAARALRCFGPGSRGSPASGPGPRRVQRRAWPPDKEQEKEKKSVICVEGNIASGKTTCLEFFSNATDVEVLTEPVSKWRNVRGHNPLGLMYHDASRWGLTLQTYVQLTMLDRHTRPQVSSVRLMERSIHSARYIFVENLYRSGKMPEVDYVVLSEWFDWILRNMDVSVDLIVYLRTNPETCYQRLKKRCREEEKVIPLEYLEAIHHLHEEWLIKGSLFPMAAPVLVIEADHHMERMLELFEQNRDRILTPENRKHCP

SEQ ID NO: 67032 - protein, 168 aa, Homo sapiens
MYHDASRWGLTLQTYVQLTMLDRHTRPQVSSVRLMERSIHSARYIFVENLYRSGKMPEVDYVVLSEWFDWILRNMDVSVDLIVYLRTNPETCYQRLKKRCREEEKVIPLEYLEAIHHLHEEWLIKGSLFPMAAPVLVIEADHHMERMLELFEQNRDRILTPENRKHCP

SEQ ID NO: 67033 - protein, 234 aa, Homo sapiens
MGAFCQRPSSDKEQEKEKKSVICVEGNIASGKTTCLEFFSNATDVEVLTEPVSKWRNVRGHNPLGLMYHDASRWGLTLQTYVQLTMLDRHTRPQVSSVRLMERSIHSARYIFVENLYRSGKMPEVDYVVLSEWFDWILRNMDVSVDLIVYLRTNPETCYQRLKKRCREEEKVIPLEYLEAIHHLHEEWLIKGSLFPMAAPVLVIEADHHMERMLELFEQNRDRILTPENRKHCP

SEQ ID NO: 67034 - protein, 168 aa, Homo sapiens; identical to SEQ ID NO: 67032

SEQ ID NO: 67035 - protein, 216 aa, Homo sapiens
MTSICVEGNIASGKTTCLEFFSNATDVEVLTEPVSKWRNVRGHNPLGLMYHDASRWGLTLQTYVQLTMLDRHTRPQVSSVRLMERSIHSARYIFVENLYRSGKMPEVDYVVLSEWFDWILRNMDVSVDLIVYLRTNPETCYQRLKKRCREEEKVIPLEYLEAIHHLHEEWLIKGSLFPMAAPVLVIEADHHMERMLELFEQNRDRILTPENRKHCP

SEQ ID NO: 67036 - protein, 240 aa, Homo sapiens
MLLWPLRGWAARALRCFGPGSRGSPASGPGPRRVQRRAWPPDKEQEKEKKSVVLTEPVSKWRNVRGHNPLGLMYHDASRWGLTLQTYVQLTMLDRHTRPQVSSVRLMERSIHSARYIFVENLYRSGKMPEVDYVVLSEWFDWILRNMDVSVDLIVYLRTNPETCYQRLKKRCREEEKVIPLEYLEAIHHLHEEWLIKGSLFPMAAPVLVIEADHHMERMLELFEQNRDRILTPENRKHCP

SEQ ID NO: 67037 - protein, 279 aa, Homo sapiens
MPVAGSELPRRPLPPAAQERDAEPRPPHGELQYLGQIQHILRCGVRKDDRTGTGTLSVFGMQARYSLRDEFPLLTTKRVFWKGVLEELLWFIKGSTNAKELSSKGVKIWDANGSRDFLDSLGFSTREEGDLGPVYGFQWRHFGAEYRDMESDLPLMALPPCHALCQFYVVNSELSCQLYQRSGDMGLGVPFNIASYALLTYMIAHITGLKPGDFIHTLGDAHIYLNHIEPLKIQLQREPRPFPKLRILRKVEKIDDFKAEDFQIEGYNPHPTIKMEMAV

SEQ ID NO: 67038 - protein, 230 aa, Homo sapiens
MPVAGSELPRRPLPPAAQERDAEPRPPHGELQYLGQIQHILRCGVRKDDRTGTGTLSVFGMQARYSLRDYSGQGVDQLQRVIDTIKTNPDDRRIIMCAWNPRDLPLMALPPCHALCQFYVVNSELSCQLYQRSGDMGLGVPFNIASYALLTYMIAHITGLKPGDFIHTLGDAHIYLNHIEPLKIQLQREPRPFPKLRILRKVEKIDDFKAEDFQIEGYNPHPTIKMEMAV

SEQ ID NO: 67039 - protein, 313 aa, Homo sapiens
MPVAGSELPRRPLPPAAQERDAEPRPPHGELQYLGQIQHILRCGVRKDDRTGTGTLSVFGMQARYSLRDEFPLLTTKRVFWKGVLEELLWFIKGSTNAKELSSKGVKIWDANGSRDFLDSLGFSTREEGDLGPVYGFQWRHFGAEYRDMESDYSGQGVDQLQRVIDTIKTNPDDRRIIMCAWNPRDLPLMALPPCHALCQFYVVNSELSCQLYQRSGDMGLGVPFNIASYALLTYMIAHITGLKPGDFIHTLGDAHIYLNHIEPLKIQLQREPRPFPKLRILRKVEKIDDFKAEDFQIEGYNPHPTIKMEMAV

SEQ ID NO: 67040 - protein, 225 aa, Homo sapiens
MSRPRKRLAGTSGSDKGLSGKRTKTENSGEALAKVEDSNPQKTSATKNCLKNLSSHWLMKSEPESRLEKGVDVKFSIEDLKAQPKQTTCWDGVRNYQARNFLRAMKLGEEAFFYHSNCKEPGIAGLMKIVKEAYPDHTQFEKNNPHYDPSSKEDNPKWSMVDVQFVRMMKRFIPLAELKSYHQAHKATGGPLKNMVLFTRQRLSIQPLTQEEFDFVLSLEEKEPS

SEQ ID NO: 67041 - protein, 166 aa, Homo sapiens
MSRPRKRLAGTSGSDKGLSGKRTKTENSGEALAKVEDSNPQKTSATKNCLKNLSSHWLMKSEPESRLEKGVDVKFSIEDLKAQPKQTTCWDGVRNYQARNFLRAMKLGEEAFFYHSNCKEPGIAGLMKIVKEAYPDHTQFEKNNPHYDPSSKEDNPKWSMKSLILF

SEQ ID NO: 67042 - protein, 225 aa, Homo sapiens; identical to SEQ ID NO: 67040

SEQ ID NO: 67043 - protein, 225 aa, Homo sapiens; identical to SEQ ID NO: 67040

SEQ ID NO: 67044 - protein, 641 aa, Homo sapiens
MALSLEEFVHSLDLRTLPRVLEIQAGIYLEGSIYEMFGNECCFSTGEVIKITGLKVKKIIAEICEQIEGCESLQPFELPMNFPGLFKIVADKTPYLTMEEITRTIHIGPSRLGHPCFYHQKDIKLENLIIKQGEQIMLNSVEEIDGEIMVSCAVARNHQTHSFNLPLSQEGEFYECEDERIYTLKEIVEWKIPKNRTRTVNLTDFSNKWDSTNPFPKDFYGTLILKPVYEIQGVMKFRKDIIRILPSLDVEVKDITDSYDANWFLQLLSTEDLFEMTSKEFPIVTEVIEAPEGNHLPQSILQPGKTIVIHKKYQASRILASEIRSNFPKRHFLIPTSYKGKFKRRPREFPTAYDLEIAKSEKEPLHVVATKAFHSPHDKLSSVSVGDQFLVHQSETTEVLCEGIKKVVNVLACEKILKKSYEAALLPLYMEGGFVEVIHDKKQYPISELCKQFRLPFNVKVSVRDLSIEEDVLAATPGLQLEEDITDSYLLISDFANPTECWEIPVGRLNMTVQLVSNFSRDAEPFLVRTLVEEITEEQYYMMRRYESSASHPPPRPPKHPSVEETKLTLLTLAEERTVDLPKSPKRHHVDITKKLHPNQAGLDSKVLIGSQNDLVDEEKERSNRGATAIAETFKNEKHQK

SEQ ID NO: 67045 - protein, 562 aa, Homo sapiens
MNFPGLFKIVADKTPYLTMEEITRTIHIGPSRLGHPCFYHQKDIKLENLIIKQGEQIMLNSVEEIDGEIMVSCAVARNHQTHSFNLPLSQEGEFYECEDERIYTLKEIVEWKIPKNRTRTVNLTDFSNKWDSTNPFPKDFYGTLILKPVYEIQGVMKFRKDIIRILPSLDVEVKDITDSYDANWFLQLLSTEDLFEMTSKEFPIVTEVIEAPEGNHLPQSILQPGKTIVIHKKYQASRILASEIRSNFPKRHFLIPTSYKGKFKRRPREFPTAYDLEIAKSEKEPLHVVATKAFHSPHDKLSSVSVGDQFLVHQSETTEVLCEGIKKVVNVLACEKILKKSYEAALLPLYMEGGFVEVIHDKKQYPISELCKQFRLPFNVKVSVRDLSIEEDVLAATPGLQLEEDITDSYLLISDFANPTECWEIPVGRLNMTVQLVSNFSRDAEPFLVRTLVEEITEEQYYMMRRYESSASHPPPRPPKHPSVEETKLTLLTLAEERTVDLPKSPKRHHVDITKKLHPNQAGLDSKVLIGSQNDLVDEEKERSNRGATAIAETFKNEKHQK

SEQ ID NO: 67046 - protein, 123 aa, Homo sapiens
MNFPVRKDIIRILPSLDVEVKDITDSYDANWFLQLLSTEDLFEMTSKEFPIVTEVIEAPEGNHLPQSILQPGKTIVIHKKYQASRILASEIRSNFPKRHFLIPTSYKGKFKRRPREFPTAYDL

SEQ ID NO: 67047 - protein, 606 aa, Homo sapiens
MFGNECCFSTGEVIKITGLKVKKIIAEICEQIEGCESLQPFELPMNFPGLFKIVADKTPYLTMEEITRTIHIGPSRLGHPCFYHQKDIKLENLIIKQGEQIMLNSVEEIDGEIMVSCAVARNHQTHSFNLPLSQEGEFYECEDERIYTLKEIVEWKIPKNRTRTVNLTDFSNKWDSTNPFPKDFYGTLILKPVYEIQGVMKFRKDIIRILPSLDVEVKDITDSYDANWFLQLLSTEDLFEMTSKEFPIVTEVIEAPEGNHLPQSILQPGKTIVIHKKYQASRILASEIRSNFPKRHFLIPTSYKGKFKRRPREFPTAYDLEIAKSEKEPLHVVATKAFHSPHDKLSSVSVGDQFLVHQSETTEVLCEGIKKVVNVLACEKILKKSYEAALLPLYMEGGFVEVIHDKKQYPISELCKQFRLPFNVKVSVRDLSIEEDVLAATPGLQLEEDITDSYLLISDFANPTECWEIPVGRLNMTVQLVSNFSRDAEPFLVRTLVEEITEEQYYMMRRYESSASHPPPRPPKHPSVEETKLTLLTLAEERTVDLPKSPKRHHVDITKKLHPNQAGLDSKVLIGSQNDLVDEEKERSNRGATAIAETFKNEKHQK

SEQ ID NO: 67048 - protein, 680 aa, Homo sapiens
MALSLEEFVHSLDLRTLPRVLEIQAGIYLEGSIYEMFGNECCFSTGEVIKITGLKVKKIIAEICEQIEGCESLQPFELPMNFPGLFKIVADKTPYLTMEEITRTIHIGPSRLGHPCFYHQKDIKLENLIIKQGEQIMLNSVEEIDGEIMVSCAVARNHQTHSFNLPLSQEGEFYECEDERIYTLKEIVEWKIPKNRTRTVNLTDFSNKWDSTNPFPKDFYGTLILKPVYEIQGVMKFRKDIIRILPSLDVEVKDITDSYDANWFLQLLSTEDLFEMTSKEFPIVTEVIEAPEGNHLPQSILQPGKTIVIHKKYQASRILASEIRSNFPKRHFLIPTSYKGKFKRRPREFPTAYDLEIAKSEKEPLHVVATKAFHSPHDKLSSVSVGDQFLVHQSETTEVLCEGIKKVVNVLACEKILKKSYEAALLPLYMEGGFVEVIHDKKQYPISELCKQFRLPFNVKVSVRDLSIEEDVLAATPGLQLEEDITDSYLLISDFANPTECWEIPVGRLNMTVQLVSNFSRDAEPFLVRTLVEEITEEQYYMMRRYESSASHPPPRPPKHPSVEETKLTLLTLAEERTVDLPKSPKAGVQWRDLGSLQPLPPGFKQFSASASHVAGITGTPHHVQRHHVDITKKLHPNQAGLDSKVLIGSQNDLVDEEKERSNRGATAIAETFKNEKHQK

SEQ ID NO: 67049 - protein, 526 aa, Homo sapiens
MDVRFYPPPAQPAAAPDAPCLGPSPCLDPYYCNKFDGENMYMSMTEPSQDYVPASQSYPGPSLESEDFNIPPITPPSLPDHSLVHLNEVESGYHSLCHPMNHNGLLPFHPQNMDLPEITVSNMLGQDGTLLSNSISVMPDIRNPEGTQYSSHPQMAAMRPRGQPADIRQQPGMMPHGQLTTINQSQLSAQLGLNMGGSNVPHNSPSPPGSKSATPSPSSSVHEDEGDDTSKINGGEKRPASDMGKKPKTPKKKKKKDPNEPQKPVSAYALFFRDTQAAIKGQNPNATFGEVSKIVASMWDGLGEEQKQVYKKKTEAAKKEYLKQLAAYRASLVSKSYSEPVDVKTSQPPQLINSKPSVFHGPSQAHSALYLSSHYHQQPGMNPHLTAMHPSLPRNIAPKPNNQMPVTVSIANMAVSPPPPLQISPPLHQHLNMQQHQPLTMQQPLGNQLPMQVQSALHSPTMQQGFTLQPDYQTIINPTSTAAQVVTQAMEYVRSGCRNPPPQPVDWNNDYCSSGGMQRDKALYLT

SEQ ID NO: 67050 - protein, 276 aa, Homo sapiens
MGKKPKTPKKKKKKDPNEPQKPVSAYALFFRDTQAAIKGQNPNATFGEVSKIVASMWDGLGEEQKQVYKKKTEAAKKEYLKQLAAYRASLVSKSYSEPVDVKTSQPPQLINSKPSVFHGPSQAHYHQQPGMNPHLTAMHPSLPRNIAPKPNNQMPVTVSIANMAVSPPPPLQISPPLHQHLNMQQHQPLTMQQPLGNQLPMQVQSALHSPTMQQGFTLQPDYQTIINPTSTAAQVVTQAMEYVRSGCRNPPPQPVDWNNDYCSSGGMQRDKALYLT

SEQ ID NO: 67051 - protein, 248 aa, Homo sapiens
MPEFLEDPSVLTKDKLKSELVANNVTLPAGEQRKDVYVQLYLQHLTARNRPPLPAGTNSKGPPDFSSDEEREPTPVLGSGAAAAGRSRAAVGRKATKKTDKPRQEDKDDLDVTELTNEDLLDQLVKYGVNPGPIVGTTRKLYEKKLLKLREQGTESRSSTPLPTISSSAENTRQNGSNDSDRYSDNEEDSKIELKLEKREPLKGRAKTPVTLKQRRVEHNQVSLVLLPPCTGINNLLTTLIHVLAFNG

SEQ ID NO: 67052 - protein, 694 aa, Homo sapiens
MPEFLEDPSVLTKDKLKSELVANNVTLPAGEQRKDVYVQLYLQHLTARNRPPLPAGTNSKGPPDFSSDEEREPTPVLGSGAAAAGRSRAAVGRKATKKTDKPRQEDKDDLDVTELTNEDLLDQLVKYGVNPGPIVGTTRKLYEKKLLKLREQGTESRSSTPLPTISSSAENTRQNGSNDSDRYSDNEEGKKKEHKKVKSTRDIVPFSELGTTPSGGGFFQGISFPEISTRPPLGSTELQAAKKVHTSKGDLPREPLVATNLPGRGQLQKLASERNLFISCKSSHDRCLEKSSSSSSQPEHSAMLVSTAASPSLIKETTTGYYKDIVENICGREKSGIQPLCPERSHISDQSPLSSKRKALEESESSQLISPPLAQAIRDYVNSLLVQGGVGSLPGTSNSMPPLDVENIQKRIDQSKFQETEFLSPPRKVPRLSEKSVEERDSGSFVAFQNIPGSELMSSFAKTVVSHSLTTLGLEVAKQSQHDKIDASELSFPFHESILKVIEEEWQQVDRQLPSLACKYPVSSREATQILSVPKVDDEILGFISEATPLGGIQAASTESCNQQLDLALCRAYEAAASALQIATHTAFVAKAMQADISQAAQILSSDPSRTHQALGILSKTYDAASYICEAAFDEVKMAAHTMGNATVGRRYLWLKDCKINLASKNKLASTPFKGGTLFGGEVCKVIKKRGNKH

SEQ ID NO: 67053 - protein, 414 aa, Homo sapiens
MPEFLEDPSVLTKDKLKSELVANNVTLPAGEQRKDVYVQLYLQHLTARNRPPLPAGTNSKGPPDFSSDEEREPTPVLGSGAAAAGRSRAAVGRKATKKTDKPRQEDKDDLDVTELTNEDLLDQLVKYGVNPGPIVGTTRKLYEKKLLKLREQGTESRSSTPLPTISSSAENTRQNGSNDSDRYSDNEEDSKIELKLEKREPLKGRAKTPVTLKQRRVEHNQVETSEHFRIDGPVISESTPIAETIMASSNESLVVNRVTGNFKHASPILPITEFSDIPRRAPKKPLTRAEVGEKTEERRVERDILKEMFPYEASTPTGISASCRRPIKGAAGRPLELSDFRMEESFSSKYVPKYVPLADVKSEKTKKGRSIPVWIKILLFVVVAVFLFLVYQAMETNQVNPFSNFLHVDPRKSN

SEQ ID NO: 67054 - protein, 345 aa, Homo sapiens
MPEFLEDPSVLTKDKLKSELVANNVTLPAGEQRKDVYVQLYLQHLTARNRPPLPAGTNSKGPPDFSSDEEREPTPVLGSGAAAAGRSRAAVGRKATKKTDKPRQEDKDDLDVTELTNEDLLDQLVKYGVNPGPIVGTTRKLYEKKLLKLREQGTESRSSTPLPTISSSAENTRQNGSNDSDRYSDNEEDSKIELKLEKREPLKGRAKTPVTLKQRRVEHNQVGEKTEERRVERDILKEMFPYEASTPTGISASCRRPIKGAAGRPLELSDFRMEESFSSKYVPKYVPLADVKSEKTKKGRSIPVWIKILLFVVVAVFLFLVYQAMETNQVNPFSNFLHVDPRKSN

SEQ ID NO: 67055 - protein, 454 aa, Homo sapiens
MPEFLEDPSVLTKDKLKSELVANNVTLPAGEQRKDVYVQLYLQHLTARNRPPLPAGTNSKGPPDFSSDEEREPTPVLGSGAAAAGRSRAAVGRKATKKTDKPRQEDKDDLDVTELTNEDLLDQLVKYGVNPGPIVGTTRKLYEKKLLKLREQGTESRSSTPLPTISSSAENTRQNGSNDSDRYSDNEEDSKIELKLEKREPLKGRAKTPVTLKQRRVEHNQSYSQAGITETEWTSGSSKGGPLQALTRESTRGSRRTPRKRVETSEHFRIDGPVISESTPIAETIMASSNESLVVNRVTGNFKHASPILPITEFSDIPRRAPKKPLTRAEVGEKTEERRVERDILKEMFPYEASTPTGISASCRRPIKGAAGRPLELSDFRMEESFSSKYVPKYVPLADVKSEKTKKGRSIPVWIKILLFVVVAVFLFLVYQAMETNQVNPFSNFLHVDPRKSN

SEQ ID NO: 67056 - protein, 44 aa, Homo sapiens
MSDKPDMAEIEKFDKSKLKKTETQEKNPLPSKETIEQEKQAGES

SEQ ID NO: 67057 - protein, 44 aa, Homo sapiens; identical to SEQ ID NO: 67056

SEQ ID NO: 67058 - protein, 44 aa, Homo sapiens; identical to SEQ ID NO: 67056

SEQ ID NO: 67059 - protein, 44 aa, Homo sapiens; identical to SEQ ID NO: 67056

SEQ ID NO: 67060 - protein, 44 aa, Homo sapiens
MSDKPGMAEIEKFDKSKLKKTETQEKNPLSSKETIEQERQAGES

SEQ ID NO: 67061 - protein, 2768 aa, Homo sapiens
MALVLEIFTLLASICWVSANIFEYQVDAQPLRPCELQRETAFLKQADYVPQCAEDGSFQTVQCQNDGRSCWCVGANGSEVLGSRQPGRPVACLSFCQLQKQQILLSGYINSTDTSYLPQCQDSGDYAPVQCDVQQVQCWCVDAEGMEVYGTRQLGRPKRCPRSCEIRNRRLLHGVGDKSPPQCSAEGEFMPVQCKFVNTTDMMIFDLVHSYNRFPDAFVTFSSFQRRFPEVSGYCHCADSQGRELAETGLELLLDEIYDTIFAGLDLPSTFTETTLYRILQRRFLAVQSVISGRFRCPTKCEVERFTATSFGHPYVPSCRRNGDYQAVQCQTEGPCWCVDAQGKEMHGTRQQGEPPSCAEGQSCASERQQALSRLYFGTSGYFSQHDLFSSPEKRWASPRVARFATSCPPTIKELFVDSGLLRPMVEGQSQQFSVSENLLKEAIRAIFPSRGLARLALQFTTNPKRLQQNLFGGKFLVNVGQFNLSGALGTRGTFNFSQFFQQLGLASFLNGGRQEDLAKPLSVGLDSNSSTGTPEAAKKDGTMNKPTVGSFGFEINLQENQNALKFLASLLELPEFLLFLQHAISVPEDVARDLGDVMETVLSSQTCEQTPERLFVPSCTTEGSYEDVQCFSGECWCVNSWGKELPGSRVRGGQPRCPTDCEKQRARMQSLMGSQPAGSTLFVPACTSEGHFLPVQCFNSECYCVDAEGQAIPGTRSAIGKPKKCPTPCQLQSEQAFLRTVQALLSNSSMLPTLSDTYIPQCSTDGQWRQVQCNGPPEQVFELYQRWEAQNKGQDLTPAKLLVKIMSYREAASGNFSLFIQSLYEAGQQDVFPVLSQYPSLQDVPLAALEGKRPQPRENILLEPYLFWQILNGQLSQYPGSYSDFSTPLAHFDLRNCWCVDEAGQELEGMRSEPSKLPTCPGSCEEAKLRVLQFIRETEEIVSASNSSRFPLGESFLVAKGIRLRNEDLGLPPLFPPREAFAEQFLRGSDYAIRLAAQSTLSFYQRRRFSPDDSAGASALLRSGPYMPQCDAFGSWEPVQCHAGTGHCWCVDEKGGFIPGSLTARSLQIPQCPTTCEKSRTSGLLSSWKQARSQENPSPKDLFVPACLETGEYARLQASGAGTWCVDPASGEELRPGSSSSAQCPSLCNVLKSGVLSRRVSPGYVPACRAEDGGFSPVQCDQAQGSCWCVMDSGEEVPGTRVTGGQPACESPRCPLPFNASEVVGGTILCETISGPTGSAMQQCQLLCRQGSWSVFPPGPLICSLESGRWESQLPQPRACQRPQLWQTIQTQGHFQLQLPPGKMCSADYADLLQTFQVFILDELTARGFCQIQVKTFGTLVSIPVCNNSSVQVGCLTRERLGVNVTWKSRLEDIPVASLPDLHDIERALVGKDLLGRFTDLIQSGSFQLHLDSKTFPAETIRFLQGDHFGTSPRTWFGCSEGFYQVLTSEASQDGLGCVKCPEGSYSQDEECIPCPVGFYQEQAGSLACVPCPVGRTTISAGAFSQTHCVTDCQRNEAGLQCDQNGQYRASQKDRGSGKAFCVDGEGRRLPWWETEAPLEDSQCLMMQKFEKVPESKVIFDANAPVAVRSKVPDSEFPVMQCLTDCTEDEACSFFTVSTTEPEISCDFYAWTSDNVACMTSDQKRDALGNSKATSFGSLRCQVKVRSHGQDSPAVYLKKGQGSTTTLQKRFEPTGFQNMLSGLYNPIVFSASGANLTDAHLFCLLACDRDLCCDGFVLTQVQGGAIICGLLSSPSVLLCNVKDWMDPSEAWANATCPGVTYDQESHQVILRLGDQEFIKSLTPLEGTQDTFTNFQQVYLWKDSDMGSRPESMGCRKDTVPRPASPTEAGLTTELFSPVDLNQVIVNGNQSLSSQKHWLFKHLFSAQQANLWCLSRCVQEHSFCQLAEITESASLYFTCTLYPEAQVCDDIMESNAQGCRLILPQMPKALFRKKVILEDKVKNFYTRLPFQKLMGISIRNKVPMSEKSISNGFFECERRCDADPCCTGFGFLNVSQLKGGEVTCLTLNSLGIQMCSEENGGAWRILDCGSPDIEVHTYPFGWYQKPIAQNNAPSFCPLVVLPSLTEKVSLDSWQSLALSSVVVDPSIRHFDVAHVSTAATSNFSAVRDLCLSECSQHEACLITTLQTQPGAVRCMFYADTQSCTHSLQGQNCRLLLREEATHIYRKPGISLLSYEASVPSVPISTHGRLLGRSQAIQVGTSWKQVDQFLGVPYAAPPLAERRFQAPEPLNWTGSWDASKPRASCWQPGTRTSTSPGVSEDCLYLNVFIPQNVAPNASVLVFFHNTMDREESEGWPAIDGSFLAAVGNLIVVTASYRVGVFGFLSSGSGEVSGNWGLLDQVAALTWVQTHIRGFGGDPRRVSLAADRGGADVASIHLLTARATNSQLFRRAVLMGGSALSPAAVISHERAQQQAIALAKEVSCPMSSSQEVVSCLRQKPANVLNDAQTKLLAVSGPFHYWGPVIDGHFLREPPARALKRSLWVEVDLLIGSSQDDGLINRAKAVKQFEESRGRTSSKTAFYQALQNSLGGEDSDARVEAAATWYYSLEHSTDDYASFSRALENATRDYFIICPIIDMASAWAKRARGNVFMYHAPENYGHGSLELLADVQFALGLPFYPAYEGQFSLEEKSLSLKIMQYFSHFIRSGNPNYPYEFSRKVPTFATPWPDFVPRAGGENYKEFSELLPNRQGLKKADCSFWSKYISSLKTSADGAKGGQSAESEEEELTAGSGLREDLLSLQEPGSKTYSK

SEQ ID NO: 67062 - protein, 2711 aa, Homo sapiens
MALVLEIFTLLASICWVSANIFEYQVDAQPLRPCELQRETAFLKQADYVPQCAEDGSFQTVQCQNDGRSCWCVGANGSEVLGSRQPGRPVACLSFCQLQKQQILLSGYINSTDTSYLPQCQDSGDYAPVQCDVQQVQCWCVDAEGMEVYGTRQLGRPKRCPRSCEIRNRRLLHGVGDKSPPQCSAEGEFMPVQCKFVNTTDMMIFDLVHSYNRFPDAFVTFSSFQRRFPEVSGYCHCADSQGRELAETGLELLLDEIYDTIFAGLDLPSTFTETTLYRILQRRFLAVQSVISGRFRCPTKCEVERFTATSFGHPYVPSCRRNGDYQAVQCQTEGPCWCVDAQGKEMHGTRQQGEPPSCAEGQSCASERQQALSRLYFGTSGYFSQHDLFSSPEKRWASPRVARFATSCPPTIKELFVDSGLLRPMVEGQSQQFSVSENLLKEAIRAIFPSRGLARLALQFTTNPKRLQQNLFGGKFLVNVGQFNLSGALGTRGTFNFSQFFQQLGLASFLNGGRQEDLAKPLSVGLDSNSSTGTPEAAKKDGTMNKPTVGSFGFEINLQENQNALKFLASLLELPEFLLFLQHAISVPEDVARDLGDVMETVLSSQTCEQTPERLFVPSCTTEGSYEDVQCFSGECWCVNSWGKELPGSRVRGGQPRCPTDCEKQRARMQSLMGSQPAGSTLFVPACTSEGHFLPVQCFNSECYCVDAEGQAIPGTRSAIGKPKKCPTPCQLQSEQAFLRTVQALLSNSSMLPTLSDTYIPQCSTDGQWRQVQCNGPPEQVFELYQRWEAQNKGQDLTPAKLLVKIMSYREAASGNFSLFIQSLYEAGQQDVFPVLSQYPSLQDVPLAALEGKRPQPRENILLEPYLFWQILNGQLSQYPGSYSDFSTPLAHFDLRNCWCVDEAGQELEGMRSEPSKLPTCPGSCEEAKLRVLQFIRETEEIVSASNSSRFPLGESFLVAKGIRLRNEDLGLPPLFPPREAFAEQFLRGSDYAIRLAAQSTLSFYQRRRFSPDDSAGASALLRSGPYMPQCDAFGSWEPVQCHAGTGHCWCVDEKGGFIPGSLTARSLQIPQCPTTCEKSRTSGLLSSWKQARSQENPSPKDLFVPACLETGEYARLQASGAGTWCVDPASGEELRPGSSSSAQCPSLCNVLKSGVLSRRVSPGYVPACRAEDGGFSPVQCDQAQGSCWCVMDSGEEVPGTRVTGGQPACESPRCPLPFNASEVVGGTILCETISGPTGSAMQQCQLLCRQGSWSVFPPGPLICSLESGRWESQLPQPRACQRPQLWQTIQTQGHFQLQLPPGKMCSADYADLLQTFQVFILDELTARGFCQIQVKTFGTLVSIPVCNNSSVQVGCLTRERLGVNVTWKSRLEDIPVASLPDLHDIERALVGKDLLGRFTDLIQSGSFQLHLDSKTFPAETIRFLQGDHFGTSPRTWFGCSEGFYQVLTSEASQDGLGCVKCPEGSYSQDEECIPCPVGFYQEQAGSLACVPCPVGRTTISAGAFSQTHLMQKFEKVPESKVIFDANAPVAVRSKVPDSEFPVMQCLTDCTEDEACSFFTVSTTEPEISCDFYAWTSDNVACMTSDQKRDALGNSKATSFGSLRCQVKVRSHGQDSPAVYLKKGQGSTTTLQKRFEPTGFQNMLSGLYNPIVFSASGANLTDAHLFCLLACDRDLCCDGFVLTQVQGGAIICGLLSSPSVLLCNVKDWMDPSEAWANATCPGVTYDQESHQVILRLGDQEFIKSLTPLEGTQDTFTNFQQVYLWKDSDMGSRPESMGCRKDTVPRPASPTEAGLTTELFSPVDLNQVIVNGNQSLSSQKHWLFKHLFSAQQANLWCLSRCVQEHSFCQLAEITESASLYFTCTLYPEAQVCDDIMESNAQGCRLILPQMPKALFRKKVILEDKVKNFYTRLPFQKLMGISIRNKVPMSEKSISNGFFECERRCDADPCCTGFGFLNVSQLKGGEVTCLTLNSLGIQMCSEENGGAWRILDCGSPDIEVHTYPFGWYQKPIAQNNAPSFCPLVVLPSLTEKVSLDSWQSLALSSVVVDPSIRHFDVAHVSTAATSNFSAVRDLCLSECSQHEACLITTLQTQPGAVRCMFYADTQSCTHSLQGQNCRLLLREEATHIYRKPGISLLSYEASVPSVPISTHGRLLGRSQAIQVGTSWKQVDQFLGVPYAAPPLAERRFQAPEPLNWTGSWDASKPRASCWQPGTRTSTSPGVSEDCLYLNVFIPQNVAPNASVLVFFHNTMDREESEGWPAIDGSFLAAVGNLIVVTASYRVGVFGFLSSGSGEVSGNWGLLDQVAALTWVQTHIRGFGGDPRRVSLAADRGGADVASIHLLTARATNSQLFRRAVLMGGSALSPAAVISHERAQQQAIALAKEVSCPMSSSQEVVSCLRQKPANVLNDAQTKLLAVSGPFHYWGPVIDGHFLREPPARALKRSLWVEVDLLIGSSQDDGLINRAKAVKQFEESRGRTSSKTAFYQALQNSLGGEDSDARVEAAATWYYSLEHSTDDYASFSRALENATRDYFIICPIIDMASAWAKRARGNVFMYHAPENYGHGSLELLADVQFALGLPFYPAYEGQFSLEEKSLSLKIMQYFSHFIRSGNPNYPYEFSRKVPTFATPWPDFVPRAGGENYKEFSELLPNRQGLKKADCSFWSKYISSLKTSADGAKGGQSAESEEEELTAGSGLREDLLSLQEPGSKTYSK

SEQ ID NO: 67063 - protein, 887 aa, Homo sapiens
MALVLEIFTLLASICWVSANIFEYQVDAQPLRPCELQRETAFLKQADYVPQCAEDGSFQTVQCQNDGRSCWCVGANGSEVLGSRQPGRPVACLSFCQLQKQQILLSGYINSTDTSYLPQCQDSGDYAPVQCDVQQVQCWCVDAEGMEVYGTRQLGRPKRCPRSCEIRNRRLLHGVGDKSPPQCSAEGEFMPVQCKFVNTTDMMIFDLVHSYNRFPDAFVTFSSFQRRFPEVSGYCHCADSQGRELAETGLELLLDEIYDTIFAGLDLPSTFTETTLYRILQRRFLAVQSVISGRFRCPTKCEVERFTATSFGHPYVPSCRRNGDYQAVQCQTEGPCWCVDAQGKEMHGTRQQGEPPSCAEGQSCASERQQALSRLYFGTSGYFSQHDLFSSPEKRWASPRVARFATSCPPTIKELFVDSGLLRPMVEGQSQQFSVSENLLKEAIRAIFPSRGLARLALQFTTNPKRLQQNLFGGKFLVNVGQFNLSGALGTRGTFNFSQFFQQLGLASFLNGGRQEDLAKPLSVGLDSNSSTGTPEAAKKDGTMNKPTVGSFGFEINLQENQNALKFLASLLELPEFLLFLQHAISVPEDVARDLGDVMETVLSSQTCEQTPERLFVPSCTTEGSYEDVQCFSGECWCVNSWGKELPGSRVRGGQPRCPTDCEKQRARMQSLMGSQPAGSTLFVPACTSEGHFLPVQCFNSECYCVDAEGQAIPGTRSAIGKPKKCPTPCQLQSEQAFLRTVQALLSNSSMLPTLSDTYEGQFSLEEKSLSLKIMQYFSHFIRSGNPNYPYEFSRKVPTFATPWPDFVPRAGGENYKEFSELLPNRQGLKKADCSFWSKYISSLKTSADGAKGGQSAESEEEELTAGSGLREDLLSLQEPGSKTYSK

SEQ ID NO: 67064 - protein, 1138 aa, Homo sapiens
MMQKFEKVPESKVIFDANAPVAVRSKVPDSEFPVMQCLTDCTEDEACSFFTVSTTEPEISCDFYAWTSDNVACMTSDQKRDALGNSKATSFGSLRCQVKVRSHGQDSPAVYLKKGAIICGLLSSPSVLLCNVKDWMDPSEAWANATCPGVTYDQESHQVILRLGDQEFIKSLTPLEGTQDTFTNFQQVYLWKDSDMGSRPESMGCRKDTVPRPASPTEAGLTTELFSPVDLNQVIVNGNQSLSSQKHWLFKHLFSAQQANLWCLSRCVQEHSFCQLAEITESASLYFTCTLYPEAQVCDDIMESNAQGCRLILPQMPKALFRKKVILEDKVKNFYTRLPFQKLMGISIRNKVPMSEKSISNGFFECERRCDADPCCTGFGFLNVSQLKGGEVTCLTLNSLGIQMCSEENGGAWRILDCGSPDIEVHTYPFGWYQKPIAQNNAPSFCPLVVLPSLTEKVSLDSWQSLALSSVVVDPSIRHFDVAHVSTAATSNFSAVRDLCLSECSQHEACLITTLQTQPGAVRCMFYADTQSCTHSLQGQNCRLLLREEATHIYRKPGISLLSYEASVPSVPISTHGRLLGRSQAIQVGTSWKQVDQFLGVPYAAPPLAERRFQAPEPLNWTGSWDASKPRASCWQPGTRTSTSPGVSEDCLYLNVFIPQNVAPNASVLVFFHNTMDREESEGWPAIDGSFLAAVGNLIVVTASYRVGVFGFLSSGSGEVSGNWGLLDQVAALTWVQTHIRGFGGDPRRVSLAADRGGADVASIHLLTARATNSQLFRRAVLMGGSALSPAAVISHERAQQQAIALAKEVSCPMSSSQEVVSCLRQKPANVLNDAQTKLLAVSGPFHYWGPVIDGHFLREPPARALKRSLWVEVDLLIGSSQDDGLINRAKAVKQFEESRGRTSSKTAFYQALQNSLGGEDSDARVEAAATWYYSLEHSTDDYASFSRALENATRDYFIICPIIDMASAWAKRARGNVFMYHAPENYGHGSLELLADVQFALGLPFYPAYEGQFSLEEKSLSLKIMQYFSHFIRSGNPNYPYEFSRKVPTFATPWPDFVPRAGGENYKEFSELLPNRQGLKKADCSFWSKYISSLKTSADGAKGGQSAESEEEELTAGSGLREDLLSLQEPGSKTYSK

SEQ ID NO: 67065 - protein, 1574 aa, Homo sapiens
IPRKPISKRPVRPSLPRSPRCPLPFNASEVVGGTILCETISGPTGSAMQQCQLLCRQGSWSVFPPGPLICSLESGRWESQLPQPRACQRPQLWQTIQTQGHFQLQLPPGKMCSADYADLLQTFQVFILDELTARGFCQIQVKTFGTLVSIPVCNNSSVQVGCLTRERLGVNVTWKSRLEDIPVASLPDLHDIERALVGKDLLGRFTDLIQSGSFQLHLDSKTFPAETIRFLQGDHFGTSPRTWFGCSEGFYQVLTSEASQDGLGCVKCPEGSYSQDEECIPCPVGFYQEQAGSLACVPCPVGRTTISAGAFSQTHCVTDCQRNEAGLQCDQNGQYRASQKDRGSGKAFCVDGEGRRLPWWETEAPLEDSQCLMMQKFEKVPESKVIFDANAPVAVRSKVPDSEFPVMQCLTDCTEDEACSFFTVSTTEPEISCDFYAWTSDNVACMTSDQKRDALGNSKATSFGSLRCQVKVRSHGQDSPAVYLKKGQGSTTTLQKRFEPTGFQNMLSGLYNPIVFSASGANLTDAHLFCLLACDRDLCCDGFVLTQVQGGAIICGLLSSPSVLLCNVKDWMDPSEAWANATCPGVTYDQESHQVILRLGDQEFIKSLTPLEGTQDTFTNFQQVYLWKDSDMGSRPESMGCRKDTVPRPASPTEAGLTTELFSPVDLNQVIVNGNQSLSSQKHWLFKHLFSAQQANLWCLSRCVQEHSFCQLAEITESASLYFTCTLYPEAQVCDDIMESNAQGCRLILPQMPKALFRKKVILEDKVKNFYTRLPFQKLMGISIRNKVPMSEKSISNGFFECERRCDADPCCTGFGFLNVSQLKGGEVTCLTLNSLGIQMCSEENGGAWRILDCGSPDIEVHTYPFGWYQKPIAQNNAPSFCPLVVLPSLTEKVSLDSWQSLALSSVVVDPSIRHFDVAHVSTAATSNFSAVRDLCLSECSQHEACLITTLQTQPGAVRCMFYADTQSCTHSLQGQNCRLLLREEATHIYRKPGISLLSYEASVPSVPISTHGRLLGRSQAIQVGTSWKQVDQFLGVPYAAPPLAERRFQAPEPLNWTGSWDASKPRASCWQPGTRTSTSPGVSEDCLYLNVFIPQNVAPNASVLVFFHNTMDREESEGWPAIDGSFLAAVGNLIVVTASYRVGVFGFLSSGSGEVSGNWGLLDQVAALTWVQTHIRGFGGDPRRVSLAADRGGADVASIHLLTARATNSQLFRRAVLMGGSALSPAAVISHERAQQQAIALAKEVSCPMSSSQEVVSCLRQKPANVLNDAQTKLLAVSGPFHYWGPVIDGHFLREPPARALKRSLWVEVDLLIGSSQDDGLINRAKAVKQFEESRGRTSSKTAFYQALQNSLGGEDSDARVEAAATWYYSLEHSTDDYASFSRALENATRDYFIICPIIDMASAWAKRARGNVFMYHAPENYGHGSLELLADVQFALGLPFYPAYEGQFSLEEKSLSLKIMQYFSHFIRSGNPNYPYEFSRKVPTFATPWPDFVPRAGGENYKEFSELLPNRQGLKKADCSFWSKYISSLKTSADGAKGGQSAESEEEELTAGSGLREDLLSLQEPGSKTYSK

SEQ ID NO: 67066 - protein, 451 aa, Homo sapiens
MEQKPSKVECGSDPEENSARSPDGKRKRKNGQCSLKTSMSGYIPSYLDKDEQCVVCGDKATGYHYRCITCEGCKGFFRRTIQKNLHPTYSCKYDSCCVIDKITRNQCQLCRFKKCIAVGMAMDLVLDDSKRVAKRKLIEQNRERRRKEEMIRSLQQRPEPTPEEWDLIHIATEAHRSTNAQGSHWKQRRKFLPDDIGQSPIVSMPDGDKVDLEAFSEFTKIITPAITRVVDFAKKLPMFSELPCEDQIILLKGCCMEIMSLRAAVRYDPESDTLTLSGEMAVKREQLKNGGLGVVSDAIFELGKSLSAFNLDDTEVALLQAVLLMSTDRSGLLCVDKIEKSQEAYLLAFEHYVNHRKHNIPHFWPKLLMKGPQVRQLEQQLGEAGSLQGPVLQHQSPKSPQQRLLELLHRSGILHARAVCGEDDSSEADSPSSSEEEPEVCEDLAGNAASP

SEQ ID NO: 67067 - protein, 1979 aa, Homo sapiens
MSSWLGGLGSGLGQSLGQVGGSLASLTGQISNFTKDMLMEGTEEVEAELPDSRTKEIEAIHAILRSENERLKKLCTDLEEKHEASEIQIKQQSTSYRNQLQQKEVEISHLKARQIALQDQLLKLQSAAQSVPSGAGVPATTASSSFAYGISHHPSAFHDDDMDFGDIISSQQEINRLSNEVSRLESEVGHWRHIAQTSKAQGTDNSDQSEICKLQNIIKELKQNRSQEIDDHQHEMSVLQNAHQQKLTEISRRHREELSDYEERIEELENLLQQGGSGVIETDLSKIYEMQKTIQVLQIEKVESTKKMEQLEDKIKDINKKLSSAENDRDILRREQEQLNVEKRQIMEECENLKLECSKLQPSAVKQSDTMTEKERILAQSASVEEVFRLQQALSDAENEIMRLSSLNQDNSLAEDNLKLKMRIEVLEKEKSLLSQEKEELQMSLLKLNNEYEVIKSTATRDISLDSELHDLRLNLEAKEQELNQSISEKETLIAEIEELDRQNQEATKHMILIKDQLSKQQNEGDSIISKLKQDLNDEKKRVHQLEDDKMDITKELDVQKEKLIQSEVALNDLHLTKQKLEDKVENLVDQLNKSQESNVSIQKENLELKEHIRQNEEELSRIRNELMQSLNQDSNSNFKDTLLKEREAEVRNLKQNLSELEQLNENLKKVAFDVKMENEKLVLACEDVRHQLEECLAGNNQLSLEKNTIVETLKMEKGEIEAELCWAKKRLLEEANKYEKTIEELSNARNLNTSALQLEHEHLIKLNQKKDMEIAELKKNIEQMDTDHKETKDVLSSSLEEQKQLTQLINKKEIFIEKLKERSSKLQEELDKYSQALRKNEILRQTIEEKDRSLGSMKEENNHLQEELERLREEQSRTAPVADPKTLDSVTELASEVSQLNTIKEHLEEEIKHHQKIIEDQNQSKMQLLQSLQEQKKEMDEFRYQHEQMNATHTQLFLEKDEEIKSLQKTIEQIKTQLHEERQDIQTDNSDIFQETKVQSLNIENGSEKHDLSKAETERLVKGIKERELEIKLLNEKNISLTKQIDQLSKDEVGKLTQIIQQKDLEIQALHARISSTSHTQDVVYLQQQLQAYAMEREKVFAVLNEKTRENSHLKTEYHKMMDIVAAKEAALIKLQDENKKLSTRFESSGQDMFRETIQNLSRIIREKDIEIDALSQKCQTLLAVLQTSSTGNEAGGVNSNQFEELLQERDKLKQQVKKMEEWKQQVMTTVQNMQHESAQLQEELHQLQAQVLVDSDNNSKLQVDYTGLIQSYEQNETKLKNFGQELAQVQHSIGQLCNTKDLLLGKLDIISPQLSSASLLTPQSAECLRASKSEVLSESSELLQQELEELRKSLQEKDATIRTLQENNHRLSDSIAATSELERKEHEQTDSEIKQLKEKQDVLQKLLKEKDLLIKAKSDQLLSSNENFTNKVNENELLRQAVTNLKERILILEMDIGKLKGENEKIVETYRGKETEYQALQETNMKFSMMLREKEFECHSMKEKALAFEQLLKEKEQGKTGELNQLLNAVKSMQEKTVVFQQERDQVMLALKQKQMENTALQNEVQRLRDKEFRSNQELERLRNHLLESEDSYTREALAAEDREAKLRKKVTVLEEKLVSSSNAMENASHQASVQVESLQEQLNVVSKQRDETALQLSVSQEQVKQYALSLANLQMVLEHFQQEEKAMYSAELEKQKQLIAEWKKNAENLEGKVISLQECLDEANAALDSASRLTEQLDVKEEQIEELKRQNELRQEMLDDVQKKLMSLANSSEGKVDKVLMRNLFIGHFHTPKNQRHEVLRLMGSILGVRREEMEQLFHDDQGGVTRWMTGWLGGGSKSVPNTPLRPNQQSVVNSSFSELFVKFLETESHPSIPPPKLSVHDMKPLDSPGRRKRDTNAPESFKDTAESRSGRRTDVNPFLAPRSAAVPLINPAGLGPGGPGHLLLKPISDVLPTFTPLPALPDNSAGVVLKDLLKQ

SEQ ID NO: 67068 - protein, 1715 aa, Homo sapiens
MSVLQNAHQQKLTEISRRHREELSDYEERIEELENLLQQGGSGVIETDLSKIYEMQKTIQVLQIEKVESTKKMEQLEDKIKDINKKLSSAENDRDILRREQEQLNVEKRQIMEECENLKLECSKLQPSAVKQSDTMTEKERILAQSASVEEVFRLQQALSDAENEIMRLSSLNQEELQMSLLKLNNEYEVIKSTATRDISLDSELHDLRLNLEAKEQELNQSISEKETLIAEIEELDRQNQEATKHMILIKDQLSKQQNEGDSIISKLKQDLNDEKKRVHQLEDDKMDITKELDVQKEKLIQSEVALNDLHLTKQKLEDKVENLVDQLNKSQESNVSIQKENLELKEHIRQNEEELSRIRNELMQSLNQDSNSNFKDTLLKEREAEVRNLKQNLSELEQLNENLKKVAFDVKMENEKLVLACEDVRHQLEECLAGNNQLSLEKNTIVETLKMEKGEIEAELCWAKKRLLEEANKYEKTIEELSNARNLNTSALQLEHEHLIKLNQKKDMEIAELKKNIEQMDTDHKETKDVLSSSLEEQKQLTQLINKKEIFIEKLKERSSKLQEELDKYSQALRKNEILRQTIEEKDRSLGSMKEENNHLQEELERLREEQSRTAPVADPKTLDSVTELASEVSQLNTIKEHLEEEIKHHQKIIEDQNQSKMQLLQSLQEQKKEMDEFRYQHEQMNATHTQLFLEKDEEIKSLQKTIEQIKTQLHEERQDIQTDNSDIFQETKVQSLNIENGSEKHDLSKAETERLVKGIKERELEIKLLNEKNISLTKQIDQLSKDEVGKLTQIIQQKDLEIQALHARISSTSHTQDVVYLQQQLQAYAMEREKVFAVLNEKTRENSHLKTEYHKMMDIVAAKEAALIKLQDENKKLSTRFESSGQDMFRETIQNLSRIIREKDIEIDALSQKCQTLLAVLQTSSTGNEAGGVNSNQFEELLQERDKLKQQVKKMEEWKQQVMTTVQNMQHESAQLQEELHQLQAQVLVDSDNNSKLQVDYTGLIQSYEQNETKLKNFGQELAQVQHSIGQLCNTKDLLLGKLDIISPQLSSASLLTPQSAECLRASKSEVLSESSELLQQELEELRKSLQEKDATIRTLQENNHRLSDSIAATSELERKEHEQTDSEIKQLKEKQDVLQKLLKEKDLLIKAKSDQLLSSNENFTNKVNENELLRQAVTNLKERILILEMDIGKLKGENEKIVETYRGKETEYQALQETNMKFSMMLREKEFECHSMKEKALAFEQLLKEKEQGKTGELNQLLNAVKSMQEKTVVFQQERDQVMLALKQKQMENTALQNEVQRLRDKEFRSNQELERLRNHLLESEDSYTREALAAEDREAKLRKKVTVLEEKLVSSSNAMENASHQASVQVESLQEQLNVVSKQRDETALQLSVSQEQVKQYALSLANLQMVLEHFQQEEKAMYSAELEKQKQLIAEWKKNAENLEGKVISLQECLDEANAALDSASRLTEQLDVKEEQIEELKRQNELRQEMLDDVQKKLMSLANSSEGKVDKVLMRNLFIGHFHTPKNQRHEVLRLMGSILGVRREEMEQLFHDDQGGVTRWMTGWLGGGSKSVPNTPLRPNQQSVVNSSFSELFVKFLETESHPSIPPPKLSVHDMKPLDSPGRRKRDTNAPESFKDTAESRSGRRTDVNPFLAPRSAAVPLINPAGLGPGGPGHLLLKPISDVLPTFTPLPALPDNSAGVVLKDLLKQ

SEQ ID NO: 67069 - protein, 1992 aa, Homo sapiens
MSNRPNNNPGGSLRRSQRNTAGAQPQDDSIGGRSCSSSSAVIVPQPEDPDRANTSERQKTGQVPKKDNSRGVKRSASPDYNRTNSPSSAKKPKALQHTESPSETNKPHSKSKKRHLDQEQQLKSAQSPSTSKAHTRKSGATGGSRSQKRKRTESSCVKSGSGSESTGAEERSAKPTKLASKSATSAKAGCSTITDSSSAASTSSSSSAVASASSTVPPGARVKQGKDQNKARRSRSASSPSPRRSSREKEQSKTGGSSKFDWAARFSPKVSLPKTKLSLPGSSKSETSKPGPSGLQAKLASLRKSTKKRSESPPAELPSLRRSTRQKTTGSCASTSRRGSGLGKRGAAEARRQEKMADPESNQEAVNSSAARTDEAPQGAAGAVGMTTSGESESDDSEMGRLQALLEARGLPPHLFGPLGPRMSQLFHRTIGSGASSKAQQLLQGLQASDESQQLQAVIEMCQLLVMGNEETLGGFPVKSVVPALITLLQMEHNFDIMNHACRALTYMMEALPRSSAVVVDAIPVFLEKLQVIQCIDVAEQALTALEMLSRRHSKAILQAGGLADCLLYLEFFSINAQRNALAIAANCCQSITPDEFHFVADSLPLLTQRLTHQDKKSVESTCLCFARLVDNFQHEENLLQQVASKDLLTNVQQLLVVTPPILSSGMFIMVVRMFSLMCSNCPTLAVQLMKQNIAETLHFLLCGASNGSCQEQIDLVPRSPQELYELTSLICELMPCLPKEGIFAVDTMLKKGNAQNTDGAIWQWRDDRGLWHPYNRIDSRIIEQINEDTGTARAIQRKPNPLANSNTSGYSESKKDDARAQLMKEDPELAKSFIKTLFGVLYEVYSSSAGPAVRHKCLRAILRIIYFADAELLKDVLKNHAVSSHIASMLSSQDLKIVVGALQMAEILMQKLPDIFSVYFRREGVMHQVKHLAESESLLTSPPKACTNGSGSMGSTTSVSSGTATAATHAAADLGSPSLQHSRDDSLDLSPQGRLSDVLKRKRLPKRGPRRPKYSPPRDDDKVDNQAKSPTTTQSPKSSFLASLNPKTWGRLSTQSNSNNIEPARTAGGSGLARAASKDTISNNREKIKGWIKEQAHKFVERYFSSENMDGSNPALNVLQRLCAATEQLNLQVDGGAECLVEIRSIVSESDVSSFEIQHSGFVKQLLLYLTSKSEKDAVSREIRLKRFLHVFFSSPLPGEEPIGRVEPVGNAPLLALVHKMNNCLSQMEQFPVKVHDFPSGNGTGGSFSLNRGSQALKFFNTHQLKCQLQRHPDCANVKQWKGGPVKIDPLALVQAIERYLVVRGYGRVREDDEDSDDDGSDEEIDESLAAQFLNSGNVRHRLQFYIGEHLLPYNMTVYQAVRQFSIQAEDERESTDDESNPLGRAGIWTKTHTIWYKPVREDEESNKDCVGGKRGRAQTAPTKTSPRNAKKHDELWHDGVCPSVSNPLEVYLIPTPPENITFEDPSLDVILLLRVLHAISRYWYYLYDNAMCKEIIPTSEFINSKLTAKANRQLQDPLVIMTGNIPTWLTELGKTCPFFFPFDTRQMLFYVTAFDRDRAMQRLLDTNPEINQSDSQDSRVAPRLDRKKRTVNREELLKQAESVMQDLGSSRAMLEIQYENEVGTGLGPTLEFYALVSQELQRADLGLWRGEEVTLSNPKGSQEGTKYIQNLQGLFALPFGRTAKPAHIAKVKMKFRFLGKLMAKAIMDFRLVDLPLGLPFYKWMLRQETSLTSHDLFDIDPVVARSVYHLEDIVRQKKRLEQDKSQTKESLQYALETLTMNGCSVEDLGLDFTLPGFPNIELKKGGKDIPVTIHNLEEYLRLVIFWALNEGVSRQFDSFRDGFESVFPLSHLQYFYPEELDQLLCGSKADTWDAKTLMECCRPDHGYTHDSRAVKFLFEILSSFDNEQQRLFLQFVTGSPRLPVGGFRSLNPPLTIVRKTFESTENPDDFLPSVMTCVNYLKLPDYSSIEIMREKLLIAAREGQQSFHLS

SEQ ID NO: 67070 - protein, 99 aa, Homo sapiens
MSNRPNNNPGGSLRRSQRNTAGAQPQDDSIGGRSCSSSSAVIVPQPEDPDRANTSERQKTGQVPKKDNSRGVKRSASPDYNRTNSPSSAKKPKALQHTE

SEQ ID NO: 67071 - protein, 2040 aa, Homo sapiens
MSNRPNNNPGGSLRRSQRNTAGAQPQDDSIGGRSHLGQAKHKGYSPPESRKSNSKAPKVQSNTTSELSRGHLSKRSCSSSSAVIVPQPEDPDRANTSERQKTGQVPKKDNSRGVKRSASPDYNRTNSPSSAKKPKALQHTESPSETNKPHSKSKKRHLDQEQQLKSAQSPSTSKAHTRKSGATGGSRSQKRKRTESSCVKSGSGSESTGAEERSAKPTKLASKSATSAKAGCSTITDSSSAASTSSSSSAVASASSTVPPGARVKQGKDQNKARRSRSASSPSPRRSSREKEQSKTGGSSKFDWAARFSPKVSLPKTKLSLPGSSKSETSKPGPSGLQAKLASLRKSTKKRSESPPAELPSLRRSTRQKTTGSCASTSRRGSGLGKRGAAEARRQEKMADPESNQEAVNSSAARTDEAPQGAAASSSVAGAVGMTTSGESESDDSEMGRLQALLEARGLPPHLFGPLGPRMSQLFHRTIGSGASSKAQQLLQGLQASDESQQLQAVIEMCQLLVMGNEETLGGFPVKSVVPALITLLQMEHNFDIMNHACRALTYMMEALPRSSAVVVDAIPVFLEKLQVIQCIDVAEQALTALEMLSRRHSKAILQAGGLADCLLYLEFFSINAQRNALAIAANCCQSITPDEFHFVADSLPLLTQRLTHQDKKSVESTCLCFARLVDNFQHEENLLQQVASKDLLTNVQQLLVVTPPILSSGMFIMVVRMFSLMCSNCPTLAVQLMKQNIAETLHFLLCGASNGSCQEQIDLVPRSPQELYELTSLICELMPCLPKEGIFAVDTMLKKGNAQNTDGAIWQWRDDRGLWHPYNRIDSRIIEQINEDTGTARAIQRKPNPLANSNTSGYSESKKDDARAQLMKEDPELAKSFIKTLFGVLYEVYSSSAGPAVRHKCLRAILRIIYFADAELLKDVLKNHAVSSHIASMLSSQDLKIVVGALQMAEILMQKLPDIFSVYFRREGVMHQVKHLAESESLLTSPPKACTNGSGSMGSTTSVSSGTATAATHAAADLGSPSLQHSRDDSLDLSPQGRLSDVLKRKRLPKRGPRRPKYSPPRDDDKVDNQAKSPTTTQSPKSSFLASLNPKTWGRLSTQSNSNNIEPARTAGGSGLARAASKDTISNNREKIKGWIKEQAHKFVERYFSSENMDGSNPALNVLQRLCAATEQLNLQVDGGAECLVEIRSIVSESDVSSFEIQHSGFVKQLLLYLTSKSEKDAVSREIRLKRFLHVFFSSPLPGEEPIGRVEPVGNAPLLALVHKMNNCLSQMEQFPVKVHDFPSGNGTGGSFSLNRGSQALKFFNTHQLKCQLQRHPDCANVKQWKGGPVKIDPLALVQAIERYLVVRGYGRVREDDEDSDDDGSDEEIDESLAAQFLNSGNVRHRLQFYIGEHLLPYNMTVYQAVRQFSIQAEDERESTDDESNPLGRAGIWTKTHTIWYKPVREDEESNKDCVGGKRGRAQTAPTKTSPRNAKKHDELWHDGVCPSVSNPLEVYLIPTPPENITFEDPSLDVILLLRVLHAISRYWYYLYDNAMCKEIIPTSEFINSKLTAKANRQLQDPLVIMTGNIPTWLTELGKTCPFFFPFDTRQMLFYVTAFDRDRAMQRLLDTNPEINQSDSQDSRVAPRLDRKKRTVNREELLKQAESVMQDLGSSRAMLEIQYENEVGTGLGPTLEFYALVSQELQRADLGLWRGEEVTLSNPKGSQEGTKYIQNLQGLFALPFGRTAKPAHIAKVKMKFRFLGKLMAKAIMDFRLVDLPLGLPFYKWMLRQETSLTSHDLFDIDPVVARSVYHLEDIVRQKKRLEQDKSQTKESLQYALETLTMNGCSVEDLGLDFTLPGFPNIELKKGGKDIPVTIHNLEEYLRLVIFWALNEGVSRQFDSFRDGFESVFPLSHLQYFYPEELDQLLCGSKADTWDAKTLMECCRPDHGYTHDSRAVKFLFEILSSFDNEQQRLFLQFVTGSPRLPVGGFRSLNPPLTIVRKTFESTENPDDFLPSVMTCVNYLKLPDYSSIEIMREKLLIAAREGQQSFHLS

SEQ ID NO: 67072 - protein, 1722 aa, Homo sapiens
MSNRPNNNPGGSLRRSQRNTAGAQPQDDSIGGSRRGSGLGKRGAAEARRQEKMADPESNQEAVNSSAARTDEAPQGAAASSSVAGAVGMTTSGESESDDSEMGRLQALLEARGLPPHLFGPLGPRMSQLFHRTIGSGASSKAQQLLQGLQASDESQQLQAVIEMCQLLVMGNEETLGGFPVKSVVPALITLLQMEHNFDIMNHACRALTYMMEALPRSSAVVVDAIPVFLEKLQVIQCIDVAEQALTALEMLSRRHSKAILQAGGLADCLLYLEFFSINAQRNALAIAANCCQSITPDEFHFVADSLPLLTQRLTHQDKKSVESTCLCFARLVDNFQHEENLLQQVASKDLLTNVQQLLVVTPPILSSGMFIMVVRMFSLMCSNCPTLAVQLMKQNIAETLHFLLCGASNGSCQEQIDLVPRSPQELYELTSLICELMPCLPKEGIFAVDTMLKKGNAQNTDGAIWQWRDDRGLWHPYNRIDSRIIEAAHQVGEDEISLSTLGRVYTIDFNSMQQINEDTGTARAIQRKPNPLANSNTSGYSESKKDDARAQLMKEDPELAKSFIKTLFGVLYEVYSSSAGPAVRHKCLRAILRIIYFADAELLKDVLKNHAVSSHIASMLSSQDLKIVVGALQMAEILMQKLPDIFSVYFRREGVMHQVKHLAESESLLTSPPKACTNGSGSMGSTTSVSSGTATAATHAAADLGSPSLQHSRDDSLDLSPQGRLSDVLKRKRLPKRGPRRPKYSPPRDDDKVDNQAKSPTTTQSPKSSFLASLNPKTWGRLSTQSNSNNIEPARTAGGSGLARAASKDTISNNREKIKGWIKEQAHKFVERYFSSENMDGSNPALNVLQRLCAATEQLNLQVDGGAECLVEIRSIVSESDVSSFEIQHSGFVKQLLLYLTSKSEKDAVSREIRLKRFLHVFFSSPLPGEEPIGRVEPVGNAPLLALVHKMNNCLSQMEQFPVKVHDFPSGNGTGGSFSLNRGSQALKFFNTHQLKCQLQRHPDCANVKQWKGGPVKIDPLALVQAIERYLVVRGYGRVREDDEDSDDDGSDEEIDESLAAQFLNSGNVRHRLQFYIGEHLLPYNMTVYQAVRQFSIQAEDERESTDDESNPLGRAGIWTKTHTIWYKPVREDEESNKDCVGGKRGRAQTAPTKTSPRNAKKHDELWHDGVCPSVSNPLEVYLIPTPPENITFEDPSLDVILLLRVLHAISRYWYYLYDNAMCKEIIPTSEFINSKLTAKANRQLQDPLVIMTGNIPTWLTELGKTCPFFFPFDTRQMLFYVTAFDRDRAMQRLLDTNPEINQSDSQDSRVAPRLDRKKRTVNREELLKQAESVMQDLGSSRAMLEIQYENEVGTGLGPTLEFYALVSQELQRADLGLWRGEEVTLSNPKGSQEGTKYIQNLQGLFALPFGRTAKPAHIAKVKMKFRFLGKLMAKAIMDFRLVDLPLGLPFYKWMLRQETSLTSHDLFDIDPVVARSVYHLEDIVRQKKRLEQDKSQTKESLQYALETLTMNGCSVEDLGLDFTLPGFPNIELKKGGKDIPVTIHNLEEYLRLVIFWALNEGVSRQFDSFRDGFESVFPLSHLQYFYPEELDQLLCGSKADTWDAKTLMECCRPDHGYTHDSRAVKFLFEILSSFDNEQQRLFLQFVTGSPRLPVGGFRSLNPPLTIVRKTFESTENPDDFLPSVMTCVNYLKLPDYSSIEIMREKLLIAAREGQQSFHLS

SEQ ID NO: 67073 - protein, 149 aa, Homo sapiens
MSNRPNNNPGGSLRRSQRNTAGAQPQDDSIGGRSCSSSSAVIVPQPEDPDRANTSERQKTGQVPKKDNSRGVKRSASPDYNRTNSPSSAKKPKALQHTESPSETNKPHSKSKKRHLDQEQQLKSAQSPSTSKAHTRKSGATGGSRSQKR

SEQ ID NO: 67074 - protein, 154 aa, Homo sapiens
MSNRPNNNPGGSLRRSQRNTAGAQPQDDSIGGRSCSSSSAVIVPQPEDPDRANTSERQKTGQVPKKDNSRGVKRSASPDYNRTNSPSSAKKPKALQHTESPSETNKPHSKSKKRHLDQEQQLKSAQSPSTSKAHTRKSGATGGSRSQKRKRTES

SEQ ID NO: 67075 - protein, 346 aa, Homo sapiens [sequence omitted]

SEQ ID NO: 67076 - protein, 581 aa, Homo sapiens
MAVAGAVSGEPLVHWCTQQLRKTFGLDVSEEIIQYVLSIESAEEIREYVTDLLQGNEGKKGQFIEELITKWQKNDQELISDPLQQCFKKDEILDGQKSGDHLKRGRKKGRNRQEVPAFTEPDTTAEVKTPFDLAKAQENSNSVKKKTKFVNLYTREGQDRLAVLLPGRHPCDCLGQKHKLINNCLICGRIVCEQEGSGPCLFCGTLVCTHEEQDILQRDSNKSQKLLKKLMSGVENSGKVDISTKDLLPHQELRIKSGLEKAIKHKDKLLEFDRTSIRRTQVIDDESDYFASDSNQWLSKLERETLQKREEELRELRHASRLSKKVTIDFAGRKILEEENSLAEYHSRLDETIQAIANGTLNQPLTKLDRSSEEPLGVLVNPNMYQSPPQWVDHTGAASQKKAFRSSGFGLEFNSFQHQLRIQDQEFQEGFDGGWCLSVHQPWASLLVRGIKRVEGRSWYTPHRGRLWIAATAKKPSPQEVSELQATYRLLRGKDVEFPNDYPSGCLLGCVDLIDCLSQKQFKEQFPDISQESDSPFVFICKNPQEMVVKFPIKGNPKIWKLDSKIHQGAKKGLMKQNKAV

SEQ ID NO: 67077 - protein, 476 aa, Homo sapiens
MSGPTWLPPKQPEPARAPQGRAIPRGTPGPPPAHGAALQPHPRVNFCPLPSEQCYQAPGGPEDRGPAWVGSHGVLQHTQGLPADRGGLRPGSLDAEIDLLSSTLAELNGGRGHASRRPDRQAYEPPPPPAYRTGSLKPNPASPLPASPYGGPTPASYTTASTPAGPAFPVQVKVAQPVRGCGPPRRGASQASGPLPGPHFPLPGRGEVWGPGYRSQREPGPGAKEEAAGVSGPAGRGRGGEHGPQVPLSQPPEDELDRLTKKLVHDMNHPPSGEYFGQCGGCGEDVVGDGAGVVALDRVFHVGCFVCSTCRAQLRGQHFYAVERRAYCEGCYVATLEKCATCSQPILDRILRAMGKAYHPGCFTCVVCHRGLDGIPFTVDATSQIHCIEDFHRKFAPRCSVCGGAIMPEPGQEETVRIVALDRSFHIGCYKCEECGLLLSSEGECQGCYPLDGHILCKACSAWRIQELSATVTTDC

SEQ ID NO: 67078 - protein, 490 aa, Homo sapiens
MEQKPSKVECGSDPEENSARSPDGKRKRKNGQCSLKTSMSGYIPSYLDKDEQCVVCGDKATGYHYRCITCEGCKGFFRRTIQKNLHPTYSCKYDSCCVIDKITRNQCQLCRFKKCIAVGMAMDLVLDDSKRVAKRKLIEQNRERRRKEEMIRSLQQRPEPTPEEWDLIHIATEAHRSTNAQGSHWKQRRKFLPDDIGQSPIVSMPDGDKVDLEAFSEFTKIITPAITRVVDFAKKLPMFSELPCEDQIILLKGCCMEIMSLRAAVRYDPESDTLTLSGEMAVKREQLKNGGLGVVSDAIFELGKSLSAFNLDDTEVALLQAVLLMSTDRSGLLCVDKIEKSQEAYLLAFEHYVNHRKHNIPHFWPKLLMKEREVQSSILYKGAAAEGRPGGSLGVHPEGQQLLGMHVVQGPQVRQLEQQLGEAGSLQGPVLQHQSPKSPQQRLLELLHRSGILHARAVCGEDDSSEADSPSSSEEEPEVCEDLAGNAASP

SEQ ID NO: 67079 - protein, 490 aa, Homo sapiens; identical to SEQ ID NO: 67078

SEQ ID NO: 67080 - protein, 410 aa, Homo sapiens
MEQKPSKVECGSDPEENSARSPDGKRKRKNGQCSLKTSMSGYIPSYLDKDEQCVVCGDKATGYHYRCITCEGCKGFFRRTIQKNLHPTYSCKYDSCCVIDKITRNQCQLCRFKKCIAVGMAMDLVLDDSKRVAKRKLIEQNRERRRKEEMIRSLQQRPEPTPEEWDLIHIATEAHRSTNAQGSHWKQRRKFLPDDIGQSPIVSMPDGDKVDLEAFSEFTKIITPAITRVVDFAKKLPMFSELPCEDQIILLKGCCMEIMSLRAAVRYDPESDTLTLSGEMAVKREQLKNGGLGVVSDAIFELGKSLSAFNLDDTEVALLQAVLLMSTDRSGLLCVDKIEKSQEAYLLAFEHYVNHRKHNIPHFWPKLLMKVTDLRMIGACHASRFLHMKVECPTELFPPLFLEVFEDQEV

SEQ ID NO: 67081 - protein, 410 aa, Homo sapiens; identical to SEQ ID NO: 67080

SEQ ID NO: 67082 - protein, 461 aa, Homo sapiens
MTPNSMTENGLTAWDKPKHCPDREHDWKLVGMSEACLHRKSHSERRSTLKNEQSSPHLIQTTWTSSIFHLDHDDVNDQSVSSAQTFQTEEKKCKGYIPSYLDKDELCVVCGDKATGYHYRCITCEGCKGFFRRTIQKNLHPSYSCKYEGKCVIDKVTRNQCQECRFKKCIYVGMATDLVLDDSKRLAKRKLIEENREKRRREELQKSIGHKPEPTDEEWELIKTVTEAHVATNAQGSHWKQKRKFLPEDIGQAPIVNAPEGGKVDLEAFSHFTKIITPAITRVVDFAKKLPMFCELPCEDQIILLKGCCMEIMSLRAAVRYDPESETLTLNGEMAVTRGQLKNGGLGVVSDAIFDLGMSLSSFNLDDTEVALLQAVLLMSSDRPGLACVERIEKYQDSFLLAFEHYINYRKHHVTHFWPKLLMKVTDLRMIGACHASRFLHMKVECPTELFPPLFLEVFED

SEQ ID NO: 67083 - protein, 461 aa, Homo sapiens; identical to SEQ ID NO: 67082

SEQ ID NO: 67084 - protein, 461 aa, Homo sapiens; identical to SEQ ID NO: 67082

SEQ ID NO: 67085 - protein, 28 aa, Homo sapiens
MTPNSMTEMALQPGTNRSTVQTENTTGS

SEQ ID NO: 67086 - protein, 121 aa, Homo sapiens
MTPNSMTENGLTAWDKPKHCPDREHDWKLVGMSEACLHRKSHSERRSTLKNEQSSPHLIQTTWTSSIFHLDHDDVNDQSVSSAQTFQTEEKKCKGYIPSYLDKDELCVVCGDKATGYHYRC

SEQ ID NO: 67087 - protein, 146 aa, Homo sapiens
MQVLTKRYPKNCLLTVMDRYAAEVHNMEQVVMIPSLLRDVQLSGPGGQAQAEAPDLYTYFTMLKAICVDVDHGLLPREEWQAKVAGSEENGTAETEEVEDESASGELDLEAQFHLHFSSLHHILMHLTEKAQEVTRKYQEMTGQVW

SEQ ID NO: 67088 - protein, 933 aa, Homo sapiens
MRALAVLSVTLVMACTEAFFPFISRGKELLWGKPEESRVSSVLEESKRLVDTAMYATMQRNLKKRGILSPAQLLSFSKLPEPTSGVIARAAEIMETSIQAMKRKVNLKTQQSQHPTDALSEDLLSIIANMSGCLPYMLPPKCPNTCLANKYRPITGACNNRDHPRWGASNTALARWLPPVYEDGFSQPRGWNPGFLYNGFPLPPVREVTRHVIQVSNEVVTDDDRYSDLLMAWGQYIDHDIAFTPQSTSKAAFGGGADCQMTCENQNPCFPIQLPEEARPAAGTACLPFYRSSAACGTGDQGALFGNLSTANPRQQMNGLTSFLDASTVYGSSPALERQLRNWTSAEGLLRVHARLRDSGRAYLPFVPPRAPAACAPEPGIPGETRGPCFLAGDGRASEVPSLTALHTLWLREHNRLAAALKALNAHWSADAVYQEARKVVGALHQIITLRDYIPRILGPEAFQQYVGPYEGYDSTANPTVSNVFSTAAFRFGHATIHPLVRRLDASFQEHPDLPGLWLHQAFFSPWTLLRGGGLDPLIRGLLARPAKLQVQDQLMNEELTERLFVLSNSSTLDLASINLQRGRDHGLPGYNEWREFCGLPRLETPADLSTAIASRSVADKILDLYKHPDNIDVWLGGLAENFLPRARTGPLFACLIGKQMKALRDGDWFWWENSHVFTDAQRRELEKHSLSRVICDNTGLTRVPMDAFQVGKFPEDFESCDSITGMNLEAWRETFPQDDKCGFPESVENGDFVHCEESGRRVLVYSCRHGYELQGREQLTCTQEGWDFQPPLCKDVNECADGAHPPCHASARCRNTKGGFQCLCADPYELGDDGRTCVDSGRLPRVTWISMSLAALLIGGFAGLTSTVICRWTRTGTKSTLPISETGGGTPELRCGKHQAVGTSPQRAAAQDSEQESAGMEGRDTHRLPRAL

SEQ ID NO: 67089 - protein, 929 aa, Homo sapiens
MRALAVLSVTLVMACTEAFFPFISRGKELLWGKPEESRVSSVLEESKRLVDTAMYATMQRNLKKRGILSPAQLLSFSKLPEPTSGVIARAAEIMETSIQAMKRKVNLKTQQSQHPTDALSEDLLSIIANMSGCLPYMLPPKCPNTCLANKYRPITGACNNRDHPRWGASNTALARWLPPVYEDGFSQPRGWNPGFLYNGFPLPPVREVTRHVIQVSNEVVTDDDRYSDLLMAWGQYIDHDIAFTPQSTSKAAFGGGADCQMTCENQNPCFPIQLPEEARPAAGTACLPFYRSSAACGTGDQGALFGNLSTANPRQQMNGLTSFLDASTVYGSSPALERQLRNWTSAEGLLRVHARLRDSGRAYLPFVPPRAPAACAPEPGIPGETRGPCFLAGDGRASEVPSLTALHTLWLREHNRLAAALKALNAHWSADAVYQEARKVVGALHQIITLRDYIPRILGPEAFQQYVGPYEGYDSTANPTVSNVFSTAAFRFGHATIHPLVRRLDASFQEHPDLPGLWLHQAFFSPWTLLRGGGLDPLIRGLLARPAKLQVQDQLMNEELTERLFVLSNSSTLDLASINLQRGRDHGLPGYNEWREFCGLPRLETPADLSTAIASRSVADKILDLYKHPDNIDVWLGGLAENFLPRARTGPLFACLIGKQMKALRDGDWFWWENSHVFTDAQRRELEKHSLSRVICDNTGLTRVPMDAFQVGKFPEDFESCDSITGMNLEAWRETFPQDDKCGFPESVENGDFVHCEESGRRVLVYSCRHGYELQGREQLTCTQEGWDFQPPLCKDVNECADGAHPPCHASARCRNTKGGFQCLCADPYELGDDGRTCVDSGRLPRVTWISMSLAALLIGGFAGLTSTVICRWRVLGWKAGILTGCREPSEGKVAGHCRTASCSQNHRTTLFQTQANPKSAGRLFSQHG

SEQ ID NO: 67090 - protein, 933 aa, Homo sapiens; identical to SEQ ID NO: 67088

SEQ ID NO: 67091 - protein, 889 aa, Homo sapiens
MRALAVLSVTLVMACTEAFFPFISRGKELLWGKPEESRVSSVLEESKRLVDTAMYATMQRNLKKRGILSPAQLLSFSKLPEPTSGVIARAAEIMETSIQAMKRKVNLKTQQSQHPTDALSEDLLSIIANMSGCLPYMLPPKCPNTCLANKYRPITGACNNRDHPRWGASNTALARWLPPVYEDGFSQPRGWNPGFLYNGFPLPPVREVTRHVIQVSNEVVTDDDRYSDLLMAWGQYIDHDIAFTPQSTSKAAFGGGADCQMTCENQNPCFPIQLPEEARPAAGTACLPFYRSSAACGTGDQGALFGNLSTANPRQQMNGLTSFLDASTVYGSSPALERQLRNWTSAEGLLRVHARLRDSGRAYLPFVPPRAPAACAPEPGIPGETRGPCFLAGDGRASEVPSLTALHTLWLREHNRLAAALKALNAHWSADAVYQEARKVVGALHQIITLRDYIPRILGPEAFQQYVGPYEGYDSTANPTVSNVFSTAAFRFGHATIHPLVRRLDASFQEHPDLPGLWLHQAFFSPWTLLRGGGLDPLIRGLLARPAKLQVQDQLMNEELTERLFVLSNSSTLDLASINLQRGRDHGLPGYNEWREFCGLPRLETPADLSTAIASRSVADKILDLYKHPDNIDVWLGGLAENFLPRARTGPLFACLIGKQMKALRDGDWFWWENSHVFTDAQRRELEKHSLSRVICDNTGLTRVPMDAFQVGKFPEDFESCDSITGMNLEAWRETFPQDDKCGFPESVENGDFVHCEESGRRVLVYSCRHGYELQGREQLTCTQEGWDFQPPLCKDSGRLPRVTWISMSLAALLIGGFAGLTSTVICRWTRTGTKSTLPISETGGGTPELRCGKHQAVGTSPQRAAAQDSEQESAGMEGRDTHRLPRAL

SEQ ID NO: 67092 - protein, 760 aa, Homo sapiens
MRALAVLSVTLVMACTEAFFPFISRGKELLWGKPEESRVSSVLEESKRLVDTAMYATMQRNLKKRGILSPAQLLSFSKLPEPTSGVIARAAEIMETSIQAMKRKVNLKTQQSQHPTDALSEDLLSIIANMSGCLPYMLPPKCPNTCLANKYRPITGACNNRDHPRWGASNTALARWLPPVYEDGFSQPRGWNPGFLYNGFPLPPVREVTRHVIQVSNEVVTDDDRYSDLLMAWGQYIDHDIAFTPQSTSKAAFGGGADCQMTCENQNPCFPIQIITLRDYIPRILGPEAFQQYVGPYEGYDSTANPTVSNVFSTAAFRFGHATIHPLVRRLDASFQEHPDLPGLWLHQAFFSPWTLLRGGGLDPLIRGLLARPAKLQVQDQLMNEELTERLFVLSNSSTLDLASINLQRGRDHGLPGYNEWREFCGLPRLETPADLSTAIASRSVADKILDLYKHPDNIDVWLGGLAENFLPRARTGPLFACLIGKQMKALRDGDWFWWENSHVFTDAQRRELEKHSLSRVICDNTGLTRVPMDAFQVGKFPEDFESCDSITGMNLEAWRETFPQDDKCGFPESVENGDFVHCEESGRRVLVYSCRHGYELQGREQLTCTQEGWDFQPPLCKDVNECADGAHPPCHASARCRNTKGGFQCLCADPYELGDDGRTCVDSGRLPRVTWISMSLAALLIGGFAGLTSTVICRWTRTGTKSTLPISETGGGTPELRCGKHQAVGTSPQRAAAQDSEQESAGMEGRDTHRLPRAL

SEQ ID NO: 67093 - protein, 760 aa, Homo sapiens; identical to SEQ ID NO: 67092

SEQ ID NO: 67094 - protein, 876 aa, Homo sapiens
MRALAVLSVTLVMACTEAFFPFISRGKELLWGKPEESRVSSVLEESKRLVDTAMYATMQRNLKKRGILSPAQLLSFSKLPEPTSGVIARAAEIMETSIQAMKRKVNLKTQQSQHPTDALSEDLLSIIANMSGCLPYMLPPKCPNTCLANKYRPITGACNNRDHPRWGASNTALARWLPPVYEDGFSQPRGWNPGFLYNGFPLPPVREVTRHVIQVSNEVVTDDDRYSDLLMAWGQYIDHDIAFTPQSTSKAAFGGGADCQMTCENQNPCFPIQLPEEARPAAGTACLPFYRSSAACGTGDQGALFGNLSTANPRQQMNGLTSFLDASTVYGSSPALERQLRNWTSAEGLLRVHARLRDSGRAYLPFVPPRAPAACAPEPGIPGETRGPCFLAGDGRASEVPSLTALHTLWLREHNRLAAALKALNAHWSADAVYQEARKVVGALHQIITLRDYIPRILGPEAFQQYVGPYEGYDSTANPTVSNVFSTAAFRFGHATIHPLVRRLDASFQEHPDLPGLWLHQAFFSPWTLLRGGYNEWREFCGLPRLETPADLSTAIASRSVADKILDLYKHPDNIDVWLGGLAENFLPRARTGPLFACLIGKQMKALRDGDWFWWENSHVFTDAQRRELEKHSLSRVICDNTGLTRVPMDAFQVGKFPEDFESCDSITGMNLEAWRETFPQDDKCGFPESVENGDFVHCEESGRRVLVYSCRHGYELQGREQLTCTQEGWDFQPPLCKDVNECADGAHPPCHASARCRNTKGGFQCLCADPYELGDDGRTCVDSGRLPRVTWISMSLAALLIGGFAGLTSTVICRWTRTGTKSTLPISETGGGTPELRCGKHQAVGTSPQRAAAQDSEQESAGMEGRDTHRLPRAL

SEQ ID NO: 67095 - protein, 172 aa, Homo sapiens
MRALAVLSVTLVMACTEAFFPFISRGKELLWGKPEESRVSSVLEESKRLVDTAMYATMQRNLKKRGILSPAQLLSFSKLPEPTSGVIARAAEIMETSIQAMKRKVNLKTQQSQHPTDALSEDLLSIIANMSGCLPYMLPPKCPNTCLANKYRPITGACNNRDHPRWGASNTA

SEQ ID NO: 67096 - protein, 153 aa, Homo sapiens
MNGLTSFLDASTVYGSSPALERQLRNWTSAEGLLRVHARLRDSGRAYLPFVPPRAPAACAPEPGIPGETRGPCFLAGDPRQRGPLPDGTAHAVAARAQPPGRGAQGPQCALERGRRVPGGAQGRGRSAPDHHPEGLHPQDPGTRGLPAVRGSL

SEQ ID NO: 67097 - protein, 174 aa, Homo sapiens
MRALAVLSVTLVMACTEAFFPFISRGKELLWGKPEESRVSSVLEESKRLVDTAMYATMQRNLKKRGILSPAQLLSFSKLPEPTSGVIARAAEIMETSIQAMKRKVNLKTQQSQHPTDALSEDLLSIIANMSGCLPYMLPPKCPNTCLANKYRPITGACNNRKMKYKPDHSETAN

SEQ ID NO: 67098 - protein, 764 aa, Homo sapiens
MRPADLLQLVLLLDLPRDLGGMGCSSPPCECHQEEDFRVTCKDIQRIPSLPPSTQTLKLIETHLRTIPSHAFSNLPNISRIYVSIDVTLQQLESHSFYNLSKVTHIEIRNTRNLTYIDPDALKELPLLKFLGIFNTGLKMFPDLTKVYSTDIFFILEITDNPYMTSIPVNAFQGLCNETLTLKLYNNGFTSVQGYAFNGTKLDAVYLNKNKYLTVIDKDAFGGVYSGPSLLDVSQTSVTALPSKGLEHLKELIARNTWTLKKLPLSLSFLHLTRADLSYPSHCCAFKNQKKIRGILESLMCNESSMQSLRQRKSVNALNSPLHQEYEENLGDSIVGYKEKSKFQDTHNNAHYYVFFEEQEDEIIGFGQELKNPQEETLQAFDSHYDYTICGDSEDMVCTPKSDEFNPCEDIMGYKFLRIVVWFVSLLALLGNVFVLLILLTSHYKLNVPRFLMCNLAFADFCMGMYLLLIASVDLYTHSEYYNHAIDWQTGPGCNTAGFFTVFASELSVYTLTVITLERWYAITFAMRLDRKIRLRHACAIMVGGWVCCFLLALLPLVGISSYAKVSICLPMDTETPLALAYIVFVLTLNIVAFVIVCCCYVKIYITVRNPQYNPGDKDTKIAKRMAVLIFTDFICMAPISFYALSAILNKPLITVSNSKILLVLFYPLNSCANPFLYAIFTKAFQRDVFILLSKFGICKRQAQAYRGQRVPPKNSTDIQVQKVTHEMRQGLHNMEDVYELIENSHLTPKKQGQISEEYMQTVL

SEQ ID NO: 67099 - protein, 253 aa, Homo sapiens
MRPADLLQLVLLLDLPRDLGGMGCSSPPCECHQEEDFRVTCKDIQRIPSLPPSTQTLKLIETHLRTIPSHAFSNLPNISRIYVSIDVTLQQLESHSFYNLSKVTHIEIRNTRNLTYIDPDALKELPLLKFLGIFNTGLKMFPDLTKVYSTDIFFILEITDNPYMTSIPVNAFQGLCNETLTLKLYNNGFTSVQGYAFNGTKLDAVYLNKNKYLTVIDKDAFGGVYSGPSLLLPLGRKSLSFETQKAPRSSMPS

SEQ ID NO: 67100 - protein, 411 aa, Homo sapiens
MRPADLLQLVLLLDLPRDLGGMGCSSPPCECHQEEDFRVTCKDIQRIPSLPPSTQTLKLIETHLRIVVWFVSLLALLGNVFVLLILLTSHYKLNVPRFLMCNLAFADFCMGMYLLLIASVDLYTHSEYYNHAIDWQTGPGCNTAGFFTVFASELSVYTLTVITLERWYAITFAMRLDRKIRLRHACAIMVGGWVCCFLLALLPLVGISSYAKVSICLPMDTETPLALAYIVFVLTLNIVAFVIVCCCYVKIYITVRNPQYNPGDKDTKIAKRMAVLIFTDFICMAPISFYALSAILNKPLITVSNSKILLVLFYPLNSCANPFLYAIFTKAFQRDVFILLSKFGICKRQAQAYRGQRVPPKNSTDIQVQKVTHEMRQGLHNMEDVYELIENSHLTPKKQGQISEEYMQTVL

SEQ ID NO: 67101 - protein, 764 aa, Homo sapiens; identical to SEQ ID NO: 67098

SEQ ID NO: 67102 - protein, 274 aa, Homo sapiens
MRPADLLQLVLLLDLPRDLGGMGCSSPPCECHQEEDFRVTCKDIQRIPSLPPSTQTLKLIETHLRTIPSHAFSNLPNISRIYVSIDVTLQQLESHSFYNLSKVTHIEIRNTRNLTYIDPDALKELPLLKFLGIFNTGLKMFPDLTKVYSTDIFFILEITDNPYMTSIPVNAFQGLCNETLTLKLYNNGFTSVQGYAFNGTKLDAVYLNKNKYLTVIDKDAFGGVYSGPSLLVENVAVSGKGFCKSLFSWLYRLPLGRKSLSFETQKAPRSSMPS

SEQ ID NO: 67103 - protein, 303 aa, Homo sapiens
MSDAGGGKKPPVDPQAGPGPGPGRAAGERGLSGSFPLVLKKLMENPPREARLDKEKGKEKLEEDEAAAASTMAVSASLMPPIWDKTIPYDGESFHLEYMDLDEFLLENGIPASPTHLAHNLLLPVAELEGKESASSSTASPPSSSTAIFQPSETVSSTESSLEKERETPSPIDPNCVEVDVNFNPDPADLVLSSVPGGELFNPRKHKFAEEDLKPQPMIKKAKKVFVPDEQKDEKYWTRRKKNNVAAKRSRDARRLKENQITIRAAFLEKENTALRTEVAELRKEVGKCKTIVSKYETKYGPL

SEQ ID NO: 67104 - protein, 184 aa, Homo sapiens
  VARIANT 1: note = MOD_RES - Any amino acid
XFIFLPRPGTSLGRIRKADKEKGKEKLEEDEAAAASTMAVSASLMPPIWDKTIPYDGESFHLEYMDLDEFLLENGIPASPTHLAHNLLLPVAELEGKESASSSTASPPSSSTAIFQPSETVSSTESSLEKERETPSPIDPNCVEVDVNFNPDPADLVLSSVPGGELFNPRKHKFAEEDLKPQPM

SEQ ID NO: 67105 - protein, 273 aa, Homo sapiens
MDMPEVLKSLLEHSLPWPEKRTDKEKGKEKLEEDEAAAASTMAVSASLMPPIWDKTIPYDGESFHLEYMDLDEFLLENGIPASPTHLAHNLLLPVAELEGKESASSSTASPPSSSTAIFQPSETVSSTESSLEKERETPSPIDPNCVEVDVNFNPDPADLVLSSVPGGELFNPRKHKFAEEDLKPQPMIKKAKKVFVPDEQKDEKYWTRRKKNNVAAKRSRDARRLKENQITIRAAFLEKENTALRTEVAELRKEVGKCKTIVSKYETKYGPL

SEQ ID NO: 67106 - protein, 273 aa, Homo sapiens; identical to SEQ ID NO: 67105

SEQ ID NO: 67107 - protein, 242 aa, Homo sapiens
MPGPWLLLALALTLNLTGVPGGRAQPEAAQQEAVTAAEHPGLDDFLRQVERLLFLRENIQRLQGDQGEHSASQIFQSDWLSKRQHPGKREEEEEEGVEEEEEEEGGAVGPHKRQHPGRREDEASWSVDVTQHKRQHPGRRSPWLAYAVPKRQHPGRRLADPKAQRSWEEEEEEEEREEDLMPEKRQHPGKRALGGPCGPQGAYGQAGLLLGLLDDLSRSQGAEEKRQHPGRRAAWVREPLEE

SEQ ID NO: 67108 - protein, 1024 aa, Homo sapiens
MGEDDAALRAGSRGLSDPWADSVGVRPRTTERHIAVHKRLVLAFAVSLVALLAVTMLAVLLSLRFDECGASATPGADGGPSGFPERGGNGSLPGSARRNHHAGGDSWQPEAGGVASPGTTSAQPPSEEEREPWEPWTQLRLSGHLKPLHYNLMLTAFMENFTFSGEVNVEIACRNATRYVVLHASRVAVEKVQLAEDRAFGAVPVAGFFLYPQTQVLVVVLNRTLDAQRNYNLKIIYNALIENELLGFFRSSYVLHGERRFLGVTQFSPTHARKAFPCFDEPIYKATFKISIKHQATYLSLSNMPVETSVFEEDGWVTDHFSQTPLMSTYYLAWAICNFTYRETTTKSGVVVRLYARPDAIRRGSGDYALHITKRLIEFYEDYFKVPYSLPKLDLLAVPKHPYAAMENWGLSIFVEQRILLDPSVSSISYLLDVTMVIVHEICHQWFGDLVTPVWWEDVWLKEGFAHYFEFVGTDYLYPGWNMEKQRFLTDVLHEVMLLDGLASSHPVSQEVLQATDIDRVFDWIAYKKGAALIRMLANFMGHSVFQRGLQDYLTIHKYGNAARNDLWNTLSEALKRNGKYVNIQEVMDQWTLQMGYPVITILGNTTAENRIIITQQHFIYDISAKTKALKLQNNSYLWQIPLTIVVGNRSHVSSEAIIWVSNKSEHHRITYLDKGSWLLGNINQTGYFRVNYDLRNWRLLIDQLIRNHEVLSVSNRAGLIDDAFSLARAGYLPQNIPLEIIRYLSEEKDFLPWHAASRALYPLDKLLDRMENYNIFNEYILKQVATTYIKLGWPKNNFNGSLVQASYQHEELRREVIMLACSFGNKHCHQQASTLISDWISSNRNRIPLNVRDIVYCTGVSLLDEDVWEFIWMKFHSTTAVSEKKILLEALTCSDDRNLLNRLLNLSLNSEVVLDQDAIDVIIHVARNPHGRDLAWKFFRDKWKILNTRYGEALFMNSKLISGVTEFLNTEGELKELKNFMKNYDGVAAASFSRAVETVEANVRWKMLYQDELFQWLGKALRH

SEQ ID NO: 67109 - protein, 398 aa, Homo sapiens
MENETVSELNQTQLQPRAVVALEYQVVTILLVLIICGLGIVGNIMVVLVVMRTKHMRTPTNCYLVSLAVADLMVLVAAGLPNITDSIYGSWVYGYVGCLCITYLQYLGINASSCSITAFTIERYIAICHPIKAQFLCTFSRAKKIIIFVWAFTSLYCMLWFFLLDLNISTYKDAIVISCGYKISRNYYSPIYLMDFGVFYVVPMILATVLYGFIARILFLNPIPSDPKENSKTWKNDSTHQNTNLNVNTSNRCFNSTVSSRKQVTKMLAVVVILFALLWMPYRTLVVVNSFLSSPFQENWFLLFCRICIYLNSAINPVIYNLMSQKFRAAFRKLCNCKQKPTEKPANYSVALNYSVIKESDHFSTELDDITVTDTYLSATKVSFDDTCLASEVSFSQS

SEQ ID NO: 67110 - protein, 398 aa, Homo sapiens; identical to SEQ ID NO: 67109

SEQ ID NO: 67111 - protein, 375 aa, Homo sapiens
MEDEMPKTLYVGNLSRDVTEALILQLFSQIGPCKNCKMIMDTAGNDPYCFVEFHEHRHAAAALAAMNGRKIMGKEVKVNWATTPSSQKKDTSNHFHVFVGDLSPEITTEDIKAAFAPFGRISDARVVKDMATGKSKGYGFVSFFNKWDAENAIQQMGGQWLGGRQIRTNWATRKPPAPKSTYESNTKQLSYDEVVNQSSPSNCTVYCGGVTSGLTEQLMRQTFSPFGQIMEIRVFPDKGYSFVRFNSHESAAHAIVSVNGTTIEGHVVKCYWGKETLDMINPVQQQNQIGYPQPYGQWGQWYGNAQQIGQYMPNGWQVPAYGMYGQAWNQQGFNQTQSSAPWMGPNYGVQPPQGQNGSMLPNQPSGYRVAGYETQ

SEQ ID NO: 67112 - protein, 386 aa, Homo sapiens
MEDEMPKTLYVGNLSRDVTEALILQLFSQIGPCKNCKMIMDTAGNDPYCFVEFHEHRHAAAALAAMNGRKIMGKEVKVNWATTPSSQKKDTSSSTVVSTQRSQDHFHVFVGDLSPEITTEDIKAAFAPFGRISDARVVKDMATGKSKGYGFVSFFNKWDAENAIQQMGGQWLGGRQIRTNWATRKPPAPKSTYESNTKQLSYDEVVNQSSPSNCTVYCGGVTSGLTEQLMRQTFSPFGQIMEIRVFPDKGYSFVRFNSHESAAHAIVSVNGTTIEGHVVKCYWGKETLDMINPVQQQNQIGYPQPYGQWGQWYGNAQQIGQYMPNGWQVPAYGMYGQAWNQQGFNQTQSSAPWMGPNYGVQPPQGQNGSMLPNQPSGYRVAGYETQ

SEQ ID NO: 67113 - protein, 463 aa, Homo sapiens
PLVSRETPLSCSHNRLNDLGGSEGQGAGPGGAAATAAAMEDEMPKTLYVGNLSRDVTEALILQLFSQIGPCKNCKMIMDTAGNDPYCFVEFHEHRHAAAALAAMNGRKIMGKEVKVNWATTPSSQKKDTSSSTVVSTQRSQDHFHVFVGDLSPEITTEDIKAAFAPFGRISDARVVKDMATGKSKGYGFVSFFNKWDAENAIQQMGGQWLGGRQIRTNWATRKPPAPKSTYECRCIGEEKEMWNFGEKYARFCSRRLIAEIDEKQIKTTIQKSNTKQLSYDEVVNQSSPSNCTVYCGGVTSGLTEQLMRQTFSPFGQIMEIRVFPDKGYSFVRFNSHESAAHAIVSVNGTTIEGHVVKCYWGKETLDMINPVQQNQIGYPQPYGQWGQWYGNAQQIGQYMPNGWQVPAYGMYGQAWNQQGFNQTQSSAPWMGPNYGVQPPQGQNGSMLPNQPSGYRVAGYETQ

SEQ ID NO: 67114 - protein, 85 aa, Homo sapiens
MITEHTSNDPYCFVEFYEHRDAAAALAAMNGRKILGKEVKVNWATTPSSQKKDTSNHFHVFVGDLSPEITTEDIKSAFAPFGKIS

SEQ ID NO: 67115 - protein, 252 aa, Homo sapiens
MDARVVKDMATGKSKGYGFVSFYNKLDAENAIVHMGGQWLGGRQIRTNWATRKPPAPKSTQENNTKQLRFEDVVNQSSPKNCTVYCGGIASGLTDQLMRQTFSPFGQIMEIRVFPEKGYSFVRFSTHESAAHAIVSVNGTTIEGHVVKCYWGKESPDMTKNFQQVDYSQWGQWSQVYGNPQQYGQYMANGWQVPPYGVYGQPWNQQGFGVDQSPSAAWMGGFGAQPPQGQAPPPVIPPPNQAGYGMASYQTQ

SEQ ID NO: 67116 - protein, 392 aa, Homo sapiens
MMEDDGQPRTLYVGNLSRDVTEVLILQLFSQIGPCKSCKMITEQPDSRRVNSSVGFSVLQHTSNDPYCFVEFYEHRDAAAALAAMNGRKILGKEVKVNWATTPSSQKKDTSNHFHVFVGDLSPEITTEDIKSAFAPFGKISDARVVKDMATGKSKGYGFVSFYNKLDAENAIVHMGGQWLGGRQIRTNWATRKPPAPKSTQENNTKQLRFEDVVNQSSPKNCTVYCGGIASGLTDQLMRQTFSPFGQIMEIRVFPEKGYSFVRFSTHESAAHAIVSVNGTTIEGHVVKCYWGKESPDMTKNFQQVDYSQWGQWSQVYGNPQQYGQYMANGWQVPPYGVYGQPWNQQGFGVDQSPSAAWMGGFGAQPPQGQAPPPVIPPPNQAGYGMASYQTQ

SEQ ID NO: 67117 - protein, 132 aa, Homo sapiens
MITEHTSNDPYCFVEFYEHRDAAAALAAMNGRKILGKEVKVNWATTPSSQKKDTSNHFHVFVGDLSPEITTEDIKSAFAPFGKISDARVVKDMATGKSKGYGFVSFYNKLDAENAIVHMGGQWLGGRQIRTN

SEQ ID NO: 67118 - protein, 375 aa, Homo sapiens
MMEDDGQPRTLYVGNLSRDVTEVLILQLFSQIGPCKSCKMITEHTSNDPYCFVEFYEHRDAAAALAAMNGRKILGKEVKVNWATTPSSQKKDTSNHFHVFVGDLSPEITTEDIKSAFAPFGKISDARVVKDMATGKSKGYGFVSFYNKLDAENAIVHMGGQWLGGRQIRTNWATRKPPAPKSTQENNTKQLRFEDVVNQSSPKNCTVYCGGIASGLTDQLMRQTFSPFGQIMEIRVFPEKGYSFVRFSTHESAAHAIVSVNGTTIEGHVVKCYWGKESPDMTKNFQQVDYSQWGQWSQVYGNPQQYGQYMANGWQVPPYGVYGQPWNQQGFGVDQSPSAAWMGGFGAQPPQGQAPPPVIPPPNQAGYGMASYQTQ

SEQ ID NO: 67119 - protein, 591 aa, Homo sapiens
MASKCSSERKSRTSLTLNQKLEMIKLSEEGMSKAEIGRRLGLLRQTVSQVVNAKEKFLKEVKSATPMNTRMIRKRNSLIADMEKVLVVWIEDQTSRNIPLSQSLIQNKALTLFNSMKAERGVEAAEEKFEASRGWFMRFKERSHFHNIKAQGEAASADVEAAASYPEALAKIIDEGGYTKQQIFNVDETAFYWKKMPSRTFIAREEKSVPGFKASKDRLTLLLGANAAGDFKLKPMLIYHSENPRALKNYTKSTLPVLYKWNSKARMTAHLFTAWFTEYFKPTVETYCSEKKIPFKILLLIDNAPSHPRALMEIYEEINVIFMPANTTSILQPMDQGVISTFKSYYLRNTFHKALAAMDSDVSDGSGQSKLKTFWKGFTILDAIKNIRDSWEEVKLSTLTGVWKKLIPTLIDDYEGFKTSVEEVSADVVEIAKELELEVEPEDVTELLQSHDKTLTDEELFLMDAQRKWFLEMESTPGEDAVNIVEMTTKDLEYYINLVDKAAAGFERIDSNFERSSTVGKMLSNSIACYREIFHERKSQLMRKASPMSYFRKLPQPPQPSAATTLTSQQPSTSRQDPPPAKRVRLTEGSD

SEQ ID NO: 67120 - protein, 525 aa, Homo sapiens
MLGKRKRVVLTIKDKLDIIKKLEEGISFKKLSVVYGIGESTVRDIKKNKERIINYANSSDPTSGVSKRKSMKSSTYEELDRVMIEWFNQQKTDGIPVSGTICAKQAKFFFDALGMEGDFNASSGWLTRFKQRHGIPKAAGKGTKLKGDETAAREFCGSFQEFVEKENLQPEQIYGADQTGLFWKCLPSRTLTLETDQSTSGCRSSRERIIIMCCANATGLHKLNLCVVGKAKKPRAFKGTDLSNLPVTYYSQKGAWIEQSVFRQWFEKYFVPQVQKHLKSKGLLEKAVLLLDFPPARPNEEMLSSDDGRIIVKYLPPNVTSLIQPMSQGVLATVKRYYRAGLLQKYMDEGNDPKIFWKNLTVLDAIYEVSRAWNMVKSSTITKAWKKLFPGNEENSGMNIDEGAILAANLATVLQNTEECEHVDIENIDQWFDSRSSDSSCQVLTDSESAEDQTKAAEQKPSSKSRKTELNPEKHISHKAALEWTENLLDYLEQQDDMLLSDKLVLRRLRTIIRKKQKIQNNKNH

SEQ ID NO: 67121 - protein, 549 aa, Homo sapiens
MNKRGKYTTLNLEEKMKVLSRIEAGRSLKSVMDEFGISKSTFYDIKKNKKLILDFVLKQDMPLVGAEKRKRTTGAKYGDVDDAVYMWYQQKRSAGVPVRGVELQAAAERFARCFGRTDFKASTGWLFRFRNRHAIGNRKGCGEQVLSSVSENVEPFRQKLSMIIKEEKLCLAQLYSGDETDLFWKSMPENSQASRKDICLPGKKINKERLSAFLCANADGTHKLKSIIIGKSKLPKSVKEDTSTLPVIYKPSKDVWFTRELFSEWFFQNFVPEVRHFQLNVLRFHDEDVRALLLLDSCPAHPSSESLTSEDGRIKCMFFPHNTSTLIQPMNQGVILSCKRLYRWKQLEESLVIFEESDDEQEKGDKGVSKIKIYNIKSAIFNWAKSWEEVKQITIANAWENLLYKKEPEYDFQGLEHGDYREILEKCGELETKLDDDRVWLNGDEEKGCLLKTKGGITKEVVQKGGEAEKQTAEFKLSAVRESLDYLLDFVDATPEFQRFHFTLKEMQQEIVKKQFQSKIHSRIGSFLKPRPHNIKDSFSGPSTSGSNH

SEQ ID NO: 67122 - protein, 549 aa, Homo sapiens; identical to SEQ ID NO: 67121

SEQ ID NO: 67123 - protein, 511 aa, Homo sapiens
MNKRGKYTTLNLEEKMKVLSRIEAGRSLKSVMDEFGISKSTFYDIKKNKKLILDFVLKQDMPLVGAEKRKRTTGAKYGDVDDAVYMWYQQKRSAGVPVRGVELQAAAERFARCFGRTDFKASTGWLFRFRNRHAIGNRKGCGEQVLSSVSENVEPFRQKLSMIIKEEKLCLAQLYSGDETDLFWKSMPENSQASRKDICLPGKKINKERLSAFLCANADGTHKLKSIIIGKSKLPKSVKEDTSTLPVIYKPSKDVWFTRELFSEWFFQNFVPEVRHFQLNVLRFHDEDVRALLLLDSCPAHPSSESLTSEDGRIKCMFFPHNTSTLIQPMNQGVILSCKRLYRWKQLEESLVIFEESDDEQEKGDKGVSKIKIYNIKSAIFNWAKSWEEVKQITIANAWENLLYKKEPEYDFQGLEHGDYREILEKCGELETKLDDDRVWLNGDEEKGCLLKTKGGITKEVVQKGGEAEKQTAEFKLSAVRESLDYLLDFVDATPEFQRFHFTLCEFSDDS

SEQ ID NO: 67124 - protein, 547 aa, Homo sapiens
MTSAAPAKKPYRKAPPEHRELRLEIPGSRLEQEEPLTDAERMKLLQEENEELRRRLASATRRTEALERELEIGQDCLELELGQSREELDKFKDKFRRLQNSYTASQRTNQELEDKLHTLIKKAEMDRKTLDWEIVELTNKLLDAKNTINKLEELNERYRLDCNLAVQLLKCNKSHFRNHKFADLPCELQDMVRKHLHSGQEAASPGPAPSLAPGAVVPTSVIARVLEKPESLLLNSAQSGSAGRPLAEDVFVHVDMSEGVPGDPASPPAPGSPTPQPNGECHSLGTARGSPEEELPLPAFEKLNPYPTPSPPHPLYPGRRVIEFSEDKVRIPRNSPLPNCTYATRQAISLSLVEEGSERARPSPVPSTPASAQASPHHQPSPAPLTLSAPASSASSEEDLLVSWQRAFVDRTPPPAAVAQRTAFGRDALPELQRHFAHSPADRDEVVQAPSARPEESELLLPTEPDSGFPREEEELNLPISPEEERQSLLPINRGTEEGPGTSHTEGRAWPLPSSSRPQRSPKRMGVHHLHRKDSLTQAQEQGNLLN

SEQ ID NO: 67125 - protein, 547 aa, Homo sapiens; identical to SEQ ID NO: 67124

SEQ ID NO: 67126 - protein, 557 aa, Homo sapiens
MTSAAPAKKPYRKAPPEHRELRLEIPGSRLEQEEPLTDAERMKLLQEENEELRRRLASATRRTEALERELEIGQDCLELELGQSREELDKFKDKFRRLQNSYTASQRTNQELEDKLHTLASLSHSWIFAIKKAEMDRKTLDWEIVELTNKLLDAKNTINKLEELNERYRLDCNLAVQLLKCNKSHFRNHKFADLPCELQDMVRKHLHSGQEAASPGPAPSLAPGAVVPTSVIARVLEKPESLLLNSAQSGSAGRPLAEDVFVHVDMSEGVPGDPASPPAPGSPTPQPNGECHSLGTARGSPEEELPLPAFEKLNPYPTPSPPHPLYPGRRVIEFSEDKVRIPRNSPLPNCTYATRQAISLSLVEEGSERARPSPVPSTPASAQASPHHQPSPAPLTLSAPASSASSEEDLLVSWQRAFVDRTPPPAAVAQRTAFGRDALPELQRHFAHSPADRDEVVQAPSARPEESELLLPTEPDSGFPREEEELNLPISPEEERQSLLPINRGTEEGPGTSHTEGRAWPLPSSSRPQRSPKRMGVHHLHRKDSLTQAQEQGNLLN

SEQ ID NO: 67127 - protein, 557 aa, Homo sapiens; identical to SEQ ID NO: 67126

SEQ ID NO: 67128 - protein, 547 aa, Homo sapiens; identical to SEQ ID NO: 67124

SEQ ID NO: 67129 - protein, 547 aa, Homo sapiens; identical to SEQ ID NO: 67124

SEQ ID NO: 67130 - protein, 547 aa, Homo sapiens; identical to SEQ ID NO: 67124

SEQ ID NO: 67131 - protein, 557 aa, Homo sapiens; identical to SEQ ID NO: 67126

SEQ ID NO: 67132 - protein, 193 aa, Homo sapiens
MTSAAPAKKPYRKAPPEHRELRLEIPGSRLEQEEPLTDAERMKLLQEENEELRRRLASATRRTEALERELEIGQDCLELELGQSREELDKFKDKFRRLQNSYTASQRTNQELEDKLHTLASLSHSWIFAIKKAEMDRKTLDWEIVELTNKLLDAKNTINKLEELNERYRLDCNLAVQLLKCNKSHFRNHKFAD

SEQ ID NO: 67133 - protein, 239 aa, Homo sapiens
  VARIANT 1: note = MOD_RES - Any amino acid
XLLQEENEELRRRLASATRRTEALERELEIGQDCLELELGQSREELDKFKDKFRRLQNSYTASQRTNQELEDKLHTLIKKAEMDRKTLDWEIVELTNKLLDAKNTINKLEELNERYRLDCNLAVQLLKCNKSHFRNHKFADVSRTHPLPAHIDHSGHCRTPLTPVSAPLSVLLFPLCPPLASMSPLKPVNSATGWCPVYCPGPITSSGGPALLVSVTETEREDPGQEGEGSQSYLPKEY

SEQ ID NO: 67134 - protein, 1748 aa, Homo sapiens
MSARAAAAKSTAMEETAIWEQHTVTLHRAPGFGFGIAISGGRDNPHFQSGETSIVISDVLKGGPAEGQLQENDRVAMVNGVSMDNVEHAFAVQQLRKSGKNAKITIRRKKKVQIPVSRPDPEPVSDNEEDSYDEEIHDPRSGRSGVVNRRSEKIWPRDRSASRERSLSPRSDRRSVASSQPAKPTKVTLVKSRKNEEYGLRLASHIFVKEISQDSLAARDGNIQEGDVVLKINGTVTENMSLTDAKTLIERSKGKLKMVVQRDERATLLNVPDLSDSIHSANASERDDISEIQSLASDHSGRSHDRPPRRSRSRSPDQRSEPSDHSRHSPQQPSNGSLRSRDEERISKPGAVSTPVKHADDHTPKTVEEVTVERNEKQTPSLPEPKPVYAQVGQPDVDLPVSPSDGVLPNSTHEDGILRPSMKLVKFRKGDSVGLRLAGGNDVGIFVAGVLEDSPAAKEGLEEGDQILRVNNVDFTNIIREEAVLFLLDLPKGEEVTILAQKKKDVYRRIVESDVGDSFYIRTHFEYEKESPYGLSFNKGEVFRVVDTLYNGKLGSWLAIRIGKNHKEVERGIIPNKNRAEQLASVQYTLPKTAGGDRADFWRFRGLRSSKRNLRKSREDLSAQPVQTKFPAYERVVLREAGFLRPVTIFGPIADVAREKLAREEPDIYQIAKSEPRDAGTDQRSSGIIRLHTIKQIIDQDKHALLDVTPNAVDRLNYAQWYPIVVFLNPDSKQGVKTMRMRLCPESRKSARKLYERSHKLRKNNHHLFTTTINLNSMNDGWYGALKEAIQQQQNQLVWVSEGKADGATSDDLDLHDDRLSYLSAPGSEYSMYSTDSRHTSDYEDTDTEGGAYTDQELDETLNDEVGTPPESAITRSSEPVREDSSGMHHENQTYPPYSPQAQPQPIHRIDSPGFKPASQQKAEASSPVPYLSPETNPASSTSAVNHNVNLTNVRLEEPTPAPSTSYSPQADSLRTPSTEAAHIMLRDQEPSLSSHVDPTKVYRKDPYPEEMMRQNHVLKQPAVSHPGHRPDKEPNLTYEPQLPYVEKQASRDLEQPTYRYESSSYTDQFSRNYEHRLRYEDRVPMYEEQWSYYDDKQPYPSRPPFDNQHSQDLDSRQHPEESSERGYFPRFEEPAPLSYDSRPRYEQAPRASALRHEEQPAPGYDTHGRLRPEAQPHPSAGPKPAESKQYFEQYSRSYEQVPPQGFTSRAGHFEPLHGAAAVPPLIPSSQHKPEALPSNTKPLPPPPTQTEEEEDPAMKPQSVLTRVKMFENKRSASLETKKDVNDTGSFKPPEVASKPSGAPIIGPKPTSQNQFSEHDKTLYRIPEPQKPQLKPPEDIVRSNHYDPEEDEEYYRKQLSYFDRRSFENKPPAHIAASHLSEPAKPAHSQNQSNFSSYSSKGKPPEADGVDRSFGEKRYEPIQATPPPPPLPSQYAQPSQPVTSASLHIHSKGAHGEGNSVSLDFQNSLVSKPDPPPSQNKPATFRPPNREDTAQAAFYPQKSFPDKAPVNGTEQTQKTVTPAYNRFTPKPYTSSARPFERKFESPKFNHNLLPSETAHKPDLSSKTPTSPKTLVKSHSLAQPPEFDSGVETFSIHAEKPKYQINNISTVPKAIPVSPSAVEEDEDEDGHTVVATARGIFNSNGGVLSSIETGVSIIIPQGAIPEGVEQEIYFKVCRDNSILPPLDKEKGETLLSPLVMCGPHGLKFLKPVELRLPHCDPKTWQNKCLPGDPNYLVGANCVSVLIDHF

SEQ ID NO: 67135 - protein, 1668 aa, Homo sapiens
MSARAAAAKSTAMEETAIWEQHTVTLHRAPGFGFGIAISGGRDNPHFQSGETSIVISDVLKGGPAEGQLQENDRVAMVNGVSMDNVEHAFAVQQLRKSGKNAKITIRRKKKVQIPVSRPDPEPVSDNEEDSYDEEIHDPRSGRSGVVNRRSEKIWPRDRSASRERSLSPRSDRRSVASSQPAKPTKVTLVKSRKNEEYGLRLASHIFVKEISQDSLAARDGNIQEGDVVLKINGTVTENMSLTDAKTLIERSKGKLKMVVQRDERATLLNVPDLSDSIHSANASERDDISEIQSLASDHSGRSHDRPPRRSRSRSPDQRSEPSDHSRHSPQQPSNGSLRSRDEERISKPGAVSTPVKHADDHTPKTVEEVTVERNEKQTPSLPEPKPVYAQVGQPDVDLPVSPSDGVLPNSTHEDGILRPSMKLVKFRKGDSVGLRLAGGNDVGIFVAGVLEDSPAAKEGLEEGDQILRVNNVDFTNIIREEAVLFLLDLPKGEEVTILAQKKKDVYRRIVESDVGDSFYIRTHFEYEKESPYGLSFNKGEVFRVVDTLYNGKLGSWLAIRIGKNHKEVERGIIPNKNRAEQLASVQYTLPKTAGGDRADFWRFRGLRSSKRNLRKSREDLSAQPVQTKFPAYERVVLREAGFLRPVTIFGPIADVAREKLAREEPDIYQIAKSEPRDAGTDQRSSGIIRLHTIKQIIDQDKHALLDVTPNAVDRLNYAQWYPIVVFLNPDSKQGVKTMRMRLCPESRKSARKLYERSHKLRKNNHHLFTTTINLNSMNDGWYGALKEAIQQQQNQLVWVSEGKADGATSDDLDLHDDRLSYLSAPGSEYSMYSTDSRHTSDYEDTDTEGGAYTDQELDETLNDEVGTPPESAITRSSEPVREDSSGMHHENQTYPPYSPQAQPQPIHRIDSPGFKPASQQVYRKDPYPEEMMRQNHVLKQPAVSHPGHRPDKEPNLTYEPQLPYVEKQASRDLEQPTYRYESSSYTDQFSRNYEHRLRYEDRVPMYEEQWSYYDDKQPYPSRPPFDNQHSQDLDSRQHPEESSERGYFPRFEEPAPLSYDSRPRYEQAPRASALRHEEQPAPGYDTHGRLRPEAQPHPSAGPKPAESKQYFEQYSRSYEQVPPQGFTSRAGHFEPLHGAAAVPPLIPSSQHKPEALPSNTKPLPPPPTQTEEEEDPAMKPQSVLTRVKMFENKRSASLETKKDVNDTGSFKPPEVASKPSGAPIIGPKPTSQNQFSEHDKTLYRIPEPQKPQLKPPEDIVRSNHYDPEEDEEYYRKQLSYFDRRSFENKPPAHIAASHLSEPAKPAHSQNQSNFSSYSSKGKPPEADGVDRSFGEKRYEPIQATPPPPPLPSQYAQPSQPVTSASLHIHSKGAHGEGNSVSLDFQNSLVSKPDPPPSQNKPATFRPPNREDTAQAAFYPQKSFPDKAPVNGTEQTQKTVTPAYNRFTPKPYTSSARPFERKFESPKFNHNLLPSETAHKPDLSSKTPTSPKTLVKSHSLAQPPEFDSGVETFSIHAEKPKYQINNISTVPKAIPVSPSAVEEDEDEDGHTVVATARGIFNSNGGVLSSIETGVSIIIPQGAIPEGVEQEIYFKVCRDNSILPPLDKEKGETLLSPLVMCGPHGLKFLKPVELRLPHCDPKTWQNKCLPGDPNYLVGANCVSVLIDHF

SEQ ID NO: 67136 - protein, 993 aa, Homo sapiens
MPVRGDRGFPPRRELSGWLRAPGMEELIWEQYTVTLQKDSKRGFGIAVSGGRDNPHFENGETSIVISDVLPGGPADGLLQENDRVVMVNGTPMEDVLHSFAVQQLRKSGKVAAIVVKRPRKVQVAALQASPPLDQDDRAFEVMDEFDGRSFRSGYSERSRLNSHGGRSRSWEDSPERGRPHERARSRERDLSRDRSRGRSLERGLDQDHARTRDRSRGRSLERGLDHDFGPSRDRDRDRSRGRSIDQDYERAYHRAYDPDYERAYSPEYRRGARHDARSRGPRSRSREHPHSRSPSPEPRGRPGPIGVLLMKSRANEEYGLRLGSQIFVKEMTRTGLATKDGNLHEGDIILKINGTVTENMSLTDARKLIEKSRGKLQLVVLRDSQQTLINIPSLNDSDSEIEDISEIESNRSFSPEERRHQYSDYDYHSSSEKLKERPSSREDTPSRLSRMGATPTPFKSTGDIAGTVVPETNKEPRYQEDPPAPQPKAAPRTFLRPSPEDEAIYGPNTKMVRFKKGDSVGLRLAGGNDVGIFVAGIQEGTSAEQEGLQEGDQILKVNTQDFRGLVREDAVLYLLEIPKGEMVTILAQSRADVYRDILACGRGDSFFIRSHFECEKETPQSLAFTRGEVFRVVDTLYDGKLGNWLAVRIGNELEKGLIPNKSRAEQMASVQNAQRDNAGDRADFWRMRGQRSGVKKNLRKSREDLTAVVSVSTKFPAYERVLLREAGFKRPVVLFGPIADIAMEKLANELPDWFQTAKTEPKDAGSEKSTGVVRLNTVRQIIEQDKHALLDVTPKAVDLLNYTQWFPIVIFFNPDSRQGVKTMRQRLNPTSNKSSRKLFDQANKLKKTCAHLFTATINLNSANDSWFGSLKDTIQHQQGEAVWVSEGKMEGMDDDPEDRMSYLTAMGADYLSCDSRLISDFEDTDGEGGAYTDNELDEPAEEPLVSSITRSSEPVQHEEVRRGRPRAGTGEPGVFLALSWTAVCSGCCGRHS

SEQ ID NO: 67137 - protein, 1043 aa, Homo sapiens
MPVRGDRGFPPRRELSGWLRAPGMEELIWEQYTVTLQKDSKRGFGIAVSGGRDNPHFENGETSIVISDVLPGGPADGLLQENDRVVMVNGTPMEDVLHSFAVQQLRKSGKVAAIVVKRPRKVQVAALQASPPLDQDDRAFEVMDEFDGRSFRSGYSERSRLNSHGGRSRSWEDSPERGRPHERARSRERDLSRDRSRGRSLERGLDQDHARTRDRSRGRSLERGLDHDFGPSRDRDRDRSRGRSIDQDYERAYHRAYDPDYERAYSPEYRRGARHDARSRGPRSRSREHPHSRSPSPEPRGRPGPIGVLLMKSRANEEYGLRLGSQIFVKEMTRTGLATKDGNLHEGDIILKINGTVTENMSLTDARKLIEKSRGKLQLVVLRDSQQTLINIPSLNDSDSEIEDISEIESNRSFSPEERRHQYSDYDYHSSSEKLKERPSSREDTPSRLSRMGATPTPFKSTGDIAGTVVPETNKEPRYQEDPPAPQPKAAPRTFLRPSPEDEAIYGPNTKMVRFKKGDSVGLRLAGGNDVGIFVAGIQEGTSAEQEGLQEGDQILKVNTQDFRGLVREDAVLYLLEIPKGEMVTILAQSRADVYRDILACGRGDSFFIRSHFECEKETPQSLAFTRGEVFRVVDTLYDGKLGNWLAVRIGNELEKGLIPNKSRAEQMASVQNAQRDNAGDRADFWRMRGQRSGVKKNLRKSREDLTAVVSVSTKFPAYERVLLREAGFKRPVVLFGPIADIAMEKLANELPDWFQTAKTEPKDAGSEKSTGVVRLNTVRQIIEQDKHALLDVTPKAVDLLNYTQWFPIVIFFNPDSRQGVKTMRQRLNPTSNKSSRKLFDQANKLKKTCAHLFTATINLNSANDSWFGSLKDTIQHQQGEAVWVSEGKMEGMDDDPEDRMSYLTAMGADYLSCDSRLISDFEDTDGEGGAYTDNELDEPAEEPLVSSITRSSEPVQHEEIEIAQKHPDIYAVPIKTHKPDPGTPQHTSSRPPEPQKAPSRPYQDTRGSYGSDAEEEEYRQQLSEHSKRGYYGQSARYRDTEL

SEQ ID NO: 67138 - protein, 1190 aa, Homo sapiens
MPVRGDRGFPPRRELSGWLRAPGMEELIWEQYTVTLQKDSKRGFGIAVSGGRDNPHFENGETSIVISDVLPGGPADGLLQENDRVVMVNGTPMEDVLHSFAVQQLRKSGKVAAIVVKRPRKVQVAALQASPPLDQDDRAFEVMDEFDGRSFRSGYSERSRLNSHGGRSRSWEDSPERGRPHERARSRERDLSRDRSRGRSLERGLDQDHARTRDRSRGRSLERGLDHDFGPSRDRDRDRSRGRSIDQDYERAYHRAYDPDYERAYSPEYRRGARHDARSRGPRSRSREHPHSRSPSPEPRGRPGPIGVLLMKSRANEEYGLRLGSQIFVKEMTRTGLATKDGNLHEGDIILKINGTVTENMSLTDARKLIEKSRGKLQLVVLRDSQQTLINIPSLNDSDSEIEDISEIESNRSFSPEERRHQYSDYDYHSSSEKLKERPSSREDTPSRLSRMGATPTPFKSTGDIAGTVVPETNKEPRYQEDPPAPQPKAAPRTFLRPSPEDEAIYGPNTKMVRFKKGDSVGLRLAGGNDVGIFVAGIQEGTSAEQEGLQEGDQILKVNTQDFRGLVREDAVLYLLEIPKGEMVTILAQSRADVYRDILACGRGDSFFIRSHFECEKETPQSLAFTRGEVFRVVDTLYDGKLGNWLAVRIGNELEKGLIPNKSRAEQMASVQNAQRDNAGDRADFWRMRGQRSGVKKNLRKSREDLTAVVSVSTKFPAYERVLLREAGFKRPVVLFGPIADIAMEKLANELPDWFQTAKTEPKDAGSEKSTGVVRLNTVRQIIEQDKHALLDVTPKAVDLLNYTQWFPIVIFFNPDSRQGVKTMRQRLNPTSNKSSRKLFDQANKLKKTCAHLFTATINLNSANDSWFGSLKDTIQHQQGEAVWVSEGKMEGMDDDPEDRMSYLTAMGADYLSCDSRLISDFEDTDGEGGAYTDNELDEPAEEPLVSSITRSSEPVQHEESIRKPSPEPRAQMRRAASSDQLRDNSPPPAFKPEPPKAKTQNKEESYDFSKSYEYKSNPSAVAGNETPGASTKGYPPPVAAKPTFGRSILKPSTPIPPQEGEEVGESSEEQDNAPKSVLGKVKIFEKMDHKARLQRMQELQEAQNARIEIAQKHPDIYAVPIKTHKPDPGTPQHTSSRPPEPQKAPSRPYQDTRGSYGSDAEEEEYRQQLSEHSKRGYYGQSARYRDTEL

SEQ ID NO: 67139 - protein, 101 aa, Homo sapiens
MEELIWEQYTVTLQKDSKRGFGIAVSGGRDNPHFENGETSIVISDVLPGGPADGLLQENDRVVMVNGTPMEDVLHSFAVQQLRKSGKVAAIVSTGFAFSLP

SEQ ID NO: 67140 - protein, 161 aa, Homo sapiens
MEELIWEQYTVTLQKDSKRGFGIAVSGGRDNPHFENGETSIVISDVLPGGPADGLLQENDRVVMVNGTPMEDVLHSFAVQQLRKSGKVAAIVVKRPRKVQVAALQASPPLDQDDRAFEVMDEFDGRSFRSGYSERSRLNSHGGRSRSWEDSPERGRPHERA

SEQ ID NO: 67141 - protein, 1020 aa, Homo sapiens
MEELIWEQYTVTLQKDSKRGFGIAVSGGRDNPHFENGETSIVISDVLPGGPADGLLQENDRVVMVNGTPMEDVLHSFAVQQLRKSGKVAAIVVKRPRKVQVAALQASPPLDQDDRAFEVMDEFDGRSFRSGYSERSRLNSHGGRSRSWEDSPERGRPHERARSRERDLSRDRSRGRSLERGLDQDHARTRDRSRGRSLERGLDHDFGPSRDRDRDRSRGRSIDQDYERAYHRAYDPDYERAYSPEYRRGARHDARSRGPRSRSREHPHSRSPSPEPRGRPGPIGVLLMKSRANEEYGLRLGSQIFVKEMTRTGLATKDGNLHEGDIILKINGTVTENMSLTDARKLIEKSRGKLQLVVLRDSQQTLINIPSLNDSDSEIEDISEIESNRSFSPEERRHQYSDYDYHSSSEKLKERPSSREDTPSRLSRMGATPTPFKSTGDIAGTVVPETNKEPRYQEDPPAPQPKAAPRTFLRPSPEDEAIYGPNTKMVRFKKGDSVGLRLAGGNDVGIFVAGIQEGTSAEQEGLQEGDQILKVNTQDFRGLVREDAVLYLLEIPKGEMVTILAQSRADVYRDILACGRGDSFFIRSHFECEKETPQSLAFTRGEVFRVVDTLYDGKLGNWLAVRIGNELEKGLIPNKSRAEQMASVQNAQRDNAGDRADFWRMRGQRSGVKKNLRKSREDLTAVVSVSTKFPAYERVLLREAGFKRPVVLFGPIADIAMEKLANELPDWFQTAKTEPKDAGSEKSTGVVRLNTVRQIIEQDKHALLDVTPKAVDLLNYTQWFPIVIFFNPDSRQGVKTMRQRLNPTSNKSSRKLFDQANKLKKTCAHLFTATINLNSANDSWFGSLKDTIQHQQGEAVWVSEGKMEGMDDDPEDRMSYLTAMGADYLSCDSRLISDFEDTDGEGGAYTDNELDEPAEEPLVSSITRSSEPVQHEEIEIAQKHPDIYAVPIKTHKPDPGTPQHTSSRPPEPQKAPSRPYQDTRGSYGSDAEEEEYRQQLSEHSKRGYYGQSARYRDTEL

SEQ ID NO: 67142 - protein, 1157 aa, Homo sapiens
MKTAQALHRMWIQAVKKLRRWKGRAPGMEELIWEQYTVTLQKDSKRGFGIAVSGGRDNPHFENGETSIVISDVLPGGPADGLLQENDRVVMVNGTPMEDVLHSFAVQQLRKSGKVAAIVVKRPRKVQVAALQASPPLDQDDRAFEVMDEFDGRSFRSGYSERSRLNSHGGRSRSWEDSPERGRPHERARSRERDLSRDRSRGRSLERGLDQDHARTRDRSRGRSLERGLDHDFGPSRDRDRDRSRGRSIDQDYERAYHRAYDPDYERAYSPEYRRGARHDARSRGPRSRSREHPHSRSPSPEPRGRPGPIGVLLMKSRANEEYGLRLGSQIFVKEMTRTGLATKDGNLHEGDIILKINGTVTENMSLTDARKLIEKSRGKLQLVVLRDSQQTLINIPSLNDSDSEIEDISEIESNRSFSPEERRHQYSDYDYHSSSEKLKERPSSREDTPSRLSRMGATPTPFKSTGDIAGTVVPETNKEPRYQEDPPAPQPKAAPRTFLRPSPEDEAIYGPNTKMVRFKKGDSVGLRLAGGNDVGIFVAGIQEGTSAEQEGLQEGDQILKVNTQDFRGLVREDAVLYLLEIPKGEMVTILAQSRADVYRDILACGRGDSFFIRSHFECEKETPQSLAFTRGEVFRVVDTLYDGKLGNWLAVRIGNELEKGLIPNKSRAEQMASVQNAQRDNAGDRADFWRMRGQRSGVKKNLRKSREDLTAVVSVSTKFPAYERVLLREAGFKRPVVLFGPIADIAMEKLANELPDWFQTAKTEPKDAGSEKSTGVVRLNTVRQIIEQDKHALLDVTPKAVDLLNYTQWFPIVIFFNPDSRQGVKTMRQRLNPTSNKSSRKLFDQANKLKKTCAHLFTATINLNSANDSWFGSLKDTIQHQQGEAVWVSEGKMEGMDDDPEDRMSYLTAMGADYLSCDSRLISDFEDTDGEGGAYTDNELDEPAEEPLVSSITRSSEPVQHEEAKTQNKEESYDFSKSYEYKSNPSAVAGNETPGASTKGYPPPVAAKPTFGRSILKPSTPIPPQEGEEVGESSEEQDNAPKSVLGKVKIFEKMDHKARLQRMQELQEAQNARIEIAQKHPDIYAVPIKTHKPDPGTPQHTSSRPPEPQKAPSRPYQDTRGSYGSDAEEEEYRQQLSEHSKRGYYGQSARYRDTEL

SEQ ID NO: 67143 - protein, 1221 aa, Homo sapiens
MKTAQALHRMWIQAVKKLRRWKGRVSPSASSPLVFPNLSSWEGEGSKTILTAPGMEELIWEQYTVTLQKDSKRGFGIAVSGGRDNPHFENGETSIVISDVLPGGPADGLLQENDRVVMVNGTPMEDVLHSFAVQQLRKSGKVAAIVVKRPRKVQVAALQASPPLDQDDRAFEVMDEFDGRSFRSGYSERSRLNSHGGRSRSWEDSPERGRPHERARSRERDLSRDRSRGRSLERGLDQDHARTRDRSRGRSLERGLDHDFGPSRDRDRDRSRGRSIDQDYERAYHRAYDPDYERAYSPEYRRGARHDARSRGPRSRSREHPHSRSPSPEPRGRPGPIGVLLMKSRANEEYGLRLGSQIFVKEMTRTGLATKDGNLHEGDIILKINGTVTENMSLTDARKLIEKSRGKLQLVVLRDSQQTLINIPSLNDSDSEIEDISEIESNRSFSPEERRHQYSDYDYHSSSEKLKERPSSREDTPSRLSRMGATPTPFKSTGDIAGTVVPETNKEPRYQEDPPAPQPKAAPRTFLRPSPEDEAIYGPNTKMVRFKKGDSVGLRLAGGNDVGIFVAGIQEGTSAEQEGLQEGDQILKVNTQDFRGLVREDAVLYLLEIPKGEMVTILAQSRADVYRDILACGRGDSFFIRSHFECEKETPQSLAFTRGEVFRVVDTLYDGKLGNWLAVRIGNELEKGLIPNKSRAEQMASVQNAQRDNAGDRADFWRMRGQRSGVKKNLRKSREDLTAVVSVSTKFPAYERVLLREAGFKRPVVLFGPIADIAMEKLANELPDWFQTAKTEPKDAGSEKSTGVVRLNTVRQIIEQDKHALLDVTPKAVDLLNYTQWFPIVIFFNPDSRQGVKTMRQRLNPTSNKSSRKLFDQANKLKKTCAHLFTATINLNSANDSWFGSLKDTIQHQQGEAVWVSEGKMEGMDDDPEDRMSYLTAMGADYLSCDSRLISDFEDTDGEGGAYTDNELDEPAEEPLVSSITRSSEPVQHEESIRKPSPEPRAQMRRAASSDQLRDNSPPPAFKPEPPKAKTQNKEESYDFSKSYEYKSNPSAVAGNETPGASTKGYPPPVAAKPTFGRSILKPSTPIPPQEGEEVGESSEEQDNAPKSVLGKVKIFEKMDHKARLQRMQELQEAQNARIEIAQKHPDIYAVPIKTHKPDPGTPQHTSSRPPEPQKAPSRPYQDTRGSYGSDAEEEEYRQQLSEHSKRGYYGQSARYRDTEL

SEQ ID NO: 67144 - protein, 928 aa, Homo sapiens
MAVRFQVADMEELTIWEQHTATLSKDPRRGFGIAISGGRDRPGGSMVVSDVVPGGPAEGRLQTGDHIVMVNGVSMENATSAFAIQILKTCTKMANITVKRPRRIHLPATKASPSSPGRQDSDEDDGPQRVEEVDQGRGYDGDSSSGSGRSWDERSRRPRPGRRGRAGSHGRRSPGGGSEANGLALVSGFKRLPRQDVQMKPVKSVLVKRRDSEEFGVKLGSQIFIKHITDSGLAARHRGLQEGDLILQINGVSSQNLSLNDTRRLIEKSEGKLSLLVLRDRGQFLVNIPPAVSDSDSSPLEDISDLASELSQAPPSHIPPPPRHAQRSPEASQTDSPVESPRLRRESSVDSRTISEPDEQRSELPRESSYDIYRVPSSQSMEDRGYSPDTRVVRFLKGKSIGLRLAGGNDVGIFVSGVQAGSPADGQGIQEGDQILQVNDVPFQNLTREEAVQFLLGLPPGEEMELVTQRKQDIFWKMVQSRVGDSFYIRTHFELEPSPPSGLGFTRGDVFHVLDTLHPGPGQSHARGGHWLAVRMGRDLREQERGIIPNQSRAEQLASLEAAQRAVGVGPGSSAGSNARAEFWRLRGLRRGAKKTTQRSREDLSALTRQGRYPPYERVVLREASFKRPVVILGPVADIAMQKLTAEMPDQFEIAETVSRTDSPSKIIKLDTVRVIAEKDKHALLDVTPSAIERLNYVQYYPIVVFFIPESRPALKALRQWLAPASRRSTRRLYAQAQKLRKHSSHLFTATIPLNGTSDTWYQELKAIIREQQTRPIWTAEDQLDGSLEDNLDLPHHGLADSSADLSCDSRVNSDYETDGEGGAYTDGEGYTDGEGGPYTDVDDEPPAPALARSSEPVQADESQSPRDRGRISAHQGAQVDSRHPQGQWRQDSMRTYEREALKKKFMRVHDAESSDEDGYDWGPATDL

SEQ ID NO: 67145 - protein, 952 aa, Homo sapiens
MNLCGLMPIFPAPLDQVADMEELTIWEQHTATLSKDPRRGFGIAISGGRDRPGGSMVVSDVVPGGPAEGRLQTGDHIVMVNGVSMENATSAFAIQILKTCTKMANITVKRPRRIHLPATKASPSSPGRQDSDEDDGPQRVEEVDQGRGYDGDSSSGSGRSWDERSRRPRPGRRGRAGSHGRRSPGGGSEANGLALVSGFKRLPRQDVQMKPVKSVLVKRRDSEEFGVKLGSQIFIKHITDSGLAARHRGLQEGDLILQINGVSSQNLSLNDTRRLIEKSEGKLSLLVLRDRGQFLVNIPPAVSDSDSSPLEEGVTMADEMSSPPADISDLASELSQAPPSHIPPPPRHAQRSPEASQTDSPVESPRLRRESSVDSRTISEPDEQRSELPRESSYDIYRVPSSQSMEDRGYSPDTRVVRFLKGKSIGLRLAGGNDVGIFVSGVQAGSPADGQGIQEGDQILQVNDVPFQNLTREEAVQFLLGLPPGEEMELVTQRKQDIFWKMVQSRVGDSFYIRTHFELEPSPPSGLGFTRGDVFHVLDTLHPGPGQSHARGGHWLAVRMGRDLREQERGIIPNQSRAEQLASLEAAQRAVGVGPGSSAGSNARAEFWRLRGLRRGAKKTTQRSREDLSALTRQGRYPPYERVVLREASFKRPVVILGPVADIAMQKLTAEMPDQFEIAETVSRTDSPSKIIKLDTVRVIAEKDKHALLDVTPSAIERLNYVQYYPIVVFFIPESRPALKALRQWLAPASRRSTRRLYAQAQKLRKHSSHLFTATIPLNGTSDTWYQELKAIIREQQTRPIWTAEDQLDGSLEDNLDLPHHGLADSSADLSCDSRVNSDYETDGEGGAYTDGEGYTDGEGGPYTDVDDEPPAPALARSSEPVQADESQSPRDRGRISAHQGAQVDSRHPQGQWRQDSMRTYEREALKKKFMRVHDAESSDEDGYDWGPATDL

SEQ ID NO: 67146 - protein, 933 aa, Homo sapiens [sequence omitted]

SEQ ID NO: 67147 - protein, 883 aa, Homo sapiens
MVVSDVVPGGPAEGRLQTGDHIVMVNGVSMENATSAFAIQILKTCTKMANITVKRPRRIHLPATKASPSSPGRQDSDEDDGPQRVEEVDQGRGYDGDSSSGSGRSWDERSRRPRPGRRGRAGSHGRRSPGGGSEANGLALVSGFKRLPRQDVQMKPVKSVLVKRRDSEEFGVKLGSQIFIKHITDSGLAARHRGLQEGDLILQINGVSSQNLSLNDTRRLIEKSEGKLSLLVLRDRGQFLVNIPPAVSDSDSSPLEDISDLASELSQAPPSHIPPPPRHAQRSPEASQTDSPVESPRLRRESSVDSRTISEPDEQRSELPRESSYDIYRVPSSQSMEDRGYSPDTRVVRFLKGKSIGLRLAGGNDVGIFVSGVQAGSPADGQGIQEGDQILQVNDVPFQNLTREEAVQFLLGLPPGEEMELVTQRKQDIFWKMVQSRVGDSFYIRTHFELEPSPPSGLGFTRGDVFHVLDTLHPGPGQSHARGGHWLAVRMGRDLREQERGIIPNQSRAEQLASLEAAQRAVGVGPGSSAGSNARAEFWRLRGLRRGAKKTTQRSREDLSALTRQGRYPPYERVVLREASFKRPVVILGPVADIAMQKLTAEMPDQFEIAETVSRTDSPSKIIKLDTVRVIAEKDKHALLDVTPSAIERLNYVQYYPIVVFFIPESRPALKALRQWLAPASRRSTRRLYAQAQKLRKHSSHLFTATIPLNGTSDTWYQELKAIIREQQTRPIWTAEDQLDGSLEDNLDLPHHGLADSSADLSCDSRVNSDYETDGEGGAYTDGEGYTDGEGGPYTDVDDEPPAPALARSSEPVQADESQSPRDRGRISAHQGAQVDSRHPQGQWRQDSMRTYEREALKKKFMRVHDAESSDEDGYDWGPATDL

SEQ ID NO: 67148 - protein, 919 aa, Homo sapiens
MEELTIWEQHTATLSKDPRRGFGIAISGGRDRPGGSMVVSDVVPGGPAEGRLQTGDHIVMVNGVSMENATSAFAIQILKTCTKMANITVKRPRRIHLPATKASPSSPGRQDSDEDDGPQRVEEVDQGRGYDGDSSSGSGRSWDERSRRPRPGRRGRAGSHGRRSPGGGSEANGLALVSGFKRLPRQDVQMKPVKSVLVKRRDSEEFGVKLGSQIFIKHITDSGLAARHRGLQEGDLILQINGVSSQNLSLNDTRRLIEKSEGKLSLLVLRDRGQFLVNIPPAVSDSDSSPLEDISDLASELSQAPPSHIPPPPRHAQRSPEASQTDSPVESPRLRRESSVDSRTISEPDEQRSELPRESSYDIYRVPSSQSMEDRGYSPDTRVVRFLKGKSIGLRLAGGNDVGIFVSGVQAGSPADGQGIQEGDQILQVNDVPFQNLTREEAVQFLLGLPPGEEMELVTQRKQDIFWKMVQSRVGDSFYIRTHFELEPSPPSGLGFTRGDVFHVLDTLHPGPGQSHARGGHWLAVRMGRDLREQERGIIPNQSRAEQLASLEAAQRAVGVGPGSSAGSNARAEFWRLRGLRRGAKKTTQRSREDLSALTRQGRYPPYERVVLREASFKRPVVILGPVADIAMQKLTAEMPDQFEIAETVSRTDSPSKIIKLDTVRVIAEKDKHALLDVTPSAIERLNYVQYYPIVVFFIPESRPALKALRQWLAPASRRSTRRLYAQAQKLRKHSSHLFTATIPLNGTSDTWYQELKAIIREQQTRPIWTAEDQLDGSLEDNLDLPHHGLADSSADLSCDSRVNSDYETDGEGGAYTDGEGYTDGEGGPYTDVDDEPPAPALARSSEPVQADESQSPRDRGRISAHQGAQVDSRHPQGQWRQDSMRTYEREALKKKFMRVHDAESSDEDGYDWGPATDL

SEQ ID NO: 67149 - protein, 1207 aa, Homo sapiens
MDLHMMNCELLATCSALGYLEGDTYHKEPDCLESVKDLIRYLRHEDETRDVRQQLGAAQILQSDLLPILTQHHQDKPLFDAVIRLMVNLTQPALLCFGNLPKEPSFRHHFLQVLTYLQAYKEAFASEKAFGVLSETLYELLQLGWEERQEEDNLLIERILLLVRNILHVPADLDQEKIDDDASAHDQLLWAIHLSGLDDLLLFLASSSAEEQWSLHVLEIVSLMFRDQNPEQLAGVGQGRLAQERSADFAELEVLRQREMAEKKTRALQRGNRHSRFGGSYIVQGLKSIGERDLIFHKGLHNLRNYSSDLGKQPKKVPKRRQAARELSIQRRSALNVRLFLRDFCSEFLENCYNRLMGSVKDHLLREKAQQHDETYYMWALAFFMAFNRAASFRPGLVSETLSVRTFHFIEQNLTNYYEMMLTDRKEAASWARRMHLALKAYQELLATVNEMDISPDEAVRESSRIIKNNIFYVMEYRELFLALFRKFDERCQPRSFLRDLVETTHLFLKMLERFCRSRGNLVVQNKQKKRRKKKKKVLDQAIVSGNVPSSPEEVEAVWPALAEQLQCCAQNSELSMDSVVPFDAASEVPVEEQRAEAMVRIQDCLLAGQAPQALTLLRSAREVWPEGDVFGSQDISPEEEIQLLKQILSAPLPRQQGPEERGAEEEEEEEEEEEEELQVVQVSEKEFNFLDYLKRFACSTVVRAYVLLLRSYQQNSAHTNHCIVKMLHRLAHDLKMEALLFQLSVFCLFNRLLSDPAAGAYKELVTFAKYILGKFFALAAVNQKAFVELLFWKNTAVVREMTEGYGSLDDRSSSRRAPTWSPEEEAHLRELYLANKDVEGQDVVEAILAHLNTVPRTRKQIIHHLVQMGLADSVKDFQRKGTHIVLWTGDQELELQRLFEEFRDSDDVLGHIMKNITAKRSRARIVDKLLALGLVAERRELYKKRQKKLASSILPNGAESLKDFCQEDLEEEENLPEEDSEEEEEGGSEAEQVQGSLVLSNENLGQSLHQEGFSIPLLWLQNCLIRAADDREEDGCSQAVPLVPLTEENEEAMENEQFQQLLRKLGVRPPASGQETFWRIPAKLSPTQLRRAAASLSQPEEEQKLQPELQPKVPGEQGSDEEHCKEHRAQALRALLLAHKKKAGLASPEEEDAVGKEPLKAAPKKRQLLDSDEEQEEDEGRNRAPELGAPGIQKKKRYQIEDDEDD

SEQ ID NO: 67150 - protein, 1208 aa, Homo sapiens
MDLHMMNCELLATCSALGYLEGDTYHKEPDCLESVKDLIRYLRHEDETRDVRQQLGAAQILQSDLLPILTQHHQDKPLFDAVIRLMVNLTQPALLCFGNLPKEPSFRHHFLQVLTYLQAYKEAFASEKAFGVLSETLYELLQLGWEERQEEDNLLIERILLLVRNILHVPADLDQEKKIDDDASAHDQLLWAIHLSGLDDLLLFLASSSAEEQWSLHVLEIVSLMFRDQNPEQLAGVGQGRLAQERSADFAELEVLRQREMAEKKTRALQRGNRHSRFGGSYIVQGLKSIGERDLIFHKGLHNLRNYSSDLGKQPKKVPKRRQAARELSIQRRSALNVRLFLRDFCSEFLENCYNRLMGSVKDHLLREKAQQHDETYYMWALAFFMAFNRAASFRPGLVSETLSVRTFHFIEQNLTNYYEMMLTDRKEAASWARRMHLALKAYQELLATVNEMDISPDEAVRESSRIIKNNIFYVMEYRELFLALFRKFDERCQPRSFLRDLVETTHLFLKMLERFCRSRGNLVVQNKQKKRRKKKKKVLDQAIVSGNVPSSPEEVEAVWPALAEQLQCCAQNSELSMDSVVPFDAASEVPVEEQRAEAMVRIQDCLLAGQAPQALTLLRSAREVWPEGDVFGSQDISPEEEIQLLKQILSAPLPRQQGPEERGAEEEEEEEEEEEEELQVVQVSEKEFNFLDYLKRFACSTVVRAYVLLLRSYQQNSAHTNHCIVKMLHRLAHDLKMEALLFQLSVFCLFNRLLSDPAAGAYKELVTFAKYILGKFFALAAVNQKAFVELLFWKNTAVVREMTEGYGSLDDRSSSRRAPTWSPEEEAHLRELYLANKDVEGQDVVEAILAHLNTVPRTRKQIIHHLVQMGLADSVKDFQRKGTHIVLWTGDQELELQRLFEEFRDSDDVLGHIMKNITAKRSRARIVDKLLALGLVAERRELYKKRQKKLASSILPNGAESLKDFCQEDLEEEENLPEEDSEEEEEGGSEAEQVQGSLVLSNENLGQSLHQEGFSIPLLWLQNCLIRAADDREEDGCSQAVPLVPLTEENEEAMENEQFQQLLRKLGVRPPASGQETFWRIPAKLSPTQLRRAAASLSQPEEEQKLQPELQPKVPGEQGSDEEHCKEHRAQALRALLLAHKKKAGLASPEEEDAVGKEPLKAAPKKRQLLDSDEEQEEDEGRNRAPELGAPGIQKKKRYQIEDDEDD

SEQ ID NO: 67151 - protein, 301 aa, Homo sapiens
MLEPQENGVIDLPDYEHVEDETFPPFPPPASPERQDGEGTEPDEESGNGAPVRVPPKRTVKRNIPKLDAQRLISERGLPALRHVFDKAKFKGKGHEAEDLKMLIRHMEHWAHRLFPKLQFEDFIDRVEYLGSKKEVQTCLKRIRLDLPILHEDFVSNNDEVAENNEHDVTSTELDPFLTNLSESEMFASELSRSLTEEQQQRIERNKQLALERRQAKLLSNSQTLGNDMLMNTPRAHTVEEVNTDEDQKEESNGLNEDILDNPCNDAIANTLNEEETLLDQSFKNVQQQLDATSRNITEAR

SEQ ID NO: 67152 - protein, 200 aa, Homo sapiens
MLIRHMEHWAHRLFPKLQFEDFIDRVEYLGSKKEVQTCLKRIRLDLPILHEDFVSNNDEVAENNEHDVTSTELDPFLTNLSESEMFASELSRSLTEEQQQRIERNKQLALERRQAKLLSNSQTLGNDMLMNTPRAHTVEEVNTDEDQKEESNGLNEDILDNPCNDAIANTLNEEETLLDQSFKNVQQQLDATSRNITEAR

SEQ ID NO: 67153 - protein, 178 aa, Homo sapiens
MMIHGFQSSHRDFCFGPWKLTASKTHIMKSADVEKLADELHMPSLPEMMFGDNVLRIQHGSGFGIEFNATDALRCVNNYQGMLKVACAEEWQESRTEGEHSKEVIKPYDWTYTTDYKGTLLGESLKLKVVPTTDHIDTEKLKAREQIKFFEEVLLFEDELHDHGVSSLSVKIPGGGHL

SEQ ID NO: 67154 - protein, 272 aa, Homo sapiens
MMIHGFQSSHRDFCFGPWKLTASKTHIMKSADVEKLADELHMPSLPEMMFGDNVLRIQHGSGFGIEFNATDALRCVNNYQGMLKVACAEEWQESRTEGEHSKEVIKPYDWTYTTDYKGTLLGESLKLKVVPTTDHIDTEKLKAREQIKFFEEVLLFEDELHDHGVSSLSVKIRVMPSSFFLLLRFFLRIDGVLIRMNDTRLYHEADKTYMLREYTSRESKISSLMHVPPSLFTEPNEISQYLPIKEAVCEKLIFPERIDPNPADSQKSTQVE

SEQ ID NO: 67155 - protein, 304 aa, Homo sapiens
MIYTMKKVHALWASVCLLLNLAPAPLNADSEEDEEHTIITDTELPPLKLMHSFCAFKADDGPCKAIMKRFFFNIFTRQCEEFIYGGCEGNQNRFESLEECKKMCTRDNANRIIKTTLQQEKPDFCFLEEDPGICRGYITRYFYNNQTKQCERFKYGGCLGNMNNFETLEECKNICEDGPNGFQVDNYGTQLNAVNNSLTPQSTKVPSLFEFHGPSWCLTPADRGLCRANENRFYYNSVIGKCRPFKYSGCGGNENNFTSKQECLRACKKGFIQRISKGGLIKTKRKRKKQRVKIAYEEIFVKNM

SEQ ID NO: 67156 - protein, 251 aa, Homo sapiens
MIYTMKKVHALWASVCLLLNLAPAPLNADSEEDEEHTIITDTELPPLKLMHSFCAFKADDGPCKAIMKRFFFNIFTRQCEEFIYGGCEGNQNRFESLEECKKMCTRDNANRIIKTTLQQEKPDFCFLEEDPGICRGYITRYFYNNQTKQCERFKYGGCLGNMNNFETLEECKNICEDGPNGFQVDNYGTQLNAVNNSLTPQSTKVPSLFVTKEGTNDGWKNAAHIYQVFLNAFCIHASMFFLGLDSISCLC

SEQ ID NO: 67157 - protein, 304 aa, Homo sapiens; identical to SEQ ID NO: 67155

SEQ ID NO: 67158 - protein, 251 aa, Homo sapiens; identical to SEQ ID NO: 67156

SEQ ID NO: 67159 - protein, 76 aa, Homo sapiens
MIYTMKKVHALWASVCLLLNLAPAPLNADSEEDEEHTIITDTELPPLKLMHSFCAFKADDGPCKAIMKRFFFNIFT

SEQ ID NO: 67160 - protein, 61 aa, Homo sapiens
MIYTMKKVHALWASVCLLLNLAPAPLNADSEEDEEHTIITDTELPPLKLMHSFCAFKADDG

SEQ ID NO: 67161 - protein, 106 aa, Homo sapiens
MIYTMKKVHALWASVCLLLNLAPAPLNADSEEDEEHTIITDTELPPLKLMHSFCAFKADDGPCKAIMKRFFFNIFTRQCEEFIYGGCEGNQNRFESLEECKKMCTR

SEQ ID NO: 67162 - protein, 288 aa, Homo sapiens
MIYTMKKVHALWASVCLLLNLAPAPLNADSEEDEEHTIITDTELPPLKLMHSFCAFKADDGPCKAIMKRFFFNIFTRQCEEFIYGGCEGNQNRFESLEECKKMCTRDNANRIIKTTLQQEKPDFCFLEEDPGICRGYITRYFYNNQTKQCERFKYGGCLGNMNNFETLEECKNICEDGPNGFQVDNYGTQLNAVNNSLTPQSTKVPSLFEFHGPSWCLTPADRGLCRANENRFYYNSVIGKCRPFKYSGCGGNENNFTSKQECLRACKKGFIQRISKGGLIKTKRKRK

SEQ ID NO: 67163 - protein, 106 aa, Homo sapiens; identical to SEQ ID NO: 67161

SEQ ID NO: 67164 - protein, 105 aa, Homo sapiens
MIYTMKKVHALWASVCLLLNLAPAPLNADSEEDEEHTIITDTELPPLKLMHSFCAFKADDGPCKAIMKRFFFNIFTRQCEEFIYGGCEGNQNRFESLEECKKMCT

SEQ ID NO: 67165 - protein, 321 aa, Homo sapiens
MGEPQGSMRILVTGGSGLVGKAIQKVVADGAGLPGEDWVFVSSKDADLTDTAQTRALFEKVQPTHVIHLAAMVGGLFRNIKYNLDFWRKNVHMNDNVLHSAFEVGARKVVSCLSTCIFPDKTTYPIDETMIHNGPPHNSNFGYSYAKRMIDVQNRAYFQQYGCTFTAVIPTNVFGPHDNFNIEDGHVLPGLIHKVHLAKSSGSALTVWGTGNPRRQFIYSLDLAQLFIWVLREYNEVEPIILSVGEEDEVSIKEAAEAVVEAMDFHGEVTFDTTKSDGQFKKTASNSKLRTYLPDFRFTPFKQAVKETCAWFTDNYEQARK

SEQ ID NO: 67166 - protein, 119 aa, Homo sapiens
MGEPQGSMRILVTGGSGLVGKAIQKVVADGAGLPGEDWVFVSSKDADLTDTAQTRALFEKVQPTHVIHLAAMVGGLFRNIKYNLDFWRKNVHMNDNVLHSAFEVGARKVVSCLSTCIFP

SEQ ID NO: 67167 - protein, 268 aa, Homo sapiens
MGEPQGSMRILVTGGSGLVGKAIQKVVADGAGLPGEDWVFVSSKDADLTDTAQTRALFEKVQPTHVIHLAAMVGGLFRNIKYNLDFWRKNVHMNDNVLHSAFEVGARKVVSCLSTCIFPDKTTYPIDETMIHNGPPHNSNFGYSYAKRMIDVQNRAYFQQYGCTFTAVIPTNVFGPHDNFNIEDGHVLPGLIHKVHLAKSSGSALTVWGTGNPRRQFIYSLDLAQLFIWVLREYNEVEPIILSVGEEDEVSIKEAAEAVVEAMDFHGE

SEQ ID NO: 67168 - protein, 321 aa, Homo sapiens; identical to SEQ ID NO: 67165

SEQ ID NO: 67169 - protein, 198 aa, Homo sapiens
MGEPQGSMRILVTGGSGLVGKAIQKVVADGAGLPGEDWVFVSSKDADLTDTAQTRALFEKVQPTHVIHLAAMVGGLFRNIKYNLDFWRKNVHMNDNVLHSAFEVGARKVVSCLSTCIFPDKTTYPIDETMIHNGPPHNSNFGYSYAKRMIDVQNRAYFQQYGCTFTAVIPTNVFGPHDNFNIEDGHVLPGLIHKVHLA

SEQ ID NO: 67170 - protein, 885 aa, Homo sapiens
MVEKSSIDENSISLEKEVRHVQEQNLDILKTDLSLKSFSEEIYSESCALLPTSSADIEETDLSEKSCPLENGGRSSISHLKKAASEEKPLGVGEMEEECTLEPELAAFPKQDGGTQEYTDATLEDHRGDVQEADTLHRQLSLSQCFPLLMTEEQQNPGEQISTNIHASGEEKCYEEVQVQNEASFSTLEGEMIETSFSQNIPKLDEAHTTEAAESETSLTQYLLAAGKREVPETKDTRDQAKLVQSESITSMEVEEVTFNTVYEYYNQKQESLGRPLSPESDISIGVGSTTSEEISELDQFYTPPSSVEYFESPKSPDLYFNPSDITKQSSIHSGGETVERYSTPLGEVAERYSTPSEGEVGERYSTPPGETLERYSTPPGETLERYSTPPGEALERYSIPTGGPNPTGTFKTYPSKIEREDGTPNEHFYTPTEERGSAYEIWRSDSFGTPNEAIEPKDNEMPPSFIEPLTKRKVYENTTLGFIVEVEGLPVPGVKWYRNKSLLEPDERIKMERVGNVCSLEISNIQKGEGGEYMCHAVNIIGEAKSFANVDIMPQEERVVALPPPVTHQHVMEFDLEHTTSSRTPSPQEIVLEVELSEKDVKEFEKQVKIVTVPEFTPDHKSMIVSLDVLPFNFVDPNMDSREGEDKELKIDLEVFEMPPRFIMPICDFKIPENSDAVFKCSVIGIPTPEVKWYKEYMCIEPDNIKYVISEEKGSHTLKIRNVCLSDSATYRCRAVNCVGEAICRGFLTMGDSEIFAVIAKKSKVTLSSLMEELVLKSNYTDSFFEFQVVEGPPRFIKGISDCYAPIGTAAYFQCLVRGSPRPTVYWYKDGKLVQGRRFTVEESGTGFHNLFITSLVKSDEGEYRCVATNKSGMAESFAALTLT

SEQ ID NO: 67171 - protein, 5604 aa, Homo sapiens
MTTQAPTFTQPLQSVVVLEGSTATFEAHISGFPVPEVSWFRDGQVISTSTLPGVQISFSDGRAKLTIPAVTKANSGRYSLKATNGSGQATSTAELLVKAETAPPNFVQRLQSMTVRQGSQVRLQVRVTGIPTPVVKFYRDGAEIQSSLDFQISQEGDLYSLLIAEAYPEDSGTYSVNATNSVGRATSTAELLVQGEEEVPAKKTKTIVSTAQISESRQTRIEKKIEAHFDARSIATVEMVIDGAAGQQLPHKTPPRIPPKPKSRSPTPPSIAAKAQLARQQSPSPIRHSPSPVRHVRAPTPSPVRSVSPAARISTSPIRSVRSPLLMRKTQASTVATGPEVPPPWKQEGYVASSSEAEMRETTLTTSTQIRTEERWEGRYGVQEQVTISGAAGAAASVSASASYAAEAVATGAKEVKQDADKSAAVATVVAAVDMARVREPVISAVEQTAQRTTTTAVHIQPAQEQVRKEAEKTAVTKVVVAADKAKEQELKSRTKEVITTKQEQMHVTHEQIRKETEKTFVPKVVISAAKAKEQETRISEEITKKQKQVTQEAIRQETEITAASMVVVATAKSTKLETVPGAQEETTTQQDQMHLSYEKIMKETRKTVVPKVIVATPKVKEQDLVSRGREGITTKREQVQITQEKMRKEAEKTALSTIAVATAKAKEQETILRTRETMATRQEQIQVTHGKVDVGKKAEAVATVVAAVDQARVREPREPGHLEESYAQQTTLEYGYKERISAAKVAEPPQRPASEPHVVPKAVKPRVIQAPSETHIKTTDQKGMHISSQIKKTTDLTTERLVHVDKRPRTASPHFTVSKISVPKTEHGYEASIAGSAIATLQKELSATSSAQKITKSVKAPTVKPSETRVRAEPTPLPQFPFADTPDTYKSEAGVEVKKEVGVSITGTTVREERFEVLHGREAKVTETARVPAPVEIPVTPPTLVSGLKNVTVIEGESVTLECHISGYPSPTVTWYREDYQIESSIDFQITFQSGIARLMIREAFAEDSGRFTCSAVNEAGTVSTSCYLAVQVSEEFEKETTAVTEKFTTEEKRFVESRDVVMTDTSLTEEQAGPGEPAAPYFITKPVVQKLVEGGSVVFGCQVGGNPKPHVYWKKSGVPLTTGYRYKVSYNKQTGECKLVISMTFADDAGEYTIVVRNKHGETSASASLLEEADYELLMKSQQEMLYQTQVTAFVQEPKVGETAPGFVYSEYEKEYEKEQALIRKKMAKDTVVVRTYVEDQEFHISSFEERLIKEIEYRIIKTTLEELLEEDGEEKMAVDISESEAVESGFDSRIKNYRILEGMGVTFHCKMSGYPLPKIAWYKDGKRIKHGERYQMDFLQDGRASLRIPVVLPEDEGIYTAFASNIKGNAICSGKLYVEPAAPLGAPTYIPTLEPVSRIRSLSPRSVSRSPIRMSPARMSPARMSPARMSPARMSPGRRLEETDESQLERLYKPVFVLKPVSFKCLEGQTARFDLKVVGRPMPETFWFHDGQQIVNDYTHKVVIKEDGTQSLIIVPATPSDSGEWTVVAQNRAGRSSISVILTVEAVEHQVKPMFVEKLKNVNIKEGSRLEMKVRATGNPNPDIVWLKNSDIIVPHKYPKIRIEGTKGEAALKIDSTVSQDSAWYTATAINKAGRDTTRCKVNVEVEFAEPEPERKLIIPRGTYRAKEIAAPELEPLHLRYGQEQWEEGDLYDKEKQQKPFFKKKLTSLRLKRFGPAHFECRLTPIGDPTMVVEWLHDGKPLEAANRLRMINEFGYCSLDYGVAYSRDSGIITCRATNKYGTDHTSATLIVKDEKSLVEESQLPEGRKGLQRIEELERMAHEGALTGVTTDQKEKQKPDIVLYPEPVRVLEGETARFRCRVTGYPQPKVNWYLNGQLIRKSKRFRVRYDGIHYLDIVDCKSYDTGEVKVTAENPEGVIEHKVKLEIQQREDFRSVLRRAPEPRPEFHVHEPGKLQFEVQKVDRPVDTTETKEVVKLKRAERITHEKVPEESEELRSKFKRRTEEGYYEAITAVELKSRKKDESYEELLRKTKDELLHWTKELTEEEKKALAEEGKITIPTFKPDKIELSPSMEAPKIFERIQSQTVGQGSDAHFRVRVVGKPDPECEWYKNGVKIERSDRIYWYWPEDNVCELVIRDVTAEDSASIMVKAINIAGETSSHAFLLVQAKQLITFTQELQDVVAKEKDTMATFECETSEPFVKVKWYKDGMEVHEGDKYRMHSDRKVHFLSILTIDTSDAEDYSCVLVEDENVKTTAKLIVEGAVVEFVKELQDIEVPESYSGELECIVSPENIEGKWYHNDVELKSNGKYTITSRRGRQNLTVKDVTKEDQGEYSFVIDGKKTTCKLKMKPRPIAILQGLSDQKVCEGDIVQLEVKVSLESVEGVWMKDGQEVQPSDRVHIVIDKQSHMLLIEDMTKEDAGNYSFTIPALGLSTSGRVSVYSVDVITPLKDVNVIEGTKAVLECKVSVPDVTSVKWYLNDEQIKPDDRVQAIVKGTKQRLVINRTHASDEGPYKLIVGRVETNCNLSVEKIKIIRGLRDLTCTETQNVVFEVELSHSGIDVLWNFKDKEIKPSSKYKIEAHGKIYKLTVLNMMKDDEGKYTFYAGENMTSGKLTVAGGAISKPLTDQTVAESQEAVFECEVANPDSKGEWLRDGKHLPLTNNIRSESDGHKRRLIIAATKLDDIGEYTYKVATSKTSAKLKVEAVKIKKTLKNLTVTETQDAVFTVELTHPNVKGVQWIKNGVVLESNEKYAISVKGTIYSLRIKNCAIVDESVYGFRLGRLGASARLHVETVKIIKKPKDVTALENATVAFEVSVSHDTVPVKWFHKSVEIKPSDKHRLVSERKVHKLMLQNISPSDAGEYTAVVGQLECKAKLFVETLHITKTMKNIEVPETKTASFECEVSHFNVPSMWLKNGVEIEMSEKFKIVVQGKLHQLIIMNTSTEDSAEYTFVCGNDQVSATLTVTPIMITSMLKDINAEEKDTITFEVTVNYEGISYKWLKNGVEIKSTDKCQMRTKKLTHSLNIRNVHFGDAADYTFVAGKATSTATLYVEARHIEFRKHIKDIKVLEKKRAMFECEVSEPDITVQWMKDDQELQITDRIKIQKEKYVHRLLIPSTRMSDAGKYTVVAGGNVSTAKLFVEGRDVRIRSIKKEVQVIEKQRAVVEFEVNEDDVDAHWYKDGIEINFQVQERHKYVVERRIHRMFISETRQSDAGEYTFVAGRNRSSVTLYVNAPEPPQVLQELQPVTVQSGKPARFCAVISGRPQPKISWYKEEQLLSTGFKCKFLHDGQEYTLLLIEAFPEDAAVYTCEAKNDYGVATTSASLSVEVPEVVSPDQEMPVYPPAIITPLQDTVTSEGQPARFQCRVSGTDLKVSWYSKDKKIKPSRFFRMTQFEDTYQLEIAEAYPEDEGTYTFVASNAVGQVSSTANLSLEAPESILHERIEQEIEMEMKELFSEGESEHSERDTRDAFSDSEDIDHKSMAAKRYASRISSTSSWPEYFKPSFTQKLTFKYVLEGEPVVFTCRLIACPTPEMTWFHNNRPIPTGLRRIIKAESDLHHHSSSLEIKRVQDRDSGSYRLLAINSEGSAESTASLLVIQKGQDEKYLEFLKRAERTHENVEALVERGEDRIKVDLRFTGSPFNKKQDVEQKGMMRTIHFKTMSSAKKTDYMYDEEYLESKSDIRGWLNVGESFLDKETKVKLQRLREARKTLMEKKKLSLLDTSSEISSRTLRSEASDKDILFSREDMKIRSMSDLAESYKVDHSAESIVQNPHALSNQMDQNIESEELPTSFQTIVDEEIFQTEIRMSQEALVKESLPKDHLYGEILVNENTQARGQLEEIMANTTIGESSTYITNVCEKEEVYETPENVSQAITPHASESFGTLVNVEESEEIASERIKKDDLRELQLSASTRIDEFKTEQKEENMRFFENSFRKRPQRCPPSFLQEIESQEVYEGDSCNFVCHFQGYPQPIVTWYNNDMPIPRNQNFIIHSLENYSILTLSSVHHQNEGSITCVLFNQYGTVKTTSMLKVKAKQKHDVKAHKVPVFHDYLDEEEELALVFDQAKGAHPSMSQEGQTNLHLLKTNPPVPPSGDTELLSFPVEIQVTAATPIPEQDKESKEVFQTEELEPKAMPQDQVTQSPKHRFVFLSDITNEPPKMLQEMPKHARCREGDSIILECLISGEPQPVVTWFQNGVLLKQNQKFQFEEVNCSHQLYIKDVNSQDSGKYKCVAENNSGAVESVSDLTVEPVTYRENSQFENIGEIYGKYSRDQQLQDQGESVRAHFYDYPAGPFTPWTNVKEYSVRDYFQSLETIEQIDQKEQVRCIPSREKIPRFVHGASRTIKISKPIRAEFIQCQAEGKERHVSEKSKLHQAEGTVYPFVDDFSDVTIKKEIRNNFGKLGRSEKENVQECAQSDYLPNIHSERISDSYNTKDSSAIVYEESLGEEIHYPGKKVKHRIIEFEKLHVEKGVLEKRPTRTSIVNPPQKKIDDKAFSLKQRESRSSNLNANMYQAEKMSPNTESDSSNIAINLKLLSSQTHKEFDAQEREQQEKISLIDKPAISKRAEHESPITFDLKQFHTQIKHTDVKFQELDSGQPEEAYFKIQHPADTENIVFDLKQMYSHIGDPALEFQGQETREQQEIHYKEKIPSPETLQPDTHNISKSVQNNVFASQEISSSQELSNRTMVEKSSIDENSISLEKEVRHVQEQNLDILKTDLSLKSFSEEIYSESCALLPTSSADIEETDLSEKSCPLENGGRSSISHLKKAASEEKPLGVGEMEEECTLEPELAAFPKQDGGTQEYTDATLEDHRGDVQEADTLHRQLSLSQCFPLLMTEEQQNPGEQISTNIHASGEEKCYEEVQVQNEASFSTLEGEMIETSFSQNIPKLDEAHTTEAAESETSLTQYLLAAGKREVPETKDTRDQAKLVQSESITSMEVEEVTFNTVYEYYNQKQESLGRPLSPESDISIGVGSTTSEEISELDQFYTPPSSVEYFESPKSPDLYFNPSDITKQSSIHSGGETVERYSTPLGEVAERYSTPSEGEVGERYSTPPGETLERYSTPPGETLERYSTPPGETLERYSTPPGETLERYSTPPGETLERYSTPPGEALERYSIPTGGPNPTGTFKTYPSKIEREDGTPNEHFYTPTEERGSAYEIWRSDSFGTPNEAIEPKDNEMPPSFIEPLTKRKVYENTTLGFIVEVEGLPVPGVKWYRNKSLLEPDERIKMERVGNVCSLEISNIQKGEGGEYMCHAVNIIGEAKSFANVDIMPQEERVVALPPPVTHQHVMEFDLEHTTSSRTPSPQEIVLEVELSEKDVKEFEKQVKIVTVPEFTPDHKSMIVSLDVLPFNFVDPNMDSREGEDKELKIDLEVFEMPPRFIMPICDFKIPENSDAVFKCSVIGIPTPEVKWYKEYMCIEPDNIKYVISEEKGSHTLKIRNVCLSDSATYRCRAVNCVGEAICRGFLTMGDSEIFAVIAKKSKVTLSSLMEELVLKSNYTDSFFEFQVVEGPPRFIKGISDCYAPIGTAAYFQCLVRGSPRPTVYWYKDGKLVQGRRFTVEESGTGFHNLFITSLVKSDEGEYRCVATNKSGMAESFAALTLT

SEQ ID NO: 67172 - protein, 472 aa, Homo sapiens
MYIYEASEEAVLEEKVLVTQPQKTKPKLAKVPEPPKKVVPEDKIYVTIPKKRETPATKEPDTTRGIFPEVEPPEAIPEIPEHPPTEEFEVFKEVIPEGETPIVKRRKTPSPTAPEAMKEVVPEMKIFEDVPEEPETPRMKTPEAPQEIIPAKTVPSKKREPPSVKVPEALQEIVPEKKTLVVPLRKPEVLPDEVPEALREVVPEKKVHPPQRAEVVPVKVHEAPKEIIPEKKVSVVPPKKPEVPPVKVPEASKEVIREEKVPLAPPKEPEVPPVKVPEPPKEVVPEKKAPVAPPKEPEVPPVKVPEAPKEVVPEKKVPVPPPKKPEVPPTKVPEVPKAAVPEKKLPEAIPPKPESPPPEVPEVLPPKEVVPEKKVPVPPAKKPEAPPPKVPEAPKEVVLEKKASVAVPKKPEAPRAKVPEAAQEVVPEKKIPKAPIKKPEAPAVTVPEVPQEIVPEKKTLVLPKKPEVPPVT

SEQ ID NO: 67173 - protein, 373 aa, Homo sapiens [sequence omitted]

SEQ ID NO: 67174 - protein, 180 aa, Homo sapiens
KVPEVPKKPVLEEKPAVPVPERAESPPPEVYEEPEEIAPEEEIAPEEEKPVPVAEEEEPEVPPPAVPEEPKKIIPEKKVPVIKKPEAPPPKEPEPEKVIEKPKLKPRPPPPPPAPPKEDVKEKIFQLKAIPKKKVPEKPQVPEKVELTPLKVPGGEKKVRKLLPERKPEPKEEVVLKSGI

SEQ ID NO: 67175 - protein, 145 aa, Homo sapiens
EDTYQLEIAEAYPEDEGTYTFVASNAVGQVSSTANLSLEAPESILHERIEQEIEMEMKELFSEGESEHSERDTRDAFSDSEDIDHKSMAAKRYASRISSTSSWPEYFKPSFTQKLTFKYVLEGEPVVFTCRLIACPTPEMTWFHN

SEQ ID NO: 67176 - protein, 181 aa, Homo sapiens
MFFASHTEEEVSVTVPEVQKEIVTEEKIHVAISKRVEPPPKVPELPEKPAPEEVAPVPIPKKVEPPAPKVPEVPKKPVPEEKKPVPVPKKEPAAPPKVPEVPKKPVPEEKIPVPVAKKKEAPPAKVPEIPKKKVPEERKPVPRKEEEVPPPPKVPALPKKPVPEEKVAVPVPVAKKAPPPR

SEQ ID NO: 67177 - protein, 829 aa, Homo sapiens
VEEFIKLEQHRVEEEHRVEKVHRVIEVFEAEEVEVFEKPKAPPKGPEISEKIIPPKKPPTKVVPRKEPPAKVPEVPKKIVVEEKVRVPEEPRVPPTKAPEVPKKIVPEEKVREAVLKKPEVPPAKVPGMPKKSVQEEKSPIVISEDTEMYIYEASEEAVLEEKVLVTQPQKTKPKLAKVPEPPKKVVPEDKIYVTIPKKRETPATKEPDTTRGIFPEVEPPEAIPEIPEHPPTEEFEVFKEVIPEGETPIVKRRKTPSPTAPEAMKEVVPEMKIFEDVPEEPETPRMKTPEAPQEIIPAKTVPSKKREPPSVKVPEALQEIVPEKKTLVVPLRKPEVLPDEVPEALREVVPEKKVHPPQRAEVVPVKVHEAPKEIIPEKKVSVVPPKKPEVPPVKVPEASKEVIREEKVPLAPPKEPEVPPVKVPEPPKEVVPEKKAPVAPPKEPEVPPVKVPEAPKEVVPEKKVPVPPPKKPEVPPTKVPEVPKAAVPEKKLPEAIPPKPESPPPEVPEVLPPKEVVPEKKVPVPPAKKPEAPPPKVPEAPKEVVLEKKASVAVPKKPEAPRAKVPEAAQEVVPEKKIPKAPIKKPEAPAVTVPEVPQEIVPEKKTLVLPKKPEVPPVTVPEAPKEVVLEKKVPSAPPKKPEVPPVKVPEAPKEVVPEKKVPVPPPKKPEVPPTKVPEVPKAAVPEKKVPEAIPPKPESPPPEVPEVLPPKEVVPEKKVPVPPAKKPEAPPPKVPEAPKEVVLEKKASVAVPKKPEAPRAKVPEAAQEVVPEKKIPKAPIKKPEAPAVTVPEVPQEAAEKEIPVAPPKKPEAPIVPVPEAQEVVPEKK

SEQ ID NO: 67178 - protein, 167 aa, Homo sapiens
MATSELSCEVSEENCERREAFWAEWKDLTLSTRPEEGCSLHEEDTQRHETYHQQGQCQVLVQRSPWLMMRMGILGRGLQEYQLPYQRVLPLPIFTPAKMGATKEEREDTPIQLQELLALETALGGQCVDRQEVAEITKQLPPVVPVSKPGALRRSLSRSMSQEAQRG

SEQ ID NO: 67179 - protein, 247 aa, Homo sapiens
MAGGVLPLRGLRALCRVLLFLSQFCILSGGEQSQALAQSIKDPGPTRTFTVVPRAAESTEIPPYVMKCPSNGLCSRLPADCIDCTTNFSCTYGKPVTFDCAVKPSVTCVDQDFKSQKNFIINMTCRFCWQLPETDYECTNSTSCMTVSCPRQRYPANCTVRDHVHCLGNRTFPKMLYCNWTGGYKWSTALALSITLGGFGADRFYLGQWREGLGKLFSFGGLGIWTLIDVLLIGVGYVGPADGSLYI

SEQ ID NO: 67180 - protein, 221 aa, Homo sapiens
MAGGVLPLRGLRALCRVLLFLSQFCILSGGESTEIPPYVMKCPSNGLCSRLPADCIDCTTNFSCTYGKPVTFDCAVKPSVTCVDQDFKSQKNFIINMTCRFCWQLPETDYECTNSTSCMTVSCPRQRYPANCTVRDHVHCLGNRTFPKMLYCNWTGGYKWSTALALSITLGGFGADRFYLGQWREGLGKLFSFGGLGIWTLIDVLLIGVGYVGPADGSLYI

SEQ ID NO: 67181 - protein, 416 aa, Homo sapiens
MASSSGSSPRPAPDENEFPFGCPPTVCQDPKEPRALCCAGCLSENPRNGEDQICPKCRGEDLQSISPGSRLRTQEKAHPEVAEAGIGCPFAGVGCSFKGSPQSVQEHEVTSQTSHLNLLLGFMKQWKARLGCGLESGPMALEQNLSDLQLQAAVEVAGDLEVDCYRAPCSESQEELALQHFMKEKLLAELEGKLRVFENIVAVLNKEVEASHLALATSIHQSQLDRERILSLEQRVVELQQTLAQKDQALGKLEQSLRLMEEASFDGTFLWKITNVTRRCHESACGRTVSLFSPAFYTAKYGYKLCLRLYLNGDGTGKRTHLSLFIVIMRGEYDALLPWPFRNKVTFMLLDQNNREHAIDAFRPDLSSASFQRPQSETNVASGCPLFFPLSKLQSPKHAYVKDDTMFLKCIVETST

SEQ ID NO: 67182 - protein, 416 aa, Homo sapiens; identical to SEQ ID NO: 67181

SEQ ID NO: 67183 - protein, 294 aa, Homo sapiens
MKQWKARLGCGLESGPMALEQNLSDLQLQAAVEVAGDLEVDCYRAPCSESQEELALQHFMKEKLLAELEGKLRVFENIVAVLNKEVEASHLALATSIHQSQLDRERILSLEQRVVELQQTLAQKDQALGKLEQSLRLMEEASFDGTFLWKITNVTRRCHESACGRTVSLFSPAFYTAKYGYKLCLRLYLNGDGTGKRTHLSLFIVIMRGEYDALLPWPFRNKVTFMLLDQNNREHAIDAFRPDLSSASFQRPQSETNVASGCPLFFPLSKLQSPKHAYVKDDTMFLKCIVETST

SEQ ID NO: 67184 - protein, 691 aa, Homo sapiens
MNAAVVRRTQEALGKVIRRPPLTEKLLSKPPFRYLHDIITEVIRMTGFMKGLYTDAEMKSDNVKDKDAKISFLQKAIDVVVMVSGEPLLAKPARIVAGHEPERTNELLQIIGKCCLNKLSSDDAVRRVLAGEKGEVKGRASLTSRSQELDNKNVREEESRVHKNTEDRGDAEIKERSTSRDRKQKEELKEDRKPREKDKDKEKAKENGGNRHREGERERAKARARPDNERQKDRGNRERDRDSERKKETERKSEGGKEKERLRDRDRERDRDKGKDRDRRRVKNGEHSWDLDREKNREHDKPEKKSASSGEMSKKLSDGTFKDSKAETETEISTRASKSLTTKTSKRRSKNSVEGRKEDNISAKSLDSIVSGINNEPNQETTTSEIGTKEANINSTSISDDNSASLRCENIQPNPTEKQKGDSTSDAEGDAGPAGQDKSEVPETPEIPNELSSNIRRIPRPGSARPAPPRVKRQDSMEALQMDRSGSGKTVSNVITESHNSDNEEDDQFVVEAAPQLSEMSEIEMVTAVELEEEEKHGGLVKKILETKKDYEKLQQSPKPGEKERSLFESAWKKEKDIVSKEIEKLRTSIQTLCKSALPLGKIMDYIQEDVDAMQNELQMWHSENRQHAEALQQEQRITDCAVEPLKAELAELEQLIKDQQDKICAVKANILKNEEKIQKMVYSINLTSRR

SEQ ID NO: 67185 - protein, 625 aa, Homo sapiens
MNAAVVRRTQEALGKVIRRPPLTEKLLSKPPFRYLHDIITEVIRMTGFMKGLYTDAEMKSDNVKDKDAKISFLQKAIDVVVMVSGEPLLAKPARIVAGHEPERTNELLQIIGKCCLNKLSSDDAVRRVLAGEKGEVKGRASLTSRSQELDNKNVREEESRVHKNTEDRGDAEIKERSTSRDRKQKEELKEDRKPREKDKDKEKAKENGGNRHREGERERAKARARPDNERQKDRGNRERDRDSERKKETERKSEGGKEKERLRDRDRERDRDKGKDRDRRRVKNGEHSWDLDREKNREHDKPEKKSASSGEMSKKLSDGTFKDSKAETETEISTRASKSLTTKTSKRRSKNSVEGDSTSDAEGDAGPAGQDKSEVPETPEIPNELSSNIRRIPRPGSARPAPPRVKRQDSMEALQMDRSGSGKTVSNVITESHNSDNEEDDQFVVEAAPQLSEMSEIEMVTAVELEEEEKHGGLVKKILETKKDYEKLQQSPKPGEKERSLFESAWKKEKDIVSKEIEKLRTSIQTLCKSALPLGKIMDYIQEDVDAMQNELQMWHSENRQHAEALQQEQRITDCAVEPLKAELAELEQLIKDQQDKICAVKANILKNEEKIQKMVYSINLTSRR

SEQ ID NO: 67186 - protein, 691 aa, Homo sapiens
MNAAVVRRTQEALGKVIRRPPLTEKLLSKPPFRYLHDIITEVIRMTGFMKGLYTDAEMKSDNVKDKDAKISFLQKAIDVVVMVSGEPLLAKPARIVAGHEPERTNELLQIIGKCCLNKLSSDDAVRRVLAGEKGEVKGRASLTSRSQELDNKNVREEESRVHKNTEDRGDAEIKERSTSRDRKQKEELKEDRKPREKDKDKEKAKENGGNRHREGERERAKARARPDNERQKDRGNRERDRDSERKKETERKSEGGKEKERLRDRDRERDRDKGKDRDRRRVKNGEHSWDLDREKNREHDKPEKKSASSGEMSKKLSDGTFKDSKAETETEISTRASKSLTTKTSKRRSKNSVEGRKEDNISAKSLDSIVSGINNEPNQETTTSEIGTKEANINSTSISDDNSASLRCENIQPNPTEKQKGKNGSEREGDAGPAGQDKSEVPETPEIPNELSSNIRRIPRPGSARPAPPRVKRQDSMEALQMDRSGSGKTVSNVITESHNSDNEEDDQFVVEAAPQLSEMSEIEMVTAVELEEEEKHGGLVKKILETKKDYEKLQQSPKPGEKERSLFESAWKKEKDIVSKEIEKLRTSIQTLCKSALPLGKIMDYIQEDVDAMQNELQMWHSENRQHAEALQQEQRITDCAVEPLKAELAELEQLIKDQQDKICAVKANILKNEEKIQKMVYSINLTSRR

SEQ ID NO: 67187 - protein, 625 aa, Homo sapiens
MNAAVVRRTQEALGKVIRRPPLTEKLLSKPPFRYLHDIITEVIRMTGFMKGLYTDAEMKSDNVKDKDAKISFLQKAIDVVVMVSGEPLLAKPARIVAGHEPERTNELLQIIGKCCLNKLSSDDAVRRVLAGEKGEVKGRASLTSRSQELDNKNVREEESRVHKNTEDRGDAEIKERSTSRDRKQKEELKEDRKPREKDKDKEKAKENGGNRHREGERERAKARARPDNERQKDRGNRERDRDSERKKETERKSEGGKEKERLRDRDRERDRDKGKDRDRRRVKNGEHSWDLDREKNREHDKPEKKSASSGEMSKKLSDGTFKDSKAETETEISTRASKSLTTKTSKRRSKNSVEGTAKLILEGDAGPAGQDKSEVPETPEIPNELSSNIRRIPRPGSARPAPPRVKRQDSMEALQMDRSGSGKTVSNVITESHNSDNEEDDQFVVEAAPQLSEMSEIEMVTAVELEEEEKHGGLVKKILETKKDYEKLQQSPKPGEKERSLFESAWKKEKDIVSKEIEKLRTSIQTLCKSALPLGKIMDYIQEDVDAMQNELQMWHSENRQHAEALQQEQRITDCAVEPLKAELAELEQLIKDQQDKICAVKANILKNEEKIQKMVYSINLTSRR

SEQ ID NO: 67188 - protein, 557 aa, Homo sapiens
MAYSEEHKGMPCGFIRQNSGNSISLDFEPSIEYQFVERLEERYKCAFCHSVLHNPHQTGCGHRFCQHCILSLRELNTVPICPVDKEVIKSQEVFKDNCCKREVLNLYVYCSNAPGCNAKVILGRYQDHLQQCLFQPVQCSNEKCREPVLRKDLKEHLSASCQFRKEKCLYCKKDVVVINLQNHEENLCPEYPVFCPNNCAKIILKTEVDEHLAVCPEAEQDCPFKHYGCAVTDKRRNLQQHEHSALREHMRLVLEKNVQLEEQISDLHKSLEQKESKIQQLAETIKKLEKEFKQFAQLFGKNGSFLPNIQVFASHIDKSAWLEAQVHQLLQMVNQQQNKFDLRPLMEAVDTVKQKITLLENNDQRLAVLEEETNKHDTHINIHKAQLSKNEERFKLLEGTCYNGKLIWKVTDYKMKKREAVDGHTVSIFSQSFYTSRCGYRLCARAYLNGDGSGRGSHLSLYFVVMRGEFDSLLQWPFRQRVTLMLLDQSGKKNIMETFKPDPNSSSFKRPDGEMNIASGCPRFVAHSVLENAKNAYIKDDTLFLKVAVDLTDLEDL

SEQ ID NO: 67189 - protein, 557 aa, Homo sapiens; identical to SEQ ID NO: 67188

SEQ ID NO: 67190 - protein, 557 aa, Homo sapiens; identical to SEQ ID NO: 67188

SEQ ID NO: 67191 - protein, 451 aa, Homo sapiens
MAYSEEHKGMPCGFIRQNSGNSISLDFEPSIEYQFVERLEERYKCAFCHSVLHNPHQTGCGHRFCQHCILSLRELNTVPICPVDKEVIKSQEVFKDNCCKREVLNLYVYCSNAPGCNAKVILGRYQDKRRNLQQHEHSALREHMRLVLEKNVQLEEQISDLHKSLEQKESKIQQLAETIKKLEKEFKQFAQLFGKNGSFLPNIQVFASHIDKSAWLEAQVHQLLQMVNQQQNKFDLRPLMEAVDTVKQKITLLENNDQRLAVLEEETNKHDTHINIHKAQLSKNEERFKLLEGTCYNGKLIWKVTDYKMKKREAVDGHTVSIFSQSFYTSRCGYRLCARAYLNGDGSGRGSHLSLYFVVMRGEFDSLLQWPFRQRVTLMLLDQSGKKNIMETFKPDPNSSSFKRPDGEMNIASGCPRFVAHSVLENAKNAYIKDDTLFLKVAVDLTDLEDL

SEQ ID NO: 67192 - protein, 522 aa, Homo sapiens
MSLLNCENSCGSSQSESDCCVAMASSCSAVTKDDSVGGTASTGNLSSSFMEEIQGYDVEFDPPLESKYECPICLMALREAVQTPCGHRFCKACIIKSIRDAGHKCPVDNEILLENQLFPDNFAKREILSLMVKCPNEGCLHKMELRHLEDHQAHCEFALMDCPQCQRPFQKFHINIHILKDCPRRQVSCDNCAASMAFEDKEIHDQNCPLANVICEYCNTILIREQMPNHYDLDCPTAPIPCTFSTFGCHEKMQRNHLARHLQENTQSHMRMLAQAVHSLSVIPDSGYISEVRNFQETIHQLEGRLVRQDHQIRELTAKMETQSMYVSELKRTIRTLEDKVAEIEAQQCNGIYIWKIGNFGMHLKCQEEEKPVVIHSPGFYTGKPGYKLCMRLHLQLPTAQRCANYISLFVHTMQGEYDSHLPWPFQGTIRLTILDQSEAPVRQNHEEIMDAKPELLAFQRPTIPRNPKGFGYVTFMHLEALRQRTFIKDDTLLVRCEVSTRFDMGSLRREGFQPRSTDAGV

SEQ ID NO: 67193 - protein, 522 aa, Homo sapiens; identical to SEQ ID NO: 67192

SEQ ID NO: 67194 - protein, 670 aa, Homo sapiens
MSSGKSARYNRFSGGPSNLPTPDVTTGTRMETTFGPAFSAVTTITKADGTSTYKQHCRTPSSSSTLAYSPRDEEDSMPPISTPRRSDSAISVRSLHSESSMSLRSTFSLPEEEEEPEPLVFAEQPSVKLCCQLCCSVFKDPVITTCGHTFCRRCALKSEKCPVDNVKLTVVVNNIAVAEQIGELFIHCRHGCRVAGSGKPPIFEVDPRGCPFTIKLSARKDHEGSCDYRPVRCPNNPSCPPLLRMNLEAHLKECEHIKCPHSKYGCTFIGNQDTYETHLETCRFEGLKEFLQQTDDRFHEMHVALAQKDQEIAFLRSMLGKLSEKIDQLEKSLELKFDVLDENQSKLSEDLMEFRRDASMLNDELSHINARLNMGILGSYDPQQIFKCKGTFVGHQGPVWCLCVYSMGDLLFSGSSDKTIKVWDTCTTYKCQKTLEGHDGIVLALCIQGCKLYSGSADCTIIVWDIQNLQKVNTIRAHDNPVCTLVSSHNVLFSGSLKAIKVWDIVGTELKLKKELTGLNHWVRALVAAQSYLYSGSYQTIKIWDIRTLDCIHVLQTSGGSVYSIAVTNHHIVCGTYENLIHVWDIESKEQVRTLTGHVGTVYALAVISTPDQTKVFSASYDRSLRVWSMDNMICTQTLLRHQGSVTALAVSRGRLFSGAVDSTVKVWTC

SEQ ID NO: 67195 - protein, 704 aa, Homo sapiens
MARELRALLLWGRRLRPLLRAPALAAVPGGKPILCPRRTTAQLGPRRNPAWSLQAGRLFSTQTAEDKEEPLHSIISSTESVQGSTSKHEFQAETKKLLDIVARSLYSEKEVFIRELISNASDALEKLRHKLVSDGQALPEMEIHLQTNAEKGTITIQDTGIGMTQEELVSNLGTIARSGSKAFLDALQNQAEASSKIIGQFGVGFYSAFMVADRVEVYSRSAAPGSLGYQWLSDGSGVFEIAEASGVRTGTKIIIHLKSDCKEFSSEARVRDVVTKYSNFVSFPLYLNGRRMNTLQAIWMMDPKDVREWQHEEFYRYVAQAHDKPRYTLHYKTDAPLNIRSIFYVPDMKPSMFDVSRELGSSVALYSRKVLIQTKATDILPKWLRFIRGVVDSEDIPLNLSRELLQESALIRKLRDVLQQRLIKFFIDQSKKDAEKYAKFFEDYGLFMREGIVTATEQEVKEDIAKLLRYESSALPSGQLTSLSEYASRMRAGTRNIYYLCAPNRHLAEHSPYYEAMKKKDTEVLFCFEQFDELTLLHLREFDKKKLISVETDIVVDHYKEEKFEDRSPAAECLSEKETEELMAWMRNVLGSRVTNVKVTLRLDTHPAMVTVLEMGAARHFLRMQQLAKTQEERAQLLQPTLEINPRHALIKKLNQLRASEPGLAQLLVDQIYENAMIAAGLVDDPRAMVGRLNELLVKALERH

SEQ ID NO: 67196 - protein, 651 aa, Homo sapiens
MARELRALLLWGRRLRPLLRAPALAAVPGGSTSKHEFQAETKKLLDIVARSLYSEKEVFIRELISNASDALEKLRHKLVSDGQALPEMEIHLQTNAEKGTITIQDTGIGMTQEELVSNLGTIARSGSKAFLDALQNQAEASSKIIGQFGVGFYSAFMVADRVEVYSRSAAPGSLGYQWLSDGSGVFEIAEASGVRTGTKIIIHLKSDCKEFSSEARVRDVVTKYSNFVSFPLYLNGRRMNTLQAIWMMDPKDVREWQHEEFYRYVAQAHDKPRYTLHYKTDAPLNIRSIFYVPDMKPSMFDVSRELGSSVALYSRKVLIQTKATDILPKWLRFIRGVVDSEDIPLNLSRELLQESALIRKLRDVLQQRLIKFFIDQSKKDAEKYAKFFEDYGLFMREGIVTATEQEVKEDIAKLLRYESSALPSGQLTSLSEYASRMRAGTRNIYYLCAPNRHLAEHSPYYEAMKKKDTEVLFCFEQFDELTLLHLREFDKKKLISVETDIVVDHYKEEKFEDRSPAAECLSEKETEELMAWMRNVLGSRVTNVKVTLRLDTHPAMVTVLEMGAARHFLRMQQLAKTQEERAQLLQPTLEINPRHALIKKLNQLRASEPGLAQLLVDQIYENAMIAAGLVDDPRAMVGRLNELLVKALERH

SEQ ID NO: 67197 - protein, 636 aa, Homo sapiens
MEGRGPYRIYDPGGSVPSGEASAAFERLVKENSRLKEKMQGIKMLGELLEESQMEATRLRQKAEELVKDNELLPPPSPSLGSFDPLAELTGKDSNVTASPTAPACPSDKPAPVQKPPSSGTSSEFEVVTPEEQNSPESSSHANAMALGPLPREDGNLMLHLQRLETTLSVCAEEPDHGQLFTHLGRMALEFNRLASKVHKNEQRTSILQTLCEQLRKENEALKAKLDKGLEQRDQAAERLREENLELKKLLMSNGNKEGASGRPGSPKMEGTGKKAVAGQQQASVTAGKVPEVVALGAAEKKVKMLEQQRSELLEVNKQWDQHFRSMKQQYEQKITELRQKLADLQKQVTDLEAEREQKQRDFDRKLLLAKSKIEMEETDKEQLTAEAKELRQKVKYLQDQLSPLTRQREYQEKEIQRLNKALEEALSIQTPPSSPPTAFGSPEGAGALLRKQELVTQNELLKQQVKIFEEDFQRERSDRERMNEEKEELKKQVEKLQAQVTLSNAQLKAFKDEEKAREALRQQKRKAKASGERYHVEPHPEHLCGAYPYAYPPMPAMVPHHGFEDWSQIRYPPPPMAMEHPPPLPNSRLFHLPEYTWRLPCGGVRNPNQSSQVMDPPTARPTEPESPKNDREGPQ

SEQ ID NO: 67198 - protein, 636 aa, Homo sapiens; identical to SEQ ID NO: 67197

SEQ ID NO: 67199 - protein, 529 aa, Homo sapiens
MLGELLEESQMEATRLRQKAEELVKDNELLPPPSPSLGSFDPLAELTGKDSNVTASPTAPACPSDKPAPVQKPPSSGTSSEFEVVTPEEQNSPESSSHANAMALGPLPREDGNLMLHLQRLETTLSVCAEEPDHGQLFTHLGRMALEFNRLASKVHKNEQRTSILQTLCEQLRKENEALKAKLDKGLEQRDQAAERLREENLELKKLLMSNGNKEGASGRPGSPKMEGTGKKAVAGQQQASVTAGKVPEVVALGAAEKKVKMLEQQRSELLEVNKQWDQHFRSMKQQYEQKITELRQKLADLQKQVTDLEAEREQKQRDFDRKLLLAKSKIEMEETDKEQLTAEAKELRQKVKYLQDQLSPLTRQREYQEKEIQRLNKALEEALSIQTPPSSPPTAFGSPEGAGALLRKQELVTQNELLKQQVKIFEEDFQRERSDRERMNEEKEELKKQVEKLQAQVTLSNAQLKAFKDEEKAREALRQQKRKAKPEYTWRLPCGGVRNPNQSSQVMDPPTARPTEPESPKNDREGPQ

SEQ ID NO: 67200 - protein, 635 aa, Homo sapiens
MEGRGPYRIYDPGGSVPSGEASAAFERLVKENSRLKEKMQGIKMLGELLEESQMEATRLRQKAEELVKDNELLPPPSPSLGSFDPLAELTGKDSNVTASPTAPACPSDKPAPVQKPPSSGTSSEFEVVTPEEQNSPESSSHANAMALGPLPREDGNLMLHLQRLETTLSVCAEEPDHGQLFTHLGRMALEFNRLASKVHKNEQRTSILQTLCEQLRKENEALKAKLDKGLEQRDQAAERLREENLELKKLLMSNGNKEGASGRPGSPKMEGTGKKAVAGQQQASVTAGKVPEVVALGAAEKKVKMLEQQRSELLEVNKQWDQHFRSMKQQYEQKITELRQKLADLQKQVTDLEAEREQKQRDFDRKLLLAKSKIEMEETDKEQLTAEAKELRQKVKYLQDQLSPLTRQREYQEKEIQRLNKALEEALSIQTPPSSPPTAFGSPEGAGALLRKQELVTQNELLKQQVKIFEEDFQRERSDRERMNEEKEELKKQVEKLQAQVTLSNAQLKAFKDEEKAREALRQQKRKAKASGERYHVEPHPEHLCGAYPYAYPPMPAMVPHHGFEDWSQIRYPPPPMAMEHPPPLPNSRLFHLPEYTWRLPCGGVRNPNQSSQVMDPPTARPTEPEPADLRLPRN

SEQ ID NO: 67201 - protein, 492 aa, Homo sapiens
MEATRLRQKAEELVKDNELLPPPSPSLGSFDPLAELTGKDSNVTASPTAPACPSDKPAPVQKPPSSGTSSEFEVVTPEEQNSPESSSHANAMALGPLPREDGNLMLHLQRLETTLSVCAEEPDHGQLFTHLGRMALEFNRLASKVHKNEQRTSILQTLCEQLRKENEALKAKLDKGLEQRDQAAERLREENLELKKLLMSNGNKEGASGRPGSPKMEGTGKKAVAGQQQASVTAGKVPEVVALGAAEKKVKMLEQQRSELLEVNKQWDQHFRSMKQQYEQKITELRQKLADLQKQVTDLEAEREQKQRDFDRKLLLAKSKIEMEETDKEQLTAEAKELRQKVKYLQDQLSPLTRQREYQEKEIQRLNKALEEALSIQTPPSSPPTAFGSPEGAGALLRKQELVTQNELLKQQVKIFEEDFQRERSDRERMNEEKEELKKQVEKLQAQVTLSNAQLKAFKDEEKAREALRQQKRKAKGTHRGCPRHLPERKVK

SEQ ID NO: 67202 - protein, 144 aa, Homo sapiens [sequence omitted]

SEQ ID NO: 67203 - protein, 583 aa, Homo sapiens
MEATRLRQKAEELVKDNELLPPPSPSLGSFDPLAELTGKDSNVTASPTAPACPSDKPAPVQKPPSSGTSSEFEVVTPEEQNSPESSSHANAMALGPLPREDGNLMLHLQRLETTLSVCAEEPDHGQLFTHLGRMALEFNRLASKVHKNEQRTSILQTLCEQLRKENEALKAKLDKGLEQRDQAAERLREENLELKKLLMSNGNKEGASGRPGSPKMEGTGKKAVAGQQQASVTAGKVPEVVALGAAEKKVKMLEQQRSELLEVNKQWDQHFRSMKQQYEQKITELRQKLADLQKQVTDLEAEREQKQRDFDRKLLLAKSKIEMEETDKEQLTAEAKELRQKVKYLQDQLSPLTRQREYQEKEIQRLNKALEEALSIQTPPSSPPTAFGSPEGAGALLRKQELVTQNELLKQQVKIFEEDFQRERSDRERMNEEKEELKKQVEKLQAQVTLSNAQLKAFKDEEKAREALRQQKRKAKASGERYHVEPHPEHLCGAYPYAYPPMPAMVPHHGFEDWSQIRYPPPPMAMEHPPPLPNSRLFHLPEYTWRLPCGGVRNPNQSSQVMDPPTARPTEPESPKNDREGPQ

SEQ ID NO: 67204 - protein, 133 aa, Homo sapiens
MEGRGPYRIYDPGGSVPSGEASAAFERLVKENSRLKEKMQGIKMLGELLEESQMEATRLRQKAEELVKDNELLPPPSPSLGSFDPLAELTGKDSNVTASPTAPACPSDKPAPVQKPPSSGTSSEFEVVTPEEQ

SEQ ID NO: 67205 - protein, 636 aa, Homo sapiens; identical to SEQ ID NO: 67197

SEQ ID NO: 67206 - protein, 257 aa, Homo sapiens
MEATRLRQKAEELVKDNELLPPPSPSLGSFDPLAELTGKDSNVTASPTAPACPSDKPAPVQKPPSSGTSSEFEVVTPEEQNSPESSSHANAMALGPLPREDGNLMLHLQRLETTLSVCAEEPDHGQLFTHLGRMALEFNRLASKVHKNEQRTSILQTLCEQLRKENEALKAKLDKGLEQRDQAAERLREENLELKKLLMSNGNKEGASGRPGSPKMEGTGKKAVAGQQQASVTAGKVPEVVALGAAEKKVKMLEQQR

SEQ ID NO: 67207 - protein, 636 aa, Homo sapiens; identical to SEQ ID NO: 67197

SEQ ID NO: 67208 - protein, 572 aa, Homo sapiens
MEGRGPYRIYDPGGSVPSGEASAAFERLVKENSRLKEKMQGIKMLGELLEESQMEATRLRQKAEELVKDNELLPPPSPSLGSFDPLAELTGKDSNVTASPTAPACPSDKPAPVQKPPSSGTSSEFEVVTPEEQNSPESSSHANAMALGPLPREDGNLMLHLQRLETTLSVCAEEPDHGQLFTHLGRMALEFNRLASKVHKNEQRTSILQTLCEQLRKENEALKAKLDKGLEQRDQAAERLREENLELKKLLMSNGNKEGASGRPGSPKMEGTGKKAVAGQQQASVTAGKVPEVVALGAAEKKVKMLEQQRSELLEVNKQWDQHFRSMKQQYEQKITELRQKLADLQKQVTDLEAEREQKQRDFDRKLLLAKSKIEMEETDKEQLTAEAKELRQKVKYLQDQLSPLTRQREYQEKEIQRLNKALEEALSIQTPPSSPPTAFGSPEGAGALLRKQELVTQNELLKQQVKIFEEDFQRERSDRERMNEEKEELKKQVEKLQAQVTLSNAQLKAFKDEEKAREALRQQKRKAKPEYTWRLPCGGVRNPNQSSQVMDPPTARPTEPESPKNDREGPQ

SEQ ID NO: 67209 - protein, 635 aa, Homo sapiens; identical to SEQ ID NO: 67200

SEQ ID NO: 67210 - protein, 556 aa, Homo sapiens
MEGRGPYRIYDPGGSVPSGEASAAFERLVKENSRLKEKMQGIKMLGELLEESQMEATRLRQKAEELVKDNELLPPPSPSLGSFDPLAELTGKDSNVTASPTAPACPSDKPAPVQKPPSSGTSSEFEVVTPEEQNSPESSSHANAMALGPLPREDGNLMLHLQRLETTLSVCAEEPDHGQLFTHLGRMALEFNRLASKVHKNEQRTSILQTLCEQLRKENEALKAKLDKGLEQRDQAAERLREENLELKKLLMSNGNKEGASGRPGSPKMEGTGKKAVAGQQQASVTAGKVPEVVALGAAEKKVKMLEQQRSELLEVNKQWDQHFRSMKQQYEQKITELRQKLADLQKQVTDLEAEREQKQRDFDRKLLLAKSKIEMEETDKEQLTAEAKELRQKVKYLQDQLSPLTRQREYQEKEIQRLNKALEEALSIQTPPSSPPTAFGSPEGAGALLRKQELVTQNELLKQQVKIFEEDFQRERSDRERMNEEKEELKKQVEKLQAQVTLSNAQLKAFKDEEKAREALRQQKRKAKSLQKMTVRGLSETRLCHLAPPSSCRAS

SEQ ID NO: 67211 - protein, 598 aa, Homo sapiens
MQGIKMLGELLEESQMEATRLRQKAEELVKDNELLPPPSPSLGSFDPLAELTGKDSNVTASPTAPACPSDKPAPVQKPPSSGTSSEFEVVTPEEQNSPESSSHANAMALGPLPREDGNLMLHLQRLETTLSVCAEEPDHGQLFTHLGRMALEFNRLASKVHKNEQRTSILQTLCEQLRKENEALKAKLDKGLEQRDQAAERLREENLELKKLLMSNGNKEGASGRPGSPKMEGTGKKAVAGQQQASVTAGKVPEVVALGAAEKKVKMLEQQRSELLEVNKQWDQHFRSMKQQYEQKITELRQKLADLQKQVTDLEAEREQKQRDFDRKLLLAKSKIEMEETDKEQLTAEAKELRQKVKYLQDQLSPLTRQREYQEKEIQRLNKALEEALSIQTPPSSPPTAFGSPEGAGALLRKQELVTQNELLKQQVKIFEEDFQRERSDRERMNEEKEELKKQVEKLQAQVTLSNAQLKAFKDEEKAREALRQQKRKAKASGERYHVEPHPEHLCGAYPYAYPPMPAMVPHHGFEDWSQIRYPPPPMAMEHPPPLPNSRLFHLPEYTWRLPCGGVRNPNQSSQVMDPPTARPTEPESPKNDREGPQ

SEQ ID NO: 67212 - protein, 513 aa, Homo sapiens
MLGELLEESQMEATRLRQKAEELVKDNELLPPPSPSLGSFDPLAELTGKDSNVTASPTAPACPSDKPAPVQKPPSSGTSSEFEVVTPEEQNSPESSSHANAMALGPLPREDGNLMLHLQRLETTLSVCAEEPDHGQLFTHLGRMALEFNRLASKVHKNEQRTSILQTLCEQLRKENEALKAKLDKGLEQRDQAAERLREENLELKKLLMSNGNKEGASGRPGSPKMEGTGKKAVAGQQQASVTAGKVPEVVALGAAEKKVKMLEQQRSELLEVNKQWDQHFRSMKQQYEQKITELRQKLADLQKQVTDLEAEREQKQRDFDRKLLLAKSKIEMEETDKEQLTAEAKELRQKVKYLQDQLSPLTRQREYQEKEIQRLNKALEEALSIQTPPSSPPTAFGSPEGAGALLRKQELVTQNELLKQQVKIFEEDFQRERSDRERMNEEKEELKKQVEKLQAQVTLSNAQLKAFKDEEKAREALRQQKRKAKSLQKMTVRGLSETRLCHLAPPSSCRAS

SEQ ID NO: 67213 - protein, 502 aa, Homo sapiens
MLGELLEESQMEATRLRQKAEELVKDNELLPPPSPSLGSFDPLAELTGKDSNVTASPTAPACPSDKPAPVQKPPSSGTSSEFEVVTPEEQNSPESSSHANAMALGPLPREDGNLMLHLQRLETTLSVCAEEPDHGQLFTHLGRMALEFNRLASKVHKNEQRTSILQTLCEQLRKENEALKAKLDKGLEQRDQAAERLREENLELKKLLMSNGNKEGASGRPGSPKMEGTGKKAVAGQQQASVTAGKVPEVVALGAAEKKVKMLEQQRSELLEVNKQWDQHFRSMKQQYEQKITELRQKLADLQKQVTDLEAEREQKQRDFDRKLLLAKSKIEMEETDKEQLTAEAKELRQKVKYLQDQLSPLTRQREYQEKEIQRLNKALEEALSIQTPPSSPPTAFGSPEGAGALLRKQELVTQNELLKQQVKIFEEDFQRERSDRERMNEEKEELKKQVEKLQAQVTLSNAQLKAFKDEEKAREALRQQKRKAKGTHRGCPRHLPERKVK

SEQ ID NO: 67214 - protein, 429 aa, Homo sapiens
MSRDPGSGGWEEAPRAAAALCTLYHEAGQRLRRLQDQLAARDALIARLRARLAALEGDAAPSLVDALLEQVARFREQLRRQEGGAAEAQMRQEIERLTERLEEKEREMQQLLSQPQHEREKEVVLLRRSMAEGERARAASDVLCRSLANETHQLRRTLTATAHMCQHLAKCLDERQHAQRNVGERSPDQSEHTDGHTSVQSVIEKLQEENRLLKQKVTHVEDLNAKWQRYNASRDEYVRGLHAQLRGLQIPHEPELMRKEISRLNRQLEEKINDCAEVKQELAASRTARDAALERVQMLEQQILAYKDDFMSERADRERAQSRIQELEEKVASLLHQVSWRQDSREPDAGRIHAGSKTAKYLAADALELMVPGGWRPGTGSQQPEPPAEGGHPGAAQRGQGDLQCPHCLQCFSDEQGEELLRHVAECCQ

SEQ ID NO: 67215 - protein, 322 aa, Homo sapiens
MQQLLSQPQHEREKEVVLLRRSMAEGERARAASDVLCRSLANETHQLRRTLTATAHMCQHLAKCLDERQHAQRNVGERSPDQSEHTDGHTSVQSVIEKLQEENRLLKQKVTHVEDLNAKWQRYNASRDEYVRGLHAQLRGLQIPHEPELMRKEISRLNRQLEEKINDCAEVKQELAASRTARDAALERVQMLEQQILAYKDDFMSERADRERAQSRIQELEEKVASLLHQVSWRQDSREPDAGRIHAGSKTAKYLAADALELMVPGGWRPGTGSQQPEPPAEGGHPGAAQRGQGDLQCPHCLQCFSDEQGEELLRHVAECCQ

SEQ ID NO: 67216 - protein, 278 aa, Homo sapiens
MAEARSQPSAGPQLNALPDHSPLLQPGLAALRRRAREAGVPLAPLPLTDSFLLRFLRARDFDLDLAWRLLKNYYKWRAECPEISADLHPRSIIGLLKAGYHGVLRSRDPTGSKVLIYRIAHWDPKVFTAYDVFRVSLITSELIVQEVETQRNGIKAIFDLEGWQFSHAFQITPSVAKKIAAVLTDSFPLKVRGIHLINEPVIFHAVFSMIKPFLTEKIKERIHMHGNNYKQSLLQHFPDILPLEYGGEEFSMEDICQEWTNFIMKSEDYLSSISESIQ

SEQ ID NO: 67217 - protein, 786 aa, Homo sapiens
MTSIFHFAIIFMLILQIRIQLSEESEFLVDRSKNGLIHVPKDLSQKTTILNISQNYISELWTSDILSLSKLRILIISHNRIQYLDISVFKFNQELEYLDLSHNKLVKISCHPTVNLKHLDLSFNAFDALPICKEFGNMSQLKFLGLSTTHLEKSSVLPIAHLNISKVLLVLGETYGEKEDPEGLQDFNTESLHIVFPTNKEFHFILDVSVKTVANLELSNIKCVLEDNKCSYFLSILAKLQTNPKLSNLTLNNIETTWNSFIRILQLVWHTTVWYFSISNVKLQGQLDFRDFDYSGTSLKALSIHQVVSDVFGFPQSYIYEIFSNMNIKNFTVSGTRMVHMLCPSKISPFLHLDFSNNLLTDTVFENCGHLTELETLILQMNQLKELSKIAEMTTQMKSLQQLDISQNSVSYDEKKGDCSWTKSLLSLNMSSNILTDTIFRCLPPRIKVLDLHSNKIKSIPKQVVKLEALQELNVAFNSLTDLPGCGSFSSLSVLIIDHNSVSHPSADFFQSCQKMRSIKAGDNPFQCTCELGEFVKNIDQVSSEVLEGWPDSYKCDYPESYRGTLLKDFHMSELSCNITLLIVTIVATMLVLAVTVTSLCSYLDLPWYLRMVCQWTQTRRRARNIPLEELQRNLQFHAFISYSGHDSFWVKNELLPNLEKEGMQICLHERNFVPGKSIVENIITCIEKSYKSIFVLSPNFVQSEWCHYELYFAHHNLFHEGSNSLILILLEPIPQYSIPSSYHKLKSLMARRTYLEWPKEKSKRGLFWANLRAAINIKLTEQAKK

SEQ ID NO: 67218 - protein, 786 aa, Homo sapiens; identical to SEQ ID NO: 67217

SEQ ID NO: 67219 - protein, 161 aa, Homo sapiens
MTSIFHFAIIFMLILQIRIQLSEESEFLVDRSKNGLIHVPKDLSQKTTILNISQNYISELWTSDILSLSKLRILIISHNRIQYLDISVFKFNQELEYLDLSHNKLVKISCHPTVNLKHLDLSFNAFDALPICKEFGNMSQLKFLGLSTTHLEKSSVLPIAH

SEQ ID NO: 67220 - protein, 48 aa, Homo sapiens
MTSIFHFAIIFMLILQIRIQLSEESEFLVDRSKNGLIHVPKDLSQKTT

SEQ ID NO: 67221 - protein, 23 aa, Homo sapiens
MTSIFHFAIIFMLILQIRIQLSE

SEQ ID NO: 67222 - protein, 90 aa, Homo sapiens
MTSIFHFAIIFMLILQIRIQLSEESEFLVDRSKNGLIHVPKDLSQKTTILNISQNYISELWTSDILSLSKLRILIISHNRIQYLDISVFK

SEQ ID NO: 67223 - protein, 784 aa, Homo sapiens
MPHTLWMVWVLGVIISLSKEESSNQASLSCDRNGICKGSSGSLNSIPSGLTEAVKSLDLSNNRITYISNSDLQRCVNLQALVLTSNGINTIEEDSFSSLGSLEHLDLSYNYLSNLSSSWFKPLSSLTFLNLLGNPYKTLGETSLFSHLTKLQILRVGNMDTFTKIQRKDFAGLTFLEELEIDASDLQSYEPKSLKSIQNVSHLILHMKQHILLLEIFVDVTSSVECLELRDTDLDTFHFSELSTGETNSLIKKFTFRNVKITDESLFQVMKLLNQISGLLELEFDDCTLNGVGNFRASDNDRVIDPGKVETLTIRRLHIPRFYLFYDLSTLYSLTERVKRITVENSKVFLVPCLLSQHLKSLEYLDLSENLMVEEYLKNSACEDAWPSLQTLILRQNHLASLEKTGETLLTLKNLTNIDISKNSFHSMPETCQWPEKMKYLNLSSTRIHSVTGCIPKTLEILDVSNNNLNLFSLNLPQLKELYISRNKLMTLPDASLLPMLLVLKISRNAITTFSKEQLDSFHTLKTLEAGGNNFICSCEFLSFTQEQQALAKVLIDWPANYLCDSPSHVRGQQVQDVRLSVSECHRTALVSGMCCALFLLILLTGVLCHRFHGLWYMKMMWAWLQAKRKPRKAPSRNICYDAFVSYSERDAYWVENLMVQELENFNPPFKLCLHKRDFIPGKWIIDNIIDSIEKSHKTVFVLSENFVKSEWCKYELDFSHFRLFDENNDAAILILLEPIEKKAIPQRFCKLRKIMNTKTYLEWPMDEAQREGFWVNLRAAIKS

SEQ ID NO: 67224 - protein, 904 aa, Homo sapiens
MRQTLPCIYFWGGLLPFGMLCASSTTKCTVSHEVADCSHLKLTQVPDDLPTNITVLNLTHNQLRRLPAANFTRYSQLTSLDVGFNTISKLEPELCQKLPMLKVLNLQHNELSQLSDKTFAFCTNLTELHLMSNSIQKIKNNPFVKQKNLITLDLSHNGLSSTKLGTQVQLENLQELLLSNNKIQALKSEELDIFANSSLKKLELSSNQIKEFSPGCFHAIGRLFGLFLNNVQLGPSLTEKLCLELANTSIRNLSLSNSQLSTTSNTTFLGLKWTNLTMLDLSYNNLNVVGNDSFAWLPQLEYFFLEYNNIQHLFSHSLHGLFNVRYLNLKRSFTKQSISLASLPKIDDFSFQWLKCLEHLNMEDNDIPGIKSNMFTGLINLKYLSLSNSFTSLRTLTNETFVSLAHSPLHILNLTKNKISKIESDAFSWLGHLEVLDLGLNEIGQELTGQEWRGLENIFEIYLSYNKYLQLTRNSFALVPSLQRLMLRRVALKNVDSSPSPFQPLRNLTILDLSNNNIANINDDMLEGLEKLEILDLQHNNLARLWKHANPGGPIYFLKGLSHLHILNLESNGFDEIPVEVFKDLFELKIIDLGLNNLNTLPASVFNNQVSLKSLNLQKNLITSVEKKVFGPAFRNLTELDMRFNPFDCTCESIAWFVNWINETHTNIPELSSHYLCNTPPHYHGFPVRLFDTSSCKDSAPFELFFMINTSILLIFIFIVLLIHFEGWRISFYWNVSVHRVLGFKEIDRQTEQFEYAAYIIHAYKDKDWVWEHFSSMEKEDQSLKFCLEERDFEAGVFELEAIVNSIKRSRKIIFVITHHLLKDPLCKRFKVHHAVQQAIEQNLDSIILVFLEEIPDYKLNHALCLRRGMFKSHCILNWPVQKERIGAFRHKLQVALGSKNSVH

SEQ ID NO: 67225 - protein, 627 aa, Homo sapiens
MLDLSYNNLNVVGNDSFAWLPQLEYFFLEYNNIQHLFSHSLHGLFNVRYLNLKRSFTKQSISLASLPKIDDFSFQWLKCLEHLNMEDNDIPGIKSNMFTGLINLKYLSLSNSFTSLRTLTNETFVSLAHSPLHILNLTKNKISKIESDAFSWLGHLEVLDLGLNEIGQELTGQEWRGLENIFEIYLSYNKYLQLTRNSFALVPSLQRLMLRRVALKNVDSSPSPFQPLRNLTILDLSNNNIANINDDMLEGLEKLEILDLQHNNLARLWKHANPGGPIYFLKGLSHLHILNLESNGFDEIPVEVFKDLFELKIIDLGLNNLNTLPASVFNNQVSLKSLNLQKNLITSVEKKVFGPAFRNLTELDMRFNPFDCTCESIAWFVNWINETHTNIPELSSHYLCNTPPHYHGFPVRLFDTSSCKDSAPFELFFMINTSILLIFIFIVLLIHFEGWRISFYWNVSVHRVLGFKEIDRQTEQFEYAAYIIHAYKDKDWVWEHFSSMEKEDQSLKFCLEERDFEAGVFELEAIVNSIKRSRKIIFVITHHLLKDPLCKRFKVHHAVQQAIEQNLDSIILVFLEEIPDYKLNHALCLRRGMFKSHCILNWPVQKERIGAFRHKLQVALGSKNSVH

SEQ ID NO: 67226 - protein, 870 aa, Homo sapiens
MRQTLPCIYFWGGLLPFGMLCASSTTKCTVSHEVADCSHLKLTQVPDDLPTNITVLNLTHNQLRRLPAANFTRYSQLTSLDVGFNTISKLEPELCQKLPMLKVLNLQHNELSQLSDKTFAFCTNLTELHLMSNSIQKIKNNPFVKQKNLITLDLSHNGLSSTKLGTQVQLENLQELLLSNNKIQALKSEELDIFANSSLKKLELSSNQIKEFSPGCFHAIGRLFGLFLNNVQLGPSLTEKLCLELANTSIRNLSLSNSQLSTTSNTTFLGLKWTNLTMLDLSYNNLNVVGNDSFAWLPQLEYFFLEYNNIQHLFSHSLHGLFNVRYLNLKRSFTKQSISLASLPKIDDFSFQWLKCLEHLNMEDNDIPGIKSNMFTGLINLKYLSLSNSFTSLRTLTNETFVSLAHSPLHILNLTKNKISKIESDAFSWLGHLEVLDLGLNEIGQELTGQEWRGLENIFEIYLSYNKYLQLTRNSFALVPSLQRLMLRRVALKNVDSSPSPFQPLRNLTILDLSNNNIANINDDMLEGLEKLEILDLQHNNLARLWKHANPGGPIYFLKGLSHLHILNLESNGFDEIPVEVFKDLFELKIIDLGLNNLNTLPASVFNNQVSLKSLNLQKNLITSVEKKVFGPAFRNLTELDMRFNPFDCTCESIAWFVNWINETHTNIPELSSHYLCNTPPHYHGFPVRLFDTSSCKDSAPFELFFMINTSILLIFIFIVLLIHFEGWRISFYWNVSVHRVLGFKEIDRQTEQFEYAAYIIHAYKDKDWVWEHFSSMEKEDQSLKFCLEERDFEAGVFELEAIVNSIKRSRKIIFVITHHLLKDPLCKRFKVHHAVQQAIEQNLDSIILVFLEEIPDYKLNHALCLRRAK

SEQ ID NO: 67227 - protein, 796 aa, Homo sapiens
MTKDKEPIVKSFHFVCLMIIIVGTRIQFSDGNEFAVDKSKRGLIHVPKDLPLKTKVLDMSQNYIAELQVSDMSFLSELTVLRLSHNRIQLLDLSVFKFNQDLEYLDLSHNQLQKISCHPIVSFRHLDLSFNDFKALPICKEFGNLSQLNFLGLSAMKLQKLDLLPIAHLHLSYILLDLRNYYIKENETESLQILNAKTLHLVFHPTSLFAIQVNISVNTLGCLQLTNIKLNDDNCQVFIKFLSELTRGSTLLNFTLNHIETTWKCLVRVFQFLWPKPVEYLNIYNLTIIESIREEDFTYSKTTLKALTIEHITNQVFLFSQTALYTVFSEMNIMMLTISDTPFIHMLCPHAPSTFKFLNFTQNVFTDSIFEKCSTLVKLETLILQKNGLKDLFKVGLMTKDMPSLEILDVSWNSLESGRHKENCTWVESIVVLNLSSNMLTDSVFRCLPPRIKVLDLHSNKIKSVPKQVVKLEALQELNVAFNSLTDLPGCGSFSSLSVLIIDHNSVSHPSADFFQSCQKMRSIKAGDNPFQCTCELREFVKNIDQVSSEVLEGWPDSYKCDYPESYRGSPLKDFHMSELSCNITLLIVTIGATMLVLAVTVTSLCIYLDLPWYLRMVCQWTQTRRRARNIPLEELQRNLQFHAFISYSEHDSAWVKSELVPYLEKEDIQICLHERNFVPGKSIVENIINCIEKSYKSIFVLSPNFVQSEWCHYELYFAHHNLFHEGSNNLILILLEPIPQNSIPNKYHKLKALMTQRTYLQWPKEKSKRGLFWANIRAAFNMKLTLVTENNDVKS

SEQ ID NO: 67228 - protein, 796 aa, Homo sapiens; identical to SEQ ID NO: 67227

SEQ ID NO: 67229 - protein, 150 aa, Homo sapiens
MTKDKEPIVKSFHFVCLMIIIVGTRIQFSDGNEFAVDKSKRGLIHVPKDLPLKTKVLDMSQNYIAELQVSDMSFLSELTVLRLSHNRIQLLDLSVFKFNQDLEYLDLSHNQLQKISCHPIVSFRHLDLSFNDFKALPICKEFGNLSQLNF

SEQ ID NO: 67230 - protein, 480 aa, Homo sapiens
MTKDKEPIVKSFHFVCLMIIIVGTRIQFSDGNEFAVDKSKRGLIHVPKDLPLKTKVLDMSQNYIAELQVSDMSFLSELTVLRLSHNRIQLLDLSVFKFNQDLEYLDLSHNQLQKISCHPIVSFRHLDLSFNDFKALPICKEFGNLSQLNFLGLSAMKLQKLDLLPIAHLHLSYILLDLRNYYIKENETESLQILNAKTLHLVFHPTSLFAIQVNISVNTLGCLQLTNIKLNDDNCQVFIKFLSELTRGSTLLNFTLNHIETTWKCLVRVFQFLWPKPVEYLNIYNLTIIESIREEDFTYSKTTLKALTIEHITNQVFLFSQTALYTVFSEMNIMMLTISDTPFIHMLCPHAPSTFKFLNFTQNVFTDSIFEKCSTLVKLETLIFVLSPNFVQSEWCHYELYFAHHNLFHEGSNNLILILLEPIPQNSIPNKYHKLKALMTQRTYLQWPKEKSKRGLFWANIRAAFNMKLTLVTENNDVKS

SEQ ID NO: 67231 - protein, 91 aa, Homo sapiens
MTKDKEPIVKSFHFVCLMIIIVGTRIQFSDGNEFAVDKSKRGLIHVPKDLPLKTKVLDMSQNYIAELQVSDMSFLSELTVLRLSHNRIQLL

SEQ ID NO: 67232 - protein, 1049 aa, Homo sapiens
MVFPMWTLKRQILILFNIILISKLLGARWFPKTLPCDVTLDVPKNHVIVDCTDKHLTEIPGGIPTNTTNLTLTINHIPDISPASFHRLDHLVEIDFRCNCVPIPLGSKNNMCIKRLQIKPRSFSGLTYLKSLYLDGNQLLEIPQGLPPSLQLLSLEANNIFSIRKENLTELANIEILYLGQNCYYRNPCYVSYSIEKDAFLNLTKLKVLSLKDNNVTAVPTVLPSTLTELYLYNNMIAKIQEDDFNNLNQLQILDLSGNCPRCYNAPFPCAPCKNNSPLQIPVNAFDALTELKVLRLHSNSLQHVPPRWFKNINKLQELDLSQNFLAKEIGDAKFLHFLPSLIQLDLSFNFELQVYRASMNLSQAFSSLKSLKILRIRGYVFKELKSFNLSPLHNLQNLEVLDLGTNFIKIANLSMFKQFKRLKVIDLSVNKISPSGDSSEVGFCSNARTSVESYEPQVLEQLHYFRYDKYARSCRFKNKEASFMSVNESCYKYGQTLDLSKNSIFFVKSSDFQHLSFLKCLNLSGNLISQTLNGSEFQPLAELRYLDFSNNRLDLLHSTAFEELHKLEVLDISSNSHYFQSEGITHMLNFTKNLKVLQKLMMNDNDISSSTSRTMESESLRTLEFRGNHLDVLWREGDNRYLQLFKNLLKLEELDISKNSLSFLPSGVFDGMPPNLKNLSLAKNGLKSFSWKKLQCLKNLETLDLSHNQLTTVPERLSNCSRSLKNLILKNNQIRSLTKYFLQDAFQLRYLDLSSNKIQMIQKTSFPENVLNNLKMLLLHHNRFLCTCDAVWFVWWVNHTEVTIPYLATDVTCVGPGAHKGQSVISLDLYTCELDLTNLILFSLSISVSLFLMVMMTASHLYFWDVWYIYHFCKAKIKGYQRLISPDCCYDAFIVYDTKDPAVTEWVLAELVAKLEDPREKHFNLCLEERDWLPGQPVLENLSQSIQLSKKTVFVMTDKYAKTENFKIAFYLSHQRLMDEKVDVIILIFLEKPFQKSKFLQLRKRLCGSSVLEWPTNPQAHPYFWQCLKNALATDNHVAYSQVFKETV

SEQ ID NO: 67233 - protein, 1041 aa, Homo sapiens
MENMFLQSSMLTCIFLLISGSCELCAEENFSRSYPCDEKKQNDSVIAECSNRRLQEVPQTVGKYVTELDLSDNFITHITNESFQGLQNLTKINLNHNPNVQHQNGNPGIQSNGLNITDGAFLNLKNLRELLLEDNQLPQIPSGLPESLTELSLIQNNIYNITKEGISRLINLKNLYLAWNCYFNKVCEKTNIEDGVFETLTNLELLSLSFNSLSHVPPKLPSSLRKLFLSNTQIKYISEEDFKGLINLTLLDLSGNCPRCFNAPFPCVPCDGGASINIDRFAFQNLTQLRYLNLSSTSLRKINAAWFKNMPHLKVLDLEFNYLVGEIASGAFLTMLPRLEILDLSFNYIKGSYPQHINISRNFSKLLSLRALHLRGYVFQELREDDFQPLMQLPNLSTINLGINFIKQIDFKLFQNFSNLEIIYLSENRISPLVKDTRQSYANSSSFQRHIRKRRSTDFEFDPHSNFYHFTRPLIKPQCAAYGKALDLSLNSIFFIGPNQFENLPDIACLNLSANSNAQVLSGTEFSAIPHVKYLDLTNNRLDFDNASALTELSDLEVLDLSYNSHYFRIAGVTHHLEFIQNFTNLKVLNLSHNNIYTLTDKYNLESKSLVELVFSGNRLDILWNDDDNRYISIFKGLKNLTRLDLSLNRLKHIPNEAFLNLPASLTELHINDNMLKFFNWTLLQQFPRLELLDLRGNKLLFLTDSLSDFTSSLRTLLLSHNRISHLPSGFLSEVSSLKHLDLSSNLLKTINKSALETKTTTKLSMLELHGNPFECTCDIGDFRRWMDEHLNVKIPRLVDVICASPGDQRGKSIVSLELTTCVSDVTAVILFFFTFFITTMVMLAALAHHLFYWDVWFIYNVCLAKVKGYRSLSTSQTFYDAYISYDTKDASVTDWVINELRYHLEESRDKNVLLCLEERDWDPGLAIIDNLMQSINQSKKTVFVLTKKYAKSWNFKTAFYLALQRLMDENMDVIIFILLEPVLQHSQYLRLRQRICKSSILQWPDNPKAEGLFWQTLRNVVLTENDSRYNNMYVDSIKQY

SEQ ID NO: 67234 - protein, 1059 aa, Homo sapiens
MKESSLQNSSCSLGKETKKENMFLQSSMLTCIFLLISGSCELCAEENFSRSYPCDEKKQNDSVIAECSNRRLQEVPQTVGKYVTELDLSDNFITHITNESFQGLQNLTKINLNHNPNVQHQNGNPGIQSNGLNITDGAFLNLKNLRELLLEDNQLPQIPSGLPESLTELSLIQNNIYNITKEGISRLINLKNLYLAWNCYFNKVCEKTNIEDGVFETLTNLELLSLSFNSLSHVPPKLPSSLRKLFLSNTQIKYISEEDFKGLINLTLLDLSGNCPRCFNAPFPCVPCDGGASINIDRFAFQNLTQLRYLNLSSTSLRKINAAWFKNMPHLKVLDLEFNYLVGEIASGAFLTMLPRLEILDLSFNYIKGSYPQHINISRNFSKLLSLRALHLRGYVFQELREDDFQPLMQLPNLSTINLGINFIKQIDFKLFQNFSNLEIIYLSENRISPLVKDTRQSYANSSSFQRHIRKRRSTDFEFDPHSNFYHFTRPLIKPQCAAYGKALDLSLNSIFFIGPNQFENLPDIACLNLSANSNAQVLSGTEFSAIPHVKYLDLTNNRLDFDNASALTELSDLEVLDLSYNSHYFRIAGVTHHLEFIQNFTNLKVLNLSHNNIYTLTDKYNLESKSLVELVFSGNRLDILWNDDDNRYISIFKGLKNLTRLDLSLNRLKHIPNEAFLNLPASLTELHINDNMLKFFNWTLLQQFPRLELLDLRGNKLLFLTDSLSDFTSSLRTLLLSHNRISHLPSGFLSEVSSLKHLDLSSNLLKTINKSALETKTTTKLSMLELHGNPFECTCDIGDFRRWMDEHLNVKIPRLVDVICASPGDQRGKSIVSLELTTCVSDVTAVILFFFTFFITTMVMLAALAHHLFYWDVWFIYNVCLAKVKGYRSLSTSQTFYDAYISYDTKDASVTDWVINELRYHLEESRDKNVLLCLEERDWDPGLAIIDNLMQSINQSKKTVFVLTKKYAKSWNFKTAFYLALQRLMDENMDVIIFILLEPVLQHSQYLRLRQRICKSSILQWPDNPKAEGLFWQTLRNVVLTENDSRYNNMYVDSIKQY

SEQ ID NO: 67235 - protein, 1032 aa, Homo sapiens
MGFCRSALHPLSLLVQAIMLAMTLALGTLPAFLPCELQPHGLVNCNWLFLKSVPHFSMAAPRGNVTSLSLSSNRIHHLHDSDFAHLPSLRHLNLKWNCPPVGLSPMHFPCHMTIEPSTFLAVPTLEELNLSYNNIMTVPALPKSLISLSLSHTNILMLDSASLAGLHALRFLFMDGNCYYKNPCRQALEVAPGALLGLGNLTHLSLKYNNLTVVPRNLPSSLEYLLLSYNRIVKLAPEDLANLTALRVLDVGGNCRRCDHAPNPCMECPRHFPQLHPDTFSHLSRLEGLVLKDSSLSWLNASWFRGLGNLRVLDLSENFLYKCITKTKAFQGLTQLRKLNLSFNYQKRVSFAHLSLAPSFGSLVALKELDMHGIFFRSLDETTLRPLARLPMLQTLRLQMNFINQAQLGIFRAFPGLRYVDLSDNRISGASELTATMGEADGGEKVWLQPGDLAPAPVDTPSSEDFRPNCSTLNFTLDLSRNNLVTVQPEMFAQLSHLQCLRLSHNCISQAVNGSQFLPLTGLQVLDLSHNKLDLYHEHSFTELPRLEALDLSYNSQPFGMQGVGHNFSFVAHLRTLRHLSLAHNNIHSQVSQQLCSTSLRALDFSGNALGHMWAEGDLYLHFFQGLSGLIWLDLSQNRLHTLLPQTLRNLPKSLQVLRLRDNYLAFFKWWSLHFLPKLEVLDLAGNQLKALTNGSLPAGTRLRRLDVSCNSISFVAPGFFSKAKELRELNLSANALKTVDHSWFGPLASALQILDVSANPLHCACGAAFMDFLLEVQAAVPGLPSRVKCGSPGQLQGLSIFAQDLRLCLDEALSWDCFALSLLAVALGLGVPMLHHLCGWDLWYCFHLCLAWLPWRGRQSGRDEDALPYDAFVVFDKTQSAVADWVYNELRGQLEECRGRWALRLCLEERDWLPGKTLFENLWASVYGSRKTLFVLAHTDRVSGLLRASFLLAQQRLLEDRKDVVVLVILSPDGRRSRYVRLRQRLCRQSVLLWPHQPSGQRSFWAQLGMALTRDNHHFYNRNFCQGPTAE

SEQ ID NO: 67236 - protein, 712 aa, Homo sapiens
MACTGPSLPSAFDILGAAGQDKLLYLKHKLKTPRPGCQGQDLLHAMVLLKLGQETEARISLEALKADAVARLVARQWAGVDSTEDPEEPPDVSWAVARLYHLLAEEKLCPASLRDVAYQEAVRTLSSRDDHRLGELQDEARNRCGWDIAGDPGSIRTLQSNLGCLPPSSALPSGTRSLPRPIDGVSDWSQGCSLRSTGSPASLASNLEISQSPTMPFLSLHRSPHGPSKLCDDPQASLVPEPVPGGCQEPEEMSWPPSGEIASPPELPSSPPPGLPEVAPDATSTGLPDTPAAPETSTNYPVECTEGSAGPQSLPLPILEPVKNPCSVKDQTPLQLSVEDTTSPNTKPCPPTPTTPETSPPPPPPPPSSTPCSAHLTPSSLFPSSLESSSEQKFYNFVILHARADEHIALRVREKLEALGVPDGATFCEDFQVPGRGELSCLQDAIDHSAFIILLLTSNFDCRLSLHQVNQAMMSNLTRQGSPDCVIPFLPLESSPAQLSSDTASLLSGLVRLDEHSQIFARKVANTFKPHRLQARKAMWRKEQDTRALREQSQHLDGERMQAAALNAAYSAYLQSYLSYQAQMEQLQVAFGSHMSFGTGAPYGARMPFGGQVPLGAPPPFPTWPGCPQPPPLHAWQAGTPPPPSPQPAAFPQSLPFPQSPAFPTASPAPPQSPGLQPLIIHHAQMVQLGLNNHMWNQRGSQAPEDKTQEAE

SEQ ID NO: 67237 - protein, 1013 aa, Homo sapiens
MGLGTLSPRMLVWLVASGIVFYGELWVCAGLDYDYTFDGNEEDKTETIDYKDPCKAAVFWGDIALDDEDLNIFQIDRTIDLTQNPFGNLGHTTGGLGDHAMSKKRGALYQLIDRIRRIGFGLEQNNTVKGKVPLQFSGQNEKNRVPRAATSRTERIWPGGVIPYVIGGNFTGSQRAMFKQAMRHWEKHTCVTFIERSDEESYIVFTYRPCGCCSYVGRRGNGPQAISIGKNCDKFGIVVHELGHVIGFWHEHTRPDRDNHVTIIRENIQPGQEYNFLKMEPGEVNSLGERYDFDSIMHYARNTFSRGMFLDTILPSRDDNGIRPAIGQRTRLSKGDIAQARKLYRCPACGETLQESNGNLSSPGFPNGYPSYTHCIWRVSVTPGEKIVLNFTTMDLYKSSLCWYDYIEVRDGYWRKSPLLGRFCGDKLPEVLTSTDSRMWIEFRSSSNWVGKGFAAVYEAICGGEIRKNEGQIQSPNYPDDYRPMKECVWKITVSESYHVGLTFQSFEIERHDNCAYDYLEVRDGTSENSPLIGRFCGYDKPEDIRSTSNTLWMKFVSDGTVNKAGFAANFFKEEDECAKPDRGGCEQRCLNTLGSYQCACEPGYELGPDRRSCEAACGGLLTKLNGTITTPGWPKEYPPNKNCVWQVVAPTQYRISVKFEFFELEGNEVCKYDYVEIWSGLSSESKLHGKFCGAEVPEVITSQFNNMRIEFKSDNTVSKKGFKAHFFSDKDECSKDNGGCQHECVNTMGSYMCQCRNGFVLHDNKHDCKEAECEQKIHSPSGLITSPNWPDKYPSRKECTWEISATPGHRIKLAFSEFEIEQHQECAYDHLEVFDGETEKSPILGRLCGNKIPDPLVATGNKMFVRFVSDASVQRKGFQATHSTECGGRLKAESKPRDLYSHAQFGDNNYPGQVDCEWLLVSERGSRLELSFQTFEVEEEADCGYDYVELFDGLDSTAVGLGRFCGSGPPEEIYSIGDSVLIHFHTDDTINKKGFHIRYKSIRYPDTTHTKK

SEQ ID NO: 67238 - protein, 392 aa, Homo sapiens
MGLGTLSPRMLVWLVASGIVFYGELWVCAGLDYDYTFDGNEEDKTETIDYKDPCKAAVFWGDIALDDEDLNIFQIDRTIDLTQNPFGNLGHTTGGLGDHAMSKKRGALYQLIDRIRRIGFGLEQNNTVKGKVPLQFSGQNEKNRVPRAATSRTERIWPGGVIPYVIGGNFTGSQRAMFKQAMRHWEKHTCVTFIERSDEESYIVFTYRPCGCCSYVGRRGNGPQAISIGKNCDKFGIVVHELGHVIGFWHEHTRPDRDNHVTIIRENIQPGQEYNFLKMEPGEVNSLGERYDFDSIMHYARNTFSRGMFLDTILPSRDDNGIRPAIGQRTRLSKGDIAQARKLYRCPACGETLQESNGNLSSPGFPNGYPSYTHCIWRVSVTPGEKVVFSLC

SEQ ID NO: 67239 - protein, 1015 aa, Homo sapiens
MPRATALGALVSLLLLLPLPRGAGGLGERPDATADYSELDGEEGTEQQLEHYHDPCKAAVFWGDIALDEDDLKLFHIDKARDWTKQTVGATGHSTGGLEEQASESSPDTTAMDTGTKEAGKDGRENTTLLHSPGTLHAAAKTFSPRVRRATTSRTERIWPGGVIPYVIGGNFTGSQRAIFKQAMRHWEKHTCVTFIERTDEESFIVFSYRTCGCCSYVGRRGGGPQAISIGKNCDKFGIVAHELGHVVGFWHEHTRPDRDQHVTIIRENIQPGQEYNFLKMEAGEVSSLGETYDFDSIMHYARNTFSRGVFLDTILPRQDDNGVRPTIGQRVRLSQGDIAQARKLYKCPACGETLQDTTGNFSAPGFPNGYPSYSHCVWRISVTPGEKIVLNFTSMDLFKSRLCWYDYVEVRDGYWRKAPLLGRFCGDKIPEPLVSTDSRLWVEFRSSSNILGKGFFAAYEATCGGDMNKDAGQIQSPNYPDDYRPSKECVWRITVSEGFHVGLTFQAFEIERHDSCAYDYLEVRDGPTEESALIGHFCGYEKPEDVKSSSNRLWMKFVSDGSINKAGFAANFFKEVDECSWPDHGGCEHRCVNTLGSYKCACDPGYELAADKKMCEVACGGFITKLNGTITSPGWPKEYPTNKNCVWQVVAPAQYRISLQFEVFELEGNDVCKYDFVEVRSGLSPDAKLHGRFCGSETPEVITSQSNNMRVEFKSDNTVSKRGFRAHFFSDKDECAKDNGGCQHECVNTFGSYLCRCRNGYWLHENGHDCKEAGCAHKISSVEGTLASPNWPDKYPSRRECTWNISSTAGHRVKLTFNEFEIEQHQECAYDHLEMYDGPDSLAPILGRFCGSKKPDPTVASGSSMFLRFYSDASVQRKGFQAVHSTECGGRLKAEVQTKELYSHAQFGDNNYPSEARCDWVIVAEDGYGVELTFRTFEVEEEADCGYDYMEAYDGYDSSAPRLGRFCGSGPLEEIYSAGDSLMIRFRTDDTINKKGFHARYTSTKFQDALHMKK

SEQ ID NO: 67240 - protein, 765 aa, Homo sapiens
MSGDHLHNDSQIEADFRLNDSHKHKDKHKDREHRHKEHKKEKDREKSKHSNSEHKDSEKKHKEKEKTKHKDGSSEKHKDKHKDRDKEKRKEEKVRASGDAKIKKEKENGFSSPPQIKDEPEDDGYFVPPKEDIKPLKRPRDEDDADYKPKKIKTEDTKKEKKRKLEEEEDGKLKKPKNKDKDKKVPEPDNKKKKPKKEEEQKWKWWEEERYPEGIKWKFLEHKGPVFAPPYEPLPENVKFYYDGKVMKLSPKAEEVATFFAKMLDHEYTTKEIFRKNFFKDWRKEMTNEEKNIITNLSKCDFTQMSQYFKAQTEARKQMSKEEKLKIKEENEKLLKEYGFCIMDNHKERIANFKIEPPGLFRGRGNHPKMGMLKRRIMPEDIIINCSKDAKVPSPPPGHKWKEVRHDNKVTWLVSWTENIQGSIKYIMLNPSSRIKGEKDWQKYETARRLKKCVDKIRNQYREDWKSKEMKVRQRAVALYFIDKLALRAGNEKEEGETADTVGCCSLRVEHINLHPELDGQEYVVEFDFLGKDSIRYYNKVPVEKRVFKNLQLFMENKQPEDDLFDRLNTGILNKHLQDLMEGLTAKVFRTYNASITLQQQLKELTAPDENIPAKILSYNRANRAVAILCNHQRAPPKTFEKSMMNLQTKIDAKKEQLADARRDLKSAKADAKVMKDAKTKKVVESKKKAVQRLEEQLMKLEVQATDREENKQIALGTSKLNYLDPRITVAWCKKWGVPIEKIYNKTQREKFAWAIDMADEDYEF

SEQ ID NO: 67241 - protein, 601 aa, Homo sapiens
MRVVRLLRLRAALTLLGEVPRRPASRGVPGSRRTQKGSGARWEKEKHEDGVKWRQLEHKGPYFAPPYEPLPDGVRFFYEGRPVRLSVAAEEVATFYGRMLDHEYTTKEVFRKNFFNDWRKEMAVEEREVIKSLDKCDFTEIHRYFVDKAAARKVLSREEKQKLKEEAEKLQQEFGYCILDGHQEKIGNFKIEPPGLFRGRGDHPKMGMLKRRITPEDVVINCSRDSKIPEPPAGHQWKEVRSDNTVTWLAAWTESVQNSIKYIMLNPCSKLKGETAWQKFETARRLRGFVDEIRSQYRADWKSREMKTRQRAVALYFIDKLALRAGNEKEDGEAADTVGCCSLRVEHVQLHPEADGCQHVVEFDFLGKDCIRYYNRVPVEKPVYKNLQLFMENKDPRDDLFDRLTTTSLNKHLQELMDGLTAKVFRTYNASITLQEQLRALTRAEDSIAAKILSYNRANRVVAILCNHQRATPSTFEKSMQNLQTKIQAKKEQVAEARAELRRARAEHKAQGDGKSRSVLEKKRRLLEKLQEQLAQLSVQATDKEENKQVALGTSKLNYLDPRISIAWCKRFRVPVEKIYSKTQRERFAWALAMAGEDFEF

SEQ ID NO: 67242 - protein, 503 aa, Homo sapiens
MLDHEYTTKEVFRKNFFNDWRKEMAVEEREVIKSLDKCDFTEIHRYFVDKAAARKVLSREEKQKLKEEAEKLQQEFGYCILDGHQEKIGNFKIEPPGLFRGRGDHPKMGMLKRRITPEDVVINCSRDSKIPEPPAGHQWKEVRSDNTVTWLAAWTESVQNSIKYIMLNPCSKLKGETAWQKFETARRLRGFVDEIRSQYRADWKSREMKTRQRAVALYFIDKLALRAGNEKEDGEAADTVGCCSLRVEHVQLHPEADGCQHVVEFDFLGKDCIRYYNRVPVEKPVYKNLQLFMENKDPRDDLFDRLTTTSLNKHLQELMDGLTAKVFRTYNASITLQEQLRALTRAEDSIAAKILSYNRANRVVAILCNHQRATPSTFEKSMQNLQTKIQAKKEQVAEARAELRRARAEHKAQGDGKSRSVLEKKRRLLEKLQEQLAQLSVQATDKEENKQVALGTSKLNYLDPRISIAWCKRFRVPVEKIYSKTQRERFAWALAMAGEDFEF

SEQ ID NO: 67243 - protein, 503 aa, Homo sapiens; identical to SEQ ID NO: 67242

SEQ ID NO: 67244 - protein, 503 aa, Homo sapiens; identical to SEQ ID NO: 67242

SEQ ID NO: 67245 - protein, 1522 aa, Homo sapiens
MSRNDKEPFFVKFLKSSDNSKCFFKALESIKEFQSEEYLQIITEEEALKIKENDRSLYICDPFSGVVFDHLKKLGCRIVGPQVVIFCMHHQRCVPRAEHPVYNMVMSDVTISCTSLEKEKREEVHKYVQMMGGRVYRDLNVSVTHLIAGEVGSKKYLVAANLKKPILLPSWIKTLWEKSQEKKITRYTDINMEDFKCPIFLGCIICVTGLCGLDRKEVQQLTVKHGGQYMGQLKMNECTHLIVQEPKGQKYECAKRWNVHCVTTQWFFDSIEKGFCQDESIYKTEPRPEAKTMPNSSTPTSQINTIDSRTLSDVSNISNINASCVSESICNSLNSKLEPTLENLENLDVSAFQAPEDLLDGCRIYLCGFSGRKLDKLRRLINSGGGVRFNQLNEDVTHVIVGDYDDELKQFWNKSAHRPHVVGAKWLLECFSKGYMLSEEPYIHANYQPVEIPVSHKPESKAALLKKKNSSFSKKDFAPSEKHEQADEDLLSQYENGSSTVVEAKTSEARPFNDSTHAEPLNDSTHISLQEENQSSVSHCVPDVSTITEEGLFSQKSFLVLGFSNENESNIANIIKENAGKIMSLLSRTVADYAVVPLLGCEVEATVGEVVTNTWLVTCIDYQTLFDPKSNPLFTPVPVMTGMTPLEDCVISFSQCAGAEKESLTFLANLLGASVQEYFVRKSNAKKGMFASTHLILKERGGSKYEAAKKWNLPAVTIAWLLETARTGKRADESHFLIENSTKEERSLETEITNGINLNSDTAEHPGTRLQTHRKTVVTPLDMNRFQSKAFRAVVSQHARQVAASPAVGQPLQKEPSLHLDTPSKFLSKDKLFKPSFDVKDALAALETPGRPSQQKRKPSTPLSEVIVKNLQLALANSSRNAVALSASPQLKEAQSEKEEAPKPLHKVVVCVSKKLSKKQSELNGIAASLGADYRWSFDETVTHFIYQGRPNDTNREYKSVKERGVHIVSEHWLLDCAQECKHLPESLYPHTYNPKMSLDISAVQDGRLCNSRLLSAVSSTKDDEPDPLILEENDVDNMATNNKESAPSNGSGKNDSKGVLTQTLEMRENFQKQLQEIMSATSIVKPQGQRTSLSRSGCNSASSTPDSTRSARSGRSRVLEALRQSRQTVPDVNTEPSQNEQIIWDDPTAREERARLASNLQWPSCPTQYSELQVDIQNLEDSPFQKPLHDSEIAKQAVCDPGNIRVTEAPKHPISEELETPIKDSHLIPTPQAPSIAFPLANPPVAPHPREKIITIEETHEELKKQYIFQLSSLNPQERIDYCHLIEKLGGLVIEKQCFDPTCTHIVVGHPLRNEKYLASVAAGKWVLHRSYLEACRTAGHFVQEEDYEWGSSSILDVLTGINVQQRRLALAAMRWRKKIQQRQESGIVEGAFSGWKVILHVDQSREAGFKRLLQSGGAKVLPGHSVPLFKEATHLFSDLNKLKPDDSGVNIAEAAAQNVYCLRTEYIADYLMQESPPHVENYCLPEAISFIQNNKELGTGLSQKRKAPTEKNKIKRPRVH

SEQ ID NO: 67246 - protein, 1045 aa, Homo sapiens
MGSQPPLGSPLSREEGEAPPPAPASEGRRRSRRVRLRGSCRHRPSFLGCRELAASAPARPAPASSEIMASAAKEFKMDNFSPKAGTSKLQQTVPADASPDSKCPICLDRFDNVSYLDRCLHKFCFRCVQEWSKNKAECPLCKQPFDSIFHSVRAEDDFKEYVLRPSYNGSFVTPDRRFRYRTTLTRERNASVYSPSGPVNRRTTTPPDSGVLFEGLGISTRPRDVEIPQFMRQIAVRRPTTADERSLRKIQEQDIINFRRTLYRAGARVRNIEDGGRYRDISAEFFRRNPACLHRLVPWLKRELTVLFGAHGSLVNIVQHIIMSNVTRYDLESQAFVSDLRPFLLNRTEHFIHEFISFARSPFNMAAFDQHANYDCPAPSYEEGSHSDSSVITISPDEAETQELDINVATVSQAPWDDETPGPSYSSSEQVHVTMSSLLNTSDSSDEELVTGGATSQIQGVQTNDDLNNDSDDSSDNCVIVGFVKPLAERTPELVELSSDSEDLGSYEKMETVKTQEQEQSYSSGDSDVSRCSSPHSVLGKDEQINKGHCDSSTRIKSKKEEKRSTSLSSPRNLNSSVRGDRVYSPYNHRHRKRGRSRSSDSRSQSRSGHDQKNHRKHHGKKRMKSKRSRSRESSRPRGRRDKKRSRTRDSSWSRRSQTLSLSSESTSRSRSRSSDHGKRRSRSRNRDRYYLRNNYGSRYKWEYTYYSRNKDRDGYESSYRRRTLSRAHYSRQSSSPEFRVQSFSERTNARKKNNHSERKYYYYERHRSRSLSSNRSRTASTGTDRVRNEKPGGKRKYKTRHLEGTNEVAQPSREFASKAKDSHYQKSSSKLDGNYKNESDTFSDSRSSDRETKHKRRKRKTRSLSVEIVYEGKATDTTKHHKKKKKKHKKKHKKHHGDNASRSPVVITIDSDSDKDSEVKEDTECDNSGPQDPLQNEFLAPSLEPFETKDVVTIEAEFGVLDKECDIATLSNNLNNANKTVDNIPPLAASVEQTLDVREESTFVSDLENQPSNIVSLQTEPSRQLPSPRTSLMSVCLGRDCDMS

SEQ ID NO: 67247 - protein, 980 aa, Homo sapiens
MIMASAAKEFKMDNFSPKAGTSKLQQTVPADASPDSKCPICLDRFDNVSYLDRCLHKFCFRCVQEWSKNKAECPLCKQPFDSIFHSVRAEDDFKEYVLRPSYNGSFVTPDRRFRYRTTLTRERNASVYSPSGPVNRRTTTPPDSGVLFEGLGISTRPRDVEIPQFMRQIAVRRPTTADERSLRKIQEQDIINFRRTLYRAGARVRNIEDGGRYRDISAEFFRRNPACLHRLVPWLKRELTVLFGAHGSLVNIVQHIIMSNVTRYDLESQAFVSDLRPFLLNRTEHFIHEFISFARSPFNMAAFDQHANYDCPAPSYEEGSHSDSSVITISPDEAETQELDINVATVSQAPWDDETPGPSYSSSEQVHVTMSSLLNTSDSSDEELVTGGATSQIQGVQTNDDLNNDSDDSSDNCVIVGFVKPLAERTPELVELSSDSEDLGSYEKMETVKTQEQEQSYSSGDSDVSRCSSPHSVLGKDEQINKGHCDSSTRIKSKKEEKRSTSLSSPRNLNSSVRGDRVYSPYNHRHRKRGRSRSSDSRSQSRSGHDQKNHRKHHGKKRMKSKRSRSRESSRPRGRRDKKRSRTRDSSWSRRSQTLSLSSESTSRSRSRSSDHGKRRSRSRNRDRYYLRNNYGSRYKWEYTYYSRNKDRDGYESSYRRRTLSRAHYSRQSSSPEFRVQSFSERTNARKKNNHSERKYYYYERHRSRSLSSNRSRTASTGTDRVRNEKPGGKRKYKTRHLEGTNEVAQPSREFASKAKDSHYQKSSSKLDGNYKNESDTFSDSRSSDRETKHKRRKRKTRSLSVEIVYEGKATDTTKHHKKKKKKHKKKHKKHHGDNASRSPVVITIDSDSDKDSEVKEDTECDNSGPQDPLQNEFLAPSLEPFETKDVVTIEAEFGVLDKECDIATLSNNLNNANKTVDNIPPLAASVEQTLDVREESTFVSDLENQPSNIVSLQTEPSRQLPSPRTSLMSVCLGRDCDMS

SEQ ID NO: 67248 - protein, 332 aa, Homo sapiens
MKLGRAVLGLLLLAPSVVQAVEPISLGLALAGVLTGYIYPRLYCLFAECCGQKRSLSREALQKDLDDNLFGQHLAKKIILNAVFGFINNPKPKKPLTLSLHGWTGTGKNFVSKIIAENIYEGGLNSDYVHLFVATLHFPHASNITLYKDQLQLWIRGNVSACARSIFIFDEMDKMHAGLIDAIKPFLDYYDLVDGVSYQKAMFIFLSNAGAERITDVALDFWRSGKQREDIKLKDIEHALSVSVFNNKNSGFWHSSLIDRNLIDYFVPFLPLEYKHLKMCIRVEMQSRGYEIDEDIVSRVAEEMTFFPKEERVFSDKGCKTVFTKLDYYYDD

SEQ ID NO: 67249 - protein, 301 aa, Homo sapiens
MKLGRAVLGLLLLAPSVVQAVEPISLGLALAGVLTGYIYPRLYCLFAECCGQKRSLSREALQKDLDDNLFGQHLAKKIILNAVFGFINNPKPKKPLTLSLFVATLHFPHASNITLYKDQLQLWIRGNVSACARSIFIFDEMDKMHAGLIDAIKPFLDYYDLVDGVSYQKAMFIFLSNAGAERITDVALDFWRSGKQREDIKLKDIEHALSVSVFNNKNSGFWHSSLIDRNLIDYFVPFLPLEYKHLKMCIRVEMQSRGYEIDEDIVSRVAEEMTFFPKEERVFSDKGCKTVFTKLDYYYDD

SEQ ID NO: 67250 - protein, 336 aa, Homo sapiens
MLRAGWLRGAAALALLLAARVVAAFEPITVGLAIGAASAITGYLSYNDIYCRFAECCREERPLNASALKLDLEEKLFGQHLATEVIFKALTGFRNNKNPKKPLTLSLHGWAGTGKNFVSQIVAENLHPKGLKSNFVHLFVSTLHFPHEQKIKLYQDQLQKWIRGNVSACANSVFIFDEMDKLHPGIIDAIKPFLDYYEQVDGVSYRKAIFIFLSNAGGDLITKTALDFWRAGRKREDIQLKDLEPVLSVGVFNNKHSGLWHSGLIDKNLIDYFIPFLPLEYRHVKMCVRAEMRARGSAIDEDIVTRVAEEMTFFPRDEKIYSDKGCKTVQSRLDFH

SEQ ID NO: 67251 - protein, 141 aa, Homo sapiens
  VARIANT 1: note = MOD_RES - Any amino acid
XRVVAAFEPITVGLAIGAASAITGYLSYNDIYCRFAECCREERPLNASALKLDLEEKLFGQHLATEVIFKALTGFRNNKNPKKPLTLSLHGWAGTGKNFVSQIVAENLHPKGLKSNFVHLFVSTLHFPHEQKIKLYQSSLT

SEQ ID NO: 67252 - protein, 305 aa, Homo sapiens
MLRAGWLRGAAALALLLAARVVAAFEPITVGLAIGAASAITGYLSYNDIYCRFAECCREERPLNASALKLDLEEKLFGQHLATEVIFKALTGFRNNKNPKKPLTLSLFVSTLHFPHEQKIKLYQDQLQKWIRGNVSACANSVFIFDEMDKLHPGIIDAIKPFLDYYEQVDGVSYRKAIFIFLSNAGGDLITKTALDFWRAGRKREDIQLKDLEPVLSVGVFNNKHSGLWHSGLIDKNLIDYFIPFLPLEYRHVKMCVRAEMRARGSAIDEDIVTRVAEEMTFFPRDEKIYSDKGCKTVQSRLDFH

SEQ ID NO: 67253 - protein, 336 aa, Homo sapiens
MLRGPWRQLWLFFLLLLPGAPEPRGASRPWEGTDEPGSAWAWPGFQRLQEQLRAAGALSKRYWTLFSCQVWPDDCDEDEEAATGPLGWRLPLLGQRYLDLLTTWYCSFKDCCPRGDCRISNNFTGLEWDLNVRLHGQHLVQQLVLRTVRGYLETPQPEKALALSFHGWSGTGKNFVARMLVENLYRDGLMSDCVRMFIATFHFPHPKYVDLYKEQLMSQIRETQQLCHQTLFIFDEAEKLHPGLLEVLGPHLERRAPEGHRAESPWTIFLFLSNLRGDIINEVVLKLLKAGWSREEITMEHLEPHLQAEIVETIGFSFLTTRWPHLDLPTSSVAPT

SEQ ID NO: 67254 - protein, 153 aa, Homo sapiens
MLRGPWRQLWLFFLLLLPGAPEPRGASRPWEGTDEPGSAWAWPGFQRLQEQLRAAGALSKRYWTLFSCQVWPDDCDEDEEAATGPLGWRLPLLGQRYLDLLTTWYCSFKDCCPRGDCRISNNFTGKNFVARMLVENLYRDGLMSDCVRMFIAT

SEQ ID NO: 67255 - protein, 397 aa, Homo sapiens
MLRGPWRQLWLFFLLLLPGAPEPRGASRPWEGTDEPGSAWAWPGFQRLQEQLRAAGALSKRYWTLFSCQVWPDDCDEDEEAATGPLGWRLPLLGQRYLDLLTTWYCSFKDCCPRGDCRISNNFTGLEWDLNVRLHGQHLVQQLVLRTVRGYLETPQPEKALALSFHGWSGTGKNFVARMLVENLYRDGLMSDCVRMFIATFHFPHPKYVDLYKEQLMSQIRETQQLCHQTLFIFDEAEKLHPGLLEVLGPHLERRAPEGHRAESPWTIFLFLSNLRGDIINEVVLKLLKAGWSREEITMEHLEPHLQAEIVETIDNGFGHSRLVKENLIDYFIPFLPLEYRHVRLCARDAFLSQELLYKEETLDEIAQMMVYVPKEEQLFSSQGCKSISQRINYFLS

SEQ ID NO: 67256 - protein, 174 aa, Homo sapiens
MGLCVPFAVTTSFLSLGLEWDLNVRLHGQHLVQQLVLRTVRGYLETPQPEKALALSFHGWSGTGKNFVARMLVENLYRDGLMSDCVRMFIATFHFPHPKYVDLYKEQLMSQIRETQQLCHQTLFIFDEAEKLHPGLLEVLGPHLERRAPEGHRAESPWTIFLFLSNLRGDIINE

SEQ ID NO: 67257 - protein, 621 aa, Homo sapiens
MEFPGGNDNYLTITGPSHPFLSGAETFHTPSLGDEEFEIPPISLDSDPSLAVSDVVGHFDDLADPSSSQDGSFSAQYGVQTLDMPVGMTHGLMEQGGGLLSGGLTMDLDHSIGTQYSANPPVTIDVPMTDMTSGLMGHSQLTTIDQSELSSQLGLSLGGGTILPPAQSPEDRLSTTPSPTSSLHEDGVEDFRRQLPSQKTVVVEAGKKQKAPKKRKKKDPNEPQKPVSAYALFFRDTQAAIKGQNPNATFGEVSKIVASMWDSLGEEQKQVYKRKTEAAKKEYLKALAAYKDNQECQATVETVELDPAPPSQTPSPPPMATVDPASPAPASIEPPALSPSIVVNSTLSSYVANQASSGAGGQPNITKLIITKQMLPSSITMSQGGMVTVIPATVVTSRGLQLGQTSTATIQPSQQAQIVTRSVLQAAAAAAAAASMQLPPPRLQPPPLQQMPQPPTQQQVTILQQPPPLQAMQQPPPQKVRINLQQQPPPLQIKSVPLPTLKMQTTLVPPTVESSPERPMNNSPEAHTVEAPSPETICEMITDVVPEVESPSQMDVELVSGSPVALSPQPRCVRSGCENPPIVSKDWDNEYCSNECVVKHCRDVFLAWVASRNSNTVVFVK

SEQ ID NO: 67258 - protein, 621 aa, Homo sapiens; identical to SEQ ID NO: 67257

SEQ ID NO: 67259 - protein, 598 aa, Homo sapiens
METFHTPSLGDEEFEIPPISLDSDPSLAVSDVVGHFDDLADPSSSQDGSFSAQYGVQTLDMPVGMTHGLMEQGGGLLSGGLTMDLDHSIGTQYSANPPVTIDVPMTDMTSGLMGHSQLTTIDQSELSSQLGLSLGGGTILPPAQSPEDRLSTTPSPTSSLHEDGVEDFRRQLPSQKTVVVEAGKKQKAPKKRKKKDPNEPQKPVSAYALFFRDTQAAIKGQNPNATFGEVSKIVASMWDSLGEEQKQVYKRKTEAAKKEYLKALAAYKDNQECQATVETVELDPAPPSQTPSPPPMATVDPASPAPASIEPPALSPSIVVNSTLSSYVANQASSGAGGQPNITKLIITKQMLPSSITMSQGGMVTVIPATVVTSRGLQLGQTSTATIQPSQQAQIVTRSVLQAAAAAAAAASMQLPPPRLQPPPLQQMPQPPTQQQVTILQQPPPLQAMQQPPPQKVRINLQQQPPPLQIKSVPLPTLKMQTTLVPPTVESSPERPMNNSPEAHTVEAPSPETICEMITDVVPEVESPSQMDVELVSGSPVALSPQPRCVRSGCENPPIVSKDWDNEYCSNECVVKHCRDVFLAWVASRNSNTVVFVK

SEQ ID NO: 67260 - protein, 549 aa, Homo sapiens
MRNLKSHLSPWILIPHWLSQMWLATLMTWQFFSPDLDHSIGTQYSANPPVTIDVPMTDMTSGLMGHSQLTTIDQSELSSQLGLSLGGGTILPPAQSPEDRLSTTPSPTSSLHEDGVEDFRRQLPSQKTVVVEAGKKQKAPKKRKKKDPNEPQKPVSAYALFFRDTQAAIKGQNPNATFGEVSKIVASMWDSLGEEQKQVYKRKTEAAKKEYLKALAAYKDNQECQATVETVELDPAPPSQTPSPPPMATVDPASPAPASIEPPALSPSIVVNSTLSSYVANQASSGAGGQPNITKLIITKQMLPSSITMSQGGMVTVIPATVVTSRGLQLGQTSTATIQPSQQAQIVTRSVLQAAAAAAAAASMQLPPPRLQPPPLQQMPQPPTQQQVTILQQPPPLQAMQQPPPQKVRINLQQQPPPLQIKSVPLPTLKMQTTLVPPTVESSPERPMNNSPEAHTVEAPSPETICEMITDVVPEVESPSQMDVELVSGSPVALSPQPRCVRSGCENPPIVSKDWDNEYCSNECVVKHCRDVFLAWVASRNSNTVVFVK

SEQ ID NO: 67261 - protein, 339 aa, Homo sapiens
MMPFCHNIINISCVKNNWSNDVRASLYSLMVLIILTTLVGNLIVIVSISHFKQLHTPTNWLIHSMATVDFLLGCLVMPYSMVRSAEHCWYFGEVFCKIHTSTDIMLSSASIFHLSFISIDRYYAVCDPLRYKAKMNILVICVMIFISWSVPAVFAFGMIFLELNFKGAEEIYYKHVHCRGGCSVFFSKISGVLTFMTSFYIPGSIMLCVYYRIYLIAKEQARLISDANQKLQIGLEMKNGISQSKERKAVKTLGIVMGVFLICWCPFFICTVMDPFLHYIIPPTLNDVLIWFGYLNSTFNPMVYAFFYPWFRKALKMMLFGKIFQKDSSRCKLFLELSS

SEQ ID NO: 67262 - protein, 306 aa, Homo sapiens
MYSFMAGSIFITIFGNLAMIISISYFKQLHTPTNFLILSMAITDFLLGFTIMPYSMIRSVENCWYFGLTFCKIYYSFDLMLSITSIFHLCSVAIDRFYAICYPLLYSTKITIPVIKRLLLLCWSVPGAFAFGVVFSEAYADGIEGYDILVACSSSCPVMFNKLWGTTLFMAGFFTPGSMMVGIYGKIFAVSRKHAHAINNLRENQNNQVKKDKKAAKTLGIVIGVFLLCWFPCFFTILLDPFLNFSTPVVLFDALTWFGYFNSTCNPLIYGFFYPWFRRALKYILLGKIFSSCFHNTILCMQKESE

SEQ ID NO: 67263 - protein, 351 aa, Homo sapiens
MAVSSEQHELSHFKRTQTKKEKFNCSEYGNRSCPENERSLGVRVAMYSFMAGSIFITIFGNLAMIISISYFKQLHTPTNFLILSMAITDFLLGFTIMPYSMIRSVENCWYFGLTFCKIYYSFDLMLSITSIFHLCSVAIDRFYAICYPLLYSTKITIPVIKRLLLLCWSVPGAFAFGVVFSEAYADGIEGYDILVACSSSCPVMFNKLWGTTLFMAGFFTPGSMMVGIYGKIFAVSRKHAHAINNLRENQNNQVKKDKKAAKTLGIVIGVFLLCWFPCFFTILLDPFLNFSTPVVLFDALTWFGYFNSTCNPLIYGFFYPWFRRALKYILLGKIFSSCFHNTILCMQKESE

SEQ ID NO: 67264 - protein, 306 aa, Homo sapiens; identical to SEQ ID NO: 67262

SEQ ID NO: 67265 - protein, 345 aa, Homo sapiens
MSSNSSLLVAVQLCYANVNGSCVKIPFSPGSRVILYIVFGFGAVLAVFGNLLVMISILHFKQLHSPTNFLVASLACADFLVGVTVMPFSMVRTVESCWYFGRSFCTFHTCCDVAFCYSSLFHLCFISIDRYIAVTDPLVYPTKFTVSVSGICISVSWILPLMYSGAVFYTGVYDDGLEELSDALNCIGGCQTVVNQNWVLTDFLSFFIPTFIMIILYGNIFLVARRQAKKIENTGSKTESSSESYKARVARRERKAAKTLGVTVVAFMISWLPYSIDSLIDAFMGFITPACIYEICCWCAYYNSAMNPLIYALFYPWFRKAIKVIVTGQVLKNSSATMNLFSEHI

SEQ ID NO: 67266 - protein, 318 aa, Homo sapiens
VNGSCVKIPFSPGSRVILYIVFGFGAVLAVFGNLLVMISILHFKQLHSPTNFLVASLACADFLVGVTVMPFSMVRTVESCWYFGRSFCTFHTCCDVAFCYSSLFHLCFISIDRYIAVTDPLVYPTKFTVSVSGICISVSWILPLMYSGAVFYTGVYDDGLEELSDALNCIGGCQTVVNQNWVLTDFLSFFIPTFIMIILYGNIFLVARRQAKKIENTESYKARVARRERKAAKTLGVTVVAFMISWLPYSIDSLIDAFMGFITPACIYEICCWCAYYNSAMNPLIYALFYPWFRKAIKVIVTGQVLKNSSATMNLFSE

SEQ ID NO: 67267 - protein, 469 aa, Homo sapiens
MPIRALCTICSDFFDHSRDVAAIHCGHTFHLQCLIQWFETAPSRTCPQCRIQVGKRTIINKLFFDLAQEEENVLDAEFLKNELDNVRAQLSQKDKEKRDSQVIIDTLRDTLEERNATVVSLQQALGKAEMLCSTLKKQMKYLEQQQDETKQAQEEARRLRSKMKTMEQIELLLQSQRPEVEEMIRDMGVGQSAVEQLAVYCVSLKKEYENLKEARKASGEVADKLRKDLFSSRSKLQTVYSELDQAKLELKSAQKDLQSADKEIMSLKKKLTMLQETLNLPPVASETVDRLVLESPAPVEVNLKLRRPSFRDDIDLNATFDVDTPPARPSSSQHGYYEKLCLEKSHSPIQDVPKKICKGPRKESQLSLGGQSCAGEPDEELVGAFPIFVRNAILGQKQPKRPRSESSCSKDVVRTGFDGLGGRTKFIQPTDTVMIRPLPVKPKTKVKQRVRVKTVPSLFQAKLDTFLWS

SEQ ID NO: 67268 - protein, 1352 aa, Homo sapiens
MASDSPARSLDEIDLSALRDPAGIFELVELVGNGTYGQVYKGRHVKTGQLAAIKVMDVTGDEEEEIKQEINMLKKYSHHRNIATYYGAFIKKNPPGMDDQLWLVMEFCGAGSVTDLIKNTKGNTLKEEWIAYICREILRGLSHLHQHKVIHRDIKGQNVLLTENAEVKLVDFGVSAQLDRTVGRRNTFIGTPYWMAPEVIACDENPDATYDFKSDLWSLGITAIEMAEGAPPLCDMHPMRALFLIPRNPAPRLKSKKWSKKFQSFIESCLVKNHSQRPATEQLMKHPFIRDQPNERQVRIQLKDHIDRTKKKRGEKDETEYEYSGSEEEEEENDSGEPSSILNLPGESTLRRDFLRLQLANKERSEALRRQQLEQQQRENEEHKRQLLAERQKRIEEQKEQRRRLEEQQRREKELRKQQEREQRRHYEEQMRREEERRRAEHEQEYIRRQLEEEQRQLEILQQQLLHEQALLLEYKRKQLEEQRQAERLQRQLKQERDYLVSLQHQRQEQRPVEKKPLYHYKEGMSPSEKPAWAKEVEERSRLNRQSSPAMPHKVANRISDPNLPPRSESFSISGVQPARTPPMLRPVDPQIPHLVAVKSQGPALTASQSVHEQPTKGLSGFQEALNVTSHRVEMPRQNSDPTSENPPLPTRIEKFDRSSWLRQEEDIPPKVPQRTTSISPALARKNSPGNGSALGPRLGSQPIRASNPDLRRTEPILESPLQRTSSGSSSSSSTPSSQPSSQGGSQPGSQAGSSERTRVRANSKSEGSPVLPHEPAKVKPEESRDITRPSRPADLTALAKELRELRIEETNRPMKKVTDYSSSSEESESSEEEEEDGESETHDGTVAVSDIPRLIPTGAPGSNEQYNVGMVGTHGLETSHADSFSGSISREGTLMIRETSGEKKRSGHSDSNGFAGHINLPDLVQQSHSPAGTPTEGLGRVSTHSQEMDSGTEYGMGSSTKASFTPFVDPRVYQTSPTDEDEEDEESSAAALFTSELLRQEQAKLNEARKISVVNVNPTNIRPHSDTPEIRKYKKRFNSEILCAALWGVNLLVGTENGLMLLDRSGQGKVYNLINRRRFQQMDVLEGLNVLVTISGKKNKLRVYYLSWLRNRILHNDPEVEKKQGWITVGDLEGCIHYKVVKYERIKFLVIALKNAVEIYAWAPKPYHKFMAFKSFADLQHKPLLVDLTVEEGQRLKVIFGSHTGFHVIDVDSGNSYDIYIPSHIQGNITPHAIVILPKTDGMEMLVCYEDEGVYVNTYGRITKDVVLQWGEMPTSVAYIHSNQIMGWGEKAIEIRSVETGHLDGVFMHKRAQRLKFLCERNDKVFFASVRSGGSSQVFFMTLNRNSMMNW

SEQ ID NO: 67269 - protein, 1276 aa, Homo sapiens
MASDSPARSLDEIDLSALRDPAGIFELVELVGNGTYGQVYKGRHVKTGQLAAIKVMDVTGDEEEEIKQEINMLKKYSHHRNIATYYGAFIKKNPPGMDDQLWLVMEFCGAGSVTDLIKNTKGNTLKEEWIAYICREILRGLSHLHQHKVIHRDIKGQNVLLTENAEVKLVDFGVSAQLDRTVGRRNTFIGTPYWMAPEVIACDENPDATYDFKSDLWSLGITAIEMAEGAPPLCDMHPMRALFLIPRNPAPRLKSKKWSKKFQSFIESCLVKNHSQRPATEQLMKHPFIRDQPNERQVRIQLKDHIDRTKKKRGEKDETEYEYSGSEEEEEENDSGEPSSILNLPGESTLRRDFLRLQLANKERSEALRRQQLEQQQRENEEHKRQLLAERQKRIEEQKEQRRRLEEQQRREKELRKQQEREQRRHYEEQMRREEERRRAEHEQEYKRKQLEEQRQAERLQRQLKQERDYLVSLQHQRQEQRPVEKKPLYHYKEGMSPSEKPAWAKEIPHLVAVKSQGPALTASQSVHEQPTKGLSGFQEALNVTSHRVEMPRQNSDPTSENPPLPTRIEKFDRSSWLRQEEDIPPKVPQRTTSISPALARKNSPGNGSALGPRLGSQPIRASNPDLRRTEPILESPLQRTSSGSSSSSSTPSSQPSSQGGSQPGSQAGSSERTRVRANSKSEGSPVLPHEPAKVKPEESRDITRPSRPASYKKAIDEDLTALAKELRELRIEETNRPMKKVTDYSSSSEESESSEEEEEDGESETHDGTVAVSDIPRLIPTGAPGSNEQYNVGMVGTHGLETSHADSFSGSISREGTLMIRETSGEKKRSGHSDSNGFAGHINLPDLVQQSHSPAGTPTEGLGRVSTHSQEMDSGTEYGMGSSTKASFTPFVDPRVYQTSPTDEDEEDEESSAAALFTSELLRQEQAKLNEARKISVVNVNPTNIRPHSDTPEIRKYKKRFNSEILCAALWGVNLLVGTENGLMLLDRSGQGKVYNLINRRRFQQMDVLEGLNVLVTISGKKNKLRVYYLSWLRNRILHNDPEVEKKQGWITVGDLEGCIHYKVVKYERIKFLVIALKNAVEIYAWAPKPYHKFMAFKSFADLQHKPLLVDLTVEEGQRLKVIFGSHTGFHVIDVDSGNSYDIYIPSHIQGNITPHAIVILPKTDGMEMLVCYEDEGVYVNTYGRITKDVVLQWGEMPTSVAYIHSNQIMGWGEKAIEIRSVETGHLDGVFMHKRAQRLKFLCERNDKVFFASVRSGGSSQVFFMTLNRNSMMNW

SEQ ID NO: 67270 - protein, 1331 aa, Homo sapiens
MASDSPARSLDEIDLSALRDPAGIFELVELVGNGTYGQVYKGRHVKTGQLAAIKVMDVTGDEEEEIKQEINMLKKYSHHRNIATYYGAFIKKNPPGMDDQLWLVMEFCGAGSVTDLIKNTKGNTLKEEWIAYICREILRGLSHLHQHKVIHRDIKGQNVLLTENAEVKLVDFGVSAQLDRTVGRRNTFIGTPYWMAPEVIACDENPDATYDFKSDLWSLGITAIEMAEGAPPLCDMHPMRALFLIPRNPAPRLKSKKWSKKFQSFIESCLVKNHSQRPATEQLMKHPFIRDQPNERQVRIQLKDHIDRTKKKRGEKDETEYEYSGSEEEEEENDSGEPSSILNLPGESTLRRDFLRLQLANKERSEALRRQQLEQQQRENEEHKRQLLAERQKRIEEQKEQRRRLEEQQRREKELRKQQEREQRRHYEEQMRREEERRRAEHEQEYKRKQLEEQRQAERLQRQLKQERDYLVSLQHQRQEQRPVEKKPLYHYKEGMSPSEKPAWAKEVEERSRLNRQSSPAMPHKVANRISDPNLPPRSESFSISGVQPARTPPMLRPVDPQIPHLVAVKSQGPALTASQSVHEQPTKGLSGFQEALNVTSHRVEMPRQNSDPTSENPPLPTRIEKFDRSSWLRQEEDIPPKVPQRTTSISPALARKNSPGNGSALGPRLGSQPIRASNPDLRRTEPILESPLQRTSSGSSSSSSTPSSQPSSQGGSQPGSQAGSSERTRVRANSKSEGSPVLPHEPAKVKPEESRDITRPSRPASYKKAIDEDLTALAKELRELRIEETNRPMKKVTDYSSSSEESESSEEEEEDGESETHDGTVAVSDIPRLIPTGAPGSNEQYNVGMVGTHGLETSHADSFSGSISREGTLMIRETSGEKKRSGHSDSNGFAGHINLPDLVQQSHSPAGTPTEGLGRVSTHSQEMDSGTEYGMGSSTKASFTPFVDPRVYQTSPTDEDEEDEESSAAALFTSELLRQEQAKLNEARKISVVNVNPTNIRPHSDTPEIRKYKKRFNSEILCAALWGVNLLVGTENGLMLLDRSGQGKVYNLINRRRFQQMDVLEGLNVLVTISGKKNKLRVYYLSWLRNRILHNDPEVEKKQGWITVGDLEGCIHYKVVKYERIKFLVIALKNAVEIYAWAPKPYHKFMAFKSFADLQHKPLLVDLTVEEGQRLKVIFGSHTGFHVIDVDSGNSYDIYIPSHIQGNITPHAIVILPKTDGMEMLVCYEDEGVYVNTYGRITKDVVLQWGEMPTSVAYIHSNQIMGWGEKAIEIRSVETGHLDGVFMHKRAQRLKFLCERNDKVFFASVRSGGSSQVFFMTLNRNSMMNW

SEQ ID NO: 67271 - protein, 1338 aa, Homo sapiens
MASDSPARSLDEIDLSALRDPAGIFELVELVGNGTYGQVYKGRHVKTGQLAAIKVMDVTGDEEEEIKQEINMLKKYSHHRNIATYYGAFIKKNPPGMDDQLWLVMEFCGAGSVTDLIKNTKGNTLKEEWIAYICREILRGLSHLHQHKVIHRDIKGQNVLLTENAEVKIVDFGVSAQLDRTVGRRNTFIGTPYWMAPEVIACDENPDATYDFKSDLWSLGITAIEMAEGAPPLCDMHPMRALFLIPRNPAPRLKSKKWSKKFQSFIESCLVKNHSQRPATEQLMKHPFIRDQPNERQVRIQLKDHIDRTKKKRGEKDETEYEYSGSEEEEEENDSGEPSSILNLPGESTLRRDFLRLQLANKERSEALRRQQLEQQQRENEEHKRQLLAERQKRIEEQKEQRRRLEEQQRREKELRKQQEREQRRHYEEQMRREEERRRAEHEQEYKRKQLEEQRQAERLQRQLKQERDYLVSLQHQRQEQRPVEKKPLYHYKEGMSPSEKPAWAKEVEERSRLNRQSSPAMPHKVANRISDPNLPPRSESFSISGVQPARTPPMLRPVDPQIPHLVAVKSQGPALTASQSVHEQPTKGLSGFQEALNVTSHRVEMPRQNSDPTSENPPLPTRIEKFDRSSWLRQEEDIPPKVPQRTTSISPALARKNSPGNGSALGPRLGSQPIRASNPDLRRTEPILESPLQRTSSGSSSSSSTPSSQPSSQGGSQPGSQAGSSERTRVRANSKSEGSPVLPHEPAKVKPEESRDITRPSRPAVSAFLSKSFELLIYQDLTALAKELRELRIEETNRPMKKVTDYSSSSEESESSEEEEEDGESETHDGTVAVSDIPRLIPTGAPGSNEQYNVGMVGTHGLETSHADSFSGSISREGTLMIRETSGEKKRSGHSDSNGFAGHINLPDLVQQSHSPAGTPTEGLGRVSTHSQEMDSGTEYGMGSSTKASFTPFVDPRVYQTSPTDEDEEDEESSAAALFTSELLRQEQAKLNEARKISVVNVNPTNIRPHSDTPEIRKYKKRFNSEILCAALWGVNLLVGTENGLMLLDRSGQGKVYNLINRRRFQQMDVLEGLNVLVTISGKKNKLRVYYLSWLRNRILHNDPEVEKKQGWITVGDLEGCIHYKVVKYERIKFLVIALKNAVEIYAWAPKPYHKFMAFKSFADLQHKPLLVDLTVEEGQRLKVIFGSHTGFHVIDVDSGNSYDIYIPSHIQGNITPHAIVILPKTDGMEMLVCYEDEGVYVNTYGRITKDVVLQWGEMPTSVAYIHSNQIMGWGEKAIEIRSVETGHLDGVFMHKRAQRLKFLCERNDKVFFASVRSGGSSQVFFMTLNRNSMMNW

SEQ ID NO: 67272 - protein, 1360 aa, Homo sapiens
MASDSPARSLDEIDLSALRDPAGIFELVELVGNGTYGQVYKGRHVKTGQLAAIKVMDVTGDEEEEIKQEINMLKKYSHHRNIATYYGAFIKKNPPGMDDQLWLVMEFCGAGSVTDLIKNTKGNTLKEEWIAYICREILRGLSHLHQHKVIHRDIKGQNVLLTENAEVKLVDFGVSAQLDRTVGRRNTFIGTPYWMAPEVIACDENPDATYDFKSDLWSLGITAIEMAEGAPPLCDMHPMRALFLIPRNPAPRLKSKKWSKKFQSFIESCLVKNHSQRPATEQLMKHPFIRDQPNERQVRIQLKDHIDRTKKKRGEKDETEYEYSGSEEEEEENDSGEPSSILNLPGESTLRRDFLRLQLANKERSEALRRQQLEQQQRENEEHKRQLLAERQKRIEEQKEQRRRLEEQQRREKELRKQQEREQRRHYEEQMRREEERRRAEHEQEYIRRQLEEEQRQLEILQQQLLHEQALLLEYKRKQLEEQRQAERLQRQLKQERDYLVSLQHQRQEQRPVEKKPLYHYKEGMSPSEKPAWAKEVEERSRLNRQSSPAMPHKVANRISDPNLPPRSESFSISGVQPARTPPMLRPVDPQIPHLVAVKSQGPALTASQSVHEQPTKGLSGFQEALNVTSHRVEMPRQNSDPTSENPPLPTRIEKFDRSSWLRQEEDIPPKVPQRTTSISPALARKNSPGNGSALGPRLGSQPIRASNPDLRRTEPILESPLQRTSSGSSSSSSTPSSQPSSQGGSQPGSQAGSSERTRVRANSKSEGSPVLPHEPAKVKPEESRDITRPSRPASYKKAIDEDLTALAKELRELRIEETNRPMKKVTDYSSSSEESESSEEEEEDGESETHDGTVAVSDIPRLIPTGAPGSNEQYNVGMVGTHGLETSHADSFSGSISREGTLMIRETSGEKKRSGHSDSNGFAGHINLPDLVQQSHSPAGTPTEGLGRVSTHSQEMDSGTEYGMGSSTKASFTPFVDPRVYQTSPTDEDEEDEESSAAALFTSELLRQEQAKLNEARKISVVNVNPTNIRPHSDTPEIRKYKKRFNSEILCAALWGVNLLVGTENGLMLLDRSGQGKVYNLINRRRFQQMDVLEGLNVLVTISGKKNKLRVYYLSWLRNRILHNDPEVEKKQGWITVGDLEGCIHYKVVKYERIKFLVIALKNAVEIYAWAPKPYHKFMAFKSFADLQHKPLLVDLTVEEGQRLKVIFGSHTGFHVIDVDSGNSYDIYIPSHIQGNITPHAIVILPKTDGMEMLVCYEDEGVYVNTYGRITKDVVLQWGEMPTSVAYIHSNQIMGWGEKAIEIRSVETGHLDGVFMHKRAQRLKFLCERNDKVFFASVRSGGSSQVFFMTLNRNSMMNW

SEQ ID NO: 67273 - protein, 1297 aa, Homo sapiens
MASDSPARSLDEIDLSALRDPAGIFELVELVGNGTYGQVYKGRHVKTGQLAAIKVMDVTGDEEEEIKQEINMLKKYSHHRNIATYYGAFIKKNPPGMDDQLWLVMEFCGAGSVTDLIKNTKGNTLKEEWIAYICREILRGLSHLHQHKVIHRDIKGQNVLLTENAEVKLVDFGVSAQLDRTVGRRNTFIGTPYWMAPEVIACDENPDATYDFKSDLWSLGITAIEMAEGAPPLCDMHPMRALFLIPRNPAPRLKSKKWSKKFQSFIESCLVKNHSQRPATEQLMKHPFIRDQPNERQVRIQLKDHIDRTKKKRGEKDETEYEYSGSEEEEEENDSGEPSSILNLPGESTLRRDFLRLQLANKERSEALRRQQLEQQQRENEEHKRQLLAERQKRIEEQKEQRRRLEEQQRREKELRKQQEREQRRHYEEQMRREEERRRAEHEQEYIRRQLEEEQRQLEILQQQLLHEQALLLEYKRKQLEEQRQAERLQRQLKQERDYLVSLQHQRQEQRPVEKKPLYHYKEGMSPSEKPAWAKEIPHLVAVKSQGPALTASQSVHEQPTKGLSGFQEALNVTSHRVEMPRQNSDPTSENPPLPTRIEKFDRSSWLRQEEDIPPKVPQRTTSISPALARKNSPGNGSALGPRLGSQPIRASNPDLRRTEPILESPLQRTSSGSSSSSSTPSSQPSSQGGSQPGSQAGSSERTRVRANSKSEGSPVLPHEPAKVKPEESRDITRPSRPADLTALAKELRELRIEETNRPMKKVTDYSSSSEESESSEEEEEDGESETHDGTVAVSDIPRLIPTGAPGSNEQYNVGMVGTHGLETSHADSFSGSISREGTLMIRETSGEKKRSGHSDSNGFAGHINLPDLVQQSHSPAGTPTEGLGRVSTHSQEMDSGTEYGMGSSTKASFTPFVDPRVYQTSPTDEDEEDEESSAAALFTSELLRQEQAKLNEARKISVVNVNPTNIRPHSDTPEIRKYKKRFNSEILCAALWGVNLLVGTENGLMLLDRSGQGKVYNLINRRRFQQMDVLEGLNVLVTISGKKNKLRVYYLSWLRNRILHNDPEVEKKQGWITVGDLEGCIHYKVVKYERIKFLVIALKNAVEIYAWAPKPYHKFMAFKSFADLQHKPLLVDLTVEEGQRLKVIFGSHTGFHVIDVDSGNSYDIYIPSHIQGNITPHAIVILPKTDGMEMLVCYEDEGVYVNTYGRITKDVVLQWGEMPTSVAYIHSNQIMGWGEKAIEIRSVETGHLDGVFMHKRAQRLKFLCERNDKVFFASVRSGGSSQVFFMTLNRNSMMNW

SEQ ID NO: 67274 - protein, 1323 aa, Homo sapiens
MASDSPARSLDEIDLSALRDPAGIFELVELVGNGTYGQVYKGRHVKTGQLAAIKVMDVTGDEEEEIKQEINMLKKYSHHRNIATYYGAFIKKNPPGMDDQLWLVMEFCGAGSVTDLIKNTKGNTLKEEWIAYICREILRGLSHLHQHKVIHRDIKGQNVLLTENAEVKLVDFGVSAQLDRTVGRRNTFIGTPYWMAPEVIACDENPDATYDFKSDLWSLGITAIEMAEGAPPLCDMHPMRALFLIPRNPAPRLKSKKWSKKFQSFIESCLVKNHSQRPATEQLMKHPFIRDQPNERQVRIQLKDHIDRTKKKRGEKDETEYEYSGSEEEEEENDSGEPSSILNLPGESTLRRDFLRLQLANKERSEALRRQQLEQQQRENEEHKRQLLAERQKRIEEQKEQRRRLEEQQRREKELRKQQEREQRRHYEEQMRREEERRRAEHEQEYKRKQLEEQRQAERLQRQLKQERDYLVSLQHQRQEQRPVEKKPLYHYKEGMSPSEKPAWAKEVEERSRLNRQSSPAMPHKVANRISDPNLPPRSESFSISGVQPARTPPMLRPVDPQIPHLVAVKSQGPALTASQSVHEQPTKGLSGFQEALNVTSHRVEMPRQNSDPTSENPPLPTRIEKFDRSSWLRQEEDIPPKVPQRTTSISPALARKNSPGNGSALGPRLGSQPIRASNPDLRRTEPILESPLQRTSSGSSSSSSTPSSQPSSQGGSQPGSQAGSSERTRVRANSKSEGSPVLPHEPAKVKPEESRDITRPSRPADLTALAKELRELRIEETNRPMKKVTDYSSSSEESESSEEEEEDGESETHDGTVAVSDIPRLIPTGAPGSNEQYNVGMVGTHGLETSHADSFSGSISREGTLMIRETSGEKKRSGHSDSNGFAGHINLPDLVQQSHSPAGTPTEGLGRVSTHSQEMDSGTEYGMGSSTKASFTPFVDPRVYQTSPTDEDEEDEESSAAALFTSELLRQEQAKLNEARKISVVNVNPTNIRPHSDTPEIRKYKKRFNSEILCAALWGVNLLVGTENGLMLLDRSGQGKVYNLINRRRFQQMDVLEGLNVLVTISGKKNKLRVYYLSWLRNRILHNDPEVEKKQGWITVGDLEGCIHYKVVKYERIKFLVIALKNAVEIYAWAPKPYHKFMAFKSFADLQHKPLLVDLTVEEGQRLKVIFGSHTGFHVIDVDSGNSYDIYIPSHIQGNITPHAIVILPKTDGMEMLVCYEDEGVYVNTYGRITKDVVLQWGEMPTSVAYIHSNQIMGWGEKAIEIRSVETGHLDGVFMHKRAQRLKFLCERNDKVFFASVRSGGSSQVFFMTLNRNSMMNW

SEQ ID NO: 67275 - protein, 1268 aa, Homo sapiens
MASDSPARSLDEIDLSALRDPAGIFELVELVGNGTYGQVYKGRHVKTGQLAAIKVMDVTGDEEEEIKQEINMLKKYSHHRNIATYYGAFIKKNPPGMDDQLWLVMEFCGAGSVTDLIKNTKGNTLKEEWIAYICREILRGLSHLHQHKVIHRDIKGQNVLLTENAEVKLVDFGVSAQLDRTVGRRNTFIGTPYWMAPEVIACDENPDATYDFKSDLWSLGITAIEMAEGAPPLCDMHPMRALFLIPRNPAPRLKSKKWSKKFQSFIESCLVKNHSQRPATEQLMKHPFIRDQPNERQVRIQLKDHIDRTKKKRGEKDETEYEYSGSEEEEEENDSGEPSSILNLPGESTLRRDFLRLQLANKERSEALRRQQLEQQQRENEEHKRQLLAERQKRIEEQKEQRRRLEEQQRREKELRKQQEREQRRHYEEQMRREEERRRAEHEQEYKRKQLEEQRQAERLQRQLKQERDYLVSLQHQRQEQRPVEKKPLYHYKEGMSPSEKPAWAKEIPHLVAVKSQGPALTASQSVHEQPTKGLSGFQEALNVTSHRVEMPRQNSDPTSENPPLPTRIEKFDRSSWLRQEEDIPPKVPQRTTSISPALARKNSPGNGSALGPRLGSQPIRASNPDLRRTEPILESPLQRTSSGSSSSSSTPSSQPSSQGGSQPGSQAGSSERTRVRANSKSEGSPVLPHEPAKVKPEESRDITRPSRPADLTALAKELRELRIEETNRPMKKVTDYSSSSEESESSEEEEEDGESETHDGTVAVSDIPRLIPTGAPGSNEQYNVGMVGTHGLETSHADSFSGSISREGTLMIRETSGEKKRSGHSDSNGFAGHINLPDLVQQSHSPAGTPTEGLGRVSTHSQEMDSGTEYGMGSSTKASFTPFVDPRVYQTSPTDEDEEDEESSAAALFTSELLRQEQAKLNEARKISVVNVNPTNIRPHSDTPEIRKYKKRFNSEILCAALWGVNLLVGTENGLMLLDRSGQGKVYNLINRRRFQQMDVLEGLNVLVTISGKKNKLRVYYLSWLRNRILHNDPEVEKKQGWITVGDLEGCIHYKVVKYERIKFLVIALKNAVEIYAWAPKPYHKFMAFKSFADLQHKPLLVDLTVEEGQRLKVIFGSHTGFHVIDVDSGNSYDIYIPSHIQGNITPHAIVILPKTDGMEMLVCYEDEGVYVNTYGRITKDVVLQWGEMPTSVAYIHSNQIMGWGEKAIEIRSVETGHLDGVFMHKRAQRLKFLCERNDKVFFASVRSGGSSQVFFMTLNRNSMMNW

SEQ ID NO: 67276 - protein, 1305 aa, Homo sapiens
MASDSPARSLDEIDLSALRDPAGIFELVELVGNGTYGQVYKGRHVKTGQLAAIKVMDVTGDEEEEIKQEINMLKKYSHHRNIATYYGAFIKKNPPGMDDQLWLVMEFCGAGSVTDLIKNTKGNTLKEEWIAYICREILRGLSHLHQHKVIHRDIKGQNVLLTENAEVKLVDFGVSAQLDRTVGRRNTFIGTPYWMAPEVIACDENPDATYDFKSDLWSLGITAIEMAEGAPPLCDMHPMRALFLIPRNPAPRLKSKKWSKKFQSFIESCLVKNHSQRPATEQLMKHPFIRDQPNERQVRIQLKDHIDRTKKKRGEKDETEYEYSGSEEEEEENDSGEPSSILNLPGESTLRRDFLRLQLANKERSEALRRQQLEQQQRENEEHKRQLLAERQKRIEEQKEQRRRLEEQQRREKELRKQQEREQRRHYEEQMRREEERRRAEHEQEYIRRQLEEEQRQLEILQQQLLHEQALLLEYKRKQLEEQRQAERLQRQLKQERDYLVSLQHQRQEQRPVEKKPLYHYKEGMSPSEKPAWAKEIPHLVAVKSQGPALTASQSVHEQPTKGLSGFQEALNVTSHRVEMPRQNSDPTSENPPLPTRIEKFDRSSWLRQEEDIPPKVPQRTTSISPALARKNSPGNGSALGPRLGSQPIRASNPDLRRTEPILESPLQRTSSGSSSSSSTPSSQPSSQGGSQPGSQAGSSERTRVRANSKSEGSPVLPHEPAKVKPEESRDITRPSRPASYKKAIDEDLTALAKELRELRIEETNRPMKKVTDYSSSSEESESSEEEEEDGESETHDGTVAVSDIPRLIPTGAPGSNEQYNVGMVGTHGLETSHADSFSGSISREGTLMIRETSGEKKRSGHSDSNGFAGHINLPDLVQQSHSPAGTPTEGLGRVSTHSQEMDSGTEYGMGSSTKASFTPFVDPRVYQTSPTDEDEEDEESSAAALFTSELLRQEQAKLNEARKISVVNVNPTNIRPHSDTPEIRKYKKRFNSEILCAALWGVNLLVGTENGLMLLDRSGQGKVYNLINRRRFQQMDVLEGLNVLVTISGKKNKLRVYYLSWLRNRILHNDPEVEKKQGWITVGDLEGCIHYKVVKYERIKFLVIALKNAVEIYAWAPKPYHKFMAFKSFADLQHKPLLVDLTVEEGQRLKVIFGSHTGFHVIDVDSGNSYDIYIPSHIQGNITPHAIVILPKTDGMEMLVCYEDEGVYVNTYGRITKDVVLQWGEMPTSVAYIHSNQIMGWGEKAIEIRSVETGHLDGVFMHKRAQRLKFLCERNDKVFFASVRSGGSSQVFFMTLNRNSMMNW

SEQ ID NO: 67277 - protein, 1312 aa, Homo sapiens
MASDSPARSLDEIDLSALRDPAGIFELVELVGNGTYGQVYKGRHVKTGQLAAIKVMDVTGDEEEEIKQEINMLKKYSHHRNIATYYGAFIKKNPPGMDDQLWLVMEFCGAGSVTDLIKNTKGNTLKEEWIAYICREILRGLSHLHQHKVIHRDIKGQNVLLTENAEVKIVDFGVSAQLDRTVGRRNTFIGTPYWMAPEVIACDENPDATYDFKSDLWSLGITAIEMAEGAPPLCDMHPMRALFLIPRNPAPRLKSKKWSKKFQSFIESCLVKNHSQRPATEQLMKHPFIRDQPNERQVRIQLKDHIDRTKKKRGEKDETEYEYSGSEEEEEENDSGEPSSILNLPGESTLRRDFLRLQLANKERSEALRRQQLEQQQRENEEHKRQLLAERQKRIEEQKEQRRRLEEQQRREKELRKQQEREQRRHYEEQMRREEERRRAEHEQEYIRRQLEEEQRQLEILQQQLLHEQALLLEYKRKQLEEQRQAERLQRQLKQERDYLVSLQHQRQEQRPVEKKPLYHYKEGMSPSEKPAWAKEIPHLVAVKSQGPALTASQSVHEQPTKGLSGFQEALNVTSHRVEMPRQNSDPTSENPPLPTRIEKFDRSSWLRQEEDIPPKVPQRTTSISPALARKNSPGNGSALGPRLGSQPIRASNPDLRRTEPILESPLQRTSSGSSSSSSTPSSQPSSQGGSQPGSQAGSSERTRVRANSKSEGSPVLPHEPAKVKPEESRDITRPSRPAVSAFLSKSFELLIYQDLTALAKELRELRIEETNRPMKKVTDYSSSSEESESSEEEEEDGESETHDGTVAVSDIPRLIPTGAPGSNEQYNVGMVGTHGLETSHADSFSGSISREGTLMIRETSGEKKRSGHSDSNGFAGHINLPDLVQQSHSPAGTPTEGLGRVSTHSQEMDSGTEYGMGSSTKASFTPFVDPRVYQTSPTDEDEEDEESSAAALFTSELLRQEQAKLNEARKISVVNVNPTNIRPHSDTPEIRKYKKRFNSEILCAALWGVNLLVGTENGLMLLDRSGQGKVYNLINRRRFQQMDVLEGLNVLVTISGKKNKLRVYYLSWLRNRILHNDPEVEKKQGWITVGDLEGCIHYKVVKYERIKFLVIALKNAVEIYAWAPKPYHKFMAFKSFADLQHKPLLVDLTVEEGQRLKVIFGSHTGFHVIDVDSGNSYDIYIPSHIQGNITPHAIVILPKTDGMEMLVCYEDEGVYVNTYGRITKDVVLQWGEMPTSVAYIHSNQIMGWGEKAIEIRSVETGHLDGVFMHKRAQRLKFLCERNDKVFFASVRSGGSSQVFFMTLNRNSMMNW

SEQ ID NO: 67278 - protein, 574 aa, Homo sapiens
MPPQLQETRMNRSIPVEVDESEPYPSQLLKPIPEYSPEEESEPPAPNIRNMAPNSLSAPTMLHNSSGDFSQAHSTLKLANHQRPVSRQVTCLRTQVLEDSEDSFCRRHPGLGKAFPSGCSAVSEPASESVVGALPAEHQFSFMEKRNQWLVSQLSAASPDTGHDSDKSDQSLPNASADSLGGSQEMVQRPQPHRNRAGLDLPTIDTGYDSQPQDVLGIRQLERPLPLTSVCYPQDLPRPLRSREFPQFEPQRYPACAQMLPPNLSPHAPWNYHYHCPGSPDHQVPYGHDYPRAAYQQVIQPALPGQPLPGASVRGLHPVQKVILNYPSPWDHEERPAQRDCSFPGLPRHQDQPHHQPPNRAGAPGESLECPAELRPQVPQPPSPAAVPRPPSNPPARGTLKTSNLPEELRKVFITYSMDTAMEVVKFVNFLLVNGFQTAIDIFEDRIRGIDIIKWMERYLRDKTVMIIVAISPKYKQDVEGAESQLDEDEHGLHTKYIHRMMQIEFIKQGSMNFRFIPVLFPNAKKEHVPTWLQNTHVYSWPKNKKNILLRLLREEEYVAPPRGPLPTLQVVPL

SEQ ID NO: 67279 - protein, 564 aa, Homo sapiens
MNRSIPVEVDESEPYPSQLLKPIPEYSPEEESEPPAPNIRNMAPNSLSAPTMLHNSSGDFSQAHSTLKLANHQRPVSRQVTCLRTQVLEDSEDSFCRRHPGLGKAFPSGCSAVSEPASESVVGALPAEHQFSFMEKRNQWLVSQLSAASPDTGHDSDKSDQSLPNASADSLGGSQEMVQRPQPHRNRAGLDLPTIDTGYDSQPQDVLGIRQLERPLPLTSVCYPQDLPRPLRSREFPQFEPQRYPACAQMLPPNLSPHAPWNYHYHCPGSPDHQVPYGHDYPRAAYQQVIQPALPGQPLPGASVRGLHPVQKVILNYPSPWDHEERPAQRDCSFPGLPRHQDQPHHQPPNRAGAPGESLECPAELRPQVPQPPSPAAVPRPPSNPPARGTLKTSNLPEELRKVFITYSMDTAMEVVKFVNFLLVNGFQTAIDIFEDRIRGIDIIKWMERYLRDTVMIIVAISPKYKQDVEGAESQLDEDEHGLHTKYIHRMMQIEFIKQGSMNFRFIPVLFPNAKKEHVPTWLQNTHVYSWPKNKKNILLRLLREEEYVAPPRGPLPTLQVVPL

SEQ ID NO: 67280 - protein, 565 aa, Homo sapiens
MNRSIPVEVDESEPYPSQLLKPIPEYSPEEESEPPAPNIRNMAPNSLSAPTMLHNSSGDFSQAHSTLKLANHQRPVSRQVTCLRTQVLEDSEDSFCRRHPGLGKAFPSGCSAVSEPASESVVGALPAEHQFSFMEKRNQWLVSQLSAASPDTGHDSDKSDQSLPNASADSLGGSQEMVQRPQPHRNRAGLDLPTIDTGYDSQPQDVLGIRQLERPLPLTSVCYPQDLPRPLRSREFPQFEPQRYPACAQMLPPNLSPHAPWNYHYHCPGSPDHQVPYGHDYPRAAYQQVIQPALPGQPLPGASVRGLHPVQKVILNYPSPWDHEERPAQRDCSFPGLPRHQDQPHHQPPNRAGAPGESLECPAELRPQVPQPPSPAAVPRPPSNPPARGTLKTSNLPEELRKVFITYSMDTAMEVVKFVNFLLVNGFQTAIDIFEDRIRGIDIIKWMERYLRDKTVMIIVAISPKYKQDVEGAESQLDEDEHGLHTKYIHRMMQIEFIKQGSMNFRFIPVLFPNAKKEHVPTWLQNTHVYSWPKNKKNILLRLLREEEYVAPPRGPLPTLQVVPL

SEQ ID NO: 67281 - protein, 574 aa, Homo sapiens
MAPQLEETRMNRSIPVEVDESEPYPSQLLKPIPEYSPEEESEPPAPNIRNMAPNSLSAPTMLHNSSGDFSQAHSTLKLANHQRPVSRQVTCLRTQVLEDSEDSFCRRHPGLGKAFPSGCSAVSEPASESVVGALPAEHQFSFMEKRNQWLVSQLSAASPDTGHDSDKSDQSLPNASADSLGGSQEMVQRPQPHRNRAGLDLPTIDTGYDSQPQDVLGIRQLERPLPLTSVCYPQDLPRPLRSREFPQFEPQRYPACAQMLPPNLSPHAPWNYHYHCPGSPDHQVPYGHDYPRAAYQQVIQPALPGQPLPGASVRGLHPVQKVILNYPSPWDHEERPAQRDCSFPGLPRHQDQPHHQPPNRAGAPGESLECPAELRPQVPQPPSPAAVPRPPSNPPARGTLKTSNLPEELRKVFITYSMDTAMEVVKFVNFLLVNGFQTAIDIFEDRIRGIDIIKWMERYLRDKTVMIIVAISPKYKQDVEGAESQLDEDEHGLHTKYIHRMMQIEFIKQGSMNFRFIPVLFPNAKKEHVPTWLQNTHVYSWPKNKKNILLRLLREEEYVAPPRGPLPTLQVVPL

SEQ ID NO: 67282 - protein, 153 aa, Homo sapiens
MEVVKFVNFLLVNGFQTAIDIFEDRIRGIDIIKWMERYLRDKTVMIIVAISPKYKQDVEGAESQLDEDEHGLHTKYIHRMMQIEFIKQGSMNFRFIPVLFPNAKKEHVPTWLQNTHVYSWPKNKKNILLRLLREEEYVAPPRGPLPTLQVVPL

SEQ ID NO: 67283 - protein, 109 aa, Homo sapiens
MIIVAISPKYKQDVEGAESQLDEDEHGLHTKYIHRMMQIEFIKQGSMNFRFIPVLFPNAKKEHVPTWLQNTHVYSWPKNKKNILLRLLREEEYVAPPRGPLPTLQVVPL

SEQ ID NO: 67284 - protein, 531 aa, Homo sapiens
MISPDPRPSPGLARWAESYEAKCERRQEIRESRRCRPNVTTCRQVGKTLRIQQREQLQRARLQQFFRRRNLELEEKGKAQHPQAREQGPSRRPGQVTGTSSEVFPAQHPPPSGICRDLSDHLSSQAGGLPPQDTPIKKPPKHHRGTQTKAEGPTIKNDASQQTNYGVAVLDKEIIQLSDYLKEALQRELVLKQKMVILQDLLSTLIQASDSSWKGQLNEDKLKGKLRSLENQLYTCTQKYSPWGMKKVLLEMEDQKNSYEQKAKESLQKVLEEKMNAEQQLQSTQRSLALAEQKCEEWRSQYEALKEDWRTLGTQHRELESQLHVLQSKLQGADSRDLQMNQALRFLENEHQQLQAKIECLQGDRDLCSLDTQDLQDQLKRSEAEKLTLVTRVQQLQGLLQNQSLQLQEQEKLLTKKDQALPVWSPKSFPNEVEPEGTGKEKDWDLRDQLQKKTLQLQAKEKECRELHSELDNLSDEYLSCLRKLQHCREELNQSQQLPPRRQCGRWLPVLMVVIAAALAVFLANKDNLMI

SEQ ID NO: 67285 - protein, 182 aa, Homo sapiens
MKKVLLEMEDQKNSYEQKAKESLQKVLEEKMNAEQQLQSTQRSLALAEQKCEEWRSQYEALKEDWRTLGTQHRELESQLHVLQSKLQGADSRDLQMNQALRFLENEHQQLQAKIECLQGDRDLCSLDTQDLQDQLKRSEAEKLTLVTRVQQLQGLLQNQSLQLQEQEKLLTKKGQQIYYHKF

SEQ ID NO: 67286 - protein, 551 aa, Homo sapiens
MISPDPRPSPGLARWAESYEAKCERRQEIRESRRCRPNVTTCRQVGKTLRIQQREQLQRARLQQFFRRRNLELEEKGKAQHPQAREQGPSRRPGQVTVLKEPLSCARRISSPREQVTGTSSEVFPAQHPPPSGICRDLSDHLSSQAGGLPPQDTPIKKPPKHHRGTQTKAEGPTIKNDASQQTNYGVAVLDKEIIQLSDYLKEALQRELVLKQKMVILQDLLSTLIQASDSSWKGQLNEDKLKGKLRSLENQLYTCTQKYSPWGMKKVLLEMEDQKNSYEQKAKESLQKVLEEKMNAEQQLQSTQRSLALAEQKCEEWRSQYEALKEDWRTLGTQHRELESQLHVLQSKLQGADSRDLQMNQALRFLENEHQQLQAKIECLQGDRDLCSLDTQDLQDQLKRSEAEKLTLVTRVQQLQGLLQNQSLQLQEQEKLLTKKDQALPVWSPKSFPNEVEPEGTGKEKDWDLRDQLQKKTLQLQAKEKECRELHSELDNLSDEYLSCLRKLQHCREELNQSQQLPPRRQCGRWLPVLMVVIAAALAVFLANKDNLMI

SEQ ID NO: 67287 - protein, 551 aa, Homo sapiens; identical to SEQ ID NO: 67286

SEQ ID NO: 67288 - protein, 531 aa, Homo sapiens; identical to SEQ ID NO: 67284

SEQ ID NO: 67289 - protein, 404 aa, Homo sapiens
MISPDPRPSPGLARWAESYEAKCERRQEIRESRRCRPNVTTCRQVGKTLRIQQREQLQRARLQQFFRRRNLELEEKGKAQHPQAREQGPSRRPGQVTGTSSEVFPAQHPPPSGICRDLSDHLSSQAGGLPPQDTPIKKPPKHHRGTQTKAEGPTIKNDASQQTNYGVAVLDKEIIQLSDYLKEALQRELVLKQKMVILQDLLSTLIQASDSSWKGQLNEDKLKGKLRSLENQLYTCTQKYSPWGMKKVLLEMEDQKNSYEQKAKESLQKVLEEKMNAEQQLQSTQRSLALAEQKCEEWRSQYEALKEDWRTLGTQHRELESQLHVLQSKLQGADSRDLQMNQALRFLENEHQQLQAKIECLQGDRDLCSLDTQDLQDQLKRSEAEKLTLVTRVQQLQEAAGWTT

SEQ ID NO: 67290 - protein, 320 aa, Homo sapiens
MISPDPRPSPGLARWAESYEAKCERRQEIRESRRCRPNVTTCRQVGKTLRIQQRELEEKGKAQHPQAREQGPSRRPGQVTVLKEPLSCARRISSPREQVTGTSSEVFPAQHPPPSGICRDLSDHLSSQAGGLPPQDTPIKKPPKHHRGTQTKAEGPTIKNDASQQTNYGVAVLDKEIIQLSDYLKEALQRELVLKQKMVILQDLLSTLIQASDSSWKGQLNEDKLKGKLRSLENQLYTCTQKYSPWGMKKVLLEMEDQKNSYEQKAKESLQKVLEEKMNAEQQLQSTQVWGCHIDMGLGTPGSLGNKGSQLHNSLEPSPL

SEQ ID NO: 67291 - protein, 26 aa, Homo sapiens
MISPDPRPSPGLARWAESYEAKCERR

SEQ ID NO: 67292 - protein, 556 aa, Homo sapiens
MQKFIEADYYELDWYYEECSDVLCAERVGQMTKTYNDIDAVTRLLEEKERDLELAARIGQSLLKKNKTLTERNELLEEQVEHIREEVSQLRHELSMKDELLQFYTSAAEESEPESVCSTPLKRNESSSSVQNYFHLDSLQKKLKDLEEENVVLRSEASQLKTETITYEEKEQQLVNDCVKELRDANVQIASISEELAKKTEDAARQQEEITHLLSQIVDLQKKAKACAVENEELVQHLGAAKDAQRQLTAELRELEDKYAECMEMLHEAQEELKNLRNKTMPNTTSRRYHSLGLFPMDSLAAEIEGTMRKELQLEEAESPDITHQKRVFETVRNINQVVKQRSLTPSPMNIPGSNQSSAMNSLLSSCVSTPRSSFYGSDIGNVVLDNKTNSIILETEAADLGNDERSKKPGTPGTPGSHDLETALRRLSLRRENYLSERRFFEEEQERKLQELAEKGELRSGSLTPTESIMSLGTHSRFSEFTGFSGMSFSSRSYLPEKLQIVKPLEGDHAGPRPLSVLLGDSLWSLIHLRKAGHLCHAYSFFFRDSHPRCWFEFL

SEQ ID NO: 67293 - protein, 145 aa, Homo sapiens
MTVHNLYLFDRNGVCLHYSEWHRKKQAGIPKEEEYKLMYGMLFSIRSFVSKMSPLDMKDGFLAFQTSRYKLHYYETPTGIKVVMNTDLGVGPIRDVLHHIYSALYVELVVKNPLCPLGQTVQSELFRSRLDSYVRSLPFFSARAG

SEQ ID NO: 67294 - protein, 145 aa, Homo sapiens; identical to SEQ ID NO: 67293

SEQ ID NO: 67295 - protein, 1133 aa, Homo sapiens
MSPTQWDFPVELCCRPMAFVTLTGLDVVYNAVHRAVWDAFCANRRADRVPISFKVLPGDHEYPKCRPKRTSYEWYIPKGILKTGWMNKHLNLVPALVVVFYELDWDEPQWKEKQSECATRVEIVRQSLQGRNTKVAVVLIQKKTPLPPGEDVIASERAAALCNACELSGKSLFVLPHTDHLVGYIIRLENAFYEHAQTYYYTEIRRVKSHKEFLNKTTHQLLFVRHQFKIAFFSELKQDTQNALKNYRTAYNLVHELRAHETNILEIKTMAGFINYKICRLCFQHNTPLDAIAQFRKHIDLCKKKIGSAELSFEHDAWMSKQFQAFGDLFDEAIKLGLTAIQTQNPGFYYQQAAYYAQERKQLAKTLCNHEASVMYPNPDPLETQTGVLDFYGQRSWRQGILSFDLSDPEKEKVGILAIQLKERNVVHSEIIITLLSNAVAQFKKYKCPRMKSHLMVQMGEEYYYAKDYTKALKLLDYVMCDYRSEGWWTLLTSVLTTALKCSYLMAQLKDYITYSLELLGRASTLKDDQKSRIEKNLINVLMNESPDPEPDCDILAVKTAQKLWADRISLAGSNIFTIGVQDFVPFVQCKAKFHAPSFHVDVPVQFDIYLKADCPHPIRFSKLCVSFNNQEYNQFCVIEEASKANEVLENLTQGKMCLVPGKTRKLLFKFVAKTEDVGKKIEITSVDLALGNETGRCVVLNWQGGGGDAASSQEALQAARSFKRRPKLPDNEVHWDSIIIQASTMIISRVPNISVHLLHEPPALTNEMYCLVVTVQSHEKTQIRDVKLTAGLKPGQDANLTQKTHVTLHGTELCDESYPALLTDIPVGDLHPGEQLEKMLYVRCGTVGSRMFLVYVSYLINTTVEEKEIVCKCHKDETVTIETVFPFDVAVKFVSTKFEHLERVYADIPFLLMTDLLSASPWALTIVSSELQLAPSMTTVDQLESQVDNVILQTGESASECFCLQCPSLGNIEGGVATGHYIISWKRTSAMENIPIITTVITLPHVIVENIPLHVNADLPSFGRVRESLPVKYHLQNKTDLVQDVEISVEPSDAFMFSGLKQIRLRILPGTEQEMLYNFYPLMAGYQQLPSLNINLLRFPNFTNQLLRRFIPTSIFVKPQGRLMDDTSIAAA

SEQ ID NO: 67296 - protein, 1086 aa, Homo sapiens
MSPTQWDFPVELCCRPMAFVTLTGLDVVYNAVHRAVWDAFCANRRADRVPISFKVLPGDHEYPKCRPKRTSYEWYIPKGILKTGWMNKHLNLVPALVVVFYELDWDEPQWKEKQSECATRVEIVRQSLQGRNTKVAVVLIQKKTPLPPGEDVIASERAAALCNACELSGKSLFVLPHTDHLVGYIIRLENAFYEHAQTYYYTEIRRVKSHKEFLNKTTHQLLFVRHQFKIAFFSELKQDTQNALKNYRTAYNLVHELRAHETNILEIKTMAGFINYKICRLCFQHNTPLDAIAQFRKHIDLCKKKIGSAELSFEHDAWMSKQFQAFGDLFDEAIKLGLTAIQTQNPGFYYQQAAYYAQERKQLAKTLCNHEASVMYPNPDPLETQTGVLDFYGQRSWRQGILSFDLSDPEKEKVGILAIQLKERNVVHSEIIITLLSNAVAQFKKYKCPRMKSHLMVQMGEEYYYAKDYTKALKLLDYVMCDYRSEGWWTLLTSVLTTALKCSYLMAQLKDYITYSLELLGRASTLKDDQKSRIEKNLINVLMNESPDPEPDCDILAVKTAQKLWADRISLAGSNIFTIGVQDFVPFVQCKAKFHAPSFHVDVPVQFDIYLKADCPHPIRFSKLCVSFNNQEYNQFCVIEEASKANEVLENLTQGKMCLVPGKTRKLLFKFVAKTEDVGKKIEITSVDLALGNETGRCVVLNWQGGGGDAASSQEALQAARSFKRRPKLPDNEVHWDSIIIQASTMIISRVPNISVHLLHEPPALTNEMYCLVVTVQSHEKTQIRDVKLTAGLKPGQDANLTQKTHVTLHGTELCDESYPALLTDIPVGDLHPGEQLEKMLYVRCGTVGSRMFLVYVSYLINTTVEEKEIVCKCHKDETVTIETVFPFDVAVKFVSTKFEHLERVYADIPFLLMTDLLSASPWALTIVSSELQLAPSMTTVDQLESQVDNVILQTGESASECFCLQCPSLGNIEGGVATGHYIISWKRTSAMENIPIITTVITLPHVIVENIPLHVNADLPSFGRVRESLPVKYHLQNKTDLVQDVEISVEPSDAFMFSGLKQIRLPAQAFYTYQYFCQATGSTHG

SEQ ID NO: 67297 - protein, 1018 aa, Homo sapiens
MSPTQWDFPVELCCRPMAFVTLTGLDVVYNAVHRAVWDAFCANRRADRVPISFKVLPGDHEYPKCRPKRTSYEWYIPKGILKTGWMNKHLNLVPALVVVFYELDWDEPQWKEKQSECATRVEIVRQSLQGRNTKVAVVLIQKKTPLPPGEDVIASERAAALCNACELSGKSLFVLPHTDHLVGYIIRLENAFYEHAQTYYYTEIRRVKSHKEFLNKTTHQLLFVRHQFKIAFFSELKQDTQNALKNYRTAYNLVHELRAHETNILEIKTMAGFINYKICRLCFQHNTPLDAIAQFRKHIDLCKKKIGSAELSFEHDAWMSKQFQAFGDLFDEAIKLGLTAIQTQNPGFYYQQAAYYAQERKQLAKTLCNHEASVMYPNPDPLETQTGVLDFYGQRSWRQGILSFDLSDPEKEKVGILAIQLKERNVVHSEIIITLLSNAVAQFKKYKCPRMKSHLMVQMGEEYYYAKDYTKALKLLDYVMCDYRSEGWWTLLTSVLTTALKCSYLMAQLKDYITYSLELLGRASTLKDDQKSRIEKNLINVLMNESPDPEPDCDILAVKTAQKLWADRISLAGSNIFTIGVQDFVPFVQCKAKFHAPSFHVDVPVQFDIYLKADCPHPIRFSKLCVSFNNQEYNQFCVIEEASKANEVLENLTQGKMCLVPGKTRKLLFKFVAKTEDVGKKIEITSVDLALGNETGRCVVLNWQGGGGDAASSQEALQAARSFKRRPKLPDNEVHWDSIIIQASTMIISRVPNISVHLLHEPPALTNEMYCLVVTVQSHEKTQIRDVKLTAGLKPGQDANLTQKTHVTLHGTELCDESYPALLTDIPVGDLHPGEQLEKMLYVRCGTVGSRMFLVYVSYLINTTVEEKEIVCKCHKDETVTIETVFPFDVAVKFVSTKFEHLERVYADIPFLLMTDLLSASPWALTIVSSELQLAPSMTTVDQLESQVDNVILQTGESASALYYLLEKDLSNGEYPHHHNCHHSAARDCGEYPSPCECRSAVIWACQRVVTCQVSPTE

SEQ ID NO: 67298 - protein, 696 aa, Homo sapiens
MEDAGGGEEQGLLFQEETIDLGGDEFGSEENETASEGSSPLADKLNEHMMESVLISDSPNSEGDAGDLGRVRDEAEPGGEGDPGPEPAGTPSPSGEADGDCAPEDAAPSSGGAPRQDAAREVPGSEAARPEQEPPVAEPVPVCTIFSQRAPPASGDGFEPQMVKSPSFGGASEASARTPPQVVQPSPSLSTFFGDTAASHSLASDFFDSFTTSAFISVSNPGAGSPAPASPPPLAVPGTEGRPEPVAMRGPQAAAPPASPEPFAHIQAVFAGSDDPFATALSMSEMDRRNDAWLPGEATRGVLRAVATQQRGAVFVDKENLTMPGLRFDNIQGDAVKDLMLRFLGEKAAAKRQVLNADSVEQSFVGLKQLISCRNWRAAVDLCGRLLTAHGQGYGKSGLLTSHTTDSLQLWFVRLALLVKLGLFQNAEMEFEPFGNLDQPDLYYEYYPHVYPGRRGSMVPFSMRILHAELQQYLGNPQESLDRLHKVKTVCSKILANLEQGLAEDGGMSSVTQEGRQGCSYLVASIRLWRSRLGRVMYSMANCLLLMKDYVLAVEAYHSVIKYYPEQEPQLLSGIGRISLQIGDIKTAEKYFQDVEKVTQKLDGLQGKIMVLMNSAFLHLGQNNFAEAHRFFTEILRMDPRNAVQMLSASHPTGKEPSPKDAEEHPEGHRDSAEPGPARPMVPQRAPPGPALCAQP

SEQ ID NO: 67299 - protein, 735 aa, Homo sapiens
MEDAGGGEETPAPEAPHPPQLAPPEEQGLLFQEETIDLGGDEFGSEENETASEGSSPLADKLNEHMMESVLISDSPNSEGDAGDLGRVRDEAEPGGEGDPGPEPAGTPSPSGEADGDCAPEDAAPSSGGAPRQDAAREVPGSEAARPEQEPPVAEPVPVCTIFSQRAPPASGDGFEPQMVKSPSFGGASEASARTPPQVVQPSPSLSTFFGDTAASHSLASDFFDSFTTSAFISVSNPGAGSPAPASPPPLAVPGTEGRPEPVAMRGPQAAAPPASPEPFAHIQAVFAGSDDPFATALSMSEMDRRNDAWLPGEATRGVLRAVATQQRGAVFVDKENLTMPGLRFDNIQGDAVKDLMLRFLGEKAAAKRQVLNADSVEQSFVGLKQLISCRNWRAAVDLCGRLLTAHGQGYGKSGLLTSHTTDSLQLWFVRLALLVKLGLFQNAEMEFEPFGNLDQPDLYYEYYPHVYPGRRGSMVPFSMRILHAELQQYLGNPQESLDRLHKVKTVCSKILANLEQGLAEDGGMSSVTQEGRQASIRLWRSRLGRVMYSMANCLLLMKDYVLAVEAYHSVIKYYPEQEPQLLSGIGRISLQIGDIKTAEKYFQDVEKVTQKLDGLQGKIMVLMNSAFLHLGQNNFAEAHRFFTEILRMDPRNAVANNNAAVCLLYLGKLKDSLRQLEAMVQQDPRHYLHESVLFNLTTMYELESSRSMQKKQALLEAVAGKEGDSFNTQCLKLA

SEQ ID NO: 67300 - protein, 735 aa, Homo sapiens; identical to SEQ ID NO: 67299

SEQ ID NO: 67301 - protein, 140 aa, Homo sapiens [sequence omitted]

SEQ ID NO: 67302 - protein, 140 aa, Homo sapiens [sequence omitted]

SEQ ID NO: 67303 - protein, 140 aa, Homo sapiens [sequence omitted]

SEQ ID NO: 67304 - protein, 140 aa, Homo sapiens [sequence omitted]

SEQ ID NO: 67305 - protein, 147 aa, Homo sapiens
MSGSFYFVIVGHHDNPVFEMEFLPAGKAESKDDHRHLNQFIAHAALDLVDENMWLSNNMYLKTVDKFNEWFVSAFVTAGHILTFLVKMRFIMLHDIRQEDGIKNFFTDVYDLYIKFSMNPFYEPNSPIRSSAFDRKVQFLGKKHLLS

SEQ ID NO: 67306 - protein, 174 aa, Homo sapiens
MSSWKQDRSGLRSTELNVLEYQPLCAVRSHILKTMSGSFYFVIVGHHDNPVFEMEFLPAGKAESKDDHRHLNQFIAHAALDLVDENMWLSNNMYLKTVDKFNEWFVSAFVTAGHMRFIMLHDIRQEDGIKNFFTDVYDLYIKFSMNPFYEPNSPIRSSAFDRKVQFLGKKHLLS

SEQ ID NO: 67307 - protein, 74 aa, Homo sapiens
MSGSFYFVIVGHHDNPVFEMEFLPAGKAESKDDHRHLNQFIAHAALDLVDENMWLSNNMYLKTVDKFNEWFVSA

SEQ ID NO: 67308 - protein, 140 aa, Homo sapiens
MAVCIAVIAKENYPLYIRSTPTENELKFHYMVHTSLDVVDEKISAMGKALVDQRELYLGLLYPTEDYKVYGYVTNSKVKFVMVVDSSNTALRDNEIRSMFRKLHNSYTDVMCNPFYNPGDRIQSSRAFDNMVTSMMIQVC

SEQ ID NO: 67309 - protein, 118 aa, Homo sapiens
MSRQANRGTESKKMSSELFTLTYGALVTQLCKDYENDEDVNKQLDKMGFNIGVRLIEDFLARSNVGRCHDFRETADVIAKERKMFLGKQNKTKRQAKLYDAVKERGAASCTDASPLLS

SEQ ID NO: 67310 - protein, 134 aa, Homo sapiens
MGFNIGVRLIEDFLARSNVGRCHDFRETADVIAKVAFKMYLGITPSITNWSPAGDEFSLILENNPLVDFVELPDNHSSLIYSNLLCGVLRGALEMVQMAVEAKFVQDTLKGDGVTEIRMRFIRRIEDNLPAGEE

SEQ ID NO: 67311 - protein, 134 aa, Homo sapiens; identical to SEQ ID NO: 67310

SEQ ID NO: 67312 - protein, 180 aa, Homo sapiens
MSRQANRGTESKKMSSELFTLTYGALVTQLCKDYENDEDVNKQLDKMGFNIGVRLIEDFLARSNVGRCHDFRETADVIAKVAFKMYLGITPSITNWSPAGDEFSLILENNPLVDFVELPDNHSSLIYSNLLCGVLRGALEMVQMAVEAKFVQDTLKGDGVTEIRMRFIRRIEDNLPAGEE

SEQ ID NO: 67313 - protein, 165 aa, Homo sapiens
MAIFSVYVVNKAGGLIYQLDSYAPRAEAEKTFSYPLDLLLKLHDERVLVAFGQRDGIRVGHAVLAINGMDVNGRYTADGKEMLETDTFKLHCYQTLTGIKFVVLADPRQAGIDSLLRKIYEIYSDFALKNPFYSLEMPIRCELFDQNLKLALEVAEKAGTFGPGS

SEQ ID NO: 67314 - protein, 219 aa, Homo sapiens
MAIFSVYVVNKAGGLIYQLDSYAPRAEAEKTFSYPLDLLLKLHDERVLVAFGQRDGIRVGHAVLAINGMDVNGRYTADGKEVLEYLGNPANYPVSIRFGRPRLTSNEKLMLASMFHSLFAIGSQLSPEQGSSGIEMLETDTFKLHCYQTLTGIKFVVLADPRQAGIDSLLRKIYEIYSDFALKNPFYSLEMPIRCELFDQNLKLALEVAEKAGTFGPGS

SEQ ID NO: 67315 - protein, 1435 aa, Homo sapiens
MAQCVQSVQELIPDSFVPCVAALCSDEAERLTRLNHLSFAELLKPFSRLTSEVHMRDPNNQLHVIKNLKIAVSNIVTQPPQPGAIRKLLNDVVSGSQPAEGLVANVITAGDYDLNISATTPWFESYRETFLQSMPALDHEFLNHYLACMLVASSSEAEPVEQFSKLSQEQHRIQHNSDYSYPKWFIPNTLKYYVLLHDVSAGDEQRAESIYEEMKQKYGTQGCYLLKINSRTSNRASDEQIPDPWSQYLQKNSIQNQESYEDGPCTITSNKNSDNNLLSLDGLDNEVKDGLPNNFRAHPLQLEQSSDPSNSIDGPDHLRSASSLHETKKGNTGIIHGACLTLTDHDRIRQFIQEFTFRGLLPHIEKTIRQLNDQLISRKGLSRSLFSATKKWFSGSKVPEKSINDLKNTSGLLYPPEAPELQIRKMADLCFLVQHYDLAYSCYHTAKKDFLNDQAMLYAAGALEMAAVSAFLQPGAPRPYPAHYMDTAIQTYRDICKNMVLAERCVLLSAELLKSQSKYSEAAALLIRLTSEDSDLRSALLLEQAAHCFINMKSPMVRKYAFHMILAGHRFSKAGQKKHALRCYCQAMQVYKGKGWSLAEDHINFTIGRQSYTLRQLDNAVSAFRHILINESKQSAAQQGAFLREYLYVYKNVSQLSPDGPLPQLPLPYINSSATRVFFGHDRRPADGEKQAATHVSLDQEYDSESSQQWRELEEQVVSVVNKGVIPSNFHPTQYCLNSYSDNSRFPLAVVEEPITVEVAFRNPLKVLLLLTDLSLLWKFHPKDFSGKDNEEVKQLVTSEPEMIGAEVISEFLINGEESKVARLKLFPHHIGELHILGVVYNLGTIQGSMTVDGIGALPGCHTGKYSLSMSVRGKQDLEIQGPRLNNTKEEKTSVKYGPDRRLDPIITEEMPLLEVFFIHFPTGLLCGEIRKAYVEFVNVSKCPLTGLKVVSKRPEFFTFGGNTAVLTPLSPSASENCSAYKTVVTDATSVCTALISSASSVDFGIGTGSQPEVIPVPLPDTVLLPGASVQLPMWLRGPDEEGVHEINFLFYYESVKKQPKIRHRILRHTAIICTSRSLNVRATVCRSNSLENEEGRGGNMLVFVDVENTNTSEAGVKEFHIVQVSSSSKHWKLQKSVNLSENKDTKLASREKGKFCFKAIRCEKEEAATQSSEKYTFADIIFGNEQIISSASPCADFFYRSLSSELKKPQAHLPVHTEKQSTEDAVRLIQKCSEVDLNIVILWKAYVVEDSKQLILEGQHHVILRTIGKEAFSYPQKQEPPEMELLKFFRPENITVSSRPSVEQLSSLIKTSLHYPESFNHPFHQKSLCLVPVTLLLSNCSKADVDVIVDLRHKTTSPEALEIHGSFTWLGQTQYKLQLKSQEIHSLQLKACFVHTGVYNLGTPRVFAKLSDQVTVFETSQQNSMPALIIISNV

SEQ ID NO: 67316 - protein, 1139 aa, Homo sapiens
MSVPDYMQCAEDHQTLLVVVQPVGIVSEENFFRIYKRICSVSQISVRDSQRVLYIRYRHHYPPENNEWGDFQTHRKVVGLITITDCFSAKDWPQTFEKFHVQKEIYGSTLYDSRLFVFGLQGEIVEQPRTDVAFYPNYEDCQTVEKRIEDFIESLFIVLESKRLDRATDKSGDKIPLLCVPFEKKDFVGLDTDSRHYKKRCQGRMRKHVGDLCLQAGMLQDSLVHYHMSVELLRSVNDFLWLGAALEGLCSASVIYHYPGGTGGKSGARRFQGSTLPAEAANRHRPGALTTNGINPDTSTEIGRAKNCLSPEDIIDKYKEAISYYSKYKNAGVIELEACIKAVRVLAIQKRSMEASEFLQNAVYINLRQLSEEEKIQRYSILSELYELIGFHRKSAFFKRVAAMQCVAPSIAEPGWRACYKLLLETLPGYSLSLDPKDFSRGTHRGWAAVQMRLLHELVYASRRMGNPALSVRHLSFLLQTMLDFLSDQEKKDVAQSLENYTSKCPGTMEPIALPGGLTLPPVPFTKLPIVRHVKLLNLPASLRPHKMKSLLGQNVSTKSPFIYSPIIAHNRGEERNKKIDFQWVQGDVCEVQLMVYNPMPFELRVENMGLLTSGVEFESLPAALSLPAESGLYPVTLVGVPQTTGTITVNGYHTTVFGVFSDCLLDNLPGIKTSGSTVEVIPALPRLQISTSLPRSAHSLQPSSGDEISTNVSVQLYNGESQQLIIKLENIGMEPLEKLEVTSKVLTTKEKLYGDFLSWKLEETLAQFPLQPGKVATFTINIKVKLDFSCQENLLQDLSDDGISVSGFPLSSPFRQVVRPRVEGKPVNPPESNKAGDYSHVKTLEAVLNFKYSGGPGHTEGYYRNLSLGLHVEVEPSVFFTRVSTLPATSTRQCHLLLDVFNSTEHELTVSTRSSEALILHAGECQRMAIQVDKFNFESFPESPGEKGQFANPKQLEEERREARGLEIHSKLGICWRIPSLKRSGEASVEGLLNQLVLEHLQLAPLQWDVLVDGQPCDREAVAACQVGDPVRLEVRLTNRSPRSVGPFALTVVPFQDHQNGVHNYDLHDTVSFVGSSTFYLDAVQPSGQSACLGALLFLYTGDFFLHIRFHEDSTSKELPPSWFCLPSVHVCALEAQA

SEQ ID NO: 67317 - protein, 1246 aa, Homo sapiens
MVPAGDQDRAPHRGKPAQAGARTSRASRALRSWRRSQAARATVTHPRGGHDRGSHGGYREGHRGCRRDPQWASAGPPPLSFTEEVKFELRALKDWDFKMSVPDYMQCAEDHQTLLVVVQPVGIVSEENFFRIYKRICSVSQISVRDSQRVLYIRYRHHYPPENNEWGDFQTHRKVVGLITITDCFSAKDWPQTFEKFHVQKEIYGSTLYDSRLFVFGLQGEIVEQPRTDVAFYPNYEDCQTVEKRIEDFIESLFIVLESKRLDRATDKSGDKIPLLCVPFEKKDFVGLDTDSRHYKKRCQGRMRKHVGDLCLQAGMLQDSLVHYHMSVELLRSVNDFLWLGAALEGLCSASVIYHYPGGTGGKSGARRFQGSTLPAEAANRHRPGAQEVLIDPGALTTNGINPDTSTEIGRAKNCLSPEDIIDKYKEAISYYSKYKNAGVIELEACIKAVRVLAIQKRSMEASEFLQNAVYINLRQLSEEEKIQRYSILSELYELIGFHRKSAFFKRVAAMQCVAPSIAEPGWRACYKLLLETLPGYSLSLDPKDFSRGTHRGWAAVQMRLLHELVYASRRMGNPALSVRHLSFLLQTMLDFLSDQEKKDVAQSLENYTSKCPGTMEPIALPGGLTLPPVPFTKLPIVRHVKLLNLPASLRPHKMKSLLGQNVSTKSPFIYSPIIAHNRGEERNKKIDFQWVQGDVCEVQLMVYNPMPFELRVENMGLLTSGVEFESLPAALSLPAESGLYPVTLVGVPQTTGTITVNGYHTTVFGVFSDCLLDNLPGIKTSGSTVEVIPALPRLQISTSLPRSAHSLQPSSGDEISTNVSVQLYNGESQQLIIKLENIGMEPLEKLEVTSKVLTTKEKLYGDFLSWKLEETLAQFPLQPGKVATFTINIKVKLDFSCQENLLQDLSDDGISVSGFPLSSPFRQVVRPRVEGKPVNPPESNKAGDYSHVKTLEAVLNFKYSGGPGHTEGYYRNLSLGLHVEVEPSVFFTRVSTLPATSTRQCHLLLDVFNSTEHELTVSTRSSEALILHAGECQRMAIQVDKFNFESFPESPGEKGQFANPKQLEEERREARGLEIHSKLGICWRIPSLKRSGEASVEGLLNQLVLEHLQLAPLQWDVLVDGQPCDREAVAACQVGDPVRLEVRLTNRSPRSVGPFALTVVPFQDHQNGVHNYDLHDTVSFVGSSTFYLDAVQPSGQSACLGALLFLYTGDFFLHIRFHEDSTSKELPPSWFCLPSVHVCALEAQA

SEQ ID NO: 67318 - protein, 1148 aa, Homo sapiens
MSVPDYMQCAEDHQTLLVVVQPVGIVSEENFFRIYKRICSVSQISVRDSQRVLYIRYRHHYPPENNEWGDFQTHRKVVGLITITDCFSAKDWPQTFEKFHVQKEIYGSTLYDSRLFVFGLQGEIVEQPRTDVAFYPNYEDCQTVEKRIEDFIESLFIVLESKRLDRATDKSGDKIPLLCVPFEKKDFVGLDTDSRHYKKRCQGRMRKHVGDLCLQAGMLQDSLVHYHMSVELLRSVNDFLWLGAALEGLCSASVIYHYPGGTGGKSGARRFQGSTLPAEAANRHRPGAQEVLIDPGALTTNGINPDTSTEIGRAKNCLSPEDIIDKYKEAISYYSKYKNAGVIELEACIKAVRVLAIQKRSMEASEFLQNAVYINLRQLSEEEKIQRYSILSELYELIGFHRKSAFFKRVAAMQCVAPSIAEPGWRACYKLLLETLPGYSLSLDPKDFSRGTHRGWAAVQMRLLHELVYASRRMGNPALSVRHLSFLLQTMLDFLSDQEKKDVAQSLENYTSKCPGTMEPIALPGGLTLPPVPFTKLPIVRHVKLLNLPASLRPHKMKSLLGQNVSTKSPFIYSPIIAHNRGEERNKKIDFQWVQGDVCEVQLMVYNPMPFELRVENMGLLTSGVEFESLPAALSLPAESGLYPVTLVGVPQTTGTITVNGYHTTVFGVFSDCLLDNLPGIKTSGSTVEVIPALPRLQISTSLPRSAHSLQPSSGDEISTNVSVQLYNGESQQLIIKLENIGMEPLEKLEVTSKVLTTKEKLYGDFLSWKLEETLAQFPLQPGKVATFTINIKVKLDFSCQENLLQDLSDDGISVSGFPLSSPFRQVVRPRVEGKPVNPPESNKAGDYSHVKTLEAVLNFKYSGGPGHTEGYYRNLSLGLHVEVEPSVFFTRVSTLPATSTRQCHLLLDVFNSTEHELTVSTRSSEALILHAGECQRMAIQVDKFNFESFPESPGEKGQFANPKQLEEERREARGLEIHSKLGICWRIPSLKRSGEASVEGLLNQLVLEHLQLAPLQWDVLVDGQPCDREAVAACQVGDPVRLEVRLTNRSPRSVGPFALTVVPFQDHQNGVHNYDLHDTVSFVGSSTFYLDAVQPSGQSACLGALLFLYTGDFFLHIRFHEDSTSKELPPSWFCLPSVHVCALEAQA

SEQ ID NO: 67319 - protein, 953 aa, Homo sapiens
MALVFQFGQPVRAQPLPGLCHGKLIRTNACDVCNSTDLPEVEIISLLEEQLPHYKLRADTIYGYDHDDWLHTPLISPDANIDLTTEQIEETLKYFLLCAERVGQMTKTYNDIDAVTRLLEEKERDLELAARIGQSLLKKNKTLTERNELLEEQVEHIREEVSQLRHELSMKDELLQFYTSAAEESEPESVCSTPLKRNESSSSVQNYFHLDSLQKKLKDLEEENVVLRSEASQLKTETITYEEKEQQLVNDCVKELRDANVQIASISEELAKKTEDAARQQEEITHLLSQIVDLQKKAKACAVENEELVQHLGAAKDAQRQLTAELRELEDKYAECMEMLHEAQEELKNLRNKTMPNTTSRRYHSLGLFPMDSLAAEIEGTMRKELQLEEAESPDITHQKRVFETVRNINQVVKQRSLTPSPMNIPGSNQSSAMNSLLSSCVSTPRSSFYGSDIGNVVLDNKTNSIILETEAADLGNDERSKKPGTPGTPGSHDLETALRRLSLRRENYLSERRFFEEEQERKLQELAEKGELRSGSLTPTESIMSLGTHSRFSEFTGFSGMSFSSRSYLPEKLQIVKPLEGSATLHHWQQLAQPHLGGILDPRPGVVTKGFRTLDVDLDEVYCLNDFEEDDTGDHISLPRLATSTPVQHPETSAHHPGKCMSQTNSTFTFTTCRILHPSDELTRVTPSLNSAPTPACGSTSHLKSTPVATPCTPRRLSLAESFTNTRESTTTMSTSLGLVWLLKERGISAAVYDPQSWDRAGRGSLLHSYTPKMAVIPSTPPNSPMQTPTSSPPSFEFKCTSPPYDNFLASKPASSILREVREKNVRSSESQTDVSVSNLNLVDKVRRFGVAKVVNSGRAHVPTLTEEQGPLLCGPPGPAPALVPRGLVPEGLPLRCPTVTSAIGGLQLNSGIRRNRSFPTMVGSSMQMKAPVTLTSGILMGAKLSKQTSLR

SEQ ID NO: 67320 - protein, 686 aa, Homo sapiens
MSLRDKGGEEECFEYDCQDEERKPTHRQHDTQDLLEEVLCAERVGQMTKTYNDIDAVTRLLEEKERDLELAARIGQSLLKKNKTLTERNELLEEQVEHIREEVSQLRHELSMKDELLQFYTSAAEESEPESVCSTPLKRNESSSSVQNYFHLDSLQKKLKDLEEENVVLRSEASQLKTETITYEEKEQQLVNDCVKELRDANVQIASISEELAKKTEDAARQQEEITHLLSQIVDLQKKAKACAVENEELVQHLGAAKDAQRQLTAELRELEDKYAECMEMLHEAQEELKNLRNKTMPNTTSRRYHSLGLFPMDSLAAEIEGTMRKELQLEEAESPDITHQKRVFETVRNINQVVKQRSLTPSPMNIPGSNQSSAMNSLLSSCVSTPRSSFYGSDIGNVVLDNKTNSIILETEAADLGNDERSKKPGTPGTPGSHDLETALRRLSLRRENYLSERRFFEEEQERKLQELAEKGELRSGSLTPTESIMSLGTHSRFSEFTGFSGMSFSSRSYLPEKLQIVKPLEGSATLHHWQQLAQPHLGGILDPRPGVVTKGFRTLDVDLDEVYCLNDFEEDDTGDHISLPRLATSTPVQHPETSGERSQARVTVSGSRSYPSRPQASPEEMQEPPAATEEEEEEEEEEGSGEGTTISPVNLAPFPEAEFWAILTSVPGTIRSGSLSVASARLCG

SEQ ID NO: 67321 - protein, 895 aa, Homo sapiens
MSLRDKGGEEECFEYDCQDEERKPTHRQHDTQDLLEEVLCAERVGQMTKTYNDIDAVTRLLEEKERDLELAARIGQSLLKKNKTLTERNELLEEQVEHIREEVSQLRHELSMKDELLQFYTSAAEESEPESVCSTPLKRNESSSSVQNYFHLDSLQKKLKDLEEENVVLRSEASQLKTETITYEEKEQQLVNDCVKELRDANVQIASISEELAKKTEDAARQQEEITHLLSQIVDLQKKAKACAVENEELVQHLGAAKDAQRQLTAELRELEDKYAECMEMLHEAQEELKNLRNKTMPNTTSRRYHSLGLFPMDSLAAEIEGTMRKELQLEEAESPDITHQKRVFETVRNINQVVKQRSLTPSPMNIPGSNQSSAMNSLLSSCVSTPRSSFYGSDIGNVVLDNKTNSIILETEAADLGNDERSKKPGTPGTPGSHDLETALRRLSLRRENYLSERRFFEEEQERKLQELAEKGELRSGSLTPTESIMSLGTHSRFSEFTGFSGMSFSSRSYLPEKLQIVKPLEGSATLHHWQQLAQPHLGGILDPRPGVVTKGFRTLDVDLDEVYCLNDFEEDDTGDHISLPRLATSTPVQHPETSAHHPGKCMSQTNSTFTFTTCRILHPSDELTRVTPSLNSAPTPACGSTSHLKSTPVATPCTPRRLSLAESFTNTRESTTTMSTSLGLVWLLKERGISAAVYDPQSWDRAGRGSLLHSYTPKMAVIPSTPPNSPMQTPTSSPPSFEFKCTSPPYDNFLASKPASSILREVREKNVRSSESQTDVSVSNLNLVDKVRRFGVAKVVNSGRAHVPTLTEEQGPLLCGPPGPAPALVPRGLVPEGLPLRCPTVTSAIGGLQLNSGIRRNRSFPTMVGSSMQMKAPVTLTSGILMGAKLSKQTSLR

SEQ ID NO: 67322 - protein, 786 aa, Homo sapiens
MALVFQFGQPVRAQPLPGLCHGKLIRTNACDVCNSTDLPEVEIISLLEEQLPHYKLRADTIYGYDHDDWLHTPLISPDANIDLTTEQIEETLKYFLLCAERVGQMTKTYNDIDAVTRLLEEKERDLELAARIGQSLLKKNKTLTERNELLEEQVEHIREEVSQLRHELSMKDELLQFYTSAAEESEPESVCSTPLKRNESSSSVQNYFHLDSLQKKLKDLEEENVVLRSEASQLKTETITYEEKEQQLVNDCVKELRDANVQIASISEELAKKTEDAARQQEEITHLLSQIVDLQKKAKACAVENEELVQHLGAAKDAQRQLTAELRELEDKYAECMEMLHEAQEELKNLRNKTMPNTTSRRYHSLGLFPMDSLAAEIEGTMRKELQLEEAESPDITHQKRVFETVRNINQVVKQRSLTPSPMNIPGSNQSSAMNSLLSSCVSTPRSSFYGSDIGNVVLDNKTNSIILETEAADLGNDERSKKPGTPGTPGSHDLETALRRLSLRRENYLSERRFFEEEQERKLQELAEKGELRSGSLTPTESIMSLGTHSRFSEFTGFSGMSFSSRSYLPEKLQIVKPLEGSATLHHWQQLAQPHLGGILDPRPGVVTKGFRTLDVDLDEVYCLNDFEEDDTAHHPGKCMSQTNSTFTFTTCRILHPSDELTRVTPSLNSAPTPACGSTSHLKSTPVATPCTPRRLSLAESFTNTRESTTTMSTSLGLVWLLKERGISAAVYDPQSWDRAGRGSLLHSHEDVTCANLGEGGVLSSFLLRSTETPKCVLIPWIGNQ

SEQ ID NO: 67323 - protein, 914 aa, Homo sapiens
MSQSQNAIFTSPTGEENLMNSNHRDSESITDVCSNEDLPEVELVSLLEEQLPQYRLKVDTLFLYENQDWTQSPHQRQHASDALSPVLAEETFRYMILGTDRVEQMTKTYNDIDMVTHLLAERDRDLELAARIGQALLKRNHVLSEQNESLEEQLGQAFDQVNQLQHELCKKDELLRIVSIASEESETDSSCSTPLRFNESFSLSQGLLQLEMLQEKLKELEEENMALRSKACHIKTETVTYEEKEQQLVSDCVKELRETNAQMSRMTEELSGKSDELIRYQEELSSLLSQIVDLQHKLKEHVIEKEELKLHLQASKDAQRQLTMELHELQDRNMECLGMLHESQEEIKELRSRSGPTAHLYFSQSYGAFTGESLAAEIEGTMRKKLSLDEESSLFKQKAQQKRVFDTVRIANDTRGRSISFPALLPIPGSNRSSVIMTAKPFESGLQQTEDKSLLNQGSSSEEVAGSSQKMGQPGPSGDSDLATALHRLSLRRQNYLSEKQFFAEEWQRKIQVLADQKEGVSGCVTPTESLASLCTTQSEITDLSSASCLRGFMPEKLQIVKPLEGSQTLYHWQQLAQPNLGTILDPRPGVITKGFTQLPGDAIYHISDLEEDEEEGITFQVQQPLEVEEKLSTSKPVTGIFLPPITSAGGPVTVATANPGKCLSCTNSTFTFTTCRILHPSDITQVTPSSGFPSLSCGSSGSSSSNTAVNSPALSYRLSIGESITNRRDSTTTFSSTMSLAKLLQERGISAKVYHSPISENPLQPLPKSLAIPSTPPNSPSHSPCPSPLPFEPRVHLSENFLASRPAETFLQEMYGLRPSRNPPDVGQLKMNLVDRLKRLGIARVVKNPGAQENGRCQEAEIGPQKPDSAVYLNSGSSLLGGLRRNQSLPVIMGSFAAPVCTSSPKMGVLKED

SEQ ID NO: 67324 - protein, 311 aa, Homo sapiens
MSQSQNAIFTSPTGEENLMNSNHRDSESITDVCSNEDLPEVELVSLLEEQLPQYRLKVDTLFLYENQDWTQSPHQRQHASDALSPVLAEETFRYMILGTDRVEQMTKTYNDIDMVTHLLAERDRDLELAARIGQALLKRNHVLSEQNESLEEQLGQAFDQVNQLQHELCKKDELLRIVSIASEESETDSSCSTPLRFNESFSLSQGLLQLEMLQEKLKELEEENMALRSKACHIKTETVTYEEKEQQLVSDCVKELRETNAQMSRMTEELSGKSDELIRYQEELSSLLSQIVDLQHKLKEVGLFIHSTDIC

SEQ ID NO: 67325 - protein, 30 aa, Homo sapiens
MSQSQNAIFTSPTGEENLMNSNHRDSESIT

SEQ ID NO: 67326 - protein, 779 aa, Homo sapiens
MILGTDRVEQMTKTYNDIDMVTHLLAERDRDLELAARIGQALLKRNHVLSEQNESLEEQLGQAFDQVNQLQHELCKKDELLRIVSIASEESETDSSCSTPLRFNESFSLSQGLLQLEMLQEKLKELEEENMALRSKACHIKTETVTYEEKEQQLVSDCVKELRETNAQMSRMTEELSGKSDELIRYQEELSSLLSQIVDLQHKLKEHVIEKEELKLHLQASKDAQRQLTMELHELQDRNMECLGMLHESQEEIKELRSRSGPTAHLYFSQSYGAFTGESLAAEIEGTMRKKLSLDEESSLFKQKAQQKRVFDTVRIANDTRGRSISFPALLPIPGSNRSSVIMTAKPFESGLQQTEDKSLLNQGSSSEEVAGSSQKMGQPGPSGDSDLATALHRLSLRRQNYLSEKQFFAEEWQRKIQVLADQKEGVSGCVTPTESLASLCTTQSEITDLSSASCLRGFMPEKLQIVKPLEGSQTLYHWQQLAQPNLGTILDPRPGVITKGFTQLPGDAIYHISDLEEDEEEGITFQVQQPLEVEEKLSTSKPVTGIFLPPITSAGGPVTVATANPGKCLSCTNSTFTFTTCRILHPSDITQVTPSSGFPSLSCGSSGSSSSNTAVNSPALSYRLSIGESITNRRDSTTTFSSTMSLAKLLQERGISAKVYHSPISENPLQPLPKSLAIPSTPPNSPSHSPCPSPLPFEPRVHLSENFLASRPAETFLQEMYGLRPSRNPPDVGQLKMNLVDRLKRLGIARVVKNPVPKRMEDARRQKLVLKNQILLFI

SEQ ID NO: 67327 - protein, 161 aa, Homo sapiens
MEKPLTVLRVSLYHPTLGPSAFANVPPRLQHDTSPLLLGRGQDAHLQLQLPRLSRRHLSLEPYLEKGSALLAFCLKALSRKGCVWVNGLTLRYLEQVPLSTVNRVSFSGIQMLVRVEEGTSLEAFVCYFHVSPSPLIYRPEAEETDEWEGISQGQPPPGSG

SEQ ID NO: 67328 - protein, 582 aa, Homo sapiens
MAEFLDDQETRLCDNCKKEIPVFNFTIHEIHCQRNIGMCPTCKEPFPKSDMETHMAAEHCQVTCKCNKKLEKRLLKKHEETECPLRLAVCQHCDLELSILKLKEHEDYCGARTELCGNCGRNVLVKDLKTHPEVCGREGEEKRNEVAIPPNAYDESWGQDGIWIASQLLRQIEALDPPMRLPRRPLRAFESDVFHNRTTNQRNITAQVSIQNNLFEEQERQERNRGQQPPKEGGEESANLDFMLALSLQNEGQASSVAEQDFWRAVCEADQSHGGPRSLSDIKGAADEIMLPCEFCEELYPEELLIDHQTSCNPSRALPSLNTGSSSPRGVEEPDVIFQNFLQQAASNQLDSLMGLSNSHPVEESIIIPCEFCGVQLEEEVLFHHQDQCDQRPATATNHVTEGIPRLDSQPQETSPELPRRRVRHQGDLSSGYLDDTKQETANGPTSCLPPSRPINNMTATYNQLSRSTSGPRPGCQPSSPCVPKLSNSDSQDIQGRNRDSQNGAIAPGHVSVIRPPQNLYPENIVPSFSPGPSGRYGASGRSEGGRNSRVTPAAANYRSRTAKAKPSKQQGAGDAEEEEEE

SEQ ID NO: 67329 - protein, 582 aa, Homo sapiens; identical to SEQ ID NO: 67328

SEQ ID NO: 67330 - protein, 135 aa, Homo sapiens
MAEFLDDQETRLCDNCKKEIPVFNFTIHEIHCQRNIGMCPTCKEPFPKSDMETHMAAEHCQVTCKCNKKLEKRLLKKHEETECPLRLAVCQHCDLELSILKLKEHEDYCGARTELCGNCGRNVLVKDLKTHPEVC

SEQ ID NO: 67331 - protein, 164 aa, Homo sapiens
MAEFLDDQETRLCDNCKKEIPVFNFTIHEIHCQRNIGMCPTCKEPFPKSDMETHMAAEHCQVTCKCNKKLEKRLLKKHEETECPLRLAVCQHCDLELSILKLKEHEDYCGARTELCGNCGRNVLVKDLKTHPELKNKRGRKGIEANSPPKRVVKRVQTWTSCWP

SEQ ID NO: 67332 - protein, 283 aa, Homo sapiens
MAEFLDDQETRLCDNCKKEIPVFNFTIHEIHCQRNIGMCPTCKEPFPKSDMETHMAAEHCQVTCKCNKKLEKRLLKKHEETECPLRLAVCQHCDLELSILKLKEHEDYCGARTELCGNCGRNVLVKDLKTHPEVCGREGEEKRNEVAIPPNAYDESWGQDGIWIASQLLRQIEALDPPMRLPRRPLRAFESDVFHNRTTNQRNITAQVSIQNNLFEEQERQERNRGQQPPKEGGEESANLDFMLALSLQNEGQASSVAEQDFWRAVCEADQSHGGPRSLSDIK

SEQ ID NO: 67333 - protein, 308 aa, Homo sapiens [sequence omitted]

SEQ ID NO: 67334 - protein, 323 aa, Homo sapiens
MILQETKAACGIPAIPHCSRVEILDAKTREKLCFLDKVEPHATIAEIKNLFTKTHPQWYPARQSLRLDPKGKSLKDEDVLQKLPVGTTATLYFRDLGAQISWVTVFLTEYAGPLFIYLLFYFRVPFIYGHKYDFTSSRHTVVHLACICHSFHYIKRLLETLFVHRFSHGTMPLRNIFKNCTYYWGFAAWMAYYINHPLYTPPTYGAQQVKLALAIFVICQLGNFSIHMALRDLRPAGSKTRKIPYPTKNPFTWLFLLVSCPNYTYEVGSWIGFAIMTQCLPVALFSLVGFTQMTIWAKGKHRSYLKEFRDYPPLRMPIIPFLL

SEQ ID NO: 67335 - protein, 337 aa, Homo sapiens
MSSSPVKRQRMESALDQLKQFTTVVADTGDFHAIDEYKPQDATTNPSLILAAAQMPAYQELVEEAIAYGRKLGGSQEDQIKNAIDKLFVLFGAEILKKIPGRVSTEVDARLSFDKDAMVARARRLIELYKEAGISKDRILIKLSSTWEGIQAGKELEEQHGIHCNMTLLFSFAQAVACAEAGVTLISPFVGRILDWHVANTDKKSYEPLEDPGVKSVTKIYNYYKKFSYKTIVMGASFRNTGEIKALAGCDFLTISPKLLGELLQDNAKLVPVLSAKAAQASDLEKIHLDEKSFRWLHNEDQMAVEKLSDGIRKFAADAVKLERMLTERMFNAENGK

SEQ ID NO: 67336 - protein, 318 aa, Homo sapiens
MSSSPVKRQRMESALDQLKQFTTVVADTGDFHAIDEYKPQDATTNPSLILAAAQMPAYQELVEEAIAYGRKLGGSQEDQIKNAIDKLFVLFGAEILKKIPGRVSTEVDARLSFDKDAMVARARRLIELYKEAGISKDRILIKLSSTWEGIQAGKELEEQHGIHCNMTLLFSFAQAVACAEAGVTLISPFVGRILDWHVANTDKKSYEPLEDPGVKSVTKIYNYYKKFSYKTIVMGASFRNTGEIKALAGCDFLTISPKLLGELLQDNAKLVPVLSAKPKPVTWKKSTWMRSLSVGCTTRTRWLWRSSLTGSASLPLMQ

SEQ ID NO: 67337 - protein, 433 aa, Homo sapiens
MRQSHQLPLVGLLLFSFIPSQLCEICEVSEENYIRLKPLLNTMIQSNYNRGTSAVNVVLSLKLVGIQIQTLMQKMIQQIKYNVKSRLSDVSSGELALIILALGVCRNAEENLIYDYHLIDKLENKFQAEIENMEAHNGTPLTNYYQLSLDVLALCLFNGNYSTAEVVNHFTPENKNYYFGSQFSVDTGAMAVLALTCVKKSLINGQIKADEGSLKNISIYTKSLVEKILSEKKENGLIGNTFSTGEAMQALFVSSDYYNENDWNCQQTLNTVLTEISQGAFSNPNAAAQVLPALMGKTFLDINKDSSCVSASGNFNISADEPITVTPPDSQSYISVNYSVRINETYFTNVTVLNGSVFLSVMEKAQKMNDTIFGFTMEERSWGPYITCIQGLCANNNDRTYWELLSGGEPLSQGAGSYVVRNGENLEVRWSKY

SEQ ID NO: 67338 - protein, 427 aa, Homo sapiens
MRHLGAFLFLLGVLGALTEMCEIPEMDSHLVEKLGQHLLPWMDRLSLEHLNPSIYVGLRLSSLQAGTKEDLYLHSLKLGYQQCLLGSAFSEDDGDCQGKPSMGQLALYLLALRANCEFVRGHKGDRLVSQLKWFLEDEKRAIGHDHKGHPHTSYYQYGLGILALCLHQKRVHDSVVDKLLYAVEPFHQGHHSVDTAAMAGLAFTCLKRSNFNPGRRQRITMAIRTVREEILKAQTPEGHFGNVYSTPLALQFLMTSPMRGAELGTACLKARVALLASLQDGAFQNALMISQLLPVLNHKTYIDLIFPDCLAPRVMLEPAAETIPQTQEIISVTLQVLSLLPPYRQSISVLAGSTVEDVLKKAHELGGFTYETQASLSGPYLTSVMGKAAGEREFWQLLRDPNTPLLQGIADYRPKDGETIELRLVSW

SEQ ID NO: 67339 - protein, 400 aa, Homo sapiens
MRHLGAFLFLLGVLGALTEMCEIPEMDSHLVEKLGQHLLPWMDRLSLEHLNPSIYVGLRLSSLQAGTKEDLYLHSLKLGYQQCLLGSAFSEDDGDCQGKPSMGQLALYLLALRANWHDHKGHPHTSYYQYGLGILALCLHQKRVHDSVVDKLLYAVEPFHQGHHSVDTAAMAGLAFTCLKRSNFNPGRRQRITMAIRTVREEILKAQTPEGHFGNVYSTPLALQFLMTSPMRGAELGTACLKARVALLASLQDGAFQNALMISQLLPVLNHKTYIDLIFPDCLAPRVMLEPAAETIPQTQEIISVTLQVLSLLPPYRQSISVLAGSTVEDVLKKAHELGGFTYETQASLSGPYLTSVMGKAAGEREFWQLLRDPNTPLLQGIADYRPKDGETIELRLVSW

SEQ ID NO: 67340 - protein, 280 aa, Homo sapiens
MEDEVVRFAKKMDKMVQKKNASTRIGMSVNAIRKQSTDEEVTSLAKSLIKSWKKLLDGPSTEKDLDEKKKEPAITSQNSPEAREESTSSGNVSNRKDETNARDTYVSSFPRAPSTSDSVRLKCREMLAAALRTGDDYIAIGADEEELGSQIEEAIYQEIRNTDMKYKNRVRSRISNLKDAKNPNLRKNVLCGNIPPDLFARMTAEEMASDELKEMRKNLTKEAIREHQMAKTGGTQTDLFTCGKCKKKNCTYTQVQTRSADEPMTTFVVCNECGNRWKFC

SEQ ID NO: 67341 - protein, 301 aa, Homo sapiens
MEDEVVRFAKKMDKMVQKKNAAGALDLLKELKNIPMTLELLQSTRIGMSVNAIRKQSTDEEVTSLAKSLIKSWKKLLDGPSTEKDLDEKKKEPAITSQNSPEAREESTSSGNVSNRKDETNARDTYVSSFPRAPSTSDSVRLKCREMLAAALRTGDDYIAIGADEEELGSQIEEAIYQEIRNTDMKYKNRVRSRISNLKDAKNPNLRKNVLCGNIPPDLFARMTAEEMASDELKEMRKNLTKEAIREHQMAKTGGTQTDLFTCGKCKKKNCTYTQVQTRSADEPMTTFVVCNECGNRWKFC

SEQ ID NO: 67342 - protein, 117 aa, Homo sapiens
MEDEVVRFAKKMDKMVQKKNAAGALDLLKELKNIPMTLELLQEMASDELKEMRKNLTKEAIREHQMAKTGGTQTDLFTCGKCKKKNCTYTQVQTRSADEPMTTFVVCNECGNRWKFC

SEQ ID NO: 67343 - protein, 159 aa, Homo sapiens
MDKPRKENEEEPQSAPKTDEERPPVEHSPEKQSPEEQSSEEQSSEEEFFPEELLPELLPEMLLSEERPPQEGLSRKDLFEGRPPMEQPPCGVGKHKLEEGSFKERLARSRPQFRGDIHGRNLSNEEMIQAADELEEMKRVRNKLMIMHWKAKRSRPYPI

SEQ ID NO: 67344 - protein, 159 aa, Homo sapiens; identical to SEQ ID NO: 67343

SEQ ID NO: 67345 - protein, 159 aa, Homo sapiens; identical to SEQ ID NO: 67343

SEQ ID NO: 67346 - protein, 156 aa, Homo sapiens
MDKPRKENEEEPQRPRPMRRGLRWSTLPKSSPPRSSLRRSSPRRRSSFLRSSCLSSCLRCSSRRSPQEGLSRKDLFEGRPPMEQPPCGVGKHKLEEGSFKERLARSRPQFRGDIHGRNLSNEEMIQAADELEEMKRVRNKLMIMHWKAKRSRPYPI

SEQ ID NO: 67347 - protein, 100 aa, Homo sapiens
MQKPCKENEGKPKCSVPKREEKRPYGEFERQQTEGNFRQRLLQSLEEFKEDIDYRHFKDEEMTREGDEMERCLEEIRGLRKKFRALHSNHRHSRDRPYPI

SEQ ID NO: 67348 - protein, 100 aa, Homo sapiens; identical to SEQ ID NO: 67347

SEQ ID NO: 67349 - protein, 96 aa, Homo sapiens
MYVKLISSDGHEFIVKREHALTSGTIKAMLSGPGQFAENETNEVNFREIPSHVLSKVCMYFTYKVRYTNSSTEIPEFPIAPEIALELLMAANFLDC

SEQ ID NO: 67350 - protein, 112 aa, Homo sapiens
MDGEEKTYGGCEGPDAMYVKLISSDGHEFIVKREHALTSGTIKAMLSGPGQFAENETNEVNFREIPSHVLSKVCMYFTYKVRYTNSSTEIPEFPIAPEIALELLMAANFLDC

SEQ ID NO: 67351 - protein, 112 aa, Homo sapiens; identical to SEQ ID NO: 67350

SEQ ID NO: 67352 - protein, 112 aa, Homo sapiens; identical to SEQ ID NO: 67350

SEQ ID NO: 67353 - protein, 112 aa, Homo sapiens; identical to SEQ ID NO: 67350

SEQ ID NO: 67354 - protein, 112 aa, Homo sapiens; identical to SEQ ID NO: 67350

SEQ ID NO: 67355 - protein, 112 aa, Homo sapiens; identical to SEQ ID NO: 67350

SEQ ID NO: 67356 - protein, 798 aa, Homo sapiens
MHGGRSCGPRTRREPSSGEEAAPVTAMAAESALQVVEKLQARLAANPDPKKLLKYLKKLSTLPITVDILAETGVGKTVNSLRKHEHVGSFARDLVAQWKKLVPVERNAEPDEQDFEKSNSRKRPRDALQKEEEMEGDYQETWKATGSRSYSPDHRQKKHRKLSELERPHKVSHGHERRDERKRCHRMSPTYSSDPESSDYGHVQSPPSCTSPHQMYVDHYRSLEEDQEPIVSHQKPGKGHSNAFQDRLGASQERHLGEPHGKGVVSQNKEHKSSHKDKRPVDAKSDEKASVVSREKSHKALSKEENRRPPSGDNAREKPPSSGVKKEKDREGSSLKKKCLPPSEAASDNHLKKPKHRDPEKAKLDKSKQGLDSFDTGKGAGDLLPKVKEKGSNNLKTPEGKVKTNLDRKSLGSLPKVEETDMEDEFEQPTMSFESYLSYDQPRKKKKKIVKTSATALGDKGLKKNDSKSTGKNLDSVQKLPKVNKTKSEKPAGADLAKLRKVPDVLPVLPDLPLPAIQANYRPLPSLELISSFQPKRKAFSSPQEEEEAGFTGRRMNSKMQVYSGSKCAYLPKMMTLHQQCIRVLKNNIDSIFEVGGVPYSVLEPVLERCTPDQLYRIEEYNHVLIEETDQLWKVHCHRDFKEERPEEYESWREMYLRLQDAREQRLRVLTKNIQFAHANKPKGRQAKMAFVNSVAKPPRDVRRRQEKFGTGGAAVPEKIKIKPAPYPMGSSHASASSISFNPSPEEPAYDGPSTSSAHLAPVVSSTVSYDPRKPTVKKIAPMMAKTIKAFKNRFSRR

SEQ ID NO: 67357 - protein, 1098 aa, Homo sapiens
MAERGGDGGESERFNPGELRMAQQQALRFRGPAPPPNAVMRGPPPLMRPPPPFGMMRGPPPPPRPPFGRPPFDPNMPPMPPPGGIPPPMGPPHLQRPPFMPPPMSSMPPPPGMMFPPGMPPVTAPGTPALPPTEEIWVENKTPDGKVYYYNARTRESAWTKPDGVKVIQQSELTPMLAAQAQVQAQAQAQAQAQAQAQAQAQAQAQAQAQAQAQAQAQAQAQAQAQAQAQAQAQAQAQAQAQVQAQVQAQVQAQAVGASTPTTSSPAPAVSTSTSSSTPSSTTSTTTTATSVAQTVSTPTTQDQTPSSAVSVATPTVSVSTPAPTATPVQTVPQPHPQTLPPAVPHSVPQPTTAIPAFPPVMVPPFRVPLPGMPIPLPGVAMMQIVSCPYVKTVATTKTGVLPGMAPPIVPMIHPQVAIAASPATLAGATAVSEWTEYKTADGKTYYYNNRTLESTWEKPQELKEKEKLEEKIKEPIKEPSEEPLPMETEEEDPKEEPIKEIKEEPKEEEMTEEEKAAQKAKPVATAPIPGTPWCVVWTGDERVFFYNPTTRLSMWDRPDDLIGRADVDKIIQEPPHKKGMEELKKLRHPTPTMLSIQKWQFSMSAIKEEQELMEEINEDEPVKAKKRKRDDNKDIDSEKEAAMEAEIKAARERAIVPLEARMKQFKDMLLERGVSAFSTWEKELHKIVFDPRYLLLNPKERKQVFDQYVKTRAEEERREKKNKIMQAKEDFKKMMEEAKFNPRATFSEFAAKHAKDSRFKAIEKMKDREALFNEFVAAARKKEKEDSKTRGEKIKSDFFELLSNHHLDSQSRWSKVKDKVESDPRYKAVDSSSMREDLFKQYIEKIAKNLDSEKEKELERQARIEASLREREREVQKARSEQTKEIDREREQHKREEAIQNFKALLSDMVRSSDVSWSDTRRTLRKDHRWESGSLLEREEKEKLFNEHIEALTKKKREHFRQLLDETSAITLTSTWKEVKKIIKEDPRCIKFSSSDRKKQREFEEYIRDKYITAKADFRTLLKETKFITYRSKKLIQESDQHLKDVEKILQNDKRYLVLDCVPEERRKLIVAYVDDLDRRGPPPPPTASEPTRRSTK

SEQ ID NO: 67358 - protein, 1077 aa, Homo sapiens
MAERGGDGGESERFNPGELRMAQQQALRFRGPAPPPNAVMRGPPPLMRPPPPFGMMRGPPPPPRPPFGRPPFDPNMPPMPPPGGIPPPMGPPHLQRPPFMPPPMSSMPPPPGMMFPPGMPPVTAPGTPALPPTEEIWVENKTPDGKVYYYNARTRESAWTKPDGVKVIQQSELTPMLAAQAQVQAQAQAQAQAQAQAQAQAQAQAQAQAQAQAQAQAQAQAQAQAQAQAQAQAQAQAQAQAQVQAQVQAQVQAQAVGASTPTTSSPAPAVSTSTSSSTPSSTTSTTTTATSVAQTVSTPTTQDQTPSSAVSVATPTVSVSTPAPTATPVQTVPQPHPQTLPPAVPHSVPQPTTAIPAFPPVMVPPFRVPLPGMPIPLPGVLPGMAPPIVPMIHPQVAIAASPATLAGATAVSEWTEYKTADGKTYYYNNRTLESTWEKPQELKEKEKLEEKIKEPIKEPSEEPLPMETEEEDPKEEPIKEIKEEPKEEEMTEEEKAAQKAKPVATAPIPGTPWCVVWTGDERVFFYNPTTRLSMWDRPDDLIGRADVDKIIQEPPHKKGMEELKKLRHPTPTMLSIQKWQFSMSAIKEEQELMEEINEDEPVKAKKRKRDDNKDIDSEKEAAMEAEIKAARERAIVPLEARMKQFKDMLLERGVSAFSTWEKELHKIVFDPRYLLLNPKERKQVFDQYVKTRAEEERREKKNKIMQAKEDFKKMMEEAKFNPRATFSEFAAKHAKDSRFKAIEKMKDREALFNEFVAAARKKEKEDSKTRGEKIKSDFFELLSNHHLDSQSRWSKVKDKVESDPRYKAVDSSSMREDLFKQYIEKIAKNLDSEKEKELERQARIEASLREREREVQKARSEQTKEIDREREQHKREEAIQNFKALLSDMVRSSDVSWSDTRRTLRKDHRWESGSLLEREEKEKLFNEHIEALTKKKREHFRQLLDETSAITLTSTWKEVKKIIKEDPRCIKFSSSDRKKQREFEEYIRDKYITAKADFRTLLKETKFITYRSKKLIQESDQHLKDVEKILQNDKRYLVLDCVPEERRKLIVAYVDDLDRRGPPPPPTASEPTRRSTK

SEQ ID NO: 67359 - protein, 682 aa, Homo sapiens
MNPQQQRMAAIGTDKELSDLLDFSAMFSPPVNSGKTRPTTLGSSQFSGSGIDERGGTTSWGTSGQPSPSYDSSRGFTDSPHYSDHLNDSRLGAHEGLSPTPFMNSNLMGKTSERGSFSLYSRDTGLPGCQSSLLRQDLGLGSPAQLSSSGKPGTAYYSFSATSSRRRPLHDSAALDPLQAKKVRKVPPGLPSSVYAPSPNSDDFNRESPSYPSPKPPTSMFASTFFMQDGTHNSSDLWSSSNGMSQPGFGGILGTSTSHMSQSSSYGNLHSHDRLSYPPHSVSPTDINTSLPPMSSFHRGSTSSSPYVAASHTPPINGSDSILGTRGNAAGSSQTGDALGKALASIYSPDHTSSSFPSNPSTPVGSPSPLTGTSQWPRPGGQAPSSPSYENSLHSLQSRMEDRLDRLDDAIHVLRNHAVGPSTSLPAGHSDIHSLLGPSHNAPIGSLNSNYGGSSLVASSRSASMVGTHREDSVSLNGNHSVLSSTVTTSSTDLNHKTQENYRGGLQSQSGTVVTTEIKTENKEKDENLHEPPSSDDMKSDDESSQKDIKVSSRGRTSSTNEDEDLNPEQKIEREKERRMANNARERLRVRDINEAFKELGRMCQLHLKSEKPQTKLLILHQAVAVILSLEQQVRERNLNPKAACLKRREEEKVSAVSAEPPTTLPGTHPGLSETTNPMGHM

SEQ ID NO: 67360 - protein, 706 aa, Homo sapiens
MNPQQQRMAAIGTDKELSDLLDFSAMFSPPVNSGKTRPTTLGSSQFSGSGIDERGGTTSWGTSGQPSPSYDSSRGFTDSPHYSDHLNDSRLGAHEGLSPTPFMNSNLMGKTSERGSFSLYSRDTGLPGCQSSLLRQDLGLGSPAQLSSSGKPGTAYYSFSATSSRRRPLHDSAALDPLQAKKVRKVPPGLPSSVYAPSPNSDDFNRESPSYPSPKPPTSMFASTFFMQDGTHNSSDLWSSSNGMSQPGFGGILGTSTSHMSQSSSYGNLHSHDRLSYPPHSVSPTDINTSLPPMSSFHRGSTSSSPYVAASHTPPINGSDSILGTRGNAAGSSQTGDALGKALASIYSPDHTSSSFPSNPSTPVGSPSPLTGTSQWPRPGGQAPSSPSYENSLHSLKNRVEQQLHEHLQDAMSFLKDVCEQSRMEDRLDRLDDAIHVLRNHAVGPSTSLPAGHSDIHSLLGPSHNAPIGSLNSNYGGSSLVASSRSASMVGTHREDSVSLNGNHSVLSSTVTTSSTDLNHKTQENYRGGLQSQSGTVVTTEIKTENKEKDENLHEPPSSDDMKSDDESSQKDIKVSSRGRTSSTNEDEDLNPEQKIEREKERRMANNARERLRVRDINEAFKELGRMCQLHLKSEKPQTKLLILHQAVAVILSLEQQVRERNLNPKAACLKRREEEKVSAVSAEPPTTLPGTHPGLSETTNPMGHM

SEQ ID NO: 67361 - protein, 702 aa, Homo sapiens
MNPQQQRMAAIGTDKELSDLLDFSAMFSPPVNSGKTRPTTLGSSQFSGSGTIHEMKQLNSKARQKGQRIKGFTDSPHYSDHLNDSRLGAHEGLSPTPFMNSNLMGKTSERGSFSLYSRDTGLPGCQSSLLRQDLGLGSPAQLSSSGKPGTAYYSFSATSSRRRPLHDSAALDPLQAKKVRKVPPGLPSSVYAPSPNSDDFNRESPSYPSPKPPTSMFASTFFMQDGTHNSSDLWSSSNGMSQPGFGGILGTSTSHMSQSSSYGNLHSHDRLSYPPHSVSPTDINTSLPPMSSFHRGSTSSSPYVAASHTPPINGSDSILGTRGNAAGSSQTGDALGKALASIYSPDHTSSSFPSNPSTPVGSPSPLTGTSQWPRPGGQAPSSPSYENSLHSLKNRVEQQLHEHLQDAMSFLKDVCEQSRMEDRLDRLDDAIHVLRNHAVGPSTSLPAGHSDIHSLLGPSHNAPIGSLNSNYGGSSLVASSRSASMVGTHREDSVSLNGNHSVLSSTVTTSSTDLNHKTQENYRGGLQSQSGTVVTTEIKTENKEKDENLHEPPSSDDMKSDDESSQKDIKVSSRGRTSSTNEDEDLNPEQKIEREKERRMANNARERLRVRDINEAFKELGRMCQLHLKSEKPQTKLLILHQAVAVILSLEQQVRERNLNPKAACLKRREEEKVSAVSAEPPTTLPGTHPGLSETTNPMGHM

SEQ ID NO: 67362 - protein, 446 aa, Homo sapiens
MGKRYMHHPQIQMISTVNLLVIHLLSHQPVCSLALSLCKSYPPHSVSPTDINTSLPPMSSFHRGSTSSSPYVAASHTPPINGSDSILGTRGNAAGSSQTGDALGKALASIYSPDHTSSSFPSNPSTPVGSPSPLTGTSQWPRPGGQAPSSPSYENSLHSLQSRMEDRLDRLDDAIHVLRNHAVGPSTSLPAGHSDIHSLLGPSHNAPIGSLNSNYGGSSLVASSRSASMVGTHREDSVSLNGNHSVLSSTVTTSSTDLNHKTQENYRGGLQSQSGTVVTTEIKTENKEKDENLHEPPSSDDMKSDDESSQKDIKVSSRGRTSSTNEDEDLNPEQKIEREKERRMANNARERLRVRDINEAFKELGRMCQLHLKSEKPQTKLLILHQAVAVILSLEQQVRERNLNPKAACLKRREEEKVSAVSAEPPTTLPGTHPGLSETTNPMGHM

SEQ ID NO: 67363 - protein, 681 aa, Homo sapiens
MAAFSVLRPRVPGSSGTWAADPDASTAVSPSLRFGGREPARPTRGGATKWPKMNPQQQRMAAIGTDKELSDLLDFSAMFSPPVNSGKTRPTTLGSSQFSGSGIDERGGTTSWGTSGQPSPSYDSSRGFTDSPHYSDHLNDSRLGAHEGLSPTPFMNSNLMGKTSERGSFSLYSRDTGLPGCQSSLLRQDLGLGSPAQLSSSGKPGTAYYSFSATSSRRRPLHDSAALDPLQAKKVRKVPPGLPSSVYAPSPNSDDFNRESPSYPSPKPPTSMFASTFFMQDGTHNSSDLWSSSNGMSQPGFGGILGTSTSHMSQSSSYGNLHSHDRLSYPPHSVSPTDINTSLPPMSSFHRGSTSSSPYVAASHTPPINGSDSILGTRGNAAGSSQTGDALGKALASIYSPDHTSSSFPSNPSTPVGSPSPLTGTSQWPRPGGQAPSSPSYENSLHSLQSRMEDRLDRLDDAIHVLRNHAVGPSTSLPAGHSDIHSLLGPSHNAPIGSLNSNYGGSSLVASSRSASMVGTHREDSVSLNGNHSVLSSTVTTSSTDLNHKTQENYRGGLQSQSGTVVTTEIKTENKEKDENLHEPPSSDDMKSDDESSQKDIKVSSRGRTSSTNEDEDLNPEQKIEREKERRMANNARERLRVRDINEAFKELGRMCQLHLKSEKPQTKLLILHQAVTTIGP

SEQ ID NO: 67364 - protein, 294 aa, Homo sapiens
MSFLKDVCEQSRMEDRLDRLDDAIHVLRNHAVGPSTSLPAGHSDIHSLLGPSHNAPIGSLNSNYGGSSLVASSRSASMVGTHREDSVSLNGNHSVLSSTVTTSSTDLNHKTQENYRGGLQSQSGTVVTTEIKTENKEKDENLHEPPSSDDMKSDDESSQKDIKVSSRGRTSTNEDEDLNPEQKIEREKERRMANNARERLRVRDINEAFKELGRMCQLHLKSEKPQTKLLILHQAVAVILSLEQQVRERNLNPKAACLKRREEEKVSAVSAEPPTTLPGTHPGLSETTNPMGHM

SEQ ID NO: 67365 - protein, 536 aa, Homo sapiens
MYCAYPVPGMGSNSLMYYYNGKTVYAPSPNSDDFNRESPSYPSPKPPTSMFASTFFMQDGTHNSSDLWSSSNGMSQPGFGGILGTSTSHMSQSSSYGNLHSHDRLSYPPHSVSPTDINTSLPPMSSFHRGSTSSSPYVAASHTPPINGSDSILGTRGNAAGSSQTGDALGKALASIYSPDHTSSSFPSNPSTPVGSPSPLTGTSQWPRPGGQAPSSPSYENSLHSLKNRVEQQLHEHLQDAMSFLKDVCEQSRMEDRLDRLDDAIHVLRNHAVGPSTSLPAGHSDIHSLLGPSHNAPIGSLNSNYGGSSLVASSRSASMVGTHREDSVSLNGNHSVLSSTVTTSSTDLNHKTQENYRGGLQSQSGTVVTTEIKTENKEKDENLHEPPSSDDMKSDDESSQKDIKVSSRGRTSSTNEDEDLNPEQKIEREKERRMANNARERLRVRDINEAFKELGRMCQLHLKSEKPQTKLLILHQAVAVILSLEQQVRERNLNPKAACLKRREEEKVSAVSAEPPTTLPGTHPGLSETTNPMGHM

SEQ ID NO: 67366 - protein, 682 aa, Homo sapiens; identical to SEQ ID NO: 67359

SEQ ID NO: 67367 - protein, 339 aa, Homo sapiens
MSSNSSTSQWPRPGGQAPSSPSYENSLHSLKNRVEQQLHEHLQDAMSFLKDVCEQSRMEDRLDRLDDAIHVLRNHAVGPSTSLPAGHSDIHSLLGPSHNAPIGSLNSNYGGSSLVASSRSASMVGTHREDSVSLNGNHSVLSSTVTTSSTDLNHKTQENYRGGLQSQSGTVVTTEIKTENKEKDENLHEPPSSDDMKSDDESSQKDIKVSSRGRTSTNEDEDLNPEQKIEREKERRMANNARERLRVRDINEAFKELGRMCQLHLKSEKPQTKLLILHQAVAVILSLEQQVRERNLNPKAACLKRREEEKVSAVSAEPPTTLPGTHPGLSETTNPMGHM

SEQ ID NO: 67368 - protein, 446 aa, Homo sapiens; identical to SEQ ID NO: 67362

SEQ ID NO: 67369 - protein, 512 aa, Homo sapiens
MYCAYPVPGMGSNSLMYYYNGKTVYAPSPNSDDFNRESPSYPSPKPPTSMFASTFFMQDGTHNSSDLWSSSNGMSQPGFGGILGTSTSHMSQSSSYGNLHSHDRLSYPPHSVSPTDINTSLPPMSSFHRGSTSSSPYVAASHTPPINGSDSILGTRGNAAGSSQTGDALGKALASIYSPDHTSSSFPSNPSTPVGSPSPLTGTSQWPRPGGQAPSSPSYENSLHSLQSRMEDRLDRLDDAIHVLRNHAVGPSTSLPAGHSDIHSLLGPSHNAPIGSLNSNYGGSSLVASSRSASMVGTHREDSVSLNGNHSVLSSTVTTSSTDLNHKTQENYRGGLQSQSGTVVTTEIKTENKEKDENLHEPPSSDDMKSDDESSQKDIKVSSRGRTSSTNEDEDLNPEQKIEREKERRMANNARERLRVRDINEAFKELGRMCQLHLKSEKPQTKLLILHQAVAVILSLEQQVRERNLNPKAACLKRREEEKVSAVSAEPPTTLPGTHPGLSETTNPMGHM

SEQ ID NO: 67370 - protein, 199 aa, Homo sapiens
MAFALLRPVGAHVLYPDVRLLSEDEENRSESDASDQSFGCCEGPEAARRGPGPGGGRRAGGGGGAGPVVVVRQRQAANARERDRTQSVNTAFTALRTLIPTEPVDRKLSKIETVRLASSYIAHLANVLLLGDSADDGQPCFRAAGSAKGAVPAAADGGRQPRSICTFCLSNQRKGGGRRDLGGSCLKVRGVAPLRGPRR

SEQ ID NO: 67371 - protein, 345 aa, Homo sapiens
MLPCFQLLRIGGGRGGDLYTFHPPAGAGCTYRLGHRADLCDVALRPQQEPGLISGIHAELHAEPRGDDWRVSLEDHSSQGTLVNNVRLPRGHRLELSDGDLLTFGPEGPPGTSPSEFYFMFQQVRVKPQDFAAITIPRSRGEARVGAGFRPMLPSQGAPQRPLSTFSPAPKATLILNSIGSLSKLRPQPLTFSPSWGGPKSLPVPAPPGEMGTTPSAPPQRNRRKSVHRVLAELDDESEPPENPPPVLMEPRKKLRVDKAPLTPTGNRRGRPRKYPVSAPMAPPAVGGGEPCAAPCCCLPQEETVAWVQCDGCDVWFHVACVGCSIQAAREADFRCPGCRAGIQT

SEQ ID NO: 67372 - protein, 345 aa, Homo sapiens; identical to SEQ ID NO: 67371

SEQ ID NO: 67373 - protein, 345 aa, Homo sapiens
MLPCFQLLRIGGGRGGDLYTFHPPAGAGCTYRLGHRADLCDVALRPQQEPGLISGIHAELHAEPRGDDWRVSLEDHSSQGTLVNNVRLPRGHRLELSDGDLLTFGPEGPPGTSPSEFYFMFQQVRVKPQDFAAITIPRSRGEARVGAGFRPMLPSQGAPQRPLSTFSPAPKATLILNSIGSLSKLRPQPLTFSPSWGGPKSLPVPAPPGEVGTTPSAPPQRNRRKSVHRVLAELDDESEPPENPPPVLMEPRKKLRVDKAPLTPTGNRRGRPRKYPVSAPMAPPAVGGGEPCAAPCCCLPQEETVAWVQCDGCDVWFHVACVGCSIQAAREADFRCPGCRAGIQT

SEQ ID NO: 67374 - protein, 345 aa, Homo sapiens; identical to SEQ ID NO: 67373

SEQ ID NO: 67375 - protein, 345 aa, Homo sapiens; identical to SEQ ID NO: 67373

SEQ ID NO: 67376 - protein, 345 aa, Homo sapiens; identical to SEQ ID NO: 67373

SEQ ID NO: 67377 - protein, 345 aa, Homo sapiens; identical to SEQ ID NO: 67373

SEQ ID NO: 67378 - protein, 345 aa, Homo sapiens
MLPCFQLLRIGGGRGGDLYTFHPPAGAGCTYRLGHRADLCDVALRPQQEPGLISGIHAELHAEPRGDDWRVSLEDHSSQGTLVNNVRLPRGHRLELSDGDLLTFGPEGSPGTSPSEFYFMFQQVRVKPQDFAAITIPRSRGEARVGAGFRPMLPSQGAPQRPLSTFSPAPKATLILNSIGSLSKLRPQPLTFSPSWGGPKSLPVPAPPGEVGTTPSAPPQRNRRKSVHRVLAELDDESEPPENPPPVLMEPRKKLRVDKAPLTPTGNRRGRPRKYPVSAPMAPPAVGGGEPCAAPCCCLPQEETVAWVQCDGCDVWFHVACVGCSIQAAREADFRCPGCRAGIQT

SEQ ID NO: 67379 - protein, 345 aa, Homo sapiens; identical to SEQ ID NO: 67373

SEQ ID NO: 67380 - protein, 345 aa, Homo sapiens; identical to SEQ ID NO: 67373

SEQ ID NO: 67381 - protein, 345 aa, Homo sapiens; identical to SEQ ID NO: 67373

SEQ ID NO: 67382 - protein, 345 aa, Homo sapiens; identical to SEQ ID NO: 67373

SEQ ID NO: 67383 - protein, 345 aa, Homo sapiens; identical to SEQ ID NO: 67373

SEQ ID NO: 67384 - protein, 345 aa, Homo sapiens; identical to SEQ ID NO: 67378

SEQ ID NO: 67385 - protein, 217 aa, Homo sapiens
TLVNNVRLPRGHRLELSDGDLLTFGPEGPPGTSPSEFYFMFQQVRVKPQDFAAITIPRSRGEARVGAGFRPMLPSQGAPQRPLSTFSPAPKATLILNSIGSLSKLRPQPLTFSPSWGGPKSLPVPAPPGEMGTTPSAPPQRNRRKSVHRVLAELDDESEPPENPPPVLMEPRKKLRVDKAPLTPTGNWHIQGMQSIVKGQKERPWPREHLSGYEEAS

SEQ ID NO: 67386 - protein, 214 aa, Homo sapiens
MSQRKARGPPAMPGVGHSQTQAKARLLPGADRKRSRLSRTRQDPWEERSWSNQRWSRATPGPRGTRAGGLALGRSEASPENAARERSRVRTLRQAFLALQAALPAVPPDTKLSKLDVLVLAASYIAHLTRTLGHELPGPAWPPFLRGLRYLHPLKKWPMRSRLYAGGLGYSDLDSTTASTPSQRTRDAEVGSQVPGEADALLSTTPLSPALGDK

SEQ ID NO: 67387 - protein, 676 aa, Homo sapiens
MSRRALRRLRGEQRGQEPLGPGALHFDLRDDDDAEEEGPKRELGVRRPGGAGKEGVRVNNRFELINIDDLEDDPVVNGERSGCALTDAVAPGNKGRGQRGNTESKTDGDDTETVPSEQSHASGKLRKKKKKQKNKKSSTGEASENGLEDIDRILERIEDSTGLNRPGPAPLSSRKHVLYVEHRHLNPDTELKRYFGARAILGEQRPRQRQRVYPKCTWLTTPKSTWPRYSKPGLSMRLLESKKGLSFFAFEHSEEYQQAQHKFLVAVESMEPNNIVVLLQTSPYHVDSLLQLSDACRFQEDQEMARDLVERALYSMECAFHPLFSLTSGACRLDYRRPENRSFYLALYKQMSFLEKRGCPRTALEYCKLILSLEPDEDPLCMLLLIDHLALRARNYEYLIRLFQEWEAHRNLSQLPNFAFSVPLAYFLLSQQTDLPECEQSSARQKASLLIQQALTMFPGVLLPLLESCSVRPDASVSSHRFFGPNAEISQPPALSQLVNLYLGRSHFLWKEPATMSWLEENVHEVLQAVDAGDPAVEACENRRKVLYQRAPRNIHRHVILSEIKEAVAALPPDVTTQSVMGFDPLPPSDTIYSYVRPERLSPISHGNTIALFFRSLLPNYTMEGERPEEGVAGGLNRNQGLNRLMLAVRDMMANFHLNDLEAPHEDDAEGEGEWD

SEQ ID NO: 67388 - protein, 473 aa, Homo sapiens
MRLLESKKGLSFFAFEHSEEYQQAQHKFLVAVESMEPNNIVVLLQTSPYHVDSLLQLSDACRFQEDQEMARDLVERALYSMECAFHPLFSLTSGACRLDYRRPENRSFYLALYKQMSFLEKRGCPRTALEYCKLILSLEPDEDPLCMLLLIDHLALRARNYEYLIRLFQEWEAHRNLSQLPNFAFSVPLAYFLLSQQTDLPECEQSSARQKASLLIQQALTMFPGVLLPLLESCSVRPDASVSSHRFFGPNAEISQPPALSQLVNLYLGRSHFLWKEPATMSWLEENVHEVLQAVDAGDPAVEACENRRKVLYQRAPRNIHRHVILSEIKEAVAALPPDVTTQSVMGFDPLPPSDTIYSYVRPERKGEEERNSVIWGSQLCVCRPRSFPSPPNVQALACRPLWQAKSYQPWKHHCSLLPVTVAKLYHGGGEARGRSGWGSEPQPGPEQADAGCARHDGQLPPQRPGGAARGRR

SEQ ID NO: 67389 - protein, 216 aa, Homo sapiens
MSRRALRRLRGEQRGQEPLGPGALHFDLRDDDDAEEEGPKRELGVRRPGGAGKEGVRVNNRFELINIDDLEDDPVVNGERSGCALTDAVAPGNKGRGQRGNTESKTDGDDTETVPSEQSHASGKLRKKKKKQKNKKSSTGEASENGLEDIDRILERIEDSTGLNRPGPAPLSSRKHVLYVEHRHLNPDTELKRYFGARAILGEQRDRVLLGCPVWF

SEQ ID NO: 67390 - protein, 207 aa, Homo sapiens
LTVNASMSRFPPHMVPPHHTLHTTGIPHPAIVTPTVKQESSQSDVGSLHSSKHQDSKKEEEKKKPHIKKPLNAFMLYMKEMRAKVVAECTLKESAAINQILGRRWHALSREEQAKYYELARKERQLHMQLYPGWSARDNYGKKKKRKRDKQPGETNDLSAPKKCRARFGLDQQNNWCGPCRRKKKCVRYIQGEGSCLSPPSSDGSLL

SEQ ID NO: 67391 - protein, 222 aa, Homo sapiens
TNQNSSSDSEAERRPPPRSESFRDKSRESLEEAAKRQDGGLFKGPPYPGYPFIMIPDLTSPYLPNGSLSPTARTLHFQSGSTHYSAYKTIEHQIAVQYLQMKWPLLDVQAGSLQSRQALKDARSPSPAHIVSPLPCCTQGHDCQHFYPPSDFTVSTQVFRDMKRSHSLQKVGEPWCIESNKVPVVQHPHHVHPLTPLITYSNEHFTPGNPPPHLPADVDPKT

SEQ ID NO: 67392 - protein, 288 aa, Homo sapiens
MPQLNGGGGDDLGANDELISFKDEGEQEEKSSENSSAERDLADVKSSLVNESETNQNSSSDSEAERRPPPRSESFRDKSRESLEEAAKRQDGGLFKGPPYPGYPFIMIPDLTSPYLPNGSLSPTARTLHFQSGSTHYSAYKTIEHQIAVQYLQMKWPLLDVQAGSLQSRQALKDARSPSPAHIVSNKVPVVQHPHHVHPLTPLITYSNEHFTPGNPPPHLPADVDPKTGIPRPPHPPDISPYYPLSPGTVGQIPHPLGWQGQPVYPITTGGFRHPYPTALTVNASMSR

SEQ ID NO: 67393 - protein, 459 aa, Homo sapiens
MPQLNGGGGDDLGANDELISFKDEGEQEEKSSENSSAERDLADVKSSLVNESETNQNSSSDSEAERRPPPRSESFRDKSRESLEEAAKRQDGGLFKGPPYPGYPFIMIPDLTSPYLPNGSLSPTARTYLQMKWPLLDVQAGSLQSRQALKDARSPSPAHIVSNKVPVVQHPHHVHPLTPLITYSNEHFTPGNPPPHLPADVDPKTGIPRPPHPPDISPYYPLSPGTVGQIPHPLGWLVPQQGQPVYPITTGGFRHPYPTALTVNASMSRFPPHMVPPHHTLHTTGIPHPAIVTPTVKQESSQSDVGSLHSSKHQDSKKEEEKKKPHIKKPLNAFMLYMKEMRAKVVAECTLKESAAINQILGRRWHALSREEQAKYYELARKERQLHMQLYPGWSARDNYGKKKKRKRDKQPGETNEHSECFLNPCLSLPPITDLSAPKKCRARFGLDQQNNWCGPCSL

SEQ ID NO: 67394 - protein, 489 aa, Homo sapiens
MPQLNGGGGDDLGANDELISFKDEGEQEEKSSENSSAERDLADVKSSLVNESETNQNSSSDSEAERRPPPRSESFRDKSRESLEEAAKRQDGGLFKGPPYPGYPFIMIPDLTSPYLPNGSLSPTARTYLQMKWPLLDVQAGSLQSRQALKDARSPSPAHIVSPLPCCTQGHDCQHFYPPSDFTVSTQVFRDMKRSHSLQKVGEPWCIESNKVPVVQHPHHVHPLTPLITYSNEHFTPGNPPPHLPADVDPKTGIPRPPHPPDISPYYPLSPGTVGQIPHPLGWLVPQQGQPVYPITTGGFRHPYPTALTVNASMSRFPPHMVPPHHTLHTTGIPHPAIVTPTVKQESSQSDVGSLHSSKHQDSKKEEEKKKPHIKKPLNAFMLYMKEMRAKVVAECTLKESAAINQILGRRWHALSREEQAKYYELARKERQLHMQLYPGWSARDNYGKKKKRKRDKQPGETNGEKKSAFATYKVKAAASAHPLQMEAY

SEQ ID NO: 67395 - protein, 619 aa, Homo sapiens
MPQLNGGGGDDLGANDELISFKDEGEQEEKSSENSSAERDLADVKSSLVNESETNQNSSSDSEAERRPPPRSESFRDKSRESLEEAAKRQDGGLFKGPPYPGYPFIMIPDLTSPYLPNGSLSPTARTLHFQSGSTHYSAYKTIEHQIAVQYLQMKWPLLDVQAGSLQSRQALKDARSPSPAHIVSNKVPVVQHPHHVHPLTPLITYSNEHFTPGNPPPHLPADVDPKTGIPRPPHPPDISPYYPLSPGTVGQIPHPLGWLVPQQGQPVYPITTGGFRHPYPTALTVNASMSRFPPHMVPPHHTLHTTGIPHPAIVTPTVKQESSQSDVGSLHSSKHQDSKKEEEKKKPHIKKPLNAFMLYMKEMRAKVVAECTLKESAAINQILGRRWHALSREEQAKYYELARKERQLHMQLYPGWSARDNYGKKKKRKRDKQPGETNEHSECFLNPCLSLPPITDLSAPKKCRARFGLDQQNNWCGPCRRKKKCVRYIQGEGSCLSPPSSDGSLLDSPPPSPNLLGSPPRDAKSQTEQTQPLSLSLKPDPLAHLSMMPPPPALLLAEATHKASALCPNGALDLPPAALQPAAPSSSIAQPSTSSLHSHSSLAGTQPQPLSLVTKSLE

SEQ ID NO: 67396 - protein, 120 aa, Homo sapiens
MLYMKEMRAKVVAECTLKESAAINQILGRRWHALSREEQAKYYELARKERQLHMQLYPGWSARDNYGKKKKRKRDKQPGETNDLSAPKKCRARFGLDQQNNWCGPCRCKYSKEVSGTVRA

SEQ ID NO: 67397 - protein, 176 aa, Homo sapiens
MSRFPPHMVPPHHTLHTTGIPHPAIVTPTVKQESSQSDVGSLHSSKHQDSKKEEEKKKPHIKKPLNAFMLYMKEMRAKVVAECTLKESAAINQILGRRWHALSREEQAKYYELARKERQLHMQLYPGWSARDNYGKKKKRKRDKQPGETNGEKKSAFATYKVKAAASAHPLQMEAY

SEQ ID NO: 67398 - protein, 317 aa, Homo sapiens
MPQLNGGGGDDLGANDELISFKDEGEQEEKSSENSSAERDLADVKSSLVNESETNQNSSSDSEAERRPPPRSESFRDKSRESLEEAAKRQDGGLFKGPPYPGYPFIMIPDLTSPYLPNGSLSPTARTYLQMKWPLLDVQAGSLQSRQALKDARSPSPAHIVQSPLPCCTQGHDCQHFYPPSDFTVSTQVFRDMKRSHSLQKVGEPWCIESNKVPVVQHPHHVHPLTPLITYSNEHFTPGNPPPHLPADVDPKTGIPRPPHPPDISPYYPLSPGTVGQIPHPLGWLVPQQGQPVYPITTGGFRHPYPTALTVNASMSR

SEQ ID NO: 67399 - protein, 596 aa, Homo sapiens
MPQLNGGGGDDLGANDELISFKDEGEQEEKSSENSSAERDLADVKSSLVNESETNQNSSSDSEAERRPPPRSESFRDKSRESLEEAAKRQDGGLFKGPPYPGYPFIMIPDLTSPYLPNGSLSPTARTYLQMKWPLLDVQAGSLQSRQALKDARSPSPAHIVSNKVPVVQHPHHVHPLTPLITYSNEHFTPGNPPPHLPADVDPKTGIPRPPHPPDISPYYPLSPGTVGQIPHPLGWLVPQQGQPVYPITTGGFRHPYPTALTVNASMSRFPPHMVPPHHTLHTTGIPHPAIVTPTVKQESSQSDVGSLHSSKHQDSKKEEEKKKPHIKKPLNAFMLYMKEMRAKVVAECTLKESAAINQILGRRWHALSREEQAKYYELARKERQLHMQLYPGWSARDNYGKKKKRKRDKQPGETNEHSECFLNPCLSLPPITDLSAPKKCRARFGLDQQNNWCGPCRRKKKCVRYIQGEGSCLSPPSSDGSLLDSPPPSPNLLGSPPRDAKSQTEQTQPLSLSLKPDPLAHLSMMPPPPALLLAEATHKASALCPNGALDLPPAALQPAAPSSSIAQPSTSSLHSHSSLAGTQPQPLSLVTKSLE

SEQ ID NO: 67400 - protein, 494 aa, Homo sapiens
MPQLNGGGGDDLGANDELISFKDEGEQEEKSSENSSAERDLADVKSSLVNESETNQNSSSDSEAERRPPPRSESFRDKSRESLEEAAKRQDGGLFKGPPYPGYPFIMIPDLTSPYLPNGSLSPTARTLHFQSGSTHYSAYKTIEHQIAVQYLQMKWPLLDVQAGSLQSRQALKDARSPSPAHIVSNKVPVVQHPHHVHPLTPLITYSNEHFTPGNPPPHLPADVDPKTGIPRPPHPPDISPYYPLSPGTVGQIPHPLGWLVPQQGQPVYPITTGGFRHPYPTALTVNASMSRFPPHMVPPHHTLHTTGIPHPAIVTPTVKQESSQSDVGSLHSSKHQDSKKEEEKKKPHIKKPLNAFMLYMKEMRAKVVAECTLKESAAINQILGRRWHALSREEQAKYYELARKERQLHMQLYPGWSARDNYGKKKKRKRDKQPGETNEHSECFLNPCLSLPPITDLSAPKKCRARFGLDQQNNWCGPCRCKYSKEVSGTVRA

SEQ ID NO: 67401 - protein, 602 aa, Homo sapiens
MPQLNGGGGDDLGANDELISFKDEGEQEEKSSENSSAERDLADVKSSLVNESETNQNSSSDSEAERRPPPRSESFRDKSRESLEEAAKRQDGGLFKGPPYPGYPFIMIPDLTSPYLPNGSLSPTARTLHFQSGSTHYSAYKTIEHQIAVQYLQMKWPLLDVQAGSLQSRQALKDARSPSPAHIVSNKVPVVQHPHHVHPLTPLITYSNEHFTPGNPPPHLPADVDPKTGIPRPPHPPDISPYYPLSPGTVGQIPHPLGWLVPQQGQPVYPITTGGFRHPYPTALTVNASMSRFPPHMVPPHHTLHTTGIPHPAIVTPTVKQESSQSDVGSLHSSKHQDSKKEEEKKKPHIKKPLNAFMLYMKEMRAKVVAECTLKESAAINQILGRRWHALSREEQAKYYELARKERQLHMQLYPGWSARDNYGKKKKRKRDKQPGETNDLSAPKKCRARFGLDQQNNWCGPCRRKKKCVRYIQGEGSCLSPPSSDGSLLDSPPPSPNLLGSPPRDAKSQTEQTQPLSLSLKPDPLAHLSMMPPPPALLLAEATHKASALCPNGALDLPPAALQPAAPSSSIAQPSTSSLHSHSSLAGTQPQPLSLVTKSLE

SEQ ID NO: 67402 - protein, 482 aa, Homo sapiens
MPQLNGGGGDDLGANDELISFKDEGEQEEKSSENSSAERDLADVKSSLVNESETNQNSSSDSEAERRPPPRSESFRDKSRESLEEAAKRQDGGLFKGPPYPGYPFIMIPDLTSPYLPNGSLSPTARTLHFQSGSTHYSAYKTIEHQIAVQYLQMKWPLLDVQAGSLQSRQALKDARSPSPAHIVSNKVPVVQHPHHVHPLTPLITYSNEHFTPGNPPPHLPADVDPKTGIPRPPHPPDISPYYPLSPGTVGQIPHPLGWLVPQQGQPVYPITTGGFRHPYPTALTVNASMSRFPPHMVPPHHTLHTTGIPHPAIVTPTVKQESSQSDVGSLHSSKHQDSKKEEEKKKPHIKKPLNAFMLYMKEMRAKVVAECTLKESAAINQILGRRWHALSREEQAKYYELARKERQLHMQLYPGWSARDNYGKKKKRKRDKQPGETNEHSECFLNPCLSLPPITGEKKSAFATYKVKAAASAHPLQMEAY

SEQ ID NO: 67403 - protein, 335 aa, Homo sapiens
MSSFLSSRFPPHMVPPHHTLHTTGIPHPAIVTPTVKQESSQSDVGSLHSSKHQDSKKEEEKKKPHIKKPLNAFMLYMKEMRAKVVAECTLKESAAINQILGRRWHALSREEQAKYYELARKERQLHMQLYPGWSARDNYGKKKKRKRDKQPGETNEHSECFLNPCLSLPPITDLSAPKKCRARFGLDQQNNWCGPCRRKKKCVRYIQGEGSCLSPPSSDGSLLDSPPPSPNLLGSPPRDAKSQTEQTQPLSLSLKPDPLAHLSMMPPPPALLLAEATHKASALCPNGALDLPPAALQPAAPSSSIAQPSTSSLHSHSSLAGTQPQPLSLVTKSLE

SEQ ID NO: 67404 - protein, 602 aa, Homo sapiens
MPQLNGGGGDDLGANDELISFKDEGEQEEKSSENSSAERDLADVKSSLVNESETNQNSSSDSEAERRPPPRSESFRDKSRESLEEAAKRQDGGLFKGPPYPGYPFIMIPDLTSPYLPNGSLSPTARTLHFQSGSTHYSAYKTIEHQIAVQYLQMKWPLLDVQAGSLQSRQALKDARSPSPAHIVSNKVPVVQHPHHVHPLTPLITYSNEHFTPGNPPPHLPADVDPKTGIPRPPHPPDISPYYPLSPGTVGQIPHPLGWLVPQQGQPVYPITTGGFRHPYPTALTVNASMSRFPPHMVPPHHTLHTTGIPHPAIVTPTVKQESSQSDVGSLHSSKHQDSKKEEEKKKPHIKKPLNAFMLYMKEMRAKVVAECTLKESAAINQILGRRWHALSREEQAKYYELARKERQLHMQLYPGWSARDNYGKKKKRKRDKQPGETNDANTPKKCRALFGLDRQTLWCKPCRRKKKCVRYIQGEGSCLSPPSSDGSLLDSPPPSPNLLGSPPRDAKSQTEQTQPLSLSLKPDPLAHLSMMPPPPALLLAEATHKASALCPNGALDLPPAALQPAAPSSSIAQPSTSSLHSHSSLAGTQPQPLSLVTKSLE

SEQ ID NO: 67405 - protein, 619 aa, Homo sapiens
MPQLNGGGGDDLGANDELISFKDEGEQEEKSSENSSAERDLADVKSSLVNESETNQNSSSDSEAERRPPPRSESFRDKSRESLEEAAKRQDGGLFKGPPYPGYPFIMIPDLTSPYLPNGSLSPTARTLHFQSGSTHYSAYKTIEHQIAVQYLQMKWPLLDVQAGSLQSRQALKDARSPSPAHIVSNKVPVVQHPHHVHPLTPLITYSNEHFTPGNPPPHLPADVDPKTGIPRPPHPPDISPYYPLSPGTVGQIPHPLGWLVPQQGQPVYPITTGGFRHPYPTALTVNASMSRFPPHMVPPHHTLHTTGIPHPAIVTPTVKQESSQSDVGSLHSSKHQDSKKEEEKKKPHIKKPLNAFMLYMKEMRAKVVAECTLKESAAINQILGRRWHALSREEQAKYYELARKERQLHMQLYPGWSARDNYGKKKKRKRDKQPGETNEHSECFLNPCLSLPPITDANTPKKCRALFGLDRQTLWCKPCRRKKKCVRYIQGEGSCLSPPSSDGSLLDSPPPSPNLLGSPPRDAKSQTEQTQPLSLSLKPDPLAHLSMMPPPPALLLAEATHKASALCPNGALDLPPAALQPAAPSSSIAQPSTSSLHSHSSLAGTQPQPLSLVTKSLE

SEQ ID NO: 67406 - protein, 214 aa, Homo sapiens
MAFLRSMWGVLSALGRSGAELCTGCGSRLRSPFSFVYLPRWFSSVLASCPKKPVSSYLRFSKEQLPIFKAQNPDAKTTELIRRIAQRWRELPDSKKKIYQDAYRAEWQVYKEEISRFKEQLTPSQIMSLEKEIMDKHLKRKAMTKKKEKLKTVKENWKNLSDSEKELYIQHAKEDETRYHNEMKSWEEQMIEVGRKDLLRRTIKKQRKYGAEEC

SEQ ID NO: 67407 - protein, 219 aa, Homo sapiens
  VARIANT 1: note = MOD_RES - Any amino acid
XELCTGCGSRLRSPFSFVYLPRWFSSVLASCPKKPVSSYLRFSKEQLPIFKAQNPDAKTTELIRRIAQRWRELPDSKKKIYQDAYRAEWQVYKEEISRFKEQLTPSQIMSLEKEIMDKHLKRKAMTKKKELTLLGKPKRPRSAYNVYVAERFQEAKGDSPQEKLKTVKENWKNLSDSEKEVSITVVSLKCLLRISVRECIRARLDSCEDNLVLLIIQVF

SEQ ID NO: 67408 - protein, 246 aa, Homo sapiens
MAFLRSMWGVLSALGRSGAELCTGCGSRLRSPFSFVYLPRWFSSVLASCPKKPVSSYLRFSKEQLPIFKAQNPDAKTTELIRRIAQRWRELPDSKKKIYQDAYRAEWQVYKEEISRFKEQLTPSQIMSLEKEIMDKHLKRKAMTKKKELTLLGKPKRPRSAYNVYVAERFQEAKGDSPQEKLKTVKENWKNLSDSEKELYIQHAKEDETRYHNEMKSWEEQMIEVGRKDLLRRTIKKQRKYGAEEC

SEQ ID NO: 67409 - protein, 433 aa, Homo sapiens
MSILAKMGDWQDRHDGTSNGTARLPQLGTVGQSPYTSAPPLSHTPNADFQPPYFPPPYQPIYPQSQDPYSHVNDPYSLNPLHAQPQPQHPGWPGQRQSQESGLLHTHRGLPHQLSGLDPRRDYRRHEDLLHGPHALSSGLGDLSIHSLPHAIEEVPHVEDPGINIPDQTVIKKGPVSLSKSNSNAVSAIPINKDNLFGGVVNPNEVFCSVPGRLSLLSSTSKYKVTVAEVQRRLSPPECLNASLLGGVLRRAKSKNGGRSLREKLDKIGLNLPAGRRKAANVTLLTSLVEGEAVHLARDFGYVCETEFPAKAVAEFLNRQHSDPNEQVTRKNMLLATKQICKEFTDLLAQDRSPLGNSRPNPILEPGIQSCLTHFNLISHGFGSPAVCAAVTALQNYLTEALKAMDKMYLSNNPNSHTDNNAKSSDKEEKHRK

SEQ ID NO: 67410 - protein, 437 aa, Homo sapiens
MLWKLTDNIKYEDCEDRHDGTSNGTARLPQLGTVGQSPYTSAPPLSHTPNADFQPPYFPPPYQPIYPQSQDPYSHVNDPYSLNPLHAQPQPQHPGWPGQRQSQESGLLHTHRGLPHQLSGLDPRRDYRRHEDLLHGPHALSSGLGDLSIHSLPHAIEEVPHVEDPGINIPDQTVIKKGPVSLSKSNSNAVSAIPINKDNLFGGVVNPNEVFCSVPGRLSLLSSTSKYKVTVAEVQRRLSPPECLNASLLGGVLRRAKSKNGGRSLREKLDKIGLNLPAGRRKAANVTLLTSLVEGEAVHLARDFGYVCETEFPAKAVAEFLNRQHSDPNEQVTRKNMLLATKQICKEFTDLLAQDRSPLGNSRPNPILEPGIQSCLTHFNLISHGFGSPAVCAAVTALQNYLTEALKAMDKMYLSNNPNSHTDNNAKSSDKEEKHRK

SEQ ID NO: 67411 - protein, 431 aa, Homo sapiens
MLVHSFSAMDRHDGTSNGTARLPQLGTVGQSPYTSAPPLSHTPNADFQPPYFPPPYQPIYPQSQDPYSHVNDPYSLNPLHAQPQPQHPGWPGQRQSQESGLLHTHRGLPHQLSGLDPRRDYRRHEDLLHGPHALSSGLGDLSIHSLPHAIEEVPHVEDPGINIPDQTVIKKGPVSLSKSNSNAVSAIPINKDNLFGGVVNPNEVFCSVPGRLSLLSSTSKYKVTVAEVQRRLSPPECLNASLLGGVLRRAKSKNGGRSLREKLDKIGLNLPAGRRKAANVTLLTSLVEGEAVHLARDFGYVCETEFPAKAVAEFLNRQHSDPNEQVTRKNMLLATKQICKEFTDLLAQDRSPLGNSRPNPILEPGIQSCLTHFNLISHGFGSPAVCAAVTALQNYLTEALKAMDKMYLSNNPNSHTDNNAKSSDKEEKHRK

SEQ ID NO: 67412 - protein, 439 aa, Homo sapiens
MKMLWKLTDNIKYEDCEDRHDGTSNGTARLPQLGTVGQSPYTSAPPLSHTPNADFQPPYFPPPYQPIYPQSQDPYSHVNDPYSLNPLHAQPQPQHPGWPGQRQSQESGLLHTHRGLPHQLSGLDPRRDYRRHEDLLHGPHALSSGLGDLSIHSLPHAIEEVPHVEDPGINIPDQTVIKKGPVSLSKSNSNAVSAIPINKDNLFGGVVNPNEVFCSVPGRLSLLSSTSKYKVTVAEVQRRLSPPECLNASLLGGVLRRAKSKNGGRSLREKLDKIGLNLPAGRRKAANVTLLTSLVEGEAVHLARDFGYVCETEFPAKAVAEFLNRQHSDPNEQVTRKNMLLATKQICKEFTDLLAQDRSPLGNSRPNPILEPGIQSCLTHFNLISHGFGSPAVCAAVTALQNYLTEALKAMDKMYLSNNPNSHTDNNAKSSDKEEKHRK

SEQ ID NO: 67413 - protein, 328 aa, Homo sapiens
MLWKLTDNIKYEDCEDRHDGTSNGTARLPQLGTVGQSPYTSAPPLSHTPNADFQPPYFPPPYQPIYPQSQDPYSHVNDPYSLNPLHAQPQPQHPGWPGQRQSQESGLLHTHRGLPHQLSGLDPRRDYRRHEDLLHGPHALSSGLGDLSIHSLPHAIEEVPHVEDPGINIPDQTVIKKGPVSLSKSNSNAVSAIPINKDNLFGGVVNPNEVFCSVPGRLSLLSSTSKYKVTVAEVQRRLSPPECLNASLLGGVLRRAKSKNGGRSLREKLDKIGLNLPAGRRKAANVTLLTSLVEDRYAKSSPTCWLRTDLPWGTHGPTPSWSPASRAA

SEQ ID NO: 67414 - protein, 437 aa, Homo sapiens; identical to SEQ ID NO: 67410

SEQ ID NO: 67415 - protein, 469 aa, Homo sapiens
MHSPPRDQAAIMLWKLVENVKYEDIYEMLVHTYSSMDRHDGVPSHSSRLSQLGSVSQGPYSSAPPLSHTPSSDFQPPYFPPPYQPLPYHQSQDPYSHVNDPYSLNPLHQPQQHPWGQRQRQEVGSEAGSLLPQPRAALPQLSGLDPRRDYHSVRRPDVLLHSAHHGLDAGMGDSLSLHGLGHPGMEDVQSVEDANNSGMNLLDQSVIKKVPVPPKSVTSLMMNKDGFLGGMSVNTGEVFCSVPGRLSLLSSTSKYKVTVGEVQRRLSPPECLNASLLGGVLRRAKSKNGGRSLRERLEKIGLNLPAGRRKAANVTLLTSLVEGEAVHLARDFGYICETEFPAKAVSEYLNRQHTDPSDLHSRKNMLLATKQLCKEFTDLLAQDRTPIGNSRPSPILEPGIQSCLTHFSLITHGFGAPAICAALTALQNYLTEALKGMDKMFLNNTTTNRHTSGEGPGSKTGDKEEKHRK

SEQ ID NO: 67416 - protein, 198 aa, Homo sapiens
MLWKLVENVKYEDIYEMLVHTYSSMDRHDGVPSHSSRLSQLGSVSQGPYSSAPPLSHTPSSDFQPPYFPPPYQPLPYHQSQDPYSHVNDPYSLNPLHQPQQHPWGQRQRQEVGSEAGSLLPQPRAALPQLSGLDPRRDYHSVRRPDVLLHSAHHGLDAGMGDSLSLHGLGHPGMEDVQSVEDANNSGMNLLDQSVIKK

SEQ ID NO: 67417 - protein, 460 aa, Homo sapiens
MHSPPRDQAAIMLWKLVENVKYEDIYEDRHDGVPSHSSRLSQLGSVSQGPYSSAPPLSHTPSSDFQPPYFPPPYQPLPYHQSQDPYSHVNDPYSLNPLHQPQQHPWGQRQRQEVGSEAGSLLPQPRAALPQLSGLDPRRDYHSVRRPDVLLHSAHHGLDAGMGDSLSLHGLGHPGMEDVQSVEDANNSGMNLLDQSVIKKVPVPPKSVTSLMMNKDGFLGGMSVNTGEVFCSVPGRLSLLSSTSKYKVTVGEVQRRLSPPECLNASLLGGVLRRAKSKNGGRSLRERLEKIGLNLPAGRRKAANVTLLTSLVEGEAVHLARDFGYICETEFPAKAVSEYLNRQHTDPSDLHSRKNMLLATKQLCKEFTDLLAQDRTPIGNSRPSPILEPGIQSCLTHFSLITHGFGAPAICAALTALQNYLTEALKGMDKMFLNNTTTNRHTSGEGPGSKTGDKEEKHRK

SEQ ID NO: 67418 - protein, 452 aa, Homo sapiens
MSTTFPGLVHDAEIRHDGSNSYRLMQLGCLESVANSTVAYSSSSPLTYSTTGTEFASPYFSTNHQYTPLHHQSFHYEFQHSHPAVTPDAYSLNSLHHSQQYYQQIHHGEPTDFINLHNARALKSSCLDEQRRELGCLDAYRRHDLSLMSHGSQYGMHPDQRLLPGPSLGLAAAGADDLQGSVEAQCGLVLNGQGGVIRRGGTCVVNPTDLFCSVPGRLSLLSSTSKYKVTIAEVKRRLSPPECLNASLLGGILRRAKSKNGGRCLREKLDRLGLNLPAGRRKAANVTLLTSLVEGEALHLARDFGYTCETEFPAKAVGEHLARQHMEQKEQTARKKMILATKQICKEFQDLLSQDRSPLGSSRPTPILDLDIQRHLTHFSLITHGFGTPAICAALSTFQTVLSEMLNYLEKHTTHKNGGAADSGQGHANSEKAPLRKTSEAAVKEGKTEKTD

SEQ ID NO: 67419 - protein, 442 aa, Homo sapiens
MLVHTYSAMERPDGLGAAAGGARLSSLPQAAYGPAPPLCHTPAATAAAEFQPPYFPPPYPQPPLPYGQAPDAAAAFPHLAGDPYGGLAPLAQPQPPQAAWAAPRAAARAHEEPPGLLAPPARALGLDPRRDYATAVPRLLHGLADGAHGLADAPLGLPGLAAAPGLEDLQAMDEPGMSLLDQSVIKKVPIPSKASSLSALSLAKDSLVGGITNPGEVFCSVPGRLSLLSSTSKYKVTVGEVQRRLSPPECLNASLLGGVLRRAKSKNGGRCLRERLEKIGLNLPAGRRKAANVTLLTSLVEGEAVHLARDFGYVCETEFPAKAAAEYLCRQHADPGELHSRKSMLLAAKQICKEFADLMAQDRSPLGNSRPALILEPGVQSCLTHFSLITHGFGGPAICAALTAFQNYLLESLKGLDKMFLSSVGSGHGETKASEKDAKHRK

SEQ ID NO: 67420 - protein, 450 aa, Homo sapiens
MLWKITDNVKYEEDCEDRHDGSSNGNPRVPHLSSAGQHLYSPAPPLSHTGVAEYQPPPYFPPPYQQLAYSQSADPYSHLGEAYAAAINPLHQPAPTGSQQQAWPGRQSQEGAGLPSHHGRPAGLLPHLSGLEAGAVSARRDAYRRSDLLLPHAHALDAAGLAENLGLHDMPHQMDEVQNVDDQHLLLHDQTVIRKGPISMTKNPLNLPCQKELVGAVMNPTEVFCSVPGRLSLLSSTSKYKVTVAEVQRRLSPPECLNASLLGGVLRRAKSKNGGRSLREKLDKIGLNLPAGRRKAAHVTLLTSLVEGEAVHLARDFAYVCEAEFPSKPVAEYLTRPHLGGRNEMAARKNMLLAAQQLCKEFTELLSQDRTPHGTSRLAPVLETNIQNCLSHFSLITHGFGSQAICAAVSALQNYIKEALIVIDKSYMNPGDQSPADSNKTLEKMEKHRK

SEQ ID NO: 67421 - protein, 118 aa, Homo sapiens
MFLQDRHDGSSNGNPRVPHLSSAGQHLYSPAPPLSHTGVAEYQPPPYFPPPYQQLAYSQSADPYSHLGEAYAAAINPLHQPAPTGSQQQAWPGRQSQEGAGLPSHHGRPAGLLPHLSG

SEQ ID NO: 67422 - protein, 281 aa, Homo sapiens
MPHQMDEVQNVDDQHLLLHDQTVIRKGPISMTKNPLNLPCQKELVGAVMNPTEVFCSVPGRLSLLSSTSKYKVTVAEVQRRLSPPECLNASLLGGVLRRAKSKNGGRSLREKLDKIGLNLPAGRRKAAHVTLLTSLVEGEAVHLARDFAYVCEAEFPSKPVAEYLTRPHLGGRNEMAARKNMLLAAQQLCKEFTELLSQDRTPHGTSRLAPVLETNIQNCLSHFSLITHGFGSQAICAAVSALQNYIKEALIVIDKSYMNPGDQSPADSNKTLEKMEKHRK

SEQ ID NO: 67423 - protein, 346 aa, Homo sapiens
MAASGKLSTCRLPPLPTIREIIKLLRLQAAKQLSQNFLLDLRLTDKIVRKAGNLTNAYVYEVGPGPGGITRSILNADVAELLVVEKDTRFIPGLQMLSDAAPGKLRIVHGDVLTFKVEKAFSESLKRPWEDDPPNVHIIGNLPFSVSTPLIIKWLENISCRDGPFVYGRTQMTLTFQKEVAERLAANTGSKQRSRLSVMAQYLCNVRHIFTIPGQAFVPKPEVDVGVVHFTPLIQPKIEQPFKLVEKVVQNVFQFRRKYCHRGLRMLFPEAQRLESTGRLLELADIDPTLRPRQLSISHFKSLCDVYRKMCDEDPQLFAYNFREELKRRKSKNEEKEEDDAENYRL

SEQ ID NO: 67424 - protein, 575 aa, Homo sapiens
MSHAAEPARDGVEASAEGPRAVFVLLEERRPADSAQLLSLNSLLPESGIVADIELENVLDPDSFYELKSQPLPLRSSLPISLQATPATPATLSASSSAGGSRTPAMSSSSSSRVLLRQQLMRAQAQEQERRERREQAAAAPFPSPAPASPAISVVGVSAGGHTLSRPPPAQVPREVLKVQTHLENPTRYHLQQARRQQVKQYLSTTLGPKLASQALTPPPGPASAQPLPAPEAAHTTGPTGSAPNSPMALLTIGSSSEKEIDDVIDEIISLESSYNDEMLSYLPGGTTGLQLPSTLPVSGNLLDVYSSQGVATPAITVSNSCPAELPNIKREISETEAKALLKERQKKDNHNLIERRRRFNINDRIKELGTLIPKSSDPEMRWNKGTILKASVDYIRKLQKEQQRSKDLESRQRSLEQANRSLQLRIQELELQAQIHGLPVPPTPGLLSLATTSASDSLKPEQLDIEEEGRPGAATFHVGGGPAQNAPHQQPPAPPSDALLDLHFPSDHLGDLGDPFHLGLEDILMEEEEGVVGGLSGGALSPLRAASDPLLSSVSPAVSKASSRRSSFSMEEES

SEQ ID NO: 67425 - protein, 502 aa, Homo sapiens
MAWALKLPLADEVIESGLVQDFDASLSGIGQELGAGAYSMSDVLALPIFKQEESSLPPDNENKILPFQYVLCAATSPAVKLHDETLTYLNQGQSYEIRMLDNRKLGELPEINGKLVKSIFRVVFHDRRLQYTEHQQLEGWRWNRPGDRILDIDIPMSVGIIDPRANPTQLNTVEFLWDPAKRTSVFIQVHCISTEFTMRKHGGEKGVPFRVQIDTFKENENGEYTEHLHSASCQIKVFKPKGADRKQKTDREKMEKRTPHEKEKYQPSYETTILTECSPWPEITYVNNSPSPGFNSSHSSFSLGEGNGSPNHQPEPPPPVTDNLLPTTTPQEAQQWLHRNRFSTFTRLFTNFSGADLLKLTRDDVIQICGPADGIRLFNALKGRMVRPRLTIYVCQESLQLREQQQQQQQQQQKHEDGDSNGTFFVYHAIYLEELTAVELTEKIAQLFSISPCQISQIYKQGPTGIHVLISDEMIQNFQEEACFILDTMKAETNDSYHIILK

SEQ ID NO: 67426 - protein, 451 aa, Homo sapiens
MAWALKLPLADEVIESGLVQDFDASLSGIGQELGAGAYSMSDVLALPIFKQEESSLPPDNENKILPFQYVLCAATSPAVKLHDETLTYLNQGQSYEIRMLDNRKLGELPEINGKLVKSIFRVVFHDRRLQYTEHQQLEGWRWNRPGDRILDIDIPMSVGIIDPRANPTQLNTVEFLWDPAKRTSVFIQPKGADRKQKTDREKMEKRTPHEKEKYQPSYETTILTECSPWPEITYVNNSPSPGFNSSHSSFSLGEGNGSPNHQPEPPPPVTDNLLPTTTPQEAQQWLHRNRFSTFTRLFTNFSGADLLKLTRDDVIQICGPADGIRLFNALKGRMVRPRLTIYVCQESLQLREQQQQQQQQQQKHEDGDSNGTFFVYHAIYLEELTAVELTEKIAQLFSISPCQISQIYKQGPTGIHVLISDEMIQNFQEEACFILDTMKAETNDSYHIILK

SEQ ID NO: 67427 - protein, 450 aa, Homo sapiens
MAWALKLPLADEVIESGLVQDFDASLSGIGQELGAGAYSMSDVLALPIFKQEESSLPPDNENKILPFQYVLCAATSPAVKLHDETLTYLNQGQSYEIRMLDNRKLGELPEINGKLVKSIFRVVFHDRRLQYTEHQQLEGWRWNRPGDRILDIDIPMSVGIIDPRANPTQLNTVEFLWDPAKRTSVFIQPKGADRKQKTDREKMEKRTPHEKEKYQPSYETTILTECSPWPEITYVNNSPSPGFNSSHSSFSLGEGNGSPNHQPEPPPPVTDNLLPTTTPQEAQQWLHRNRFSTFTRLFTNFSGADLLKLTRDDVIQICGPADGIRLFNALKGRMVRPRLTIYVCQESLQLREQQQQQQQQQQKHEDGDSNGTFFVYHAIYLEELTAVELTEKIAQLFSISPCQISQIYKQGPTGIHVLISDEMIQNFQEEACFILDTMKETNDSYHIILK

SEQ ID NO: 67428 - protein, 479 aa, Homo sapiens
MLFWHTQPEHYNQHNSGSYLRDVLALPIFKQEEPQLSPENEARLPPLQYVLCAATSPAVKLHEETLTYLNQGQSYEIRLLENRKLGDFQDLNTKYVKSIIRVVFHDRRLQYTEHQQLEGWRWSRPGDRILDIDIPLSVGILDPRASPTQLNAVEFLWDPAKRASAFIQVHCISTEFTPRKHGGEKGVPFRVQIDTFKQNENGEYTEHLHSASCQIKVFKPKGADRKQKTDREKMEKRTAQEKEKYQPSYETTILTECSPWPDVAYQVNSAPSPSYNGSPNSFGLGEGNASPTHPVEALPVGSDHLLPSASIQDAQQWLHRNRFSQFCRLFASFSGADLLKMSRDDLVQICGPADGIRLFNAIKGRNVRPKMTIYVCQELEQNRVPLQQKRDGSGDSNLSVYHAIFLEELTTLELIEKIANLYSISPQHIHRVYRQGPTGIHVVVSNEMVQNFQDESCFVLSTIKAESNDGYHIILKCGL

SEQ ID NO: 67429 - protein, 32 aa, Homo sapiens
MVQNFQDESCFVLSTIKAESNDGYHIILKCGL

SEQ ID NO: 67430 - protein, 405 aa, Homo sapiens
MAKYVSLTEANEELKVLMDENQTSRPVAVHTSTVNPLGKQLLPKTFGQSSVNIDQQVVIGMPQRPAASNIPVVGSPNPPSTHFASQNQHSYSSPPWAGQHNRKGEKNGMGLCRLSMKVWETVQRKGTTSCQEVVGELVAKFRAASNHASPNESAYDVKNIKRRTYDALNVLMAMNIISREKKKIKWIGLTTNSAQNCQNLRVERQKRLERIKQKQSELQQLILQQIAFKNLVLRNQYVEEQVSQRPLPNSVIHVPFIIISSSKKTVINCSISDDKSEYLFKFNSSFEIHDDTEVLMWMGMTFGLESGSCSAEDLKMARNLVPKALEPYVTEMAQGTFGGVFTTAGSRSNGTWLSASDLTNIAIGMLATSSGGSQYSGSRVETPAVEEEEEEDNNDDDLSENDEDD

SEQ ID NO: 67431 - protein, 882 aa, Homo sapiens
MEGESSRFEIHTPVSDKKKKKCSIHKERPQKHSHEIFRDSSLVNEQSQITRRKKRKKDFQHLISSPLKKSRICDETANATSTLKKRKKRRYSALEVDEEAGVTVVLVDKENINNTPKHFRKDVDVVCVDMSIEQKLPRKPKTDKFQVLAKSHAHKSEALHSKVREKKNKKHQRKAASWESQRARDTLPQSESHQEESWLSVGPGGEITELPASAHKNKSKKKKKKSSNREYETLAMPEGSQAGREAGTDMQESQPTVGLDDETPQLLGPTHKKKSKKKKKKKSNHQEFEALAMPEGSQVGSEVGADMQESRPAVGLHGETAGIPAPAYKNKSKKKKKKSNHQEFEAVAMPESLESAYPEGSQVGSEVGTVEGSTALKGFKESNSTKKKSKKRKLTSVKRARVSGDDFSVPSKNSESTLFDSVEGDGAMMEEGVKSRPRQKKTQACLASKHVQEAPRLEPANEEHNVETAEDSEIRYLSADSGDADDSDADLGSAVKQLQEFIPNIKDRATSTIKRMYRDDLERFKEFKAQGVAIKFGKFSVKENKQLEKNVEDFLALTGIESADKLLYTDRYPEEKSVITNLKRRYSFRLHIGRNIARPWKLIYYRAKKMFDVNNYKGRYSEGDTEKLKMYHSLLGNDWKTIGEMVARSSLSVALKFSQISSQRNRGAWSKSETRKLIKAVEEVILKKMSPQELKEVDSKLQENPESCLSIVREKLYKGISWVEVEAKVQTRNWMQCKSKWTEILTKRMTNGRRIYYGMNALRAKVSLIERLYEINVEDTNEIDWEDLASAIGDVPPSYVQTKFSRLKAVYVPFWQKKTFPEIIDYLYETTLPLLKEKLEKMMEKKGTKIQTPAAPKQVFPFRDIFYYEDDSEGGHRKRKRR

SEQ ID NO: 67432 - protein, 905 aa, Homo sapiens
MEGESSRFEIHTPVSDKKKKKCSIHKERPQKHSHEIFRDSSLVNEQSQITRRKKRKKDFQHLISSPLKKSRICDETANATSTLKKRKKRRYSALEVDEEAGVTVVLVDKENINNTPKHFRKDVDVVCVDMSIEQKLPRKPKTDKFQVLAKSHAHKSEALHSKVREKKNKKHQRKAASWESQRARDTLPQSESHQEESWLSVGPGGEITELPASAHKNKSKKKKKKSSNREYETLAMPEGSQAGREAGTDMQESQPTVGLDDETPQLLGPTHKKKSKKKKKKKSNHQEFEALAMPEGSQVGSEVGADMQESRPAVGLHGETAGIPAPAYKNKSKKKKKKSNHQEFEAVAMPESLESAYPEGSQVGSEVGTVEGSTALKGFKESNSTKKKSKKRKLTSVKRARVSGDDFSVPSKNSESTLFDSVEGDGAMMEEGVKSRPRQKKTQACLASKHVQEAPRLEPANEEHNVETAEDSEIRYLSADSGDADDSDADLGSAVKQLQEFIPNIKDRATSTIKRMYRDDLERFKEFKAQGVAIKFGKFSVKENKQLEKNVEDFLALTGIESADKLLYTDRYPEEKSVITNLKRRYSFRLHIGRNIARPWKLIYYRAKKMFDVNNYKGRYSEGDTEKLKMYHSLLGNDWKTIGEMVARSSLSVALKFSQISSQRNRGAWSKSETRKLIKAVEEVILKKMSPQELKEVDSKLQENPESCLSIVREKLYKGISWVEVEAKVQTRNWMQCKSKWTEILTKRMTNGRRIYYGMNALRAKVSLIERLYEINVEDTNEIDWEDLASAIGDVPPSYVQTKFSRLKAVYVPFWQKKTFPEIIDYLYETTLPLLKEKLEKMMEKKGTKIQTPAAPKQVFPFRDIFYYEDDSEGEDIEKESEGQAPCMAHACNSSTLGGQGRWII

SEQ ID NO: 67433 - protein, 1162 aa, Homo sapiens
MEEVRCPEHGTFCFLKTGVRDGPNKGKSFYVCRADTCSFVRATDIPVSHCLLHEDFVVELQGLLLPQDKKEYRLFFRCIRSKAEGKRWCGSIPWQDPDSKEHSVSNKSQHASETFHHSSNWLRNPFKVLDKNQEPALWKQLIKGEGEEKKADKKQREKGDQLFDQKKEQKPEMMEKDLSSGLVPKKKQSVVQEKKQEEGAEIQCEAETGGTHKRDFSEIKSQQCQGNELTRPSASSQEKSSGKSQDVQRESEPLREKVTQLLPQNVHSHNSISKPQKGGPLNKEYTNWEAKETKAKDGPSIQATQKSLPQGHFQERPETHSVPAPGGPAAQAAPAAPGLSLGEGREAATSSDDEEEDDVVFVSSKPGSPLLFDSTLDLETKENLQFPDRSVQRKVSPASGVSKKVEPSDPVARRVYLTTQLKQKKSTLASVNIQALPDKGQKLIKQIQELEEVLSGLTLSPEQGTNEKSNSQVPQQSHFTKTTTGPPHLVPPQPLPRRGTQPVGSLELKSACQVTAGGSSQCYRGHTNQDHVHAVWKITSEAIGQLHRSLESCPGETVVAEDPAGLKVPLLLHQKQALAWLLWRESQKPQGGILADDMGLGKTLTMIALILTQKNQEKKEEKEKSTALTWLSKDDSCDFTSHGTLIICPASLIHHWKNEVEKRVNSNKLRVYLYHGPNRDSRARVLSTYDIVITTYSLVAKEIPTNKQEAEIPGANLNVEGTSTPLLRIAWARIILDEAHNVKNPRVQTSIAVCKLQACARWAVTGTPIQNNLLDMYSLLKFLRCSPFDEFNLWRSQVDNGSKKGGERLSILTKSLLLRRTKDQLDSTGRPLVILPQRKFQLHHLKLSEDEETVYNVFFARSRSALQSYLKRHESRGNQSGRSPNNPFSRVALEFGSEEPRHSEAADSPRSSTVHILSQLLRLRQCCCHLSLLKSALDPMELKGEGLVLSLEEQLSALTLSELRDSEPSSTVSLNGTFFKMELFEGMRESTKISSLLAELEAIQRNSASQKSVIVSQWTNMLKVVALHLKKHGLTYATIDGSVNPKQRMDLVEAFNHSRGPQVMLISLLAGGVGLNLTGGNHLFLLDMHWNPSLEDQACDRIYRVGQQKDVVIHRFVCEGTVEEKILQLQEKKKDLAKQVLSGSGESVTKLTLADLRVLFGI

SEQ ID NO: 67434 - protein, 143 aa, Homo sapiens
NMLKVVALHLKKHGLTYATIDGSVNPKQRMDLVEAFNHSRGPQVMLISLLAGGVGLNLTGGNHLFLLDMHWNPSLEDQACDRIYRVGQQKDVVIHRFVCEGTVEEKILQLQEKKKDLAKQVLSGSGESVTKLTLADLRVLFGI

SEQ ID NO: 67435 - protein, 420 aa, Homo sapiens
MAELGKKYCVYCLAEVSPLRFRCTECQDIELCPECFSAGAEIGHHRRYHGYQLVDGGRFTLWGPEAEGGWTSREEQLLLDAIEQFGFGNWEDMAAHVGASRTPQEVMEHYVSMYIHGNLGKACIPDTIPNRVTDHTCPSGGPLSPSLTTPLPPLDISVAEQQQLGYMPLRDDYEIEYDQDAETLISGLSVNYDDDDVEIELKRAHVDMYVRKLKERQRRKNIARDYNLVPAFLGKDKKEKEKALKRKITKEEKELRLKLRPLYQFMSCKEFDDLFENMHKEKMLRAKIRELQRYRRNGITKMEESAEYEAARHKREKRKENKNLAGSKRGKEDGKDSEFAAIENLPGFELLSDREKVLCSSLNLSPARYVTVKTIIIKDHLQKRQGIPSKSRLPSYLDKVLKKRILNFLTESGWISRDAS

SEQ ID NO: 67436 - protein, 121 aa, Homo sapiens
MAAHVGASRTPQEVMEHYVSMYIHGNLGKACIPDTIPNRVTDHTCPSGGPLSPSLTTPLPPLDISVAEQQQLGYMPLRDDYEIEYDQDAETLISGLSVNYDDDDVEIELKRAHVDMYVRKL

SEQ ID NO: 67437 - protein, 129 aa, Homo sapiens
MAAHVGASRTPQEVMEHYVSMYIHGNLGKACIPDTIPNRVTDHTCPSGGPLSPSLTTPLPPLDISVAEQQQLGYMPLRDDYEIEYDQDAETLISGLSVNYDDDDVEIELKRAHVDMYVRKLKERQRRKN

SEQ ID NO: 67438 - protein, 345 aa, Homo sapiens
MAELGKKYCVYCLAEEDMAAHVGASRTPQEVMEHYVSMYIHGNLGKACIPDTIPNRVTDHTCPSGGPLSPSLTTPLPPLDISVAEQQQLGYMPLRDDYEIEYDQDAETLISGLSVNYDDDDVEIELKRAHVDMYVRKLKERQRRKNIARDYNLVPAFLGKDKKEKEKALKRKITKEEKELRLKLRPLYQFMSCKEFDDLFENMHKEKMLRAKIRELQRYRRNGITKMEESAEYEAARHKREKRKENKNLAGSKRGKEDGKDSEFAAIENLPGFELLSDREKVLCSSLNLSPARYVTVKTIIIKDHLQKRQGIPSKSRLPSYLDKVLKKRILNFLTESGWISRDAS

SEQ ID NO: 67439 - protein, 328 aa, Homo sapiens
MAAHVGASRTPQEVMEHYVSMYIHGNLGKACIPDTIPNRVTDHTCPSGGPLSPSLTTPLPPLDISVAEQQQLGYMPLRDDYEIEYDQDAETLISGLSVNYDDDDVEIELKRAHVDMYVRKLKERQRRKNIARDYNLVPAFLGKDKKEKEKALKRKITKEEKELRLKLRPLYQFMSCKEFDDLFENMHKEKMLRAKIRELQRYRRNGITKMEESAEYEAARHKREKRKENKNLAGSKRGKEDGKDSEFAAIENLPGFELLSDREKVLCSSLNLSPARYVTVKTIIIKDHLQKRQGIPSKSRLPSYLDKVLKKRILNFLTESGWISRDAS

SEQ ID NO: 67440 - protein, 432 aa, Homo sapiens
MSELKDCPLQFHDFKSVDHLKVCPRYTAVLARSEDDGIGIEELDTLQLELETLLSSASRRLRVLEAETQILTDWQDKKGDRRFLKLGRDHELGAPPKHGKPKKQKLEGKAGHGPGPGPGRPKSKNLQPKIQEYEFTDDPIDVPRIPKNDAPNRFWASVEPYCADITSEEVRTLEELLKPPEDEAEHYKIPPLGKHYSQRWAQEDLLEEQKDGARAAAVADKKKGLMGPLTELDTKDVDALLKKSEAQHEQPEDGCPFGALTQRLLQALVEENIISPMEDSPIPDMSGKESGADGASTSPRNQNKPFSVPHTKSLESRIKEELIAQGLLESEDRPAEDSEDEVLAELRKRQAELKALSAHNRTKKHDLLRLAKEEVSRQELRQRVRMADNEVMDAFRKIMAARQKKRTPTKKEKDQAWKTLKERESILKLLDG

SEQ ID NO: 67441 - protein, 369 aa, Homo sapiens
MSELKDCPLQFHDFKSVDHLKVCPRYTAVLARSEDDGIGIEELDTLQLELETLLSSASRRLRVLEAETQILTDWQDKKGDRRFLKLGRDHELGAPPKHGKPKKQKLEGKAGHGPGPGPGRPKSKNLQPKIQEYEFTDDPIDVPRIPKNDAPNRFWASVEPYCADITSEEVRTLEELLKPPEDEAEHYKIPPLGKHYSQRWAQEDLLEEQKDGARAAAVADKKKGLMGPLTELDTKDVDALLKKSEAQHEQPEDGCPFGALTQRLLQALVEENIISPMEDSPIPDMSGKESGADGASTSPRNQNKPFSVPHTKSLESRIKEELIAQGLLESEDRPAEDSEDEVLAELRKRQAELKALSAHNRTKKHDLLR

SEQ ID NO: 67442 - protein, 95 aa, Homo sapiens
MSELKDCPLQFHDFKSVDHLKVCPRYTAVLARSEDDGIGIEELDTLQLELETLLSSASRRLRVLEAETQILTDWQDKKGDRRFLKLGRDHELGAP

SEQ ID NO: 67443 - protein, 432 aa, Homo sapiens; identical to SEQ ID NO: 67440

SEQ ID NO: 67444 - protein, 345 aa, Homo sapiens
MQLEIQVALNFIISYLYNKLPRRRVNIFGEELERLLKKKYEGHWYPEKPYKGSGFRCIHIGEKVDPVIEQASKESGLDIDDVRGNLPQDLSVWIDPFEVSYQIGEKGPVKVLYVDDNNENGCELDKEIKNSFNPEAQVFMPISDPASSVSSSPSPPFGHSAAVSPTFMPRSTQPLTFTTATFAATKFGSTKMKNSGRSNKVARTSPINLGLNVNDLLKQKAISSSMHSLYGLGLGSQQQPQQQQQPAQPPPPPPPPQQQQQQKTSALSPNAKEFIFPNMQGQGSSTNGMFPGDSPLNLSPLQYSNAFDVFAAYGGLNEKSFVDGLNFSLNNMQYSNQQFQPVMAN

SEQ ID NO: 67445 - protein, 345 aa, Homo sapiens; identical to SEQ ID NO: 67444

SEQ ID NO: 67446 - protein, 344 aa, Homo sapiens
MQLEIKVALNFIISYLYNKLPRRRADLFGEELERLLKKKYEGHWYPEKPLKGSGFRCVHIGEMVDPVVELAAKRSGLAVEDVRANVPEELSVWIDPFEVSYQIGEKGAVKVLYLDDSEGCGAPELDKEIKSSFNPDAQVFVPIGSQDSSLSNSPSPSFGQSPSPTFIPRSAQPITFTTASFAATKFGSTKMKKGGGAASGGGVASSGAGGQQPPQQPRMARSPTNSLLKHKSLSLSMHSLNFITANPAPQSQLSPNAKEFVYNGGGSPSLFFDAADGQGSGTPGPFGGSGAGTCNSSSFDMAQVFGGGANSLFLEKTPFVEGLSYNLNTMQYPSQQFQPVVLAN

SEQ ID NO: 67447 - protein, 101 aa, Homo sapiens
MQLEIKVALNFIISYLYNKLPRRRADLFGEELERLLKKKYEGHWYPEKPLKGSGFRCVHIGEMVDPVVELAAKRSGLAVEDVRANVPEELSVWIDPFEVSY

SEQ ID NO: 67448 - protein, 522 aa, Homo sapiens
MSITSDEVNFLVYRYLQESGFSHSAFTFGIESHISQSNINGTLVPPSALISILQKGLQYVEAEISINKDGTVFDSRPIESLSLIVAVIPDVVQMRQQAFGEKLTQQQASAAATEASAMAKAATMTPAAISQQNPPKNREATVNGEENGAHEINNHSKPMEIDGDVEIPPNKATVLRGHESEVFICAWNPVSDLLASGSGDSTARIWNLNENSNGGSTQLVLRHCIREGGHDVPSNKDVTSLDWNSDGTLLAMGSYDGFARIWTENGNLASTLGQHKGPIFALKWNKKGNYVLSAGVDKTTIIWDAHTGEAKQQFPFHSAPALDVDWQNNMTFASCSTDMCIHVCRLGCDHPVKTFQGHTNEVNAIKWDPSGMLLASCSDDMTLKIWSMKQDACVHDLQAHSKEIYTIKWSPTGPATSNPNSSIMLASASFDSTVRLWDVEQGVCTHTLMKHQEPVYSVAFSPDGKYLASGSFDKYVHIWNTQSGSLVHSYQGTGGIFEVCWNARGDKVGASASDGSVCVLDL

SEQ ID NO: 67449 - protein, 522 aa, Homo sapiens; identical to SEQ ID NO: 67448

SEQ ID NO: 67450 - protein, 522 aa, Homo sapiens; identical to SEQ ID NO: 67448

SEQ ID NO: 67451 - protein, 364 aa, Homo sapiens
MEIDGDVEIPPNKATVLRGHESEVFICAWNPVSDLLASGSGDSTARIWNLNENSNGGSTQLVLRHCIREGGHDVPSNKDVTSLDWNSDGTLLAMGSYDGFARIWTENGNLASTLGQHKGPIFALKWNKKGNYVLSAGVDKTTIIWDAHTGEAKQQFPFHSAPALDVDWQNNMTFASCSTDMCIHVCRLGCDHPVKTFQGHTNEVNAIKWDPSGMLLASCSDDMTLKIWSMKQDACVHDLQAHSKEIYTIKWSPTGPATSNPNSSIMLASASFDSTVRLWDVEQGVCTHTLMKHQEPVYSVAFSPDGKYLASGSFDKYVHIWNTQSGSLVHSYQGTGGIFEVCWNARGDKVGASASDGSVCVLDL

SEQ ID NO: 67452 - protein, 577 aa, Homo sapiens
MTELAGASSSCCHRPAGRGAMQSVLHHFQRLRGREGGSHFINTSSPRGEAKMSITSDEVNFLVYRYLQESGFSHSAFTFGIESHISQSNINGTLVPPAALISILQKGLQYVEAEISINEDGTVFDGRPIESLSLIDAVMPDVVQTRQQAFREKLAQQQASAAAAAAAATAAATAATTTSAGVSHQNPSKNREATVNGEENRAHSVNNHAKPMEIDGEVEIPSSKATVLRGHESEVFICAWNPVSDLLASGSGDSTARIWNLNENSNGGSTQLVLRHCIREGGHDVPSNKDVTSLDWNTNGTLLATGSYDGFARIWTEDGNLASTLGQHKGPIFALKWNRKGNYILSAGVDKTTIIWDAHTGEAKQQFPFHSAPALDVDWQNNTTFASCSTDMCIHVCRLGCDRPVKTFQGHTNEVNAIKWDPSGMLLASCSDDMTLKIWSMKQEVCIHDLQAHNKEIYTIKWSPTGPATSNPNSNIMLASASFDSTVRLWDIERGVCTHTLTKHQEPVYSVAFSPDGKYLASGSFDKCVHIWNTQSGNLVHSYRGTGGIFEVCWNARGDKVGASASDGSVCVLDLRK

SEQ ID NO: 67453 - protein, 526 aa, Homo sapiens
MSITSDEVNFLVYRYLQESGFSHSAFTFGIESHISQSNINGTLVPPAALISILQKGLQYVEAEISINEDGTVFDGRPIESLSLIDAVMPDVVQTRQQAFREKLAQQQASAAAAAAAATAAATAATTTSAGVSHQNPSKNREATVNGEENRAHSVNNHAKPMEIDGEVEIPSSKATVLRGHESEVFICAWNPVSDLLASGSGDSTARIWNLNENSNGGSTQLVLRHCIREGGHDVPSNKDVTSLDWNTNGTLLATGSYDGFARIWTEDGNLASTLGQHKGPIFALKWNRKGNYILSAGVDKTTIIWDAHTGEAKQQFPFHSAPALDVDWQNNTTFASCSTDMCIHVCRLGCDRPVKTFQGHTNEVNAIKWDPSGMLLASCSDDMTLKIWSMKQEVCIHDLQAHNKEIYTIKWSPTGPATSNPNSNIMLASASFDSTVRLWDIERGVCTHTLTKHQEPVYSVAFSPDGKYLASGSFDKCVHIWNTQSGNLVHSYRGTGGIFEVCWNARGDKVGASASDGSVCVLDLRK

SEQ ID NO: 67454 - protein, 577 aa, Homo sapiens; identical to SEQ ID NO: 67452

SEQ ID NO: 67455 - protein, 75 aa, Homo sapiens
MSITSDEVNFLVYRYLQESGFSHSAFTFGIESHISQSNINGTLVPPAALISILQKGLQYVEAEISINEDGTVFDG

SEQ ID NO: 67456 - protein, 45 aa, Homo sapiens
MSITSDEVNFLVYRYLQESGFSHSAFTFGIESHISQSNINGTLVP

SEQ ID NO: 67457 - protein, 526 aa, Homo sapiens; identical to SEQ ID NO: 67453

SEQ ID NO: 67458 - protein, 59 aa, Homo sapiens
MTELAGASSSCCHRPAGRGAMQSVLHHFQRLRGREGGSHFINTSSPRGEAKMSITSDEV

SEQ ID NO: 67459 - protein, 80 aa, Homo sapiens
MTELAGASSSCCHRPAGRGAMQSVLHHFQRLRGREGGSHFINTSSPRGEAKMSITSDEVNFLVYRYLQESGFSHSAFTFG

SEQ ID NO: 67460 - protein, 526 aa, Homo sapiens; identical to SEQ ID NO: 67453

SEQ ID NO: 67461 - protein, 447 aa, Homo sapiens
MELSQMSELMGLSVLLGLLALMATAAVARGWLRAGEERSGRPACQKANGFPPDKSSGSKKQKQYQRIRKEKPQQHNFTHRLLAAALKSHSGNISCMDFSSNGKYLATCADDRTIRIWSTKDFLQREHRSMRANVELDHATLVRFSPDCRAFIVWLANGDTLRVFKMTKREDGGYTFTATPEDFPKKHKAPVIDIGIANTGKFIMTASSDTTVLIWSLKGQVLSTINTNQMNNTHAAVSPCGRFVASCGFTPDVKVWEVCFGKKGEFQEVVRAFELKGHSAAVHSFAFSNDSRRMASVSKDGTWKLWDTDVEYKKKQDPYLLKTGRFEEAAGAAPCRLALSPNAQVLALASGSSIHLYNTRRGEKEECFERVHGECIANLSFDITGRFLASCGDRAVRLFHNTPGHRAMVEEMQGHLKRASNESTRQRLQQQLTQAQETLKSLGALKK

SEQ ID NO: 67462 - protein, 446 aa, Homo sapiens [sequence omitted]

SEQ ID NO: 67463 - protein, 808 aa, Homo sapiens
MAETAAGVGRFKTNYAVERKIEPFYKGGKAQLDQTGQHLFCVCGTRVNILEVASGAVLRSLEQEDQEDITAFDLSPDNEVLVTASRALLLAQWAWQEGSVTRLWKAIHTAPVATMAFDPTSTLLATGGCDGAVRVWDIVRHYGTHHFRGSPGVVHLVAFHPDPTRLLLFSSATDAAIRVWSLQDRSCLAVLTAHYSAVTSLAFSADGHTMLSSGRDKICIIWDLQSCQATRTVPVFESVEAAVLLPEEPVSQLGVKSPGLYFLTAGDQGTLRVWEAASGQCVYTQAQPPGPGQELTHCTLAHTAGVVLTATADHNLLLYEARSLRLQKQFAGYSEEVLDVRFLGPEDSHVVVASNSPCLKVFELQTSACQILHGHTDIVLALDVFRKGWLFASCAKDQSVRIWRMNKAGQVMCVAQGSGHTHSVGTVCCSRLKESFLVTGSQDCTVKLWPLPKALLSKNTAPDNGPILLQAQTTQRCHDKDINSVAIAPNDKLLATGSQDRTAKLWALPQCQLLGVFSGHRRGLWCVQFSPMDQVLATASADGTIKLWALQDFSCLKTFEGHDASVLKVAFVSRGTQLLSSGSDGLVKLWTIKNNECVRTLDAHEDKVWGLHCSRLDDHALTGASDSRVILWKDVTEAEQAEEQARQEEQVVRQQELDNLLHEKRYLRALGLAISLDRPHTVLTVIQAIRRDPEACEKLEATMLRLRRDQKEALLRFCVTWNTNSRHCHEAQAVLGVLLRREAPEELLAYEGVRAALEALLPYTERHFQRLSRTLQAAAFLDFLWHNMKLPVPAAAPTPWETHKGALP

SEQ ID NO: 67464 - protein, 808 aa, Homo sapiens; identical to SEQ ID NO: 67463

SEQ ID NO: 67465 - protein, 242 aa, Homo sapiens
MFPQSRHPTPHQAAGQPFKFTIPESLDRIKEEFQFLQAQYHSLKLECEKLASEKTEMQRHYVMYYEMSYGLNIEMHKQTEIAKRLNTICAQVIPFLSQEHQQQVAQAVERAKQVTMAELNAIIGVRGLPGLPPTQQQLQAQHLSHGHGPPVPLTPHPSGLQPPGIPPLGGSAGLLALSSALSGQSHLAIKDDKKHHDAEHHRGERPGKSNSLLVPDSLRGTDKRRNGPEFSNDIKKRKVDDK

SEQ ID NO: 67466 - protein, 144 aa, Homo sapiens
MQRHYVMYYEMSYGLNIEMHKQTEIAKRLNTICAQVIPFLSQEHQQQVAQAVERAKQVTMAELNAIIGQQQLQAQHLSHGHGPPVPLTPHPSGLQPPGIPPLGGSAGLLALSSALSGQSHLAIKDDKKHHDAEHHRGERPGKPD

SEQ ID NO: 67467 - protein, 127 aa, Homo sapiens
MPTPGTSATPGLRPGLGKPPAIDPLVNQAAAGLRTPLAVPGPYPAPFGMVPHAGMNGELTSPGAAYASLHNMSPQMSAAAAAAAVVAYGRSPMVGFDPPPHMRVPTIPPNLAGIPGGKPSLVPAPAH

SEQ ID NO: 67468 - protein, 127 aa, Homo sapiens; identical to SEQ ID NO: 67467

SEQ ID NO: 67469 - protein, 770 aa, Homo sapiens
MFPQSRHPTPHQAAGQPFKFTIPESLDRIKEEFQFLQAQYHSLKLECEKLASEKTEMQRHYVMYYEMSYGLNIEMHKQTEIAKRLNTICAQVIPFLSQEHQQQVAQAVERAKQVTMAELNAIIGQQQLQAQHLSHGHGPPVPLTPHPSGLQPPGIPPLGGSAGLLALSSALSGQSHLAIKDDKKHHDAEHHRDREPGTSNSLLVPDSLRGTDKRRNGPEFSNDIKKRKVDDKDSSHYDSDGDKSDDNLVVDVSNEDPSSPRASPAHSPRENGIDKNRLLKKDASSSPASTASSASSTSLKSKEMSLHEKASTPVLKSSTPTPRSDMPTPGTSATPGLRPGLGKPPAIDPLVNQAAAGLRTPLAVPGPYPAPFGMVPHAGMNGELTSPGAAYASLHNMSPQMSAAAAAAAVVAYGRSPMVGFDPPPHMRVPTIPPNLAGIPGGKPAYSFHVTADGQMQPVPFPPDALIGPGIPRHARQINTLNHGEVVCAVTISNPTRHVYTGGKGCVKVWDISHPGNKSPVSQLDCLNRDNYIRSCKLLPDGCTLIVGGEASTLSIWDLAAPTPRIKAELTSSAPACYALAISPDSKVCFSCCSDGNIAVWDLHNQTLVRQFQGHTDGASCIDISNDGTKLWTGGLDNTVRSWDLREGRQLQQHDFTSQIFSLGYCPTGEWLAVGMESSNVEVLHVNKPDKYQLHLHESCVLSLKFAYCGKWFVSTGKDNLLNAWRTPYGASIFQSKESSSVLSCDISVDDKYIVTGSGDKKATVYEVIY

SEQ ID NO: 67470 - protein, 242 aa, Homo sapiens
MFPQSRHPTPHQAAGQPFKFTIPESLDRIKEEFQFLQAQYHSLKLECEKLASEKTEMQRHYVMYYEMSYGLNIEMHKQTEIAKRLNTICAQVIPFLSQEHQQQVAQAVERAKQVTMAELNAIIGVRGLPGLPPTQQQLQAQHLSHGHGPPVPLTPHPSGLQPPGIPPLGGSAGLLALSSALSGQSHLAIKDDKKHHDAEHHRDREPGTSNSLLVPDSLRGTDKRRNGPEFSNDIKKRKVDDK

SEQ ID NO: 67471 - protein, 706 aa, Homo sapiens
MVQSRLTATSASQDSPASGLQTPLQSGQPFKFSILEICDRIKEEFQFLQAQYHSLKLECEKLASEKTEMQRHYVMYYEMSYGLNIEMHKQAEIVKRLSGICAQIIPFLTQEHQQQVLQAVERAKQVTVGELNSLIGQQQLQPLSHHAPPVPLTPRPAGLVGGSATGLLALSGALAAQAQLAAAVKEDRAGVEAEGSRVERAPSRSASPSPPESLVEEERPSGPGGGGKQRADEKEPSGPYESDEDKSDYNLVVDEDQPSEPPSPATTPCGKVPICIPARRDLVDSPASLASSLGSPLPRAKELILNDLPASTPASKSCDSSPPQDASTPGPSSASHLCQLAAKPAPSTDSVALRSPLTLSSPFTTSFSLGSHSTLNGDLSVPSSYVSLHLSPQVSSSVVYGRSPVMAFESHPHLRGSSVSSSLPSIPGGKPAYSFHVSADGQMQPVPFPSDALVGAGIPRHARQLHTLAHGEVVCAVTISGSTQHVYTGGKGCVKVWDVGQPGAKTPVAQLDCLNRDNYIRSCKLLPDGRSLIVGGEASTLSIWDLAAPTPRIKAELTSSAPACYALAVSPDAKVCFSCCSDGNIVVWDLQNQTMVRQFQGHTDGASCIDISDYGTRLWTGGLDNTVRCWDLREGRQLQQHDFSSQIFSLGHCPNQDWLAVGMESSNVEILHVRKPEKYQLHLHESCVLSLKFASCVQGVVLSPEL

SEQ ID NO: 67472 - protein, 743 aa, Homo sapiens
MYPQGRHPTPLQSGQPFKFSILEICDRIKEEFQFLQAQYHSLKLECEKLASEKTEMQRHYVMYYEMSYGLNIEMHKQAEIVKRLSGICAQIIPFLTQEHQQQVLQAVERAKQVTVGELNSLIGQQLQPLSHHAPPVPLTPRPAGLVGGSATGLLALSGALAAQAQLAAAVKEDRAGVEAEGSRVERAPSRSASPSPPESLVEEERPSGPGGGGKQRADEKEPSGPYESDEDKSDYNLVVDEDQPSEPPSPATTPCGKVPICIPARRDLVDSPASLASSLGSPLPRAKELILNDLPASTPASKSCDSSPPQDASTPGPSSASHLCQLAAKPAPSTDSVALRSPLTLSSPFTTSFSLGSHSTLNGDLSVPSSYVSLHLSPQVSSSVVYGRSPVMAFESHPHLRGSSVSSSLPSIPGGKPAYSFHVSADGQMQPVPFPSDALVGAGIPRHARQLHTLAHGEVVCAVTISGSTQHVYTGGKGCVKVWDVGQPGAKTPVAQLDCLNRDNYIRSCKLLPDGRSLIVGGEASTLSIWDLAAPTPRIKAELTSSAPACYALAVSPDAKVCFSCCSDGNIVVWDLQNQTMVRQFQGHTDGASCIDISDYGTRLWTGGLDNTVRCWDLREGRQLQQHDFSSQIFSLGHCPNQDWLAVGMESSNVEILHVRKPEKYQLHLHESCVLSLKFASCGRWFVSTGKDNLLNAWRTPYGASIFQSKESSSVLSCDISRNNKYIVTGSGDKKATVYEVVY

SEQ ID NO: 67473 - protein, 292 aa, Homo sapiens
LAHGEVVCAVTISGSTQHVYTGGKGCVKVWDVDGAVFAGQRGGAHQPIRNRDNYIRSCKLLPDGRSLIVGGEASTLSIWDLAAPTPRIKAELTSSAPACYALAVSPDAKVCFSCCSDGNIVVWDLQNQTMVRQFQGHTDGASCIDISDYGTRLWTGGLDNTVRCWDLREGRQLQQHDFSSQIFSLGHCPNQDWLAVGMESSNVEILHVRKPEKYQLHLHESCVLSLKFASCGRWFVSTGKDNLLNAWRTPYGASIFQSKESSSVLSCDISRNNKYIVTGSGDKKATVYEVVY

SEQ ID NO: 67474 - protein, 706 aa, Homo sapiens; identical to SEQ ID NO: 67471

SEQ ID NO: 67475 - protein, 360 aa, Homo sapiens
MYPQGRHPTPLQSGQPFKFSILEICDRIKEEFQFLQAQYHSLKLECEKLASEKTEMQRHYVMYYEMSYGLNIEMHKQAEIVKRLSGICAQIIPFLTQESASPSPPESLVEEERPSGPGGGGKQRADEKEPSGPYESDEDKSDYNLVVDEDQPSEPPSPATTPCGKVPICIPARRDLVDSPASLASSLGSPLPRAKELILNDLPASTPASKSCDSSPPQDASTPGPSSASHLCQLAAKPAPSTDSVALRSPLTLSSPFTTSFSLGSHSTLNGDLSVPSSYVSLHLSPQVSSSVVYGRSPVMAFESHPHLRGSSVSSSLPSIPGGKPAYSFHVSADGQMQPVPFPSDALVGAGIPPWPSSTA

SEQ ID NO: 67476 - protein, 621 aa, Homo sapiens
MQRHYVMYYEMSYGLNIEMHKQAEIVKRLSGICAQIIPFLTQEHQQQVLQAVERAKQVTVGELNSLIGSASPSPPESLVEEERPSGPGGGGKQRADEKEPSGPYESDEDKSDYNLVVDEDQPSEPPSPATTPCGKVPICIPARRDLVDSPASLASSLGSPLPRAKELILNDLPASTPASKSCDSSPPQDASTPGPSSASHLCQLAAKPAPSTDSVALRSPLTLSSPFTTSFSLGSHSTLNGDLSVPSSYVSLHLSPQVSSSVVYGRSPVMAFESHPHLRGSSVSSSLPSIPGGKPAYSFHVSADGQMQPVPFPSDALVGAGIPRHARQLHTLAHGEVVCAVTISGSTQHVYTGGKGCVKVWDVGQPGAKTPVAQLDCLNRDNYIRSCKLLPDGRSLIVGGEASTLSIWDLAAPTPRIKAELTSSAPACYALAVSPDAKVCFSCCSDGNIVVWDLQNQTMVRQFQGHTDGASCIDISDYGTRLWTGGLDNTVRCWDLREGRQLQQHDFSSQIFSLGHCPNQDWLAVGMESSNVEILHVRKPEKYQLHLHESCVLSLKFASCGRWFVSTGKDNLLNAWRTPYGASIFQSKESSSVLSCDISRNNKYIVTGSGDKKATVYEVVY

SEQ ID NO: 67477 - protein, 410 aa, Homo sapiens
MTFPPALLPPNPVTPPRPRTLPPPGPARPVTSASLLPSQHLPRTASVSSSVVYGRSPVMAFESHPHLRGSSVSSSLPSIPGGKPAYSFHVSADGQMQPVPFPSDALVGAGIPRHARQLHTLAHGEVVCAVTISGSTQHVYTGGKGCVKVWDVGQPGAKTPVAQLDCLNRDNYIRSCKLLPDGRSLIVGGEASTLSIWDLAAPTPRIKAELTSSAPACYALAVSPDAKVCFSCCSDGNIVVWDLQNQTMVRQFQGHTDGASCIDISDYGTRLWTGGLDNTVRCWDLREGRQLQQHDFSSQIFSLGHCPNQDWLAVGMESSNVEILHVRKPEKYQLHLHESCVLSLKFASCGRWFVSTGKDNLLNAWRTPYGASIFQSKESSSVLSCDISRNNKYIVTGSGDKKATVYEVVY

SEQ ID NO: 67478 - protein, 686 aa, Homo sapiens
QTPLQSGQPFKFSILEICDRIKEEFQFLQAQYHSLKLECEKLASEKTEMQRHYVMYYEMSYGLNIEMHKQAEIVKRLSGICAQIIPFLTQEHQQQVLQAVERAKQVTVGELNSLIGQQQLQPLSHHAPPVPLTPRPAGLVGGSATGLLALSGALAAQAQLAAAVKEDRAGVEAEGSRVERAPSRSASPSPPESLVEEERPSGPGGGGKQRADEKEPSGPYESDEDKSDYNLVVDEDQPSEPPSPATTPCGKVPICIPARRDLVDSPASLASSLGSPLPRAKELILNDLPASTPASKSCDSSPPQDASTPGPSSASHLCQLAAKPAPSTDSVALRSPLTLSSPFTTSFSLGSHSTLNGDLSVPSSYVSLHLSPQVSSSVVYGRSPVMAFESHPHLRGSSVSSSLPSIPGGKPAYSFHVSADGQMQPVPFPSDALVGAGIPRHARQLHTLAHGEVVCAVTISGSTQHVYTGGKGCVKVWDVGQPGAKTPVAQLDCLNRDNYIRSCKLLPDGRSLIVGGEASTLSIWDLAAPTPRIKAELTSSAPACYALAVSPDAKVCFSCCSDGNIVVWDLQNQTMVRQFQGHTDGASCIDISDYGTRLWTGGLDNTVRCWDLREGRQLQQHDFSSQIFSLGHCPNQDWLAVGMESSNVEILHVRKPEKYQLHLHESCVLSLKFASCVQGVVLSPEL

SEQ ID NO: 67479 - protein, 621 aa, Homo sapiens; identical to SEQ ID NO: 67476

SEQ ID NO: 67480 - protein, 760 aa, Homo sapiens
MYPQGRHPAPHQPGQPGFKFTVAESCDRIKDEFQFLQAQYHSLKVEYDKLANEKTEMQRHYVMYYEMSYGLNIEMHKQTEIAKRLNTILAQIMPFLSQEHQQQVAQAVERAKQVTMTELNAIIGQQQLQAQHLSHATHGPPVQLPPHPSGLQPPGIPPVTGSSSGLLALGALGSQAHLTVKDEKNHHELDHRERESSANNSVSPSESLRASEKHRGSADYSMEAKKRKAEEKDSLSRYDSDGDKSDDLVVDVSNEDPATPRVSPAHSPPENGLDKARSLKKDAPTSPASVASSSSTPSSKTKDLGHNDKSSTPGLKSNTPTPRNDAPTPGTSTTPGLRSMPASALRTPISITSSYAAPFAMMSHHEMNGSLTSPGAYAGLHNIPPQMSAAAAAAAAAYGRSPMVSFGAVGFDPHPPMRATGLPSSLASIPGGKPAYSFHVSADGQMQPVPFPHDALAGPGIPRHARQINTLSHGEVVCAVTISNPTRHVYTGGKGCVKIWDISQPGSKSPISQLDCLNRDNYIRSCKLLPDGRTLIVGGEASTLTIWDLASPTPRIKAELTSSAPACYALAISPDAKVCFSCCSDGNIAVWDLHNQTLVRQFQGHTDGASCIDISHDGTKLWTGGLDNTVRSWDLREGRQLQQHDFTSQIFSLGYCPTGEWLAVGMESSNVEVLHHTKPDKYQLHLHESCVLSLKFAYCGKWFVSTGKDNLLNAWRTPYGASIFQSKESSSVLSCDISADDKYIVTGSGDKKATVYEVIY

SEQ ID NO: 67481 - protein, 762 aa, Homo sapiens
MAPHQPGQPGFKFTVAESCDRIKDEFQFLQAQYHSLKVEYDKLANEKTEMQRHYVMYYEMSYGLNIEMHKQTEIAKRLNTILAQIMPFLSQEHQQQVAQAVERAKQVTMTELNAIIGQQQLQAQHLSHATHGPPVQLPPHPSGLQPPGIPPVTGSSSGLLALGALGSQAHLTVKDEKNHHELDHRERESSANNSVSPSESLRASEKHRGSADYSMEAKKRKAEEKDSLSRYDSDGDKSDDLVVDVSNEDPATPRVSPAHSPPENGLDKARSLKKDAPTSPASVASSSSTPSSKTKDLGHNDKSSTPGLKSNTPTPRNDAPTPGTSTTPGLRSMPGKPPGMDPIASALRTPISITSSYAAPFAMMSHHEMNGSLTSPGAYAGLHNIPPQMSAAAAAAAAAYGRSPMVSFGAVGFDPHPPMRATGLPSSLASIPGGKPAYSFHVSADGQMQPVPFPHDALAGPGIPRHARQINTLSHGEVVCAVTISNPTRHVYTGGKGCVKIWDISQPGSKSPISQLDCLNRDNYIRSCKLLPDGRTLIVGGEASTLTIWDLASPTPRIKAELTSSAPACYALAISPDAKVCFSCCSDGNIAVWDLHNQTLVRQFQGHTDGASCIDISHDGTKLWTGGLDNTVRSWDLREGRQLQQHDFTSQIFSLGYCPTGEWLAVGMESSNVEVLHHTKPDKYQLHLHESCVLSLKFAYCGKWFVSTGKDNLLNAWRTPYGASIFQSKESSSVLSCDISADDKYIVTGSGDKKATVYEVIY

SEQ ID NO: 67482 - protein, 764 aa, Homo sapiens
MYPQGRHPAPHQPGQPGFKFTVAESCDRIKDEFQFLQAQYHSLKVEYDKLANEKTEMQRHYVMYYEMSYGLNIEMHKQTEIAKRLNTILAQIMPFLSQEHQQQVAQAVERAKQVTMTELNAIIGQQQLQAQHLSHATHGPPVQLPPHPSGLQPPGIPPVTGSSSGLLALGALGSQAHLTVKDEKNHHELDHRERSSASNNSVSPSESLRASEKHRGSADYSMEAKKRKAEEKDSLSRYDSDGDKSDDLVVDVSNEDPATPRVSPAHSPPENGLDKARSLKKDAPTSPASVASSSSTPSSKTKDLGHNDKSSTPGLKSNTPTPRNDAPTPGTSTTPGLRSMPGKPPGMDPIASALRTPISITSSYAAPFAMMSHHEMNGSLTSPGAYAGLHNIPPQMSAAAAAAAAAYGRSPMVGFDPHPPMRATGLPSSLASIPGGKPAYSFHVSADGQMQPVPFPHDALAGPGIPRHARQINTLSHGEVVCAVTISNPTRHVYTGGKGCVKIWDISQPGSKSPISQLDCLNRDNYIRSCKLLPDGRTLIVGGEASTLTIWDLASPTPRIKAELTSSAPACYALAISPDAKVCFSCCSDGNIAVWDLHNQTLVRQFQGHTDGASCIDISHDGTKLWTGGLDNTVRSWDLREGRQLQQHDFTSQIFSLGYCPTGEWLAVGMESSNVEVLHHTKPDKYQLHLHESCVLSLKFAYCGKWFVSTGKDNLLNAWRTPYGASIFQSKESSSVLSCDISADDKYIVTGSGDKKATVYEVIY

SEQ ID NO: 67483 - protein, 769 aa, Homo sapiens
MYPQGRHPAPHQPGQPGFKFTVAESCDRIKDEFQFLQAQYHSLKVEYDKLANEKTEMQRHYVMYYEMSYGLNIEMHKQTEIAKRLNTILAQIMPFLSQEHQQQVAQAVERAKQVTMTELNAIIGQQQLQAQHLSHATHGPPVQLPPHPSGLQPPGIPPVTGSSSGLLALGALGSQAHLTVKDEKNHHELDHRERESSANNSVSPSESLRASEKHRGSADYSMEAKKRKAEEKDSLSRYDSDGDKSDDLVVDVSNEDPATPRVSPAHSPPENGLDKARSLKKDAPTSPASVASSSSTPSSKTKDLGHNDKSSTPGLKSNTPTPRNDAPTPGTSTTPGLRSMPGKPPGMDPIASALRTPISITSSYAAPFAMMSHHEMNGSLTSPGAYAGLHNIPPQMSAAAAAAAAAYGRSPMVSFGAVGFDPHPPMRATGLPSSLASIPGGKPAYSFHVSADGQMQPVPFPHDALAGPGIPRHARQINTLSHGEVVCAVTISNPTRHVYTGGKGCVKIWDISQPGSKSPISQLDCLNRDNYIRSCKLLPDGRTLIVGGEASTLTIWDLASPTPRIKAELTSSAPACYALAISPDAKVCFSCCSDGNIAVWDLHNQTLVRQFQGHTDGASCIDISHDGTKLWTGGLDNTVRSWDLREGRQLQQHDFTSQIFSLGYCPTGEWLAVGMESSNVEVLHHTKPDKYQLHLHESCVLSLKFAYCGKWFVSTGKDNLLNAWRTPYGASIFQSKESSSVLSCDISADDKYIVTGSGDKKATVYEVIY

SEQ ID NO: 67484 - protein, 764 aa, Homo sapiens
MYPQGRHPAPHQPGQPGFKFTVAESCDRIKDEFQFLQAQYHSLKVEYDKLANEKTEMQRHYVMYYEMSYGLNIEMHKQTEIAKRLNTILAQIMPFLSQEHQQQVAQAVERAKQVTMTELNAIIGQQQLQAQHLSHATHGPPVQLPPHPSGLQPPGIPPVTGSSSGLLALGALGSQAHLTVKDEKNHHELDHRERESSANNSVSPSESLRASEKHRGSADYSMEAKKRKAEEKDSLSRYDSDGDKSDDLVVDVSNEDPATPRVSPAHSPPENGLDKARSLKKDAPTSPASVASSSSTPSSKTKDLGHNDKSSTPGLKSNTPTPRNDAPTPGTSTTPGLRSMPGKPPGMDPIASALRTPISITSSYAAPFAMMSHHEMNGSLTSPGAYAGLHNIPPQMSAAAAAAAAAYGRSPMVGFDPHPPMRATGLPSSLASIPGGKPAYSFHVSADGQMQPVPFPHDALAGPGIPRHARQINTLSHGEVVCAVTISNPTRHVYTGGKGCVKIWDISQPGSKSPISQLDCLNRDNYIRSCKLLPDGRTLIVGGEASTLTIWDLASPTPRIKAELTSSAPACYALAISPDAKVCFSCCSDGNIAVWDLHNQTLVRQFQGHTDGASCIDISHDGTKLWTGGLDNTVRSWDLREGRQLQQHDFTSQIFSLGYCPTGEWLAVGMESSNVEVLHHTKPDKYQLHLHESCVLSLKFAYCGKWFVSTGKDNLLNAWRTPYGASIFQSKESSSVLSCDISADDKYIVTGSGDKKATVYEVIY

SEQ ID NO: 67485 - protein, 772 aa, Homo sapiens
MYPQGRHPAPHQPGQPGFKFTVAESCDRIKDEFQFLQAQYHSLKVEYDKLANEKTEMQRHYVMYYEMSYGLNIEMHKQTEIAKRLNTILAQIMPFLSQEHQQQVAQAVERAKQVTMTELNAIIGQQQLQAQHLSHATHGPPVQLPPHPSGLQPPGIPPVTGSSSGLLALGALGSQAHLTVKDEKNHHELDHRERESSANNSVSPSESLRASEKHRGSADYSMEAKKRKAEEKDSLSRYDSDGDKSDDLVVDVSNEDPATPRVSPAHSPPENGLDKARSLKKDAPTSPASVASSSSTPSSKTKDLGHNDKSSTPGLKSNTPTPRNDAPTPGTSTTPGLRSMPGKPPGMDPIGIMASALRTPISITSSYAAPFAMMSHHEMNGSLTSPGAYAGLHNIPPQMSAAAAAAAAAYGRSPMVSFGAVGFDPHPPMRATGLPSSLASIPGGKPAYSFHVSADGQMQPVPFPHDALAGPGIPRHARQINTLSHGEVVCAVTISNPTRHVYTGGKGCVKIWDISQPGSKSPISQLDCLNRDNYIRSCKLLPDGRTLIVGGEASTLTIWDLASPTPRIKAELTSSAPACYALAISPDAKVCFSCCSDGNIAVWDLHNQTLVRQFQGHTDGASCIDISHDGTKLWTGGLDNTVRSWDLREGRQLQQHDFTSQIFSLGYCPTGEWLAVGMESSNVEVLHHTKPDKYQLHLHESCVLSLKFAYCGKWFVSTGKDNLLNAWRTPYGASIFQSKESSSVLSCDISADDKYIVTGSGDKKATVYEVIY

SEQ ID NO: 67486 - protein, 772 aa, Homo sapiens
MPPPPPLSCLRGLQAPHQPGQPGFKFTVAESCDRIKDEFQFLQAQYHSLKVEYDKLANEKTEMQRHYVMYYEMSYGLNIEMHKQTEIAKRLNTILAQIMPFLSQEHQQQVAQAVERAKQVTMTELNAIIGQQLQAQHLSHATHGPPVQLPPHPSGLQPPGIPPVTGSSSGLLALGALGSQAHLTVKDEKNHHELDHRERESSANNSVSPSESLRASEKHRGSADYSMEAKKRKAEEKDSLSRYDSDGDKSDDLVVDVSNEDPATPRVSPAHSPPENGLDKARSLKKDAPTSPASVASSSSTPSSKTKDLGHNDKSSTPGLKSNTPTPRNDAPTPGTSTTPGLRSMPGKPPGMDPIGIMASALRTPISITSSYAAPFAMMSHHEMNGSLTSPGAYAGLHNIPPQMSAAAAAAAAAYGRSPMVGFDPHPPMRATGLPSSLASIPGGKPAYSFHVSADGQMQPVPFPHDALAGPGIPRHARQINTLSHGEVVCAVTISNPTRHVYTGGKGCVKIWDISQPGSKSPISQLDCLNRDNYIRSCKLLPDGRTLIVGGEASTLTIWDLASPTPRIKAELTSSAPACYALAISPDAKVCFSCCSDGNIAVWDLHNQTLVRQFQGHTDGASCIDISHDGTKLWTGGLDNTVRSWDLREGRQLQQHDFTSQIFSLGYCPTGEWLAVGMESSNVEVLHHTKPDKYQLHLHESCVLSLKFAYCGKWFVSTGKDNLLNAWRTPYGASIFQSKESSSVLSCDISADDKYIVTGSGDKKATVYEVIY

SEQ ID NO: 67487 - protein, 774 aa, Homo sapiens
MPPPPPLSCLRGLQAPHQPGQPGFKFTVAESCDRIKDEFQFLQAQYHSLKVEYDKLANEKTEMQRHYVMYYEMSYGLNIEMHKQTEIAKRLNTILAQIMPFLSQEHQQQVAQAVERAKQVTMTELNAIIGQQLQAQHLSHATHGPPVQLPPHPSGLQPPGIPPVTGSSSGLLALGALGSQAHLTVKDEKNHHELDHRERESSANNSVSPSESLRASEKHRGSADYSMEAKKRKAEEKDSLSRYDSDGDKSDDLVVDVSNEDPATPRVSPAHSPPENGLDKARSLKKDAPTSPASVASSSSTPSSKTKDLGHNDKSSTPGLKSNTPTPRNDAPTPGTSTTPGLRSMPGKPPGMDPIASALRTPISITSSYAAPFAMMSHHEMNGSLTSPGAYAGLHNIPPQMSAAAAAAAAAYGRSPMVSFGAVGFDPHPPMRATGLPSSLASIPGGKPAYSFHVSADGQMQPVPFPHDALAGPGIPRHARQINTLSHGEVVCAVTISNPTRHVYTGGKGCVKIWDISQPGSKSPISQLDCLNRDNYIRSCKLLPDGRTLIVGGEASTLTIWDLASPTPRIKAELTSSAPACYALAISPDAKVCFSCCSDGNIAVWDLHNQTLVRQFQGHTDGASCIDISHDGTKLWTGGLDNTVRSWDLREGRQLQQHDFTSQIFSLGYCPTGEWLAVGMESSNVEVLHHTKPDKYQLHLHESCVLSLKFAYCGKWFVSTGKDNLLNAWRTPYGASIFQSKESSSVLSCDISADDKYIVTGSGDKKATVYEVIY

SEQ ID NO: 67488 - protein, 572 aa, Homo sapiens
MTSRDQPRPKGPPKSTSPCPGISNSESSPTLNYQGILNRLKQFPRFSPHFAAELESIYYSLHKIQQDVAEHHKQIGNVLQIVESCSQLQGFQSEEVSPAEPASPGTPQQVKDKTLQESSFEDIMATRSSDWLRRPLGEDNQPETQLFWDKEPWFWHDTLTEQLWRIFAGVHDEKAKPRDRQQAPGLGQESKAPGSCDPGTDPCPEDASTPRPPEASSSPPEGSQDRNTSWGVVQEPPGRASRFLQSISWDPEDFEDAWKRPDALPGQSKRLAVPCKLEKMRILAHGELVLATAISSFTRHVFTCGRRGIKVWSLTGQVAEDRFPESHLPIQTPGAFLRTCLLSSNSRSLLTGGYNLASVSVWDLAAPSLHVKEQLPCAGLNCQALDANLDANLAFASFTSGVVRIWDLRDQSVVRDLKGYPDGVKSIVVKGYNIWTGGPDACLRCWDQRTIMKPLEYQFKSQIMSLSHSPQEDWVLLGMANGQQWLQSTSGSQRHMVGQKDSVILSVKFSPFGQWWASVGMDDFLGVYSMPAGTKVFEVPEMSPVTCCDVSSNNRLVVTGSGEHASVYQITY

SEQ ID NO: 67489 - protein, 416 aa, Homo sapiens
MATRSSDWLRRPLGEDNQPETQLFWDKEPWFWHDTLTEQLWRIFAGVHDEKAKPRDRQQAPGLGQESKAPGSCDPGTDPCPEDASTPRPPEASSSPPEGSQDRNTSWGVVQEPPGRASRFLQSISWDPEDFEDAWKRPDALPGQSKRLAVPCKLEKMRILAHGELVLATAISSFTRHVFTCGRRGIKVWSLTGQVAEDRFPESHLPIQTPGAFLRTCLLSSNSRSLLTGGYNLASVSVWDLAAPSLHVKEQLPCAGLNCQALDANLDANLAFASFTSGVVRIWDLRDQSVVRDLKGYPDGVKSIVVKGYNIWTGGPDACLRCWDQRTIMKPLEYQFKSQIMSLSHSPQEDWVLLGMANGQQWLQSTSGSQRHMVGQRQRHPERQVLPLWPVVGKRWNGRLPWRLQHAGGDKSVRGA

SEQ ID NO: 67490 - protein, 572 aa, Homo sapiens [sequence omitted]

SEQ ID NO: 67491 - protein, 449 aa, Homo sapiens
MATRSSDWLRRPLGEDNQPETQLFWDKEPWFWHDTLTEQLWRIFAGVHDEKAKPRDRQQAPGLGQESKAPGSCDPGTDPCPEDASTPRPPEASSSPPEGSQDRNTSWGVVQEPPGRASRFLQSISWDPEDFEDAWKRPDALPGQSKRLAVPCKLEKMRILAHGELVLATAISSFTRHVFTCGRRGIKVWSLTGQVAEDRFPESHLPIQTPGAFLRTCLLSSNSRSLLTGGYNLASVSVWDLAAPSLHVKEQLPCAGLNCQALDANLDANLAFASFTSGVVRIWDLRDQSVVRDLKGYPDGVKSIVVKGYNIWTGGPDACLRCWDQRTIMKPLEYQFKSQIMSLSHSPQEDWVLLGMANGQQWLQSTSGSQRHMVGQKDSVILSVKFSPFGQWWASVGMDDFLGVYSMPAGTKVFEVPEMSPVTCCDVSSNNRLVVTGSGEHASVYQITY

SEQ ID NO: 67492 - protein, 571 aa, Homo sapiens
MNQLRGKKSCHTGLGRSAGWNIPIGLLYCDLPEPRKPLEKAVANFFSGSCAPCADGTDFPQLCQLCPGCGCSTLNQYFGYSGAFKCLKDGAGDVAFVKHSTIFENLANKADRDQYELLCLDNTRKPVDEYKDCHLAQVPSHTVVARSMGGKEDLIWELLNQAQEHFGKDKSKEFQLFSSPHGKDLLFKDSAHGFLKVPPRMDAKMYLGYEYVTAIRNLREGTCPEAPTDECKPVKWCALSHHERLKCDEWSVNSVGKIECVSAETTEDCIAKIMNGEADAMSLDGGFVYIAGKCGLVPVLAENYNKSDNCEDTPEAGYFAIAVVKKSASDLTWDNLKGKKSCHTAVGRTAGWNIPMGLLYNKINHCRFDEFFSEGCAPGSKKDSSLCKLCMGSGLNLCEPNNKEGYYGYTGAFRCLVEKGDVAFVKHQTVPQNTGGKNPDPWAKNLNEKDYELLCLDGTRKPVEEYANCHLARAPNHAVVTRKDKEACVHKILRQQQHLFGSNVTDCSGNFCLFRSETKDLLFRDDTVCLAKLHDRNTYEKYLGEEYVKAVGNLRKCSTSSLLEACTFRRP

SEQ ID NO: 67493 - protein, 698 aa, Homo sapiens
MRLAVGALLVCAVLGLCLAVPDKTVRWCAVSEHEATKCQSFRDHMKSVIPSDGPSVACVKKASYLDCIRAIAANEADAVTLDAGLVYDAYLAPNNLKPVVAEFYGSKEDPQTFYYAVAVVKKDSGFQMNQLRGKKSCHTGLGRSAGWNIPIGLLYCDLPEPRKPLEKAVANFFSGSCAPCADGTDFPQLCQLCPGCGCSTLNQYFGYSGAFKCLKDGAGDVAFVKHSTIFENLANKADRDQYELLCLDNTRKPVDEYKDCHLAQVPSHTVVARSMGGKEDLIWELLNQAQEHFGKDKSKEFQLFSSPHGKDLLFKDSAHGFLKVPPRMDAKMYLGYEYVTAIRNLREGTCPEAPTDECKPVKWCALSHHERLKCDEWSVNSVGKIECVSAETTEDCIAKIMNGEADAMSLDGGFVYIAGKCGLVPVLAENYNKSDNCEDTPEAGYFAIAVVKKSASDLTWDNLKGKKSCHTAVGRTAGWNIPMGLLYNKINHCRFDEFFSEGCAPGSKKDSSLCKLCMGSGLNLCEPNNKEGYYGYTGAFRCLVEKGDVAFVKHQTVPQNTGGKNPDPWAKNLNEKDYELLCLDGTRKPVEEYANCHLARAPNHAVVTRKDKEACVHKILRQQQHLFGSNVTDCSGNFCLFRSETKDLLFRDDTVCLAKLHDRNTYEKYLGEEYVKAVGNLRKCSTSSLLEACTFRRP

SEQ ID NO: 67494 - protein, 760 aa, Homo sapiens
MMDQARSAFSNLFGGEPLSYTRFSLARQVDGDNSHVEMKLAVDEEENADNNTKANVTKPKRCSGSICYGTIAVIVFFLIGFMIGYLGYCKGVEPKTECERLAGTESPVREEPGEDFPAARRLYWDDLKRKLSEKLDSTDFTGTIKLLNENSYVPREAGSQKDENLALYVENQFREFKLSKVWRDQHFVKIQVKDSAQNSVIIVDKNGRLVYLVENPGGYVAYSKAATVTGKLVHANFGTKKDFEDLYTPVNGSIVIVRAGKITFAEKVANAESLNAIGVLIYMDQTKFPIVNAELSFFGHAHLGTGDPYTPGFPSFNHTQFPPSRSSGLPNIPVQTISRAAAEKLFGNMEGDCPSDWKTDSTCRMVTSESKNVKLTVSNVLKEIKILNIFGVIKGFVEPDHYVVVGAQRDAWGPGAAKSGVGTALLLKLAQMFSDMVLKDGFQPSRSIIFASWSAGDFGSVGATEWLEGYLSSLHLKAFTYINLDKAVLGTSNFKVSASPLLYTLIEKTMQNVKHPVTGQFLYQDSNWASKVEKLTLDNAAFPFLAYSGIPAVSFCFCEDTDYPYLGTTMDTYKELIERIPELNKVARAAAEVAGQFVIKLTHDVELNLDYERYNSQLLSFVRDLNQYRADIKEMGLSLQWLYSARGDFFRATSRLTTDFGNAEKTDRFVMKKLNDRVMRVEYHFLSPYVSPKESPFRHVFWGSGSHTLPALLENLKLRKQNNGAFNETLFRNQLALATWTIQGAANALSGDVWDIDNEF

SEQ ID NO: 67495 - protein, 760 aa, Homo sapiens; identical to SEQ ID NO: 67494

SEQ ID NO: 67496 - protein, 478 aa, Homo sapiens
MDQTKFPIVNAELSFFGHAHLGTGDPYTPGFPSFNHTQFPPSRSSGLPNIPVQTISRAAAEKLFGNMEGDCPSDWKTDSTCRMVTSESKNVKLTVSNVLKEIKILNIFGVIKGFVEPDHYVVVGAQRDAWGPGAAKSGVGTALLLKLAQMFSDMVLKDGFQPSRSIIFASWSAGDFGSVGATEWLEGYLSSLHLKAFTYINLDKAVLGTSNFKVSASPLLYTLIEKTMQNVKHPVTGQFLYQDSNWASKVEKLTLDNAAFPFLAYSGIPAVSFCFCEDTDYPYLGTTMDTYKELIERIPELNKVARAAAEVAGQFVIKLTHDVELNLDYERYNSQLLSFVRDLNQYRADIKEMGLSLQWLYSARGDFFRATSRLTTDFGNAEKTDRFVMKKLNDRVMRVEYHFLSPYVSPKESPFRHVFWGSGSHTLPALLENLKLRKQNNGAFNETLFRNQLALATWTIQGAANALSGDVWDIDNEF

SEQ ID NO: 67497 - protein, 13 aa, Homo sapiens
MDQARSAFSNLDL

SEQ ID NO: 67498 - protein, 3830 aa, Homo sapiens
MAFVATQGATVVDQTTLMKKYLQFVAALTDVNTPDETKLKMMQEVSENFENVTSSPQYSTFLEHIIPRFLTFLQDGEVQFLQEKPAQQLRKLVLEIIHRIPTNEHLRPHTKNVLSVMFRFLETENEENVLICLRIIIELHKQFRPPITQEIHHFLDFVKQIYKELPKVVNRYFENPQVIPENTVPPPEMVGMITTIAVKVNPEREDSETRTHSIIPRGSLSLKVLAELPIIVVLMYQLYKLNIHNVVAEFVPLIMNTIAIQVSAQARQHKLYNKELYADFIAAQIKTLSFLAYIIRIYQELVTKYSQQMVKGMLQLLSNCPAETAHLRKELLIAAKHILTTELRNQFIPCMDKLFDESILIGSGYTARETLRPLAYSTLADLVHHVRQHLPLSDLSLAVQLFAKNIDDESLPSSIQTMSCKLLLNLVDCIRSKSEQESGNGRDVLMRMLEVFVLKFHTIARYQLSAIFKKCKPQSELGAVEAALPGVPTAPAAPGPAPSPAPVPAPPPPPPPPPPATPVTPAPVPPFEKQGEKDKEDKQTFQVTDCRSLVKTLVCGVKTITWGITSCKAPGEAQFIPNKQLQPKETQIYIKLVKYAMQALDIYQVQIAGNGQTYIRVANCQTVRMKEEKEVLEHFAGVFTMMNPLTFKEIFQTTVPYMVERISKNYALQIVANSFLANPTTSALFATILVEYLLDRLPEMGSNVELSNLYLKLFKLVFGSVSLFAAENEQMLKPHLHKIVNSSMELAQTAKEPYNYFLLLRALFRSIGGGSHDLLYQEFLPLLPNLLQGLNMLQSGLHKQHMKDLFVELCLTVPVRLSSLLPYLPMLMDPLVSALNGSQTLVSQGLRTLELCVDNLQPDFLYDHIQPVRAELMQALWRTLRNPADSISHVAYRVLGKFGGSNRKMLKESQKLHYVVTEVQGPSITVEFSDCKASLQLPMEKAIETALDCLKSANTEPYYRRQAWEVIKCFLVAMMSLEDNKHALYQLLAHPNFTEKTIPNVIISHRYKAQDTPARKTFEQALTGAFMSAVIKDLRPSALPFVASLIRHYTMVAVAQQCGPFLLPCYQVGSQPSTAMFHSEENGSKGMDPLVLIDAIAICMAYEEKELCKIGEVALAVIFDVASIILGSKERACQLPLFSYIVERLCACCYEQAWYAKLGGVVSIKFLMERLPLTWVLQNQQTFLKALLFVMMDLTGEVSNGAVAMAKTTLEQLLMRCATPLKDEERAEEIVAAQEKSFHHVTHDLVREVTSPNSTVRKQAMHSLQVLAQVTGKSVTVIMEPHKEVLQDMVPPKKHLLRHQPANAQIGLMEGNTFCTTLQPRLFTMDLNVVEHKVFYTELLNLCEAEDSALTKLPCYKSLPSLVPLRIAALNALAACNYLPQSREKIIAALFKALNSTNSELQEAGEACMRKFLEGATIEVDQIHTHMRPLLMMLGDYRSLTLNVVNRLTSVTRLFPNSFNDKFCDQMMQHLRKWMEVVVITHKGGQRSDGNEMKICSAIINLFHLIPAAPQTLVKPLLEVVMKTERAMLIEAGSPFREPLIKFLTRHPSQTVELFMMEATLNDPQWSRMFMSFLKHKDARPLRDVLAANPNRFITLLLPGGAQTAVRPGSPSTSTMRLDLQFQAIKIISIIVKNDDSWLASQHSLVSQLRRVWVSENFQERHRKENMAATNWKEPKLLAYCLLNYCKRNYGDIELLFQLLRAFTGRFLCNMTFLKEYMEEEIPKNYSIAQKRALFFRFVDFNDPNFGDELKAKVLQHILNPAFLYSFEKGEGEQLLGPPNPEGDNPESITSVFITKVLDPEKQADMLDSLRIYLLQYATLLVEHAPHHIHDNNKNRNSKLRRLMTFAWPCLLSKACVDPACKYSGHLLLAHIIAKFAIHKKIVLQVFHSLLKAHAMEARAIVRQAMAILTPAVPARMEDGHQMLTHWTRKIIVEEGHTVPQLVHILHLIVQHFKVYYPVRHHLVQHMVSAMQRLGFTPSVTIEQRRLAVDLSEVVIKWELQRIKDQQPDSDMDPNSSGEGVNSVSSSIKRGLSVDSAQEVKRFRTATGAISAVFGRSQSLPGADSLLAKPIDKQHTDTVVNFLIRVACQVNDNTNTAGSPGEVLSRRCVNLLKTALRPDMWPKSELKLQWFDKLLMTVEQPNQVNYGNICTGLEVLSFLLTVLQSPAILSSFKPLQRGIAACMTCGNTKVLRAVHSLLSRLMSIFPTEPSTSSVASKYEELECLYAAVGKVIYEGLTNYEKATNANPSQLFGTLMILKSACSNNPSYIDRLISVFMRSLQKMVREHLNPQAASGSTEATSGTSELVMLSLELVKTRLAVMSMEMRKNFIQAILTSLIEKSPDAKILRAVVKIVEEWVKNNSPMAANQTPTLREKSILLVKMMTYIEKRFPEDLELNAQFLDLVNYVYRDETLSGSELTAKLEPAFLSGLRCAQPLIRAKFFEVFDNSMKRRVYERLLYVTCSQNWEAMGNHFWIKQCIELLLAVCEKSTPIGTSCQGAMLPSITNVINLADSHDRAAFAMVTHVKQEPRERENSESKEEDVEIDIELAPGDQTSTPKTKELSEKDIGNQLHMLTNRHDKFLDTLREVKTGALLSAFVQLCHISTTLAEKTWVQLFPRLWKILSDRQQHALAGEISPFLCSGSHQVQRDCQPSALNCFVEAMSQCVPPIPIRPCVLKYLGKTHNLWFRSTLMLEHQAFEKGLSLQIKPKQTTEFYEQESITPPQQEILDSLAELYSLLQEEDMWAGLWQKRCKYSETATAIAYEQHGFFEQAQESYEKAMDKAKKEHERSNASPAIFPEYQLWEDHWIRCSKELNQWEALTEYGQSKGHINPYLVLECAWRVSNWTAMKEALVQVEVSCPKEMAWKVNMYRGYLAICHPEEQQLSFIERLVEMASSLAIREWRRLPHVVSHVHTPLLQAAQQIIELQEAAQINAGLQPTNLGRNNSLHDMKTVVKTWRNRLPIVSDDLSHWSSIFMWRQHHYQAIVTAYENSSQHDPSSNNAMLGVHASASAIIQYGKIARKQGLVNVALDILSRIHTIPTVPIVDCFQKIRQQVKCYLQLAGVMGKNECMQGLEVIESTNLKYFTKEMTAEFYALKGMFLAQINKSEEANKAFSAAVQMHDVLVKAWAMWGDYLENIFVKERQLHLGVSAITCYLHACRHQNESKSRKYLAKVLWLLSFDDDKNTLADAVDKYCIGVPPIQWLAWIPQLLTCLVGSEGKLLLNLISQVGRVYPQAVYFPIRTLYLTLKIEQRERYKSDPGPIRATAPMWRCSRIMHMQRELHPTLLSSLEGIVDQMVWFRENWHEEVLRQLQQGLAKCYSVAFEKSGAVSDAKITPHTLNFVKKLVSTFGVGLENVSNVSTMFSSAASESLARRAQATAQDPVFQKLKGQFTTDFDFSVPGSMKLHNLISKLKKWIKILEAKTKQLPKFFLIEEKCRFLSNFSAQTAEVEIPGEFLMPKPTHYYIKIARFMPRVEIVQKHNTAARRLYIRGHNGKIYPYLVMNDACLTESRREERVLQLLRLLNPCLEKRKETTKRHLFFTVPRVVAVSPQMRLVEDNPSSLSLVEIYKQRCAKKGIEHDNPISRYYDRLATVQARGTQASHQVLRDILKEVQSNMVPRSMLKEWALHTFPNATDYWTFRKMFTIQLALIGFAEFVLHLNRLNPEMLQIAQDTGKLNVAYFRFDINDATGDLDANRPVPFRLTPNISEFLTTIGVSGPLTASMIAVARCFAQPNFKVDGILKTVLRDEIIAWHKKTQEDTSSPLSAAGQPENMDSQQLVSLVQKAVTAIMTRLHNLAQFEGGESKVNTLVAAANSLDNLCRMDPAWHPWL

SEQ ID NO: 67499 - protein, 3859 aa, Homo sapiens
MAFVATQGATVVDQTTLMKKYLQFVAALTDVNTPDETKLKMMQEVSENFENVTSSPQYSTFLEHIIPRFLTFLQDGEVQFLQEKPAQQLRKLVLEIIHRIPTNEHLRPHTKNVLSVMFRFLETENEENVLICLRIIIELHKQFRPPITQEIHHFLDFVKQIYKELPKVVNRYFENPQVIPENTVPPPEMVGMITTIAVKVNPEREDSETRTHSIIPRGSLSLKVLAELPIIVVLMYQLYKLNIHNVVAEFVPLIMNTIAIQVSAQARQHKLYNKELYADFIAAQIKTLSFLAYIIRIYQELVTKYSQQMVKGMLQLLSNCPAETAHLRKELLIAAKHILTTELRNQFIPCMDKLFDESILIGSGYTARETLRPLAYSTLADLVHHVRQHLPLSDLSLAVQLFAKNIDDESLPSSIQTMSCKLLLNLVDCIRSKSEQESGNGRDVLMRMLEVFVLKFHTIARYQLSAIFKKCKPQSELGAVEAALPGVPTAPAAPGPAPSPAPVPAPPPPPPPPPPATPVTPAPVPPFEKQGEKDKEDKQTFQVTDCRSLVKTLVCGVKTITWGITSCKAPGEAQFIPNKQLQPKETQIYIKLVKYAMQALDIYQVQIAGNGQTYIRVANCQTVRMKEEKEVLEHFAGVFTMMNPLTFKEIFQTTVPYMVERISKNYALQIVANSFLANPTTSALFATILVEYLLDRLPEMGSNVELSNLYLKLFKLVFGSVSLFAAENEQMLKPHLHKIVNSSMELAQTAKEPYNYFLLLRALFRSIGGGSHDLLYQEFLPLLPNLLQGLNMLQSGLHKQHMKDLFVELCLTVPVRLSSLLPYLPMLMDPLVSALNGSQTLVSQGLRTLELCVDNLQPDFLYDHIQPVRAELMQALWRTLRNPADSISHVAYRVLGKFGGSNRKMLKESQKLHYVVTEVQGPSITVEFSDCKASLQLPMEKAIETALDCLKSANTEPYYRRQAWEVIKCFLVAMMSLEDNKHALYQLLAHPNFTEKTIPNVIISHRYKAQDTPARKTFEQALTGAFMSAVIKDLRPSALPFVASLIRHYTMVAVAQQCGPFLLPCYQVGSQPSTAMFHSEENGSKGMDPLVLIDAIAICMAYEEKELCKIGEVALAVIFDVASIILGSKERACQLPLFSYIVERLCACCYEQAWYAKLGGVVSIKFLMERLPLTWVLQNQQTFLKALLFVMMDLTGEVSNGAVAMAKTTLEQLLMRCATPLKDEERAEEIVAAQEKSFHHVTHDLVREVTSPNSTVRKQAMHSLQVLAQVTGKSVTVIMEPHKEVLQDMVPPKKHLLRHQPANAQIGLMEGNTFCTTLQPRLFTMDLNVVEHKVFYTELLNLCEAEDSALTKLPCYKSLPSLVPLRIAALNALAACNYLPQSREKIIAALFKALNSTNSELQEAGEACMRKFLEGATIEVDQIHTHMRPLLMMLGDYRSLTLNVVNRLTSVTRLFPNSFNDKFCDQMMQHLRKWMEVVVITHKGGQRSDGNESISECGRCPLSPFCQFEEMKICSAIINLFHLIPAAPQTLVKPLLEVVMKTERAMLIEAGSPFREPLIKFLTRHPSQTVELFMMEATLNDPQWSRMFMSFLKHKDARPLRDVLAANPNRFITLLLPGGAQTAVRPGSPSTSTMRLDLQFQAIKIISIIVKNDDSWLASQHSLVSQLRRVWVSENFQERHRKENMAATNWKEPKLLAYCLLNYCKRNYGDIELLFQLLRAFTGRFLCNMTFLKEYMEEEIPKNYSIAQKRALFFRFVDFNDPNFGDELKAKVLQHILNPAFLYSFEKGEGEQLLGPPNPEGDNPESITSVFITKVLDPEKQADMLDSLRIYLLQYATLLVEHAPHHIHDNNKNRNSKLRRLMTFAWPCLLSKACVDPACKYSGHLLLAHIIAKFAIHKKIVLQVFHSLLKAHAMEARAIVRQAMAILTPAVPARMEDGHQMLTHWTRKIIVEEGHTVPQLVHILHLIVQHFKVYYPVRHHLVQHMVSAMQRLGFTPSVTIEQRRLAVDLSEVVIKWELQRIKDQQPDSDMDPNSSGEGVNSVSSSIKRGLSVDSAQEVKRFRTATGAISAVFGRSQSLPGADSLLAKPIDKQHTDTVVNFLIRVACQVNDNTNTAGSPGEVLSRRCVNLLKTALRPDMWPKSELKLQWFDKLLMTVEQPNQVNYGNICTGLEVLSFLLTVLQSPAILSSFKPLQRGIAACMTCGNTKVLRAVHSLLSRLMSIFPTEPSTSSVASKYEELECLYAAVGKVIYEGLTNYEKATNANPSQLFGTLMILKSACSNNPSYIDRLISVFMRSLQKMVREHLNPQAASGSTEATSGTSELVMLSLELVKTRLAVMSMEMRKNFIQAILTSLIEKSPDAKILRAVVKIVEEWVKNNSPMAANQTPTLREKSILLVKMMTYIEKRFPEDLELNAQFLDLVNYVYRDETLSGSELTAKLEPAFLSGLRCAQPLIRAKFFEVFDNSMKRRVYERLLYVTCSQNWEAMGNHFWIKQCIELLLAVCEKSTPIGTSCQGAMLPSITNVINLADSHDRAAFAMVTHVKQEPRERENSESKEEDVEIDIELAPGDQTSTPKTKELSEKDIGNQLHMLTNRHDKFLDTLREVKTGALLSAFVQLCHISTTLAEKTWVQLFPRLWKILSDRQQHALAGEISPFLCSGSHQVQRDCQPSALNCFVEAMSQCVPPIPIRPCVLKYLGKTHNLWFRSTLMLEHQAFEKGLSLQIKPKQTTEFYEQESITPPQQEILDSLAELYSLLQEEDMWAGLWQKRCKYSETATAIAYEQHGFFEQAQESYEKAMDKAKKEHERSNASPAIFPEYQLWEDHWIRCSKELNQWEALTEYGQSKGHINPYLVLECAWRVSNWTAMKEALVQVEVSCPKEMAWKVNMYRGYLAICHPEEQQLSFIERLVEMASSLAIREWRRLPHVVSHVHTPLLQAAQQIIELQEAAQINAGLQPTNLGRNNSLHDMKTVVKTWRNRLPIVSDDLSHWSSIFMWRQHHYQGKPTWSGMHSSSIVTAYENSSQHDPSSNNAMLGVHASASAIIQYGKIARKQGLVNVALDILSRIHTIPTVPIVDCFQKIRQQVKCYLQLAGVMGKNECMQGLEVIESTNLKYFTKEMTAEFYALKGMFLAQINKSEEANKAFSAAVQMHDVLVKAWAMWGDYLENIFVKERQLHLGVSAITCYLHACRHQNESKSRKYLAKVLWLLSFDDDKNTLADAVDKYCIGVPPIQWLAWIPQLLTCLVGSEGKLLLNLISQVGRVYPQAVYFPIRTLYLTLKIEQRERYKSDPGPIRATAPMWRCSRIMHMQRELHPTLLSSLEGIVDQMVWFRENWHEEVLRQLQQGLAKCYSVAFEKSGAVSDAKITPHTLNFVKKLVSTFGVGLENVSNVSTMFSSAASESLARRAQATAQDPVFQKLKGQFTTDFDFSVPGSMKLHNLISKLKKWIKILEAKTKQLPKFFLIEEKCRFLSNFSAQTAEVEIPGEFLMPKPTHYYIKIARFMPRVEIVQKHNTAARRLYIRGHNGKIYPYLVMNDACLTESRREERVLQLLRLLNPCLEKRKETTKRHLFFTVPRVVAVSPQMRLVEDNPSSLSLVEIYKQRCAKKGIEHDNPISRYYDRLATVQARGTQASHQVLRDILKEVQSNMVPRSMLKEWALHTFPNATDYWTFRKMFTIQLALIGFAEFVLHLNRLNPEMLQIAQDTGKLNVAYFRFDINDATGDLDANRPVPFRLTPNISEFLTTIGVSGPLTASMIAVARCFAQPNFKVDGILKTVLRDEIIAWHKKTQEDTSSPLSAAGQPENMDSQQLVSLVQKAVTAIMTRLHNLAQFEGGESKVNTLVAAANSLDNLCRMDPAWHPWL

SEQ ID NO: 67500 - protein, 71 aa, Homo sapiens
MAFVATQGATVVDQTTLMKKYLQFVAALTDVNTPDETKLKMMQEVSENFENVTSSPQYSTFLEHIIPRFLT

SEQ ID NO: 67501 - protein, 38 aa, Homo sapiens
MSDSGEQNYGERVNVEEGKCGSRHLTSFINEYLKLRNK

SEQ ID NO: 67502 - protein, 188 aa, Homo sapiens
MSTRRRHVGNRANPDPNCCLGVFGLSLYTTERDLREVFSKYGPIADVSIVYDQQSRRSRGFAFVYFENVDDAKEAKERANGMELDGRRIRVDFSITKRPHTPTPGIYMGRPTYGSSRRRDYYDRGYDRGYDDRDYYSRSYRGGGGGGGGWRAAQDRDQIYRRRSPSPYYSRGGYRSRSRSRSYSPRRY

SEQ ID NO: 67503 - protein, 288 aa, Homo sapiens
MSDSGEQNYGERESRSASRSGSAHGSGKSARHTPARSRSKEDSRRSRSKSRSRSESRSRSRRSSRRHYTRSRSRSRSHRRSRSRSYSRDYRRRHSHSHSPMSTRRRHVGNRANPDPNCCLGVFGLSLYTTERDLREVFSKYGPIADVSIVYDQQSRRSRGFAFVYFENVDDAKEAKERANGMELDGRRIRVDFSITKRPHTPTPGIYMGRPTYGSSRRRDYYDRGYDRGYDDRDYYSRSYRGGGGGGGGWRAAQDRDQIYRRRSPSPYYSRGGYRSRSRSRSYSPRRY

SEQ ID NO: 67504 - protein, 160 aa, Homo sapiens
MVPSAGQLALFALGIVLAACQALENSTSPLSADPPVAAAVVSHFNDCPDSHTQFCFHGTCRFLVQEDKPACVCHSGYVGARCEHADLLAVVAASQKKQAITALVVVSIVALAVLIITCVLIHCCQVRKHCEWCRALICRHEKPSALLKGRTACCHSETVV

SEQ ID NO: 67505 - protein, 159 aa, Homo sapiens
MVPSAGQLALFALGIVLAACQALENSTSPLSDPPVAAAVVSHFNDCPDSHTQFCFHGTCRFLVQEDKPACVCHSGYVGARCEHADLLAVVAASQKKQAITALVVVSIVALAVLIITCVLIHCCQVRKHCEWCRALICRHEKPSALLKGRTACCHSETVV

SEQ ID NO: 67506 - protein, 860 aa, Homo sapiens
MMSIKAFTLVSAVERELLMGDKERVNIECVECCGRDLYVGTNDCFVYHFLLEERPVPAGPATFTATKQLQRHLGFKKPVNELRAASALNRLLVLCDNSISLVNMLNLEPVPSGARIKGAATFALNENPVSGDPFCVEVCIISVKRRTIQMFLVYEDRVQIVKEVSTAEQPLAVAVDGHFLCLALTTQYIIHNYSTGVSQDLFPYCSEERPPIVKRIGRQEFLLAGPGGLGMFATVAGISQRAPVHWSENVIGAAVSFPYVIALDDEFITVHSMLDQQQKQTLPFKEGHILQDFEGRVIVATSKGVYILVPLPLEKQIQDLLASRRVEEALVLAKGARRNIPKEKFQVMYRRILQQAGFIQFAQLQFLEAKELFRSGQLDVRELISLYPFLLPTSSSFTRSHPPLHEYADLNQLTQGDQEKMAKCKRFLMSYLNEVRSTEVANGYKEDIDTALLKLYAEADHDSLLDLLVTENFCLLTDSAAWLEKHKKYFALGLLYHYNNQDAAAVQLWVNIVNGDVQDSTRSDLYEYIVDFLTYCLDEELVWAYADWVLQKSEEVGVQVFTKRPLDEQQKNSFNPDDIINCLKKYPKALVKYLEHLVIDKRLQKEEYHTHLAVLYLEEVLLQRASASGKGAEATETQAKLRRLLQKSDLYRVHFLLERLQGAGLPMESAILHGKLGEHEKALHILVHELQDFAAAEDYCLWCSEGRDPPHRQQLFHTLLAIYLHAGPTAHELAVAAVDLLNRHATEFDAAQVLQMLPDTWSVQLLCPFLMGAMRDSIHARRTMQVALGLARSENLIYTYDKMKLKGSSIQLSDKKLCQICQNPFCEPVFVRYPNGGLVHTHCAASRHTNPSSSSPGTRT

SEQ ID NO: 67507 - protein, 860 aa, Homo sapiens; identical to SEQ ID NO: 67506

SEQ ID NO: 67508 - protein, 315 aa, Homo sapiens
MLIGSCRKVKRSVQVFTKRPLDEQQKNSFNPDDIINCLKKYPKALVKYLEHLVIDKRLQKEEYHTHLAVLYLEEVLLQRASASGKGAEATETQAKLRRLLQKSDLYRVHFLLERLQGAGLPMESAILHGKLGEHEKALHILVHELQDFAAAEDYCLWCSEGRDPPHRQQLFHTLLAIYLHAGPTAHELAVAAVDLLNRHATEFDAAQVLQMLPDTWSVQLLCPFLMGAMRDSIHARRTMQVALGLARSENLIYTYDKMKLKGSSIQLSDKKLCQICQNPFCEPVFVRYPNGGLVHTHCAASRHTNPSSSSPGTRT

SEQ ID NO: 67509 - protein, 567 aa, Homo sapiens
MGRGLLRGLWPLHIVLWTRIASTIPPHVQKSVNNDMIVTDNNGAVKFPQLCKFCDVRFSTCDNQKSCMSNCSITSICEKPQEVCVAVWRKNDENITLETVCHDPKLPYHDFILEDAASPKCIMKEKKKPGETFFMCSCSSDECNDNIIFSEEYNTSNPDLLLVIFQVTGISLLPPLGVAISVIIIFYCYRVNRQQKLSSTWETGKTRKLMEFSEHCAIILEDDRSDISSTCANNINHNTELLPIELDTLVGKGRFAEVYKAKLKQNTSEQFETVAVKIFPYEEYASWKTEKDIFSDINLKHENILQFLTAEERKTELGKQYWLITAFHAKGNLQEYLTRHVISWEDLRKLGSSLARGIAHLHSDHTPCGRPKMPIVHRDLKSSNILVKNDLTCCLCDFGLSLRLDPTLSVDDLANSGQVGTARYMAPEVLESRMNLENVESFKQTDVYSMALVLWEMTSRCNAVGEVKDYEPPFGSKVREHPCVESMKDNVLRDRGRPEIPSFWLNHQGIQMVCETLTECWDHDPEARLTAQCVAERFSELEHLDRLSGRSCSEEKIPEDGSLNTTK

SEQ ID NO: 67510 - protein, 592 aa, Homo sapiens
MGRGLLRGLWPLHIVLWTRIASTIPPHVQKSDVEMEAQKDEIICPSCNRTAHPLRHINNDMIVTDNNGAVKFPQLCKFCDVRFSTCDNQKSCMSNCSITSICEKPQEVCVAVWRKNDENITLETVCHDPKLPYHDFILEDAASPKCIMKEKKKPGETFFMCSCSSDECNDNIIFSEEYNTSNPDLLLVIFQVTGISLLPPLGVAISVIIIFYCYRVNRQQKLSSTWETGKTRKLMEFSEHCAIILEDDRSDISSTCANNINHNTELLPIELDTLVGKGRFAEVYKAKLKQNTSEQFETVAVKIFPYEEYASWKTEKDIFSDINLKHENILQFLTAEERKTELGKQYWLITAFHAKGNLQEYLTRHVISWEDLRKLGSSLARGIAHLHSDHTPCGRPKMPIVHRDLKSSNILVKNDLTCCLCDFGLSLRLDPTLSVDDLANSGQVGTARYMAPEVLESRMNLENVESFKQTDVYSMALVLWEMTSRCNAVGEVKDYEPPFGSKVREHPCVESMKDNVLRDRGRPEIPSFWLNHQGIQMVCETLTECWDHDPEARLTAQCVAERFSELEHLDRLSGRSCSEEKIPEDGSLNTTK

SEQ ID NO: 67511 - protein, 112 aa, Homo sapiens
MCSCSSDECNDNIIFSEGRCKIRHIGSNNRLQRSTCQNTGWESAHVMKTPGFREYNTSNPDLLLVIFQVTGISLLPPLGVAISVIIIFYCYRVNRQQKLSSTWETGKTRKLM

SEQ ID NO: 67512 - protein, 397 aa, Homo sapiens
MCSCSSDECNDNIIFSEEYNTSNPDLLLVIFQVTGISLLPPLGVAISVIIIFYCYRVNRQQKLSSTWETGKTRKLMEFSEHCAIILEDDRSDISSTCANNINHNTELLPIELDTLVGKGRFAEVYKAKLKHENILQFLTAEERKTELGKQYWLITAFHAKGNLQEYLTRHVISWEDLRKLGSSLARGIAHLHSDHTPCGRPKMPIVHRDLKSSNILVKNDLTCCLCDFGLSLRLDPTLSVDDLANSGQVGTARYMAPEVLESRMNLENVESFKQTDVYSMALVLWEMTSRCNAVGEVKDYEPPFGSKVREHPCVESMKDNVLRDRGRPEIPSFWLNHQGIQMVCETLTECWDHDPEARLTAQCVAERFSELEHLDRLSGRSCSEEKIPEDGSLNTTK

SEQ ID NO: 67513 - protein, 851 aa, Homo sapiens
MTSHYVIAIFALMSSCLATAGPEPGALCELSPVSASHPVQALMESFTVLSGCASRGTTGLPQEVHVLNLRTAGQGPGQLQREVTLHLNPISSVHIHHKSVVFLLNSPHPLVWHLKTERLATGVSRLFLVSEGSVVQFSSANFSLTAETEERNFPHGNEHLLNWARKEYGAVTSFTELKIARNIYIKVGEDQVFPPKCNIGKNFLSLNYLAEYLQPKAAEGCVMSSQPQNEEVHIIELITPNSNPYSAFQVDITIDIRPSQEDLEVVKNLILILKCKKSVNWVIKSFDVKGSLKIIAPNSIGFGKESERSMTMTKSIRDDIPSTQGNLVKWALDNGYSPITSYTMAPVANRFHLRLENNAEEMGDEEVHTIPPELRILLDPGALPALQNPPIRGGEGQNGGLPFPFPDISRRVWNEEGEDGLPRPKDPVIPSIQLFPGLREPEEVQGSVDIALSVKCDNEKMIVAVEKDSFQASGYSGMDVTLLDPTCKAKMNGTHFVLESPLNGCGTRPRWSALDGVVYYNSIVIQVPALGDSSGWPDGYEDLESGDNGFPGDMDEGDASLFTRPEIVVFNCSLQQVRNPSSFQEQPHGNITFNMELYNTDLFLVPSQGVFSVPENGHVYVEVSVTKAEQELGFAIQTCFISPYSNPDRMSHYTIIENICPKDESVKFYSPKRVHFPIPQADMDKKRFSFVFKPVFNTSLLFLQCELTLCTKMEKHPQKLPKCVPPDEACTSLDASIIWAMMQNKKTFTKPLAVIHHEAESKEKGPSMKEPNPISPPIFHGLDTLTVMGIAFAAFVIGALLTGALWYIYSHTGETAGRQQVPTSPPASENSSAAHSIGSTQSTPCSSSSTA

SEQ ID NO: 67514 - protein, 850 aa, Homo sapiens
MTSHYVIAIFALMSSCLATAGPEPGALCELSPVSASHPVQALMESFTVLSGCASRGTTGLPQEVHVLNLRTAGQGPGQLQREVTLHLNPISSVHIHHKSVVFLLNSPHPLVWHLKTERLATGVSRLFLVSEGSVVQFSSANFSLTAETEERNFPHGNEHLLNWARKEYGAVTSFTELKIARNIYIKVGEDQVFPPKCNIGKNFLSLNYLAEYLQPKAAEGCVMSSQPQNEEVHIIELITPNSNPYSAFQVDITIDIRPSQEDLEVVKNLILILKCKKSVNWVIKSFDVKGSLKIIAPNSIGFGKESERSMTMTKSIRDDIPSTQGNLVKWALDNGYSPITSYTMAPVANRFHLRLENNEEMGDEEVHTIPPELRILLDPGALPALQNPPIRGGEGQNGGLPFPFPDISRRVWNEEGEDGLPRPKDPVIPSIQLFPGLREPEEVQGSVDIALSVKCDNEKMIVAVEKDSFQASGYSGMDVTLLDPTCKAKMNGTHFVLESPLNGCGTRPRWSALDGVVYYNSIVIQVPALGDSSGWPDGYEDLESGDNGFPGDMDEGDASLFTRPEIVVFNCSLQQVRNPSSFQEQPHGNITFNMELYNTDLFLVPSQGVFSVPENGHVYVEVSVTKAEQELGFAIQTCFISPYSNPDRMSHYTIIENICPKDESVKFYSPKRVHFPIPQADMDKKRFSFVFKPVFNTSLLFLQCELTLCTKMEKHPQKLPKCVPPDEACTSLDASIIWAMMQNKKTFTKPLAVIHHEAESKEKGPSMKEPNPISPPIFHGLDTLTVMGIAFAAFVIGALLTGALWYIYSHTGETAGRQQVPTSPPASENSSAAHSIGSTQSTPCSSSSTA

SEQ ID NO: 67515 - protein, 35 aa, Homo sapiens
MTSHYVIAIFALMSSCLATAGPEPGALCELSPVSA

SEQ ID NO: 67516 - protein, 850 aa, Homo sapiens; identical to SEQ ID NO: 67514

SEQ ID NO: 67517 - protein, 851 aa, Homo sapiens; identical to SEQ ID NO: 67513

SEQ ID NO: 67518 - protein, 683 aa, Homo sapiens
MALFVRLLALALALALGPAATLAGPAKSPYQLVLQHSRLRGRQHGPNVCAVQKVIGTNRKYFTNCKQWYQRKICGKSTVISYECCPGYEKVPGEKGCPAALPLSNLYETLGVVGSTTTQLYTDRTEKLRPEMEGPGSFTIFAPSNEAWASLPAEVLDSLVSNVNIELLNALRYHMVGRRVLTDELKHGMTLTSMYQNSNIQIHHYPNGIVTVNCARLLKADHHATNGVVHLIDKVISTITNNIQQIIEIEDTFETLRAAVAASGLNTMLEGNGQYTLLAPTNEAFEKIPSETLNRILGDPEALRDLLNNHILKSAMCAEAIVAGLSVETLEGTTLEVGCSGDMLTINGKAIISNKDILATNGVIHYIDELLIPDSAKTLFELAAESDVSTAIDLFRQAGLGNHLSGSERLTLLAPLNSVFKDGTPPIDAHTRNLLRNHIIKDQLASKYLYHGQTLETLGGKKLRVFVYRNSLCIENSCIAAHDKRGRYGTLFTMDRVLTPPMGTVMDVLKGDNRFSMLVAAIQSAGLTETLNREGVYTVFAPTNEAFRALPPRERSRLLGDAKELANILKYHIGDEILVSGGIGALVRLKSLQGDKLEVSLKNNVVSVNKEPVAEPDIMATNGVVHVITNVLQPPANRPQERGDELADSALEIFKQASAFSRPEQPQVLCSPVYQKLLERMKH

SEQ ID NO: 67519 - protein, 416 aa, Homo sapiens
MLEGNGQYTLLAPTNEAFEKIPSETLNRILGDPEALRDLLNNHILKSAMCAEAIVAGLSVETLEGTTLEVGCSGDMLTINGKAIISNKDILATNGVIHYIDELLIPDSAKTLFELAAESDVSTAIDLFRQAGLGNHLSGSERLTLLAPLNSVFKDGTPPIDAHTRNLLRNHIIKDQLASKYLYHGQTLETLGGKKLRVFVYRNSLCIENSCIAAHDKRGRYGTLFTMDRVLTPPMGTVMDVLKGDNRFSMLVAAIQSAGLTETLNREGVYTVFAPTNEAFRALPPRERSRLLGDAKELANILKYHIGDEILVSGGIGALVRLKSLQGDKLEVSLKNNVVSVNKEPVAEPDIMATNGVVHVITNVLQPPANRPQERGDELADSALEIFKQASAFSRASQRSVRLAPVYQKLLERMKH

SEQ ID NO: 67520 - protein, 683 aa, Homo sapiens
MALFVRLLALALALALGPAATLAGPAKSPYQLVLQHSRLRGRQHGPNVCAVQKVIGTNRKYFTNCKQWYQRKICGKSTVISYECCPGYEKVPGEKGCPAALPLSNLYETLGVVGSTTTQLYTDRTEKLRPEMEGPGSFTIFAPSNEAWASLPAEVLDSLVSNVNIELLNALRYHMVGRRVLTDELKHGMTLTSMYQNSNIQIHHYPNGIVTVNCARLLKADHHATNGVVHLIDKVISTITNNIQQIIEIEDTFETLRAAVAASGLNTMLEGNGQYTLLAPTNEAFEKIPSETLNRILGDPEALRDLLNNHILKSAMCAEAIVAGLSVETLEGTTLEVGCSGDMLTINGKAIISNKDILATNGVIHYIDELLIPDSAKTLFELAAESDVSTAIDLFRQAGLGNHLSGSERLTLLAPLNSVFKDGTPPIDAHTRNLLRNHIIKDQLASKYLYHGQTLETLGGKKLRVFVYRNSLCIENSCIAAHDKRGRYGTLFTMDRVLTPPMGTVMDVLKGDNRFSMLVAAIQSAGLTETLNREGVYTVFAPTNEAFRALPPRERSRLLGDAKELANILKYHIGDEILVSGGIGALVRLKSLQGDKLEVSLKNNVVSVNKEPVAEPDIMATNGVVHVITNVLQPPANRPQERGDELADSALEIFKQASAFSRASQRSVRLAPVYQKLLERMKH

SEQ ID NO: 67521 - protein, 395 aa, Homo sapiens
MAFSPWQILSPVQWAKWTWSAVRGGAAGEDEAGGPEGDPEEEDSQAETKSLSFRSGCKVKKHETQSLALDACSRDEGAVISQISDISNRDGHATDEEKLASTSCGQKSAGAEVKGEPEEDLEYFECSNVPVSTINHAFSSSEAGIEKETCQKMEEDGSTVLGLLESSAEKAPVSVSCGGESPLDGICLSESDKTAVLTLIREEIITKEIEANEWKKKYEETRQEVLEMRKIVAEYEKTIAQMIEDEQRTSMTSQKSFQQLTMEKEQALADLNSVERSLSDLFRRYENLKGVLEGFKKNEEALKKCAQDYLARVKQEEQRYQALKIHAEEKLDKANEEIAQVRTKAKAESAALHAGLRKEQMKVESLERALQQKNQEIEELTKICDELIAKLGKTD

SEQ ID NO: 67522 - protein, 805 aa, Homo sapiens
MAFSPWQILSPVQWAKWTWSAVRGGAAGEDEAGGPEGDPEEEDSQAETKSLSFSSDSEGNFETPEAETPIRSPFKESCDPSLGLAGPGAKSQESQEADEQLVAEVVEKCSSKTCSKPSENEVPQQAIDSHSVKNFREEPEHDFSKISIVRPFSIETKDSTDISAVLGTKAAHGCVTAVSGKALPSSPPDALQDEAMTEGSMGVTLEASAEADLKAGNSCPELVPSRRSKLRKPKPVPLRKKAIGGEFSDTNAAVEGTPLPKASYHFSPEELDENTSPLLGDARFQKSPPDLKETPGTLSSDTNDSGVELGEESRSSPLKLEFDFTEDTGNIEARKALPRKLGRKLGSTLTPKIQKDGISKSAGLEQPTDPVARDGPLSQTSSKPDPSQWESPSFNPFGSHSVLQNSPPLSSEGSYHFDPDNFDESMDPFKPTTTLTSSDFCSPTGNHVNEILESPKKAKSRLITSGCKVKKHETQSLALDACSRDEGAVISQISDISNRDGHATDEEKLASTSCGQKSAGAEVKGEPEEDLEYFECSNVPVSTINHAFSSSEAGIEKETCQKMEEDGSTVLGLLESSAEKAPVSVSCGGESPLDGICLSESDKTAVLTLIREEIITKEIEANEWKKKYEETRQEVLEMRKIVAEYEKTIAQMIEDEQRTSMTSQKSFQQLTMEKEQALADLNSVERSLSDLFRRYENLKGVLEGFKKNEEALKKCAQDYLARVKQEEQRYQALKIHAEEKLDKANEEIAQVRTKAKAESAALHAGLRKEQMKVESLERALQQKNQEIEELTKICDELIAKLGKTD

SEQ ID NO: 67523 - protein, 379 aa, Homo sapiens
MGGSHSQTPRGREPAGERHPRPTETATTEQVKFLCFLLSGCKVKKHETQSLALDACSRDEGAVISQISDISNRDGHATDEEKLASTSCGQKSAGAEVKGEPEEDLEYFECSNVPVSTINHAFSSSEAGIEKETCQKMEEDGSTVLGLLESSAEKAPVSVSCGGESPLDGICLSESDKTAVLTLIREEIITKEIEANEWKKKYEETRQEVLEMRKIVAEYEKTIAQMIEDEQRTSMTSQKSFQQLTMEKEQALADLNSVERSLSDLFRRYENLKGVLEGFKKNEEALKKCAQDYLARVKQEEQRYQALKIHAEEKLDKANEEIAQVRTKAKAESAALHAGLRKEQMKVESLERALQQKNQEIEELTKICDELIAKLGKTD

SEQ ID NO: 67524 - protein, 367 aa, Homo sapiens
MGGSHSQTPRGREPAGERHPRPTETASGCKVKKHETQSLALDACSRDEGAVISQISDISNRDGHATDEEKLASTSCGQKSAGAEVKGEPEEDLEYFECSNVPVSTINHAFSSSEAGIEKETCQKMEEDGSTVLGLLESSAEKAPVSVSCGGESPLDGICLSESDKTAVLTLIREEIITKEIEANEWKKKYEETRQEVLEMRKIVAEYEKTIAQMIEDEQRTSMTSQKSFQQLTMEKEQALADLNSVERSLSDLFRRYENLKGVLEGFKKNEEALKKCAQDYLARVKQEEQRYQALKIHAEEKLDKANEEIAQVRTKAKAESAALHAGLRKEQMKVESLERALQQKNQEIEELTKICDELIAKLGKTD

SEQ ID NO: 67525 - protein, 817 aa, Homo sapiens
MAFSPWQILSPVQWAKWTWSAVRGGAAGEDEAGGPEGDPEEEDSQAETKSLSFSSDSEGNFETPEAETPIRSPFKESCDPSLGLAGPGAKSQESQEADEQLVAEVVEKCSSKTCSKPSENEVPQQAIDSHSVKNFREEPEHDFSKISIVRPFSIETKDSTDISAVLGTKAAHGCVTAVSGKALPSSPPDALQDEAMTEGSMGVTLEASAEADLKAGNSCPELVPSRRSKLRKPKPVPLRKKAIGGEFSDTNAAVEGTPLPKASYHFSPEELDENTSPLLGDARFQKSPPDLKETPGTLSSDTNDSGVELGEESRSSPLKLEFDFTEDTGNIEARKALPRKLGRKLGSTLTPKIQKDGISKSAGLEQPTDPVARDGPLSQTSSKPDPSQWESPSFNPFGSHSVLQNSPPLSSEGSYHFDPDNFDESMDPFKPTTTLTSSDFCSPTGNHVNEILESPKKAKSRLITTTEQVKFLCFLLSGCKVKKHETQSLALDACSRDEGAVISQISDISNRDGHATDEEKLASTSCGQKSAGAEVKGEPEEDLEYFECSNVPVSTINHAFSSSEAGIEKETCQKMEEDGSTVLGLLESSAEKAPVSVSCGGESPLDGICLSESDKTAVLTLIREEIITKEIEANEWKKKYEETRQEVLEMRKIVAEYEKTIAQMIEDEQRTSMTSQKSFQQLTMEKEQALADLNSVERSLSDLFRRYENLKGVLEGFKKNEEALKKCAQDYLARVKQEEQRYQALKIHAEEKLDKANEEIAQVRTKAKAESAALHAGLRKEQMKVESLERALQQKNQEIEELTKICDELIAKLGKTD

SEQ ID NO: 67526 - protein, 792 aa, Homo sapiens
MQRQTIKGAGAGGAALMAFSPWQILSPVQWAKWTWSAVRGGAAGEDEAGGPEGDPEEEDSQAETKSLSFSSDSEGNFETPEAETPIRSPFKESCDPSLGLAGPGAKSQESQEADEQLVAEVVEKCSSKTCSKPSENEVPQQAIDSHSVKNFREEPEHDFSKISIVRPFSIETKDSTDISAVLGTKAAHGCVTAVSGKALPSSPPDALQDEAMTEGSMGVTLEASAEADLKAGNSCPELVPSRRSKLRKPKPVPLRKKAIGGEFSDTNAAVEGTPLPKASYHFSPEELDENTSPLLGDARFQKSPPDLKETPGTLSSDTNDSGVELGEESRSSPLKLEFDFTEDTGNIEARKALPRKLGRKLGSTLTPKIQKDGISKSAGLEQPTDPVARDGPLSQTSSKPDPSQWESPSFNPFGSHSVLQNSPPLSSEGSYHFDPDNFDESMDPFKPTTTLTSSDFCSPTGNHVNEILESPKKAKSRLITSGCKVKKHETQSLALDACSRDEGAVISQISDISNRDGHATDEEKLASTSCGQKSAGAEVKGIEKETCQKMEEDGSTVLGLLESSAEKAPVSVSCGGESPLDGICLSESDKTAVLTLIREEIITKEIEANEWKKKYEETRQEVLEMRKIVAEYEKTIAQMIEDEQRTSMTSQKSFQQLTMEKEQALADLNSVERSLSDLFRRYENLKGVLEGFKKNEEALKKCAQDYLARVKQEEQRYQALKIHAEEKLDKANEEIAQVRTKAKAESAALHAGLRKEQMKVESLERALQQKNQEIEELTKICDELIAKLGKTD

SEQ ID NO: 67527 - protein, 476 aa, Homo sapiens
MTEGSMGVTLEASAEADLKAGNSCPELVPSRRSKLRKPKPVPLRKKAIGGEFSDTNAAVEGTPLPKASYHFSPEELDENTSPLLGDARFQKSPPDLKETPGTLSSDTNDSGVELGEESRSSPLKLEFDFTEDTGNIEARKALPRKLGRKLGSTLTPKIQKDGISKSAGLEQPTDPVARDGPLSQTSSKPDPSQWESPSFNPFGSHSVLQNSPPLSSEGSYHFDPDNFDESMDPFKPTTTLTSSDFCSPTGNHVNEILESPKKAKSRLITSGCKVKKHETQSLALDACSRDEGAVISQISDISNRDGHATDEEKLASTSCGQKSAGAEVKGEPEEDLEYFECSNVPVSTINHAFSSSEAGIEKETCQKMEEDGSTVLGLLESSAEKAPVSVSCGGESPLDGICLSESDKTAVLTLIREEIITKEIEANEWKKKYFNKEVFRGDICPKRFGLQIPVIFKKQLTTKSLSLHRVTVKKLM

SEQ ID NO: 67528 - protein, 731 aa, Homo sapiens
MNNILKLKSSDSEGNFETPEAETPIRSPFKESCDPSLGLAGPGAKSQESQEADEQLVAEVVEKCSSKTCSKPSENEVPQQAIDSHSVKNFREEPEHDFSKISIVRPFSIETKDSTDISAVLGTKAAHGCVTAVSGKALPSSPPDALQDEAMTEGSMGVTLEASAEADLKAGNSCPELVPSRRSKLRKPKPVPLRKKAIGGEFSDTNAAVEGTPLPKASYHFSPEELDENTSPLLGDARFQKSPPDLKETPGTLSSDTNDSGVELGEESRSSPLKLEFDFTEDTGNIEARKALPRKLGRKLGSTLTPKIQKDGISKSAGLEQPTDPVARDGPLSQTSSKPDPSQWESPSFNPFGSHSVLQNSPPLSSEGSYHFDPDNFDESMDPFKPTTTLTSSDFCSPTGNHVNEILESPKKAKSRLITSGCKVKKHETQSLALDACSRDEGAVISQISDISNRDGHATDEEKLASTSCGQKSAGAEVKGIEKETCQKMEEDGSTVLGLLESSAEKAPVSVSCGGESPLDGICLSESDKTAVLTLIREEIITKEIEANEWKKKYEETRQEVLEMRKIVAEYEKTIAQMIEDEQRTSMTSQKSFQQLTMEKEQALADLNSVERSLSDLFRRYENLKGVLEGFKKNEEALKKCAQDYLARVKQEEQRYQALKIHAEEKLDKANEEIAQVRTKAKAESAALHAGLRKEQMKVESLERALQQKNQEIEELTKICDELIAKLGKTD

SEQ ID NO: 67529 - protein, 610 aa, Homo sapiens
MTEGSMGVTLEASAEADLKAGNSCPELVPSRRSKLRKPKPVPLRKKAIGGEFSDTNAAVEGTPLPKASYHFSPEELDENTSPLLGDARFQKSPPDLKETPGTLSSDTNDSGVELGEESRSSPLKLEFDFTEDTGNIEARKALPRKLGRKLGSTLTPKIQKDGISKSAGLEQPTDPVARDGPLSQTSSKPDPSQWESPSFNPFGSHSVLQNSPPLSSEGSYHFDPDNFDESMDPFKPTTTLTSSDFCSPTGNHVNEILESPKKAKSRLITSGCKVKKHETQSLALDACSRDEGAVISQISDISNRDGHATDEEKLASTSCGQKSAGAEVKGEPEEDLEYFECSNVPVSTINHAFSSSEAGIEKETCQKMEEDGSTVLGLLESSAEKAPVSVSCGGESPLDGICLSESDKTAVLTLIREEIITKEIEANEWKKKYEETRQEVLEMRKIVAEYEKTIAQMIEDEQRTSMTSQKSFQQLTMEKEQALADLNSVERSLSDLFRRYENLKGVLEGFKKNEEALKKCAQDYLARVKQEEQRYQALKIHAEEKLDKANEEIAQVRTKAKAESAALHAGLRKEQMKVESLERALQQKNQEIEELTKICDELIAKLGKTD

SEQ ID NO: 67530 - protein, 581 aa, Homo sapiens
MTEGSMGVTLEASAEADLKAGNSCPELVPSRRSKLRKPKPVPLRKKAIGGEFSDTNAAVEGTPLPKASYHFSPEELDENTSPLLGDARFQKSPPDLKETPGTLSSDTNDSGVELGEESRSSPLKLEFDFTEDTGNIEARKALPRKLGRKLGSTLTPKIQKDGISKSAGLEQPTDPVARDGPLSQTSSKPDPSQWESPSFNPFGSHSVLQNSPPLSSEGSYHFDPDNFDESMDPFKPTTTLTSSDFCSPTGNHVNEILESPKKAKSRLITSGCKVKKHETQSLALDACSRDEGAVISQISDISNRDGHATDEEKLASTSCGQKSAGAEVKGIEKETCQKMEEDGSTVLGLLESSAEKAPVSVSCGGESPLDGICLSESDKTAVLTLIREEIITKEIEANEWKKKYEETRQEVLEMRKIVAEYEKTIAQMIEDEQRTSMTSQKSFQQLTMEKEQALADLNSVERSLSDLFRRYENLKGVLEGFKKNEEALKKCAQDYLARVKQEEQRYQALKIHAEEKLDKANEEIAQVRTKAKAESAALHAGLRKEQMKVESLERALQQKNQEIEELTKICDELIAKLGKTD

SEQ ID NO: 67531 - protein, 30 aa, Homo sapiens
MTEGSMGVTLEASAEADLKAGNSCPELVPS

SEQ ID NO: 67532 - protein, 138 aa, Homo sapiens
MTEGSMGVTLEASAEADLKAGNSCPELVPSRRSKLRKPKPVPLRKKAIGGEFSDTNAAVEGTPLPKASYHFSPEELDENTSPLLGDARFQKSPPDLKETPGTLSSDTNDSGVELGEESRSSPLKLEFDFTEDTGNIEA

SEQ ID NO: 67533 - protein, 61 aa, Homo sapiens
MTEGSMGVTLEASAEADLKAGNSCPELVPSRRSKLRKPKPVPLRKKAIGGEFSDTNAAVEG

SEQ ID NO: 67534 - protein, 129 aa, Homo sapiens
MAFSPWQILSPVQWAKWTWSAVRGGAAGEDEAGGPEGDPEEEDSQAETKSLSFSSDSEGNFETPEAETPIRSPFKESCDPSLGLAGPGAKSQESQEADEQLVAEVVEKCSSKTCSKPSENEVPQQAIDS

SEQ ID NO: 67535 - protein, 1026 aa, Homo sapiens
MGGSQSLQPAPASDLNLEASEAMSSDSEEAFETPESTTPVKAPPAPPPPPPEVIPEPEVSTQPPPEEPGCGSETVPVPDGPRSDSVEGSPFRPPSHSFSAVFDEDKPIASSGTYNLDFDNIELVDTFQTLEPRASDAKNQEGKVNTRRKSTDSVPISKSTLSRSLSLQASDFDGASSSGNPEAVALAPDAYSTGSSSASSTLKRTKKPRPPSLKKKQTTKKPTETPPVKETQQEPDEESLVPSGENLASETKTESAKTEGPSPALLEETPLEPAVGPKAACPLDSESAEGVVPPASGGGRVQNSPPVGRKTLPLTTAPEAGEVTPSDSGGQEDSPAKGLSVRLEFDYSEDKSSWDNQQENPPPTKKIGKKPVAKMPLRRPKMKKTPEKLDNTPASPPRSPAEPNDIPIAKGTYTFDIDKWDDPNFNPFSSTSKMQESPKLPQQSYNFDPDTCDESVDPFKTSSKTPSSPSKSPASFEIPASAMEANGVDGDGLNKPAKKKKTPLKTDTFRVKKSPKRSPLSDPPSQDPTPAATPETPPVISAVVHATDEEKLAVTNQKWTCMTVDLEADKQDYPQPSDLSTFVNETKFSSPTEELDYRNSYEIEYMEKIGSSLPQDDDAPKKQALYLMFDTSQESPVKSSPVRMSESPTPCSGSSFEETEALVNTAAKNQHPVPRGLAPNQESHLQVPEKSSQKELEAMGLGTPSEAIEITAPEGSFASADALLSRLAHPVSLCGALDYLEPDLAEKNPPLFAQKLQEELEFAIMRIEALKLARQIALASRSHQDAKREAAHPTDVSISKTALYSRIGTAEVEKPAGLLFQQPDLDSALQIARAEIITKEREVSEWKDKYEESRREVMEMRKIVAEYEKTIAQMIEDEQREKSVSHQTVQQLVLEKEQALADLNSVEKSLADLFRRYEKMKEVLEGFRKNEEVLKRCAQEYLSRVKKEEQRYQALKVHAEEKLDRANAEIAQVRGKAQQEQAAHQASLRKEQLRVDALERTLEQKNKEIEELTKICDELIAKMGKS

SEQ ID NO: 67536 - protein, 2948 aa, Homo sapiens
MGNENSTSDNQRTLSAQTPRSAQPPGNSQNIKRKQQDTPGSPDHRDASSIGSVGLGGFCTASESSASLDPCLVSPEVTEPRKDPQGARGPEGSLLPSPPPSQEREHPSSSMPFAECPPEGCLASPAAAPEDGPQTQSPRREPAPNAPGDIAAAFPAERDSSTPYQEIAAVPSAGRERQPKEEGQKSSFSFSSGIDQSPGMSPVPLREPMKAPLCGEGDQPGGFESQEKEAAGGFPPAESRQGVASVQVTPEAPAAAQQGTESSAVLEKSPLKPMAPIPQDPAPRASDRERGQGEAPPQYLTDDLEFLRACHLPRSNSGAAPEAEVNAASQESCQQPVGAYLPHAELPWGLPSPALVPEAGGSGKEALDTIDVQGHPQTGMRGTKPNQVVCVAAGGQPEGGLPVSPEPSLLTPTEEAHPASSLASFPAAQIPIAVEEPGSSSRESVSKAGMPVSADAAKEVVDAGLVGLERQVSDLGSKGEHPEGDPGEVPAPSPQERGEHLNTEQSHEVQPGVPPPPLPKEQSHEVQPGAPPPPLPKAPSESARGPPGPTDGAKVHEDSTSPAVAKEGSRSPGDSPGGKEEAPEPPDGGDPGNLQGEDSQAFSSKRDPEVGKDELSKPSSDAESRDHPSSHSAQPPRKGGAGHTDGPHSQTAEADASGLPHKLGEEDPVLPPVPDGAGEPTVPEGAIWEGSGLQPKCPDTLQSREGLGRMESFLTLESEKSDFPPTPVAEVAPKAQEGESTLEIRKMGSCDGEGLLTSPDQPRGPACDASRQEFHAGVPHPPQGENLAADLGLTALILDQDQQGIPSCPGEGWIRGAASEWPLLSSEKHLQPSQAQPETSIFDVLKEQAQPPENGKETSPSHPGFKDQGADSSQIHVPVEPQEDNNLPTHGGQEQALGSELQSQLPKGTLSDTPTSSPTDMVWESSLTEESELSAPTRQKLPALGEKRPEGACGDGQSSRVSPPAADVLKDFSLAGNFSRKETCCTGQGPNKSQQALADALEEGSQHEEACQRHPGASEAADGCSPLWGLSKREMASGNTGEAPPCQPDSVALLDAVPCLPALAPASPGVTPTQDAPETEACDETQEGRQQPVPAPQQKMECWATSDAESPKLLASFPSAGEQGGEAGAAETGGSAGAGDPGKQQAPEKPGEATLSCGLLQTEHCLTSGEEASTSALRESCQAEHPMASCQDALLPARELGGIPRSTMDFSTHQAVPDPKELLLSGPPEVAAPDTPYLHVDSAAQRGAEDSGVKAVSSADPRAPGESPCPVGEPPLALENAASLKLFAGSLAPLLQPGAAGGEIPAVQASSGSPKARTTEGPVDSMPCLDRMPLLAKGKQATGEEKAATAPGAGAKASGEGMAGDAAGETEGSMERMGEPSQDPKQGTSGGVDTSSEQIATLTGFPDFREHIAKIFEKPVLGALATPGEKAGAGRSAVGKDLTRPLGPEKLLDGPPGVDVTLLPAPPARLQVEKKQQLAGEAEISHLALQDPASDKLLGPAGLTWERNLPGAGVGKEMAGVPPTLREDERPEGPGAAWPGLEGQAYSQLERSRQELASGLPSPAATQELPVERAAAFQVAPHSHGEEAVAQDRIPSGKQHQETSACDSPHGEDGPGDFAHTGVPGHVPRSTCAPSPQREVLTVPEANSEPWTLDTLGGERRPGVTAGILEMRNALGNQSTPAPPTGEVADTPLEPGKVAGAAGEAEGDITLSTAETQACASGDLPEAGTTRTFSVVAGDLVLPGSCQDPACSDKAPGMEGTAALHGDSPARPQQAKEQPGPERPIPAGDGKVCVSSPPEPDETHDPKLQHLAPEELHTDRESPRPGPSMLPSVPKKDAPRVMDKVTSDETRGAEGTESSPVADDIIQPAAPADLESPTLAASSYHGDVVGQVSTDLIAQSISPAAAHAGLPPSAAEHIVSPSAPAGDRVEASTPSCPDPAKDLSRSSDSEEAFETPESTTPVKAPPAPPPPPPEVIPEPEVSTQPPPEEPGCGSETVPVPDGPRSDSVEGSPFRPPSHSFSAVFDEDKPIASSGTYNLDFDNIELVDTFQTLEPRASDAKNQEGKVNTRRKSTDSVPISKSTLSRSLSLQASDFDGASSSGNPEAVALAPDAYSTGSSSASSTLKRTKKPRPPSLKKKQTTKKPTETPPVKETQQEPDEESLVPSGENLASETKTESAKTEGPSPALLEETPLEPAVGPKAACPLDSESAEGVVPPASGGGRVQNSPPVGRKTLPLTTAPEAGEVTPSDSGGQEDSPAKGLSVRLEFDYSEDKSSWDNQQENPPPTKKIGKKPVAKMPLRRPKMKKTPEKLDNTPASPPRSPAEPNDIPIAKGTYTFDIDKWDDPNFNPFSSTSKMQESPKLPQQSYNFDPDTCDESVDPFKTSSKTPSSPSKSPASFEIPASAMEANGVDGDGLNKPAKKKKTPLKTDTFRVKKSPKRSPLSDPPSQDPTPAATPETPPVISAVVHATDEEKLAVTNQKWTCMTVDLEADKQDYPQPSDLSTFVNETKFSSPTEELDYRNSYEIEYMEKIGSSLPQDDDAPKKQALYLMFDTSQESPVKSSPVRMSESPTPCSGSSFEETEALVNTAAKNQHPVPRGLAPNQESHLQVPEKSSQKELEAMGLGTPSEAIEITAPEGSFASADALLSRLAHPVSLCGALDYLEPDLAEKNPPLFAQKLQEELEFAIMRIEALKLARQIALASRSHQDAKREAAHPTDVSISKTALYSRIGTAEVEKPAGLLFQQPDLDSALQIARAEIITKEREVSEWKDKYEESRREVMEMRKIVAEYEKTIAQMIEDEQREKSVSHQTVQQLVLEKEQALADLNSVEKSLADLFRRYEKMKEVLEGFRKNEEVLKRCAQEYLSRVKKEEQRYQALKVHAEEKLDRANAEIAQVRGKAQQEQAAHQASLRKEQLRVDALERTLEQKNKEIEELTKICDELIAKMGKS

SEQ ID NO: 67537 - protein, 2861 aa, Homo sapiens
QRTLSAQTPRSAQPPGNSQNIKRKQQDTPGSPDHRDASSIGSVGLGGFCTASESSASLDPCLVSPEVTEPRKDPQGARGPEGSLLPSPPPSQEREHPSSSMPFAECPPEGCLASPAAAPEDGPQTQSPRREPAPNAPGDIAAAFPAERDSSTPYQEIAAVPSAGRERQPKEEGQKSSFSFSSGIDQSPGMSPVPLREPMKAPLCGEGDQPGGFESQEKEAAGGFPPAESRQGVASVQVTPEAPAAAQQGTESSAVLEKSPLKPMAPIPQDPAPRASDRERGQGEAPPQYLTDDLEFLRACHLPRSNSGAAPEAEVNAASQESCQQPVGAYLPHAELPWGLPSPALVPEAGGSGKEALDTIDVQGHPQTGMRGTKPNQVVCVAAGGQPEGGLPVSPEPSLLTPTEEAHPASSLASFPAAQIPIAVEEPGSSSRESVSKAGMPVSADAAKEVVDAGLVGLERQVSDLGSKGEHPEGDPGEVPAPSPQERGEHLNTEQSHEVQPGVPPPPLPKEQSHEVQPGAPPPPLPKAPSESARGPPGPTDGAKVHEDSTSPAVAKEGSRSPGDSPGGKEEAPEPPDGGDPGNLQGEDSQAFSSKRDPEVGKDELSKPSSDAESRDHPSSHSAQPPRKGGAGHTDGPHSQTAEADASGLPHKLGEEDPVLPPVPDGAGEPTVPEGAIWEGSGLQPKCPDTLQSREGLGRMESFLTLESEKSDFPPTPVAEVAPKAQEGESTLEIRKMGSCDGEGLLTSPDQPRGPACDASRQEFHAGVPHPPQGENLAADLGLTALILDQDQQGIPSCPGEGWIRGAASEWPLLSSEKHLQPSQAQPETSIFDVLKEQAQPPENGKETSPSHPGFKDQGADSSQIHVPVEPQEDNNLPTHGGQEQALGSELQSQLPKGTLSDTPTSSPTDMVWESSLTEESELSAPTRQKLPALGEKRPEGACGDGQSSRVSPPAADVLKDFSLAGNFSRKETCCTGQGPNKSQQALADALEEGSQHEEACQRHPGASEAADGCSPLWGLSKREMASGNTGEAPPCQPDSVALLDAVPCLPALAPASPGVTPTQDAPETEACDETQEGRQQPVPAPQQKMECWATSDAESPKLLASFPSAGEQGGEAGAAETGGSAGAGDPGKQQAPEKPGEATLSCGLLQTEHCLTSGEEASTSALRESCQAEHPMASCQDALLPARELGGIPRSTMDFSTHQAVPDPKELLLSGPPEVAAPDTPYLHVDSAAQRGAEDSGVKAVSSADPRAPGESPCPVGEPPLALENAASLKLFAGSLAPLLQPGAAGGEIPAVQASSGSPKARTTEGPVDSMPCLDRMPLLAKGKQATGEEKAATAPGAGAKASGEGMAGDAAGETEGSMERMGEPSQDPKQGTSGGVDTSSEQIATLTGFPDFREHIAKIFEKPVLGALATPGEKAGAGRSAVGKDLTRPLGPEKLLDGPPGVDVTLLPAPPARLQVEKKQQLAGEAEISHLALQDPASDKLLGPAGLTWERNLPGAGVGKEMAGVPPTLREDERPEGPGAAWPGLEGQAYSQLERSRQELASGLPSPAATQELPVERAAAFQVAPHSHGEEAVAQDRIPSGKQHQETSACDSPHGEDGPGDFAHTGVPGHVPRSTCAPSPQREVLTVPEANSEPWTLDTLGGERRPGVTAGILEMRNALGNQSTPAPPTGEVADTPLEPGKVAGAAGEAEGDITLSTAETQACASGDLPEAGTTRTFSVVAGDLVLPGSCQDPACSDKAPGMEGTAALHGDSPARPQQAKEQPGPERPIPAGDGKVCVSSPPEPDETHDPKLQHLAPEELHTDRESPRPGPSMLPSVPKKDAPRVMDKVTSDETRGAEGTESSPVADDIIQPAAPADLESPTLAASSYHGDVVGQVSTDLIAQSISPAAAHAGLPPSAAEHIVSPSAPAGDRVEASTPSCPDPAKDLSRSSDSEEAFETPESTTPVKAPPAPPPPPPEVIPEPEVSTQPPPEEPGCGSETVPVPDGPRSDSVEGSPFRPPSHSFSAVFDEDKPIASSGTYNLDFDNIELVDTFQTLEPRASDAKNQEGKVNTRRKSTDSVPISKSTLSRSLSLQASDFDGASSSGNPEAVALAPDAYSTGSSSASSTLKRTKKPRPPSLKKKQTTKKPTETPPVKETQQEPDEESLVPSGENLASETKTESAKTEGPSPALLEETPLEPAVGPKAACPLDSESAEGVVPPASGGGRVQNSPPVGRKTLPLTTAPEAGEVTPSDSGGQEDSPAKGLSVRLEFDYSEDKSSWDNQQENPPPTKKIGKKPVAKMPLRRPKMKKTPEKLDNTPASPPRSPAEPNDIPIAKGTYTFDIDKWDDPNFNPFSSTSKMQESPKLPQQSYNFDPDTCDESVDPFKTSSKTPSSPSKSPASFEIPASAMEANGVDGDGLNKPAKKKKTPLKTDTFRVKKSPKRSPLSDPPSQDPTPAATPETPPVISAVVHATDEEKLAVTNQKWTCMTVDLEADKQDYPQPSDLSTFVNETKFSSPTEELDYRNSYEIEYMEKIGSSLPQDDDAPKKQALYLMFDTSQESPVKSSPVRMSESPTPCSGSSFEETEALVNTAAKNQHPVPRGLAPNQESHLQVPEKSSQKELEAMGLGTPSEAIEIREAAHPTDVSISKTALYSRIGTAEVEKPAGLLFQQPDLDSALQIARAEIITKEREVSEWKDKYEESRREVMEMRKIVAEYEKTIAQMIEDEQREKSVSHQTVQQLVLEKEQALADLNSVEKSLADLFRRYEKMKEVLEGFRKNEEVLKRCAQEYLSRVKKEEQRYQALKVHAEEKLDRANAEIAQVRGKAQQEQAAHQASLRKEQLRVDALERTLEQKNKEIEELTKICDELIAKMGKS

SEQ ID NO: 67538 - protein, 1094 aa, Homo sapiens
MGNENSTSDNQRTLSAQTPRSAQPPGNSQNIKRKQQDTPGSPDHRDASSSPVADDIIQPAAPADLESPTLAASSYHGDVVGQVSTDLIAQRSSDSEEAFETPESTTPVKAPPAPPPPPPEVIPEPEVSTQPPPEEPGCGSETVPVPDGPRSDSVEGSPFRPPSHSFSAVFDEDKPIASSGTYNLDFDNIELVDTFQTLEPRASDAKNQEGKVNTRRKSTDSVPISKSTLSRSLSLQASDFDGASSSGNPEAVALAPDAYSTGSSSASSTLKRTKKPRPPSLKKKQTTKKPTETPPVKETQQEPDEESLVPSGENLASETKTESAKTEGPSPALLEETPLEPAVGPKAACPLDSESAEGVVPPASGGGRVQNSPPVGRKTLPLTTAPEAGEVTPSDSGGQEDSPAKGLSVRLEFDYSEDKSSWDNQQENPPPTKKIGKKPVAKMPLRRPKMKKTPEKLDNTPASPPRSPAEPNDIPIAKGTYTFDIDKWDDPNFNPFSSTSKMQESPKLPQQSYNFDPDTCDESVDPFKTSSKTPSSPSKSPASFEIPASAMEANGVDGDGLNKPAKKKKTPLKTDTFRVKKSPKRSPLSDPPSQDPTPAATPETPPVISAVVHATDEEKLAVTNQKWTCMTVDLEADKQDYPQPSDLSTFVNETKFSSPTEELDYRNSYEIEYMEKIGSSLPQDDDAPKKQALYLMFDTSQESPVKSSPVRMSESPTPCSGSSFEETEALVNTAAKNQHPVPRGLAPNQESHLQVPEKSSQKELEAMGLGTPSEAIEITAPEGSFASADALLSRLAHPVSLCGALDYLEPDLAEKNPPLFAQKLQEELEFAIMRIEALKLARQIALASRSHQDAKREAAHPTDVSISKTALYSRIGTAEVEKPAGLLFQQPDLDSALQIARAEIITKEREVSEWKDKYEESRREVMEMRKIVAEYEKTIAQMIEDEQREKSVSHQTVQQLVLEKEQALADLNSVEKSLADLFRRYEKMKEVLEGFRKNEEVLKRCAQEYLSRVKKEEQRYQALKVHAEEKLDRANAEIAQVRGKAQQEQAAHQASLRKEQLRVDALERTLEQKNKEIEELTKICDELIAKMGKS

SEQ ID NO: 67539 - protein, 996 aa, Homo sapiens
MGGSQSLQPAPASDLNLEASEAMSSDSEEAFETPESTTPVKAPPAPPPPPPEVIPEPEVSTQPPPEEPGCGSETVPVPDGPRSDSVEGSPFRPPSHSFSAVFDEDKPIASSGTYNLDFDNIELVDTFQTLEPRASDAKNQEGKVNTRRKSTDSVPISKSTLSRSLSLQASDFDGASSSGNPEAVALAPDAYSTGSSSASSTLKRTKKPRPPSLKKKQTTKKPTETPPVKETQQEPDEESLVPSGENLASETKTESAKTEGPSPALLEETPLEPAVGPKAACPLDSESAEGVVPPASGGGRVQNSPPVGRKTLPLTTAPEAGEVTPSDSGGQEDSPAKGLSVRLEFDYSEDKSSWDNQQENPPPTKKIGKKPVAKMPLRRPKMKKTPEKLDNTPASPPRSPAEPNDIPIAKGTYTFDIDKWDDPNFNPFSSTSKMQESPKLPQQSYNFDPDTCDESVDPFKTSSKTPSSPSKSPASFEIPASAMEANGVDGDGLNKPAKKKKTPLKTDTFRVKKSPKRSPLSDPPSQDPTPAATPETPPVISAVVHATDEEKLAVTNQKWTCMTVDLEADKQDYPQPSDLSTFVNETKFSSPTEELDYRNSYEIEYMEKIGSSLPQDDDAPKKQALYLMFDTSQESPVKSSPVRMSESPTPCSGSSFEETEALVNTAAKNQHPVPRGLAPNQESHLQVPEKSSQKELEAMGLGTPSEAIEITAPEGSFASADALLSRLAHPVSLCGALDYLEPDLAEKNPPLFAQKLQREAAHPTDVSISKTALYSRIGTAEVEKPAGLLFQQPDLDSALQIARAEIITKEREVSEWKDKYEESRREVMEMRKIVAEYEKTIAQMIEDEQREKSVSHQTVQQLVLEKEQALADLNSVEKSLADLFRRYEKMKEVLEGFRKNEEVLKRCAQEYLSRVKKEEQRYQALKVHAEEKLDRANAEIAQVRGKAQQEQAAHQASLRKEQLRVDALERTLEQKNKEIEELTKICDELIAKMGKS

SEQ ID NO: 67540 - protein, 571 aa, Homo sapiens
MPLRRPKMKKTPEKLDNTPASPPRSPAEPNDIPIAKGTYTFDIDKWDDPNFNPFSSTSKMQESPKLPQQSYNFDPDTCDESVDPFKTSSKTPSSPSKSPASFEIPASAMEANGVDGDGLNKPAKKKKTPLKTVKKSPKRSPLSDPPSQDPTPAATPETPPVISAVVHATDEEKLAVTNQKWTCMTVDLEADKQDYPQPSDLSTFVNETKFSSPTEELDYRNSYEIEYMEKIGSSLPQDDDAPKKQALYLMFDTSQESPVKSSPVRMSESPTPCSGSSFEETEALVNTAAKNQHPVPRGLAPNQESHLQVPEKSSQKELEAMGLGTPSEAIEIREAAHPTDVSISKTALYSRIGTAEVEKPAGLLFQQPDLDSALQIARAEIITKEREVSEWKDKYEESRREVMEMRKIVAEYEKTIAQMIEDEQREKSVSHQTVQQLVLEKEQALADLNSVEKSLADLFRRYEKMKEVLEGFRKNEEVLKRCAQEYLSRVKKEEQRYQALKVHAEEKLDRANAEIAQVRGKAQQEQAAHQASLRKEQLRVDALERTLEQKNKEIEELTKICDELIAKMGKS

SEQ ID NO: 67541 - protein, 2948 aa, Homo sapiens; identical to SEQ ID NO: 67536

SEQ ID NO: 67542 - protein, 2875 aa, Homo sapiens
MGNENSTSDNQRTLSAQTPRSAQPPGNSQNIKRKQQDTPGSPDHRDASSIGSVGLGGFCTASESSASLDPCLVSPEVTEPRKDPQGARGPEGSLLPSPPPSQEREHPSSSMPFAECPPEGCLASPAAAPEDGPQTQSPRREPAPNAPGDIAAAFPAERDSSTPYQEIAAVPSAGRERQPKEEGQKSSFSFSSGIDQSPGMSPVPLREPMKAPLCGEGDQPGGFESQEKEAAGGFPPAESRQGVASVQVTPEAPAAAQQGTESSAVLEKSPLKPMAPIPQDPAPRASDRERGQGEAPPQYLTDDLEFLRACHLPRSNSGAAPEAEVNAASQESCQQPVGAYLPHAELPWGLPSPALVPEAGGSGKEALDTIDVQGHPQTGMRGTKPNQVVCVAAGGQPEGGLPVSPEPSLLTPTEEAHPASSLASFPAAQIPIAVEEPGSSSRESVSKAGMPVSADAAKEVVDAGLVGLERQVSDLGSKGEHPEGDPGEVPAPSPQERGEHLNTEQSHEVQPGVPPPPLPKEQSHEVQPGAPPPPLPKAPSESARGPPGPTDGAKVHEDSTSPAVAKEGSRSPGDSPGGKEEAPEPPDGGDPGNLQGEDSQAFSSKRDPEVGKDELSKPSSDAESRDHPSSHSAQPPRKGGAGHTDGPHSQTAEADASGLPHKLGEEDPVLPPVPDGAGEPTVPEGAIWEGSGLQPKCPDTLQSREGLGRMESFLTLESEKSDFPPTPVAEVAPKAQEGESTLEIRKMGSCDGEGLLTSPDQPRGPACDASRQEFHAGVPHPPQGENLAADLGLTALILDQDQQGIPSCPGEGWIRGAASEWPLLSSEKHLQPSQAQPETSIFDVLKEQAQPPENGKETSPSHPGFKDQGADSSQIHVPVEPQEDNNLPTHGGQEQALGSELQSQLPKGTLSDTPTSSPTDMVWESSLTEESELSAPTRQKLPALGEKRPEGACGDGQSSRVSPPAADVLKDFSLAGNFSRKETCCTGQGPNKSQQALADALEEGSQHEEACQRHPGASEAADGCSPLWGLSKREMASGNTGEAPPCQPDSVALLDAVPCLPALAPASPGVTPTQDAPETEACDETQEGRQQPVPAPQQKMECWATSDAESPKLLASFPSAGEQGGEAGAAETGGSAGAGDPGKQQAPEKPGEATLSCGLLQTEHCLTSGEEASTSALRESCQAEHPMASCQDALLPARELGGIPRSTMDFSTHQAVPDPKELLLSGPPEVAAPDTPYLHVDSAAQRGAEDSGVKAVSSADPRAPGESPCPVGEPPLALENAASLKLFAGSLAPLLQPGAAGGEIPAVQASSGSPKARTTEGPVDSMPCLDRMPLLAKGKQATGEEKAATAPGAGAKASGEGMAGDAAGETEGSMERMGEPSQDPKQGTSGGVDTSSEQIATLTGFPDFREHIAKIFEKPVLGALATPGEKAGAGRSAVGKDLTRPLGPEKLLDGPPGVDVTLLPAPPARLQVEKKQQLAGEAEISHLALQDPASDKLLGPAGLTWERNLPGAGVGKEMAGVPPTLREDERPEGPGAAWPGLEGQAYSQLERSRQELASGLPSPAATQELPVERAAAFQVAPHSHGEEAVAQDRIPSGKQHQETSACDSPHGEDGPGDFAHTGVPGHVPRSTCAPSPQREVLTVPEANSEPWTLDTLGGERRPGVTAGILEMRNALGNQSTPAPPTGEVADTPLEPGKVAGAAGEAEGDITLSTAETQACASGDLPEAGTTRTFSVVAGDLVLPGSCQDPACSDKAPGMEGTAALHGDSPARPQQAKEQPGPERPIPAGDGKVCVSSPPEPDETHDPKLQHLAPEELHTDRESPRPGPSMLPSVPKKDAPRVMDKVTSDETRGAEGTERSAKDIGLWKAMMPSLDTDTLDVLERRVVLIQHEFLHKKEANGHSRFMYSSPVADDIIQPAAPADLESPTLAASSYHGDVVGQVSTDLIAQRSSDSEEAFETPESTTPVKAPPAPPPPPPEVIPEPEVSTQPPPEEPGCGSETVPVPDGPRSDSVEGSPFRPPSHSFSAVFDEDKPIASSGTYNLDFDNIELVDTFQTLEPRASDAKNQEGKVNTRRKSTDSVPISKSTLSRSLSLQASDFDGASSSGNPEAVALAPDAYSTGSSSASSTLKRTKKPRPPSLKKKQTTKKPTETPPVKETQQEPDEESLVPSGENLASETKTESAKTEGPSPALLEETPLEPAVGPKAACPLDSESAEGVVPPASGGGRVQNSPPVGRKTLPLTTAPEAGEVTPSDSGGQEDSPAKGLSVRLEFDYSEDKSSWDNQQENPPPTKKIGKKPVAKMPLRRPKMKKTPEKLDNTPASPPRSPAEPNDIPIAKGTYTFDIDKWDDPNFNPFSSTSKMQESPKLPQQSYNFDPDTCDESVDPFKTSSKTPSSPSKSPASFEIPASAMEANGVDGDGLNKPAKKKKTPLKTDTFRVKKSPKRSPLSDPPSQDPTPAATPETPPVISAVVHATDEEKLAVTNQKWTCMTVDLEADKQDYPQPSDLSTFVNETKFSSPTEELDYRNSYEIEYMEKIGSSLPQDDDAPKKQALYLMFDTSQESPVKSSPVRMSESPTPCSGSSFEETEALVNTAAKNQHPVPRGLAPNQESHLQVPEKSSQKELEAMGLGTPSEAIEIREAAHPTDVSISKTALYSRIGTAEVEKPAGLLFQQPDLDSALQIARAEIITKEREVSEWKDKYEESRREVMEMRKIVAEYEKTIAQMIEDEQREKSVSHQTVQQLVLEKEQALADLNSVEKSLADLFRRYEKMKEVLEGFRKNEEVLKRCAQEYLSRVKKEEQRYQALKVHAEEKLDRANAEIAQVRGKAQQEQAAHQASLRKEQLRVDALERTLEQKNKEIEELTKICDELIAKMGKS

SEQ ID NO: 67543 - protein, 1094 aa, Homo sapiens; identical to SEQ ID NO: 67538

SEQ ID NO: 67544 - protein, 838 aa, Homo sapiens
MSLQVLNDKNVSNEKNTENCDFLFSPPEVTGRSSVLRVSQKENVPPKNLAKAMKVTFQTPLRDPQTHRILSPSMASKLEAPFTQDDTLGLENSHPVWTQKENQQLIKEVDAKTTHGILQKPVEADTDLLGDASPAFGSGSSSESGPGALADLDCSSSSQSPGSSENQMVSPGKVSGSPEQAVEENLSSYSLDRRVTPASETLEDPCRTESQHKAETPHGAEEECKAETPHGAEEECRHGGVCAPAAVATSPPGAIPKEACGGAPLQGLPGEALGCPAGVGTPVPADGTQTLTCAHTSAPESTAPTNHLVAGRAMTLSPQEEVAAGQMASSSRSGPVKLEFDVSDGATSKRAPPPRRLGERSGLKPPLRKAAVRQQKAPQEVEEDDGRSGAGEDPPMPASRGSYHLDWDKMDDPNFIPFGGDTKSGCSEAQPPESPETRLGQPAAEQLHAGPATEEPGPCLSQQLHSASAEDTPVVQLAAETPTAESKERALNSASTSLPTSCPGSEPVPTHQQGQPALELKEESFRDPAEVLGTGAEVDYLEQFGTSSFKESALRKQSLYLKFDPLLRDSPGRPVPVATETSSMHGANETPSGRPREAKLVEFDFLGALDIPVPGPPPGVPAPGGPPLSTGPIVDLLQYSQKDLDAVVKATQEENRELRSRCEELHGKNLELGKIMDRFEEVVYQAMEEVQKQKELSKAEIQKVLKEKDQLTTDLNSMEKSFSDLFKRFEKQKEVIEGYRKNEESLKKCVEDYLARITQEGQRYQALKAHAEEKLQLANEEIAQVRSKAQAEALALQASLRKEQMRIQSLEKTVEQKTKENEELTRICDDLISKMEKI

SEQ ID NO: 67545 - protein, 145 aa, Homo sapiens
MSLQVLNDKNVSNEKNTENCDFLFSPPEVTGRSSVLRVSQKENVPPKNLAKAMKVTFQTPLRDPQTHRILSPSMASKLEAPFTQDDTLGLENSHPVWTQKEKAAAFSLSGGHACGAVGSRDPNSREQGESLELCQHLASHKLSRQ

SEQ ID NO: 67546 - protein, 221 aa, Homo sapiens
MSLQVLNDKNVSNEKNTENCDFLFSPPEVTGRSSVLRVSQKENVPPKNLAKAMKVTFQTPLRDPQTHRILSPSMASKLEAPFTQDDTLGLENSHPVWTQKENQQLIKEVDAKTTHGILQKPVEADTDLLGDASPAFGSGSSSESGPGALADLDCSSSSQSPGSSENQMVSPGKVSGSPEQAVEENLSSYSLDRRVTPASETLEDPCRTESQHKAETPHGAE

SEQ ID NO: 67547 - protein, 231 aa, Homo sapiens
MSLQVLNDKNVSNEKNTENCDFLFSPPEVTGRSSVLRVSQKENVPPKNLAKAMKVTFQTPLRDPQTHRILSPSMASKLEAPFTQDDTLGLENSHPVWTQKENQQLIKEVDAKTTHGILQKPVEADTDLLGDASPAFGSGSSSESGPGALADLDCSSSSQSPGSSENQMVSPGKVSGSPEQAVEENLSSYSLDRRVTPASETLEDPCRTESQHKAETPHGAEEECKAETPHG

SEQ ID NO: 67548 - protein, 201 aa, Homo sapiens
MANKGPSYGMSREVQSKIEKKYDEELEERLVEWIIVQCGPDVGRPDRGRLGFQVWLKNGVILSKLVNSLYPDGSKPVKVPENPPSMVFKQMEQVAQFLKAAEDYGVIKTDMFQTVDLFEGKDMAAVQRTLMALGSLAVTKNDGHYRGDPNWFMKKAQEHKREFTESQLQEGKHVIGLQMGSNRGASQAGMTGYGRPRQIIS

SEQ ID NO: 67549 - protein, 35 aa, Homo sapiens
MANKGPSYGMSREVQPSRLACLTHTRVVPSALAKL

SEQ ID NO: 67550 - protein, 201 aa, Homo sapiens; identical to SEQ ID NO: 67548

SEQ ID NO: 67551 - protein, 201 aa, Homo sapiens; identical to SEQ ID NO: 67548

SEQ ID NO: 67552 - protein, 91 aa, Homo sapiens
MANKGPSYGMSREVQSKIEKKYDEELEERLVEWIIVQCGPDVGRPDRGRLGFQVWLKNGVILSKLVNSLYPDGSKPVKVPENPPSMVFKQM

SEQ ID NO: 67553 - protein, 201 aa, Homo sapiens; identical to SEQ ID NO: 67548

SEQ ID NO: 67554 - protein, 201 aa, Homo sapiens; identical to SEQ ID NO: 67548

SEQ ID NO: 67555 - protein, 199 aa, Homo sapiens
MANRGPAYGLSREVQQKIEKQYDADLEQILIQWITTQCRKDVGRPQPGRENFQNWLKDGTVLCELINALYPEGQAPVKKIQASTMAFKQMEQISQFLQAAERYGINTTDIFQTVDLWEGKNMACVQRTLMNLGGLAVARDDGLFSGDPNWFPKKSKENPRNFSDNQLQEGKNVIGLQMGTNRGASQAGMTGYGMPRQIL

SEQ ID NO: 67556 - protein, 220 aa, Homo sapiens
MSAFSLALALVSSPQPPPPIGMANRGPAYGLSREVQQKIEKQYDADLEQILIQWITTQCRKDVGRPQPGRENFQNWLKDGTVLCELINALYPEGQAPVKKIQASTMAFKQMEQISQFLQAAERYGINTTDIFQTVDLWEGKNMACVQRTLMNLGGLAVARDDGLFSGDPNWFPKKSKENPRNFSDNQLQEGKNVIGLQMGTNRGASQAGMTGYGMPRQIL

SEQ ID NO: 67557 - protein, 199 aa, Homo sapiens; identical to SEQ ID NO: 67555

SEQ ID NO: 67558 - protein, 187 aa, Homo sapiens
MANRGPAYGLSREVQQKIEKQYDADLEQILIQWITTQCRKDVGRPQPGRENFQNWLKDGTVLCELINALYPEGQAPVKKIQASTMAFKQMEQISQFLQAAERYGINTTDIFQTVDLWEGKNMACVQRTLMNLGGLAVARDDGLFSGDPNWFPKKSKENPRNFSDNQLQEGKNVIGLQMGTNRGASQA

SEQ ID NO: 67559 - protein, 817 aa, Homo sapiens
MMDGPRSDVGRWGGNPLQPPTTPSPEPEPEPDGRSRRGGGRSFWARCCGCCSCRNAADDDWGPEPSDSRGRGSSSGTRRPGSRGSDSRRPVSRGSGVNAAGDGTIREGMLVVNGVDLLSSRSDQNRREHHTDEYEYDELIVRRGQPFHMLLLLSRTYESSDRITLELLIGNNPEVGKGTHVIIPVGKGGSGGWKAQVVKASGQNLNLRVHTSPNAIIGKFQFTVRTQSDAGEFQLPFDPRNEIYILFNPWCPEDIVYVDHEDWRQEYVLNESGRIYYGTEAQIGERTWNYGQFDHGVLDACLYILDRRGMPYGGRGDPVNVSRVISAMVNSLDDNGVLIGNWSGDYSRGTNPSAWVGSVEILLSYLRTGYSVPYGQCWVFAGVTTTVLRCLGLATRTVTNFNSAHDTDTSLTMDIYFDENMKPLEHLNHDSVWNFHVWNDCWMKRPDLPSGFDGWQVVDATPQETSSGIFCCGPCSVESIKNGLVYMKYDTPFIFAEVNSDKVYWQRQDDGSFKIVYVEEKAIGTLIVTKAISSNMREDITYLYKHPEGSDAERKAVETAAAHGSKPNVYANRGSAEDVAMQVEAQDAVMGQDLMVSVMLINHSSSRRTVKLHLYLSVTFYTGVSGTIFKETKKEVELAPGASDRVTMPVAYKEYRPHLVDQGAMLLNVSGHVKESGQVLAKQHTFRLRTPDLSLTLLGAAVVGQECEVQIVFKNPLPVTLTNVVFRLEGSGLQRPKILNVGDIGGNETVTLRQSFVPVRPGPRQLIASLDSPQLSQVHGVIQVDVAPAPGDGGFFSDAGGDSHLGETIPMASRGGA

SEQ ID NO: 67560 - protein, 375 aa, Homo sapiens
MKRPDLPSGFDGWQVVDATPQETSSGIFCCGPCSVESIKNGLVYMKYDTPFIFAEVNSDKVYWQRQDDGSFKIVYVEEKAIGTLIVTKAISSNMREDITYLYKHPEGSDAERKAVETAAAHGSKPNVYANRGSAEDVAMQVEAQDAVMGQDLMVSVMLINHSSSRRTVKLHLYLSVTFYTGVSGTIFKETKKEVELAPGASDRVTMPVAYKEYRPHLVDQGAMLLNVSGHVKESGQVLAKQHTFRLRTPDLSLTLLGAAVVGQECEVQIVFKNPLPVTLTNVVFRLEGSGLQRPKILNVGDIGGNETVTLRQSFVPVRPGPRQLIASLDSPQLSQVHGVIQVDVAPAPGDGGFFSDAGGDSHLGETIPMASRGGA

SEQ ID NO: 67561 - protein, 135 aa, Homo sapiens
MMDGPRSDVGRWGGNPLQPPTTPSPEPEPEPDGRSRRGGGRSFWARCCGCCSCRNAADDDWGPEPSDSRGRGSSSGTRRPGSRGSDSRRPVSRGSGVNAAGDGTIREGMLVVNGVDLLSSRSDQNRREHHTDEYE

SEQ ID NO: 67562 - protein, 42 aa, Homo sapiens
MMDGPRSDVGRWGGNPLQPPTTPSPEPEPEPDGRSRRGGGRS

SEQ ID NO: 67563 - protein, 65 aa, Homo sapiens
MMDGPRSDVGRWGGNPLQPPTTPSPEPEPEPDGRSRRGGGRSFWARCCGCCSCRNAADDDWGPEP

SEQ ID NO: 67564 - protein, 50 aa, Homo sapiens
MMDGPRSDVGRWGGNPLQPPTTPSPEPEPEPDGRSRRGGGRSFWARCCGC

SEQ ID NO: 67565 - protein, 9 aa, Homo sapiens
MMDGPRSDV

SEQ ID NO: 67566 - protein, 687 aa, Homo sapiens
MAEELVLERCDLELETNGRDHHTADLCREKLVVRRGQPFWLTLHFEGRNYEASVDSLTFSVVTGPAPSQEAGTKARFPLRDAVEEGDWTATVVDQQDCTLSLQLTTPANAPIGLYRLSLEASTGYQGSSFVLGHFILLFNAWCPADAVYLDSEEERQEYVLTQQGFIYQGSAKFIKNIPWNFGQFEDGILDICLILLDVNPKFLKNAGRDCSRRSSPVYVGRVVSGMVNCNDDQGVLLGRWDNNYGDGVSPMSWIGSVDILRRWKNHGCQRVKYGQCWVFAAVACTVLRCLGIPTRVVTNYNSAHDQNSNLLIEYFRNEFGEIQGDKSEMIWNFHCWVESWMTRPDLQPGYEGWQALDPTPQEKSEGTYCCGPVPVRAIKEGDLSTKYDAPFVFAEVNADVVDWIQQDDGSVHKSINRSLIVGLKISTKSVGRDEREDITHTYKYPEGSSEEREAFTRANHLNKLAEKEETGMAMRIRVGQSMNMGSDFDVFAHITNNTAEEYVCRLLLCARTVSYNGILGPECGTKYLLNLNLEPFSEKSVPLCILYEKYRDCLTESNLIKVRALLVEPVINSYLLAERDLYLENPEIKIRILGEPKQKRKLVAEVSLQNPLPVALEGCTFTVEGAGLTEEQKTVEIPDPVEAGEEVKVRMDLLPLHMGLHKLVVNFESDKLKAVKGFRNVIIGPA

SEQ ID NO: 67567 - protein, 281 aa, Homo sapiens
MAEELVLERCDLELETNGRDHHTADLCREKLVVRRGQPFWLTLHFEGRNYEASVDSLTFSVVTGPAPSQEAGTKARFPLRDAVEEGDWTATVVDQQDCTLSLQLTTPANAPIGLYRLSLEASTGYQGSSFVLGHFILLFNAWCPADAVYLDSEEERQEYVLTQQGFIYQGSAKFIKNIPWNFGQFEDGILDICLILLDVNPKFLKNAGRDCSRRSSPVYVGRVVSGMVNCNDDQGVLLGRWDNNYGDGVSPMSWIGSVDILRRWKNHGCQRVKYGQCWVFA

SEQ ID NO: 67568 - protein, 160 aa, Homo sapiens
MAEELVLERCDLELETNGRDHHTADLCREKLVVRRGQPFWLTLHFEGRNYEASVDSLTFSVVTGPAPSQEAGTKARFPLRDAVEEGDWTATVVDQQDCTLSLQLTTPANAPIGLYRLSLEASTGYQGSSFVLGHFILLFNAWCPADAVYLDSEEERQEYV

SEQ ID NO: 67569 - protein, 606 aa, Homo sapiens
MAEELVLERCDLELETNGRDHHTADLCREKLVVRRGQPFWLTLHFEGRNYEASVDSLTFSVVTADAVYLDSEEERQEYVLTQQGFIYQGSAKFIKNIPWNFGQFEDGILDICLILLDVNPKFLKNAGRDCSRRSSPVYVGRVVSGMVNCNDDQGVLLGRWDNNYGDGVSPMSWIGSVDILRRWKNHGCQRVKYGQCWVFAAVACTVLRCLGIPTRVVTNYNSAHDQNSNLLIEYFRNEFGEIQGDKSEMIWNFHCWVESWMTRPDLQPGYEGWQALDPTPQEKSEGTYCCGPVPVRAIKEGDLSTKYDAPFVFAEVNADVVDWIQQDDGSVHKSINRSLIVGLKISTKSVGRDEREDITHTYKYPEGSSEEREAFTRANHLNKLAEKEETGMAMRIRVGQSMNMGSDFDVFAHITNNTAEEYVCRLLLCARTVSYNGILGPECGTKYLLNLNLEPFSEKSVPLCILYEKYRDCLTESNLIKVRALLVEPVINSYLLAERDLYLENPEIKIRILGEPKQKRKLVAEVSLQNPLPVALEGCTFTVEGAGLTEEQKTVEIPDPVEAGEEVKVRMDLLPLHMGLHKLVVNFESDKLKAVKGFRNVIIGPA

SEQ ID NO: 67570 - protein, 627 aa, Homo sapiens
MAEGPAPSQEAGTKARFPLRDAVEEGDWTATVVDQQDCTLSLQLTTPANAPIGLYRLSLEASTGYQGSSFVLGHFILLFNAWCPADAVYLDSEEERQEYVLTQQGFIYQGSAKFIKNIPWNFGQFEDGILDICLILLDVNPKFLKNAGRDCSRRSSPVYVGRVVSGMVNCNDDQGVLLGRWDNNYGDGVSPMSWIGSVDILRRWKNHGCQRVKYGQCWVFAAVACTVLRCLGIPTRVVTNYNSAHDQNSNLLIEYFRNEFGEIQGDKSEMIWNFHCWVESWMTRPDLQPGYEGWQALDPTPQEKSEGTYCCGPVPVRAIKEGDLSTKYDAPFVFAEVNADVVDWIQQDDGSVHKSINRSLIVGLKISTKSVGRDEREDITHTYKYPEGSSEEREAFTRANHLNKLAEKEETGMAMRIRVGQSMNMGSDFDVFAHITNNTAEEYVCRLLLCARTVSYNGILGPECGTKYLLNLNLEPFSEKSVPLCILYEKYRDCLTESNLIKVRALLVEPVINSYLLAERDLYLENPEIKIRILGEPKQKRKLVAEVSLQNPLPVALEGCTFTVEGAGLTEEQKTVEIPDPVEAGEEVKVRMDLLPLHMGLHKLVVNFESDKLKAVKGFRNVIIGPA

SEQ ID NO: 67571 - protein, 693 aa, Homo sapiens
MAALGVQSINWQTAFNRQAHHTDKFSSQELILRRGQNFQVLMIMNKGLGSNERLEFIVSTGPYPSESAMTKAVFPLSNGSSGGWSAVLQASNGNTLTISISSPASAPIGRYTMALQIFSQGGISSVKLGTFILLFNPWLNVDSVFMGNHAEREEYVQEDAGIIFVGSTNRIGMIGWNFGQFEEDILSICLSILDRSLNFRRDAATDVASRNDPKYVGRVLSAMINSNDDNGVLAGNWSGTYTGGRDPRSWNGSVEILKNWKKSGFSPVRYGQCWVFAGTLNTALRSLGIPSRVITNFNSAHDTDRNLSVDVYYDPMGNPLDKGSDSVWNFHVWNEGWFVRSDLGPSYGGWQVLDATPQERSQGVFQCGPASVIGVREGDVQLNFDMPFIFAEVNADRITWLYDNTTGKQWKNSVNSHTIGRYISTKAVGSNARMDVTDKYKYPEGSDQERQVFQKALGKLKPNTPFAATSSMGLETEEQEPSIIGKLKVAGMLAVGKEVNLVLLLKNLSRDTKTVTVNMTAWTIIYNGTLVHEVWKDSATMSLDPEEEAEHPIKISYAQYEKYLKSDNMIRITAVCKVPDESEVVVERDIILDNPTLTLEVLNEARVRKPVNVQMLFSNPLDEPVRDCVLMVEGSGLLLGNLKIDVPTLGPKEGSRVRFDILPSRSGTKQLLADFSCNKFPAIKAMLSIDVAE

SEQ ID NO: 67572 - protein, 533 aa, Homo sapiens
MAALGVQSINWQTAFNRQAHHTDKFSSQELILRRGQNFQVLMIMNKGLGSNERLEFIVSTGPYPSESAMTKAVFPLSNGSSGGWSAVLQASNGNTLTISISSPASAPIGRYTMALQIFSQGGISSVKLGTFILLFNPWLNVDSVFMGNHAEREEYVQEDAGIIFVGSTNRIGMIGWNFGQFEEDILSICLSILDRSLNFRRDAATDVASRNDPKYVGRVLSAMINSNDDNGVLAGNWSGTYTGGRDPRSWNGSVEILKNWKKSGFSPVRYGQCWVFAGTLNTALRSLGIPSRVITNFNSAHDTDRNLSVDVYYDPMGNPLDKGSDSVWNFHVWNEGWFVRSDLGPSYGGWQVLDATPQERSQGVFQCGPASVIGVREGDVQLNFDMPFIFAEVNADRITWLYDNTTGKQWKNSVNSHTIGRYISTKAVGSNARMDVTDKYKYPEGSDQERQVFQKALGKLKPNTPFAATSSMGLETEEQEPSIIGKLKVAGMLAVGKEVNLVLLLIPHALQCCRMDWPLTQGLSKRDTGEKLV

SEQ ID NO: 67573 - protein, 684 aa, Homo sapiens
MMDASKELQVLHIDFLNQDNAVSHHTWEFQTSSPVFRRGQVFHLRLVLNQPLQSYHQLKLEFSTGPNPSIAKHTLVVLDPRTPSDHYNWQATLQNESGKEVTVAVTSSPNAILGKYQLNVKTGNHILKSEENILYLLFNPWCKEDMVFMPDEDERKEYILNDTGCHYVGAARSIKCKPWNFGQFEKNVLDCCISLLTESSLKPTDRRDPVLVCRAMCAMMSFEKGQGVLIGNWTGDYEGGTAPYKWTGSAPILQQYYNTKQAVCFGQCWVFAGILTTVLRALGIPARSVTGFDSAHDTERNLTVDTYVNENGEKITSMTHDSVWNFHVWTDAWMKRPDLPKGYDGWQAVDATPQERSQGVFCCGPSPLTAIRKGDIFIVYDTRFVFSEVNGDRLIWLVKMVNGQEELHVISMETTSIGKNISTKAVGQDRRRDITYEYKYPEGSSEERQVMDHAFLLLSSEREHRRPVKENFLHMSVQSDDVLLGNSVNFTVILKRKTAALQNVNILGSFELQLYTGKKMAKLCDLNKTSQIQGQVSEVTLTLDSKTYINSLAILDDEPVIRGFIIAEIVESKEIMASEVFTSFQYPEFSIELPNTGRIGQLLVCNCIFKNTLAIPLTDVKFSLESLGISSLQTSDHGTVQPGETIQSQIKCTPIKTGPKKFIVKLSSKQVKEINAQKIVLITK

SEQ ID NO: 67574 - protein, 720 aa, Homo sapiens
MAQGLEVALTDLQSSRNNVRHHTEEITVDHLLVRRGQAFNLTLYFRNRSFQPGLDNIIFVVETGPLPDLALGTRAVFSLARHHSPSPWIAWLETNGATSTEVSLCAPPTAAVGRYLLKIHIDSFQGSVTAYQLGEFILLFNPWCPEDAVYLDSEPQRQEYVMNDYGFIYQGSKNWIRPCPWNYGQFEDKIIDICLKLLDKSLHFQTDPATDCALRGSPVYVSRVVCAMINSNDDNGVLNGNWSENYTDGANPAEWTGSVAILKQWNATGCQPVRYGQCWVFAAVMCTVMRCLGIPTRVITNFDSGHDTDGNLIIDEYYDNTGRILGNKKKDTIWNFHVWNECWMARKDLPPAYGGWQVLDATPQEMSNGVYCCGPASVRAIKEGEVDLNYDTPFVFSMVNADCMSWLVQGGKEQKLHQDTSSVGNFISTKSIQSDERDDITENYKYEEGSLQERQVFLKALQKLKARSFHGSQRGAELQPSRPTSLSQDSPRSLHTPSLRPSDVVQVSLKFKLLDPPNMGQDICFVLLALNMSSQFKDLKVNLSAQSLLHDGSPLSPFWQDTAFITLSPKEAKTYPCKISYSQYSQYLSTDKLIRISALGEEKSSPEKILVNKIITLSYPSITINVLGAAVVNQPLSIQVIFSNPLSEQVEDCVLTVEGSGLFKKQQKVFLGVLKPQHQASIILETVPFKSGQRQIQANMRSNKFKDIKGYRNVYVDFAL

SEQ ID NO: 67575 - protein, 638 aa, Homo sapiens
MAQGLEVALTDLQSSRNNVRHHTEEITVDHLLVRRGQAFNLTLYFRNRSFQPGLDNIIFVVETEDAVYLDSEPQRQEYVMNDYGFIYQGSKNWIRPCPWNYGQFEDKIIDICLKLLDKSLHFQTDPATDCALRGSPVYVSRVVCAMINSNDDNGVLNGNWSENYTDGANPAEWTGSVAILKQWNATGCQPVRYGQCWVFAAVMCTVMRCLGIPTRVITNFDSGHDTDGNLIIDEYYDNTGRILGNKKKDTIWNFHVWNECWMARKDLPPAYGGWQVLDATPQEMSNGVYCCGPASVRAIKEGEVDLNYDTPFVFSMVNADCMSWLVQGGKEQKLHQDTSSVGNFISTKSIQSDERDDITENYKYEEGSLQERQVFLKALQKLKARSFHGSQRGAELQPSRPTSLSQDSPRSLHTPSLRPSDVVQVSLKFKLLDPPNMGQDICFVLLALNMSSQFKDLKVNLSAQSLLHDGSPLSPFWQDTAFITLSPKEAKTYPCKISYSQYSQYLSTDKLIRISALGEEKSSPEKILVNKIITLSYPSITINVLGAAVVNQPLSIQVIFSNPLSEQVEDCVLTVEGSGLFKKQQKVFLGVLKPQHQASIILETVPFKSGQRQIQANMRSNKFKDIKGYRNVYVDFAL

SEQ ID NO: 67576 - protein, 719 aa, Homo sapiens
AQGLEVALTDLQSSRNNVRHHTEEITVDHLLVRRGQAFNLTLYFRNRSFQPGLDNIIFVVETGPLPDLALGTRAVFSLARHHSPSPWIAWLETNGATSTEVSLCAPPTAAVGRYLLKIHIDSFQGSVTAYQLGEFILLFNPWCPEDAVYLDSEPQRQEYVMNDYGFIYQGSKNWIRPCPWNYGQFEDKIIDICLKLLDKSLHFQTDPATDCALRGSPVYVSRVVCAMINSNDDNGVLNGNWSENYTDGANPAEWTGSVAILKQWNATGCQPVRYGQCWVFAAVMCTVMRCLGIPTRVITNFDSGHDTDGNLIIDEYYDNTGRILGNKKKDTIWNFHVWNECWMARKDLPPAYGGWQVLDATPQEMSNGVYCCGPASVRAIKEGEVDLNYDTPFVFSMVNADCMSWLVQGGKEQKLHQDTSSVGNFISTKSIQSDERDDITENYKYEEGSLQERQVFLKALQKLKARSFHGSQRGAELQPSRPTSLSQDSPRSLHTPSLRPSDVVQVSLKFKLLDPPNMGQDICFVLLALNMSSQFKDLKVNLSAQSLLHDGSPLSPFWQDTAFITLSPKEAKTYPCKISYSQYSQYLSTDKLIRISALGEEKSSPEKILVNKIITLSYPSITINVLGAAVVNQPLSIQVIFSNPLSEQVEDCVLTVEGSGLFKKQQKVFLGVLKPQHQASIILETVPFKSGQRQIQANMRSNKFKDIKGYRNVYVDFAL

SEQ ID NO: 67577 - protein, 706 aa, Homo sapiens
MAGIRVTKVDWQRSRNGAAHHTQEYPCPELVVRRGQSFSLTLELSRALDCEEILIFTMETGPRASEALHTKAVFQTSELERGEGWTAAREAQMEKTLTVSLASPPSAVIGRYLLSIRLSSHRKHSNRRLGEFVLLFNPWCAEDDVFLASEEERQEYVLSDSGIIFRGVEKHIRAQGWNYGQFEEDILNICLSILDRSPGHQNNPATDVSCRHNPIYVTRVISAMVNSNNDRGVVQGQWQGKYGGGTSPLHWRGSVAILQKWLKGRYKPVKYGQCWVFAGVLCTVLRCLGIATRVVSNFNSAHDTDQNLSVDKYVDSFGRTLEDLTEDSMWNFHVWNESWFARQDLGPSYNGWQVLDATPQEESEGVFRCGPASVTAIREGDVHLAHDGPFVFAEVNADYITWLWHEDESRERVYSNTKKIGRCISTKAVGSDSRVDITDLYKYPEGSRKERQVYSKAVNRLFGVEASGRRIWIRRAGGRCLWRDDLLEPATKPSIAGKFKVLEPPMLGHDLRLALCLANLTSRAQRVRVNLSGATILYTRKPVAEILHESHAVRLGPQEEKRIPITISYSKYKEDLTEDKKILLAAMCLVTKGEKLLVEKDITLEDFITIKVLGPAMVGVAVTVEVTVVNPLIERVKDCALMVEGSGLLQEQLSIDVPTLEPQERASVQFDITPSKSGPRQLQVDLVSPHFPDIKGFVIVHVATAK

SEQ ID NO: 67578 - protein, 625 aa, Homo sapiens
MAGIRVTKVDWQRSRNGAAHHTQEYPCPELVVRRGQSFSLTLELSRALDCEEILIFTMETGPRASEALHTKAVFQTSELERGEGWTAAREAQMEKTLTVSLASPPSAVIGRYLLSIRLSSHRKHSNRRLGEFVLLFNPWCAEDDVFLASEEERQEYVLSDSGIIFRGVEKHIRAQGWNYGQFEEDILNICLSILDRSPGHQNNPATDVSCRHNPIYVTRVISAMVNSNNDRGVVQGQWQGKYGGGTSPLHWRGSVAILQKWLKGRYKPVKYGQCWVFAGVLCTVLRCLGIATRVVSNFNSAHDTDQNLSVDKYVDSFGRTLEDLTEDSMWNFHVWNESWFARQDLGPSYNGWQVLDATPQEESEGVFRCGPASVTAIREGDVHLAHDGPFVFAEVNADYITWLWHEDESRERVYSNTKKIGRCISTKAVGSDSRVDITDLYKYPEGSRKERQVYSKAVNRLFGVEASGRRIWIRRAGGRCLWRDDLLEPATKPSIAGKFKVLEPPMLGHDLRLALCLANLTSRAQRVRVNLSGATILYTRKPVAEILHESHAVRLGPQEEKRIPITISYSKYKEDLTEDKKILLAAMCLVTKGEKLLVEKDITLEDFITIKRAYPGASGEGLSPV

SEQ ID NO: 67579 - protein, 710 aa, Homo sapiens
MDQVATLRLESVDLQSSRNNKEHHTQEMGVKRLTVRRGQPFYLRLSFSRPFQSQNDHITFVAETGPKPSELLGTRATFFLTRVQPGNVWSASDFTIDSNSLQVSLFTPANAVIGHYTLKIEISQGQGHSVTYPLGTFILLFNPWSPEDDVYLPSEILLQEYIMRDYGFVYKGHERFITSWPWNYGQFEEDIIDICFEILNKSLYHLKNPAKDCSQRNDVVYVCRVVSAMINSNDDNGVLQGNWGEDYSKGVSPLEWKGSVAILQQWSARGGQPVKYGQCWVFASVMCTVMRCLGVPTRVVSNFRSAHNVDRNLTIDTYYDRNAEMLSTQKRDKIWNFHVWNECWMIRKDLPPGYNGWQVLDPTPQQTSSGLFCCGPASVKAIREGDVHLAYDTPFVYAEVNADEVIWLLGDGQAQEILAHNTSSIGKEISTKMVGSDQRQSITSSYKYPEGSPEERAVFMKASRKMLGPQRASLPFLDLLESGGLRDQPAQLQLHLARIPEWGQDLQLLLRIQRVPDSTHPRGPIGLVVRFCAQALLHGGGTQKPFWRHTVRMNLDFGKETQWPLLLPYSNYRNKLTDEKLIRVSGIAEVEETGRSMLVLKDICLEPPHLSIEVSERAEVGKALRVHVTLTNTLMVALSSCTMVLEGSGLINGQIAKDLGTLVAGHTLQIQLDLYPTKAGPRQLQVLISSNEVKEIKGYKDIFVTVAGAP

SEQ ID NO: 67580 - protein, 281 aa, Homo sapiens
MRFVVALVLLNVAAAGAVPLLATESVKQEEAGVRPSAGNVSTHPSLSQRPGGSTKSHPEPQTPKDSPSKSSSEAQTTKDVPNKSGADGQTPKDGSSKSGAEDQTPKDVPNKSGAEKQTPKDGSNKSGAEEQGPIDGPSKSGAEEQTSKDSPNKEEVKSSEPTEDVEPKEAEDDDTGPEEGSPPKEEKEKMSGSASSENREGTLSDSTGSEKDDLYPNGSGNGSAESSHFFAYLVTAAILVAVLYIAHHNKRKIIAFVLEGKRSKVTRRPKASDYQRLDQKS

SEQ ID NO: 67581 - protein, 437 aa, Homo sapiens
MRFVVALVLLNVAAAGAVPLLATESVKQEEAGVRPSAGNVSTHPSLSQRPGGSTKSHPEPQTPKDSPSKSSAEAQTPEDTPNKSGAEAKTQKDSSNKSGAEAKTQKGSTSKSGSEAQTTKDSTSKSHPELQTPKDSTGKSGAEAQTPEDSPNRSGAEAKTQKDSPSKSGSEAQTTKDVPNKSGADGQTPKDGSSKSGAEDQTPKDVPNKSGAEKQTPKDGSNKSGAEEQGPIDGPSKSGAEEQTSKDSPNKVVPEQPSRKDHSKPISNPSDNKELPKADTNQLADKGKLSPHAFKTESGEETDLISPPQEEVKSSEPTEDVEPKEAEDDDTGPEEGSPPKEEKEKMSGSASSENREGTLSDSTGSEKDDLYPNGSGNGSAESSHFFAYLVTAAILVAVLYIAHHNKRKIIAFVLEGKRSKVTRRPKASDYQRLDQKS

SEQ ID NO: 67582 - protein, 379 aa, Homo sapiens
MRFVVALVLLNVAAAGAVPLLATESVKQEEAGVRPSAGNVSTHPSLSQRPGGSTKSHPEPQTPKDSPSKSSAEAQTPEDTPNKSGAEAKTQKDSSNKSGAEAKTQKGSTSKSGSEAQTTKDSTSKSHPELQTPKDSTGKSGAEAQTPEDSPNRSGAEAKTQKDSPSKSGSEAQTTKDVPNKSGADGQTPKDGSSKSGAEDQTPKDVPNKSGAEKQTPKDGSNKSGAEEQGPIDGPSKSGAEEQTSKDSPNKEEVKSSEPTEDVEPKEAEDDDTGPEEGSPPKEEKEKMSGSASSENREGTLSDSTGSEKDDLYPNGSGNGSAESSHFFAYLVTAAILVAVLYIAHHNKRKIIAFVLEGKRSKVTRRPKASDYQRLDQKS

SEQ ID NO: 67583 - protein, 453 aa, Homo sapiens
MRFVVALVLLNVAAAGAVPLLATESVKQEEAGVRPSAGNVSTHPSLSQRPGGSTKSHPEPQTPKDSPSKSSAEAQTPEDTPNKSGAEAKTQKDSSNKSGAEAKTQKGSTSKSGSEAQTTKDSTSKSHPELQTPKDSTGKSGAEAQTPEDSPNRSGAEAKTQKDSPSKSGSEAQTTKDVPNKSGADGQTPKDGSSKSGAEDQTPKDVPNKSGAEKQTPKDGSNKSGAEEQGPIDGPSKSGAEEQTSKDSPNKVVPEQPSRKDHSKPISNPSDNKELPKADTNQLADKGKLSPHAFKTESGEETDLISPPQEEVKSSEPTEDVEPKEAEDDDTGPEEGSPPKEEKEKMSGSASSENREGTLSDSTGSEKDDLYPNGSGNGSAESSHFFAYLVTAAILVAVLYIAHHNKRKIIAFVLEGKRSKVTRRPKASDYQRLDQKIFFPLSPNRMVYSSGKR

SEQ ID NO: 67584 - protein, 230 aa, Homo sapiens
MYVRVSFDTKPDLLLHLMTKEWQLELPKLLISVHGGLQNFELQPKLKQVFGKGLIKAAMTTGAWIFTGGVNTGVIRHVGDALKDHASKSRGKICTIGIAPWGIVENQEDLIGRDVVRPYQTMSNPMSKLTVLNSMHSHFILADNGTTGKYGAEVKLRRQLEKHISLQKINTRIGQGVPVVALIVEGGPNVISIVLEYLRDTPPVPVVVCDGSGRASDILAFGHKYSEEGG

SEQ ID NO: 67585 - protein, 839 aa, Homo sapiens [sequence omitted]

SEQ ID NO: 67586 - protein, 790 aa, Homo sapiens
MKAHPKEMVPLMGKRVAAPSGNPAILPEKRPAEITPTKKSAHFFLEIEGFEPNPTVAKTSPPVFSKPMDSNIRQCISGNCDDMDSPQSPQDDVTETPSNPNSPSAQLAKEEQRRKKRRLKKRIFAAVSEGCVEELVELLVELQELCRRRHDEDVPDFLMHKLTASDTGKTCLMKALLNINPNTKEIVRILLAFAEENDILGRFINAEYTEEAYEGQTALNIAIERRQGDIAALLIAAGADVNAHAKGAFFNPKYQHEGFYFGETPLALAACTNQPEIVQLLMEHEQTDITSRDSRGNNILHALVTVAEDFKTQNDFVKRMYDMILLRSGNWELETTRNNDGLTPLQLAAKMGKAEILKYILSREIKEKRLRSLSRKFTDWAYGPVSSSLYDLTNVDTTTDNSVLEITVYNTNIDNRHEMLTLEPLHTLLHMKWKKFAKHMFFLSFCFYFFYNITLTLVSYYRPREEEAIPHPLALTHKMGWLQLLGRMFVLIWAMCISVKEGIAIFLLRPSDLQSILSDAWFHFVFFIQAVLVILSVFLYLFAYKEYLACLVLAMALGWANMLYYTRGFQSMGMYSVMIQKVILHDVLKFLFVYIVFLLGFGVALASLIEKCPKDNKDCSSYGSFSDAVLELFKLTIGLGDLNIQQNSKYPILFLFLLITYVILTFVLLLNMLIALMGETVENVSKESERIWRLQRARTILEFEKMLPEWLRSRFRMGELCKVAEDDFRLCLRINEVKWTEWKTHVSFLNEDPGPVRRTDFNKIQDSSRNNSKTTLNAFEEVEEFPETSV

SEQ ID NO: 67587 - protein, 1119 aa, Homo sapiens
MKRSLRKMWRPGEKKEPQGVVYEDVPDDTEDFKESLKVVFEGSAYGLQNFNKQKKLKRCDDMDTFFLHYAAAEGQIELMEKITRDSSLEVLHEMDDYGNTPLHCAVEKNQIESVKFLLSRGANPNLRNFNMMAPLHIAVQGMNNEVMKVLLEHRTIDVNLEGENGNTAVIIACTTNNSEALQILLKKGAKPCKSNKWGCFPIHQAAFSGSKECMEIILRFGEEHGYSRQLHINFMNNGKATPLHLAVQNGDLEMIKMCLDNGAQIDPVEKGRCTAIHFAATQGATEIVKLMISSYSGSVDIVNTTDGCHETMLHRASLFDHHELADYLISVGADINKIDSEGRSPLILATASASWNIVNLLLSKGAQVDIKDNFGRNFLHLTVQQPYGLKNLRPEFMQMQQIKELVMDEDNDGCTPLHYACRQGGPGSVNNLLGFNVSIHSKSKDKKSPLHFAASYGRINTCQRLLQDISDTRLLNEGDLHGMTPLHLAAKNGHDKVVQLLLKKGALFLSDHNGWTALHHASMGGYTQTMKVILDTNLKCTDRLDEDGNTALHFAAREGHAKAVALLLSHNADIVLNKQQASFLHLALHNKRKEVVLTIIRSKRWDECLKIFSHNSPGNKCPITEMIEYLPECMKVLLDFCMLHSTEDKSCRDYYIEYNFKYLQCPLEFTKKTPTQDVIYEPLTALNAMVQNNRIELLNHPVCKEYLLMKWLAYGFRAHMMNLGSYCLGLIPMTILVVNIKPGMAFNSTGIINETSDHSEILDTTNSYLIKTCMILVFLSSIFGYCKEAGQIFQQKRNYFMDISNVLEWIIYTTGIIFVLPLFVEIPAHLQWQCGAIAVYFYWMNFLLYLQRFENCGIFIVMLEVILKTLLRSTVVFIFLLLAFGLSFYILLNLQDPFSSPLLSIIQTFSMMLGDINYRESFLEPYLRNELAHPVLSFAQLVSFTIFVPIVLMNLLIGLAVGDIAEVQKHASLKRIAMQVELHTSLEKKLPLWFLRKVDQKSTIVYPNKPRSGGMLFHIFCFLFCTGEIRQEIPNADKSLEMEILKQKYRLKDLTFLLEKQHELIKLIIQKMEIISETEDDDSHCSFQDRFKKEQMEQRNSRWNTVLRAVKAKTHHLEP

SEQ ID NO: 67588 - protein, 759 aa, Homo sapiens
MMAALYPSTDLSGASSSSLPSSPSSSSPNEVMALKDVREVKEENTLNEKLFLLACDKGDYYMVKKILEENSSGDLNINCVDVLGRNAVTITIENENLDILQLLLDYGCQKLMERIQNPEYSTTMDVAPVILAAHRNNYEILTMLLKQDVSLPKPHAVGCECTLCSAKNKKDSLRHSRFRLDIYRCLASPALIMLTEEDPILRAFELSADLKELSLVEVEFRNDYEELARQCKMFAKDLLAQARNSRELEVILNHTSSDEPLDKRGLLEERMNLSRLKLAIKYNQKEFVSQSNCQQFLNTVWFGQMSGYRRKPTCKKIMTVLTVGIFWPVLSLCYLIAPKSQFGRIIHTPFMKFIIHGASYFTFLLLLNLYSLVYNEDKKNTMGPALERIDYLLILWIIGMIWSDIKRLWYEGLEDFLEESRNQLSFVMNSLYLATFALKVVAHNKFHDFADRKDWDAFHPTLVAEGLFAFANVLSYLRLFFMYTTSSILGPLQISMGQMLQDFGKFLGMFLLVLFSFTIGLTQLYDKGYTSKEQKDCVGIFCEQQSNDTFHSFIGTCFALFWYIFSLAHVAIFVTRFSYGEELQSFVGAVIVGTYNVVVVIVLTKLLVAMLHKSFQLIANHEDKEWKFARAKLWLSYFDDKCTLPPPFNIIPSPKTICYMISSLSKWICSHTSKGKVKRQNSLKEWRNLKQKRDENYQKVMCCLVHRYLTSMRQKMQSTDQATVENLNELRQDLSKFRNEIRDLLGFRTSKYAMFYPRN

SEQ ID NO: 67589 - protein, 144 aa, Homo sapiens
MIWSDIKRLWYEGLEDFLEESRNQLSFVMNSLYLATFALKVVAHNKISMGQMLQDFGKFLGMFLLVLFSFTIGLTQLYDKGYTSKEQKDCVGIFCEQQSNDTFHSFIGTCFALFWYIFSLAHVAIFVTRFSYGEELQSFVGAVI

SEQ ID NO: 67590 - protein, 793 aa, Homo sapiens
MMAALYPSTDLSGASSSSLPSSPSSSSPNEVMALKDVREVKEENTLNEKLFLLACDKGDYYMVKKILEENSSGDLNINCVDVLGRNAVTITIENENLDILQLLLDYGCQSADALLVAIDSEVVGAVDILLNHRPKRSSRPTIVKLMERIQNPEYSTTMDVAPVILAAHRNNYEILTMLLKQDVSLPKPHAVGCECTLCSAKNKKDSLRHSRFRLDIYRCLASPALIMLTEEDPILRAFELSADLKELSLVEVEFRNDYEELARQCKMFAKDLLAQARNSRELEVILNHTSSDEPLDKRGLLEERMNLSRLKLAIKYNQKEFVSQSNCQQFLNTVWFGQMSGYRRKPTCKKIMTVLTVGIFWPVLSLCYLIAPKSQFGRIIHTPFMKFIIHGASYFTFLLLLNLYSLVYNEDKKNTMGPALERIDYLLILWIIGMIWSDIKRLWYEGLEDFLEESRNQLSFVMNSLYLATFALKVVAHNKFHDFADRKDWDAFHPTLVAEGLFAFANVLSYLRLFFMYTTSSILGPLQISMGQMLQDFGKFLGMFLLVLFSFTIGLTQLYDKGYTSKEQKDCVGIFCEQQSNDTFHSFIGTCFALFWYIFSLAHVAIFVTRFSYGEELQSFVGAVIVGTYNVVVVIVLTKLLVAMLHKSFQLIANHEDKEWKFARAKLWLSYFDDKCTLPPPFNIIPSPKTICYMISSLSKWICSHTSKGKVKRQNSLKEWRNLKQKRDENYQKVMCCLVHRYLTSMRQKMQSTDQATVENLNELRQDLSKFRNEIRDLLGFRTSKYAMFYPRN

SEQ ID NO: 67591 - protein, 804 aa, Homo sapiens
MAQFYYKRNVNAPYRDRIPLRIVRAESELSPSEKAYLNAVEKGDYASVKKSLEEAEIYFKININCIDPLGRTALLIAIENENLELIELLLSFNVYVGDALLHAIRKEVVGAVELLLNHKKPSGEKQFVAQPNCQQLLASRWYDEFPGWRRRHWAVKMVTCFIIGLLFPVFSVCYLIAPKSPLGLFIRKPFIKFICHTASYLTFLFLLLLASQHIDRSDLNRQGPPPTIVEWMILPWVLGFIWGEIKQMWDGGLQDYIHDWWNLMDFVMNSLYLATISLKIVAFVKYSALNPRESWDMWHPTLVAEALFAIANIFSSLRLISLFTANSHLGPLQISLGRMLLDILKFLFIYCLVLLAFANGLNQLYFYYEETKGLTCKGIRCEKQNNAFSTLFETLQSLFWSIFGLINLYVTNVKAQHEFTEFVGATMFGTYNVISLVVLLNMLIAMMNNSYQLIADHADIEWKFARTKLWMSYFEEGGTLPTPFNVIPSPKSLWYLIKWIWTHLCKKKMRRKPESFGTIGRRAADNLRRHHQYQEVMRNLVKRYVAAMIRDAKTEEGLTEENFKELKQDISSFRFEVLGLLRGSKLSTIQSANASKESSNSADSDEKSDSEGNSKDKKKNFSLFDLTTLIHPRSAAIASERHNISNGSALVVQEPPREKQRKVNFVTDIKNFGLFHRRSKQNAAEQNANQIFSVSEEVARQQAAGPLERNIQLESRGLASRGDLSIPGLSEQCVLVDHRERNTDTLGLQVGKRVCPFKSEKVVVEDTVPIIPKEKHAKEEDSSIDYDLNLPDTVTHEDYVTTRL

SEQ ID NO: 67592 - protein, 836 aa, Homo sapiens
MAQFYYKRNVNAPYRDRIPLRIVRAESELSPSEKAYLNAVEKGDYASVKKSLEEAEIYFKININCIDPLGRTALLIAIENENLELIELLLSFNVYVGDALLHAIRKEVVGAVELLLNHKKPSGEKQVPPILLDKQFSEFTPDITPIILAAHTNNYEIIKLLVQKGVSVPRPHEVRCNCVECVSSSDVDSLRHSRSRLNIYKALASPSLIALSSEDPFLTAFQLSWELQELSKVENEFKSEYEELSRQCKQFAKDLLDQTRSSRELEIILNYRDDNSLIEEQSGNDLARLKLAIKYRQKEFVAQPNCQQLLASRWYDEFPGWRRRHWAVKMVTCFIIGLLFPVFSVCYLIAPKSPLGLFIRKPFIKFICHTASYLTFLFLLLLASQHIDRSDLNRQGPPPTIVEWMILPWVLGFIWGEIKQMWDGGLQDYIHDWWNLMDFVMNSLYLATISLKIVAFVKYSALNPRESWDMWHPTLVAEALFAIANIFSSLRLISLFTANSHLGPLQISLGRMLLDILKFLFIYCLVLLAFANGLNQLYFYYEETKGLTCKGIRCEKQNNAFSTLFETLQSLFWSIFGLINLYVTNVKAQHEFTEFVGATMFGTYNVISLVVLLNMLIAMMNNSYQLIADHADIEWKFARTKLWMSYFEEGGTLPTPFNVIPSPKSLWYLIKWIWTHLCKKKMRRKPESFGTIGRRAADNLRRHHQYQEVMRNLVKRYVAAMIRDAKTEEVARQQAAGPLERNIQLESRGLASRGDLSIPGLSEQCVLVDHRERNTDTLGLQVGKRVCPFKSEKVVVEDTVPIIPKEKHAKEEDSSIDYDLNLPDTVTHEDYVTTRL

SEQ ID NO: 67593 - protein, 893 aa, Homo sapiens
MAQFYYKRNVNAPYRDRIPLRIVRAESELSPSEKAYLNAVEKGDYASVKKSLEEAEIYFKININCIDPLGRTALLIAIENENLELIELLLSFNVYVGDALLHAIRKEVVGAVELLLNHKKPSGEKQVPPILLDKQFSEFTPDITPIILAAHTNNYEIIKLLVQKGVSVPRPHEVRCNCVECVSSSDVDSLRHSRSRLNIYKALASPSLIALSSEDPFLTAFQLSWELQELSKVENEFKSEYEELSRQCKQFAKDLLDQTRSSRELEIILNYRDDNSLIEEQSGNDLARLKLAIKYRQKEFVAQPNCQQLLASRWYDEFPGWRRRHWAVKMVTCFIIGLLFPVFSVCYLIAPKSPLGLFIRKPFIKFICHTASYLTFLFLLLLASQHIDRSDLNRQGPPPTIVEWMILPWVLGFIWGEIKQMWDGGLQDYIHDWWNLMDFVMNSLYLATISLKIVAFVKYSALNPRESWDMWHPTLVAEALFAIANIFSSLRLISLFTANSHLGPLQISLGRMLLDILKFLFIYCLVLLAFANGLNQLYFYYEETKGLTCKGIRCEKQNNAFSTLFETLQSLFWSIFGLINLYVTNVKAQHEFTEFVGATMFGTYNVISLVVLLNMLIAMMNNSYQLIADHADIEWKFARTKLWMSYFEEGGTLPTPFNVIPSPKSLWYLIKWIWTHLCKKKMRRKPESFGTIGRRAADNLRRHHQYQEVMRNLVKRYVAAMIRDAKTEEGLTEENFKELKQDISSFRFEVLGLLRGSKLSTIQSANASKESSNSADSDEKSDSEEEVARQQAAGPLERNIQLESRGLASRGDLSIPGLSEQCVLVDHRERNTDTLGLQVGKRVCPFKSEKVVVEDTVPIIPKEKHAKEEDSSIDYDLNLPDTVTHEDYVTTRL

SEQ ID NO: 67594 - protein, 828 aa, Homo sapiens
MAQFYYKRNVNAPYRDRIPLRIVRAESELSPSEKAYLNAVEKGDYASVKKSLEEAEIYFKININCIDPLGRTALLIAIENENLELIELLLSFNVYVGDALLHAIRKEVVGAVELLLNHKKPSGEKQVPPILLDKQFSEFTPDITPIILAAHTNNYEIIKLLVQKGVSVPRPHEVRCNCVECVSSSDVDSLRHSRSRLNIYKALASPSLIALSSEDPFLTAFQLSWELQELSKVENEFKSEYEELSRQCKQFAKDLLDQTRSSRELEIILNYRDDNSLIEEQSGNDLARLKLAIKYRQKEFVAQPNCQQLLASRWYDEFPGWRRRHWAVKMVTCFIIGLLFPVFSVCYLIAPKSPLGLFIRKPFIKFICHTASYLTFLFLLLLASQHIDRSDLNRQGPPPTIVEWMILPWVLGFIWGEIKQMWDGGLQDYIHDWWNLMDFVMNSLYLATISLKIVAFVKYSALNPRESWDMWHPTLVAEALFAIANIFSSLRLISLFTANSHLGPLQISLGRMLLDILKFLFIYCLVLLAFANGLNQLYFYYEETKGLTCKGIRCEKQNNAFSTLFETLQSLFWSIFGLINLYVTNVKAQHEFTEFVGATMFGTYNVISLVVLLNMLIAMMNNSYQLIARRAADNLRRHHQYQEVMRNLVKRYVAAMIRDAKTEEGLTEENFKELKQDISSFRFEVLGLLRGSKLSTIQSANASKESSNSADSDEKSDSEEEVARQQAAGPLERNIQLESRGLASRGDLSIPGLSEQCVLVDHRERNTDTLGLQVGKRVCPFKSEKVVVEDTVPIIPKEKHAKEEDSSIDYDLNLPDTVTHEDYVTTRL

SEQ ID NO: 67595 - protein, 804 aa, Homo sapiens; identical to SEQ ID NO: 67591

SEQ ID NO: 67596 - protein, 982 aa, Homo sapiens
MAQFYYKRNVNAPYRDRIPLRIVRAESELSPSEKAYLNAVEKGDYASVKKSLEEAEIYFKININCIDPLGRTALLIAIENENLELIELLLSFNVYVGDALLHAIRKEVVGAVELLLNHKKPSGEKQVPPILLDKQFSEFTPDITPIILAAHTNNYEIIKLLVQKGVSVPRPHEVRCNCVECVSSSDVDSLRHSRSRLNIYKALASPSLIALSSEDPFLTAFQLSWELQELSKVENEFKSEYEELSRQCKQFAKDLLDQTRSSRELEIILNYRDDNSLIEEQSGNDLARLKLAIKYRQKEFVAQPNCQQLLASRWYDEFPGWRRRHWAVKMVTCFIIGLLFPVFSVCYLIAPKSPLGLFIRKPFIKFICHTASYLTFLFLLLLASQHIDRSDLNRQGPPPTIVEWMILPWVLGFIWGEIKQMWDGGLQDYIHDWWNLMDFVMNSLYLATISLKIVAFVKYSALNPRESWDMWHPTLVAEALFAIANIFSSLRLISLFTANSHLGPLQISLGRMLLDILKFLFIYCLVLLAFANGLNQLYFYYEETKGLTCKGIRCEKQNNAFSTLFETLQSLFWSIFGLINLYVTNVKAQHEFTEFVGATMFGTYNVISLVVLLNMLIAMMNNSYQLIADHADIEWKFARTKLWMSYFEEGGTLPTPFNVIPSPKSLWYLIKWIWTHLCKKKMRRKPESFGTIGVRTQHRRAADNLRRHHQYQEVMRNLVKRYVAAMIRDAKTEEGLTEENFKELKQDISSFRFEVLGLLRGSKLSTIQSANASKESSNSADSDEKSDSEGNSKDKKKNFSLFDLTTLIHPRSAAIASERHNISNGSALVVQEPPREKQRKVNFVTDIKNFGLFHRRSKQNAAEQNANQIFSVSEEVARQQAAGPLERNIQLESRGLASRGDLSIPGLSEQCVLVDHRERNTDTLGLQVGKRVCPFKSEKVVVEDTVPIIPKEKHAKEEDSSIDYDLNLPDTVTHEDYVTTRL

SEQ ID NO: 67597 - protein, 977 aa, Homo sapiens
MAQFYYKRNVNAPYRDRIPLRIVRAESELSPSEKAYLNAVEKGDYASVKKSLEEAEIYFKININCIDPLGRTALLIAIENENLELIELLLSFNVYVGDALLHAIRKEVVGAVELLLNHKKPSGEKQVPPILLDKQFSEFTPDITPIILAAHTNNYEIIKLLVQKGVSVPRPHEVRCNCVECVSSSDVDSLRHSRSRLNIYKALASPSLIALSSEDPFLTAFQLSWELQELSKVENEFKSEYEELSRQCKQFAKDLLDQTRSSRELEIILNYRDDNSLIEEQSGNDLARLKLAIKYRQKEFVAQPNCQQLLASRWYDEFPGWRRRHWAVKMVTCFIIGLLFPVFSVCYLIAPKSPLGLFIRKPFIKFICHTASYLTFLFLLLLASQHIDRSDLNRQGPPPTIVEWMILPWVLGFIWGEIKQMWDGGLQDYIHDWWNLMDFVMNSLYLATISLKIVAFVKYSALNPRESWDMWHPTLVAEALFAIANIFSSLRLISLFTANSHLGPLQISLGRMLLDILKFLFIYCLVLLAFANGLNQLYFYYEETKGLTCKGIRCEKQNNAFSTLFETLQSLFWSIFGLINLYVTNVKAQHEFTEFVGATMFGTYNVISLVVLLNMLIAMMNNSYQLIADHADIEWKFARTKLWMSYFEEGGTLPTPFNVIPSPKSLWYLIKWIWTHLCKKKMRRKPESFGTIGRRAADNLRRHHQYQEVMRNLVKRYVAAMIRDAKTEEGLTEENFKELKQDISSFRFEVLGLLRGSKLSTIQSANASKESSNSADSDEKSDSEGNSKDKKKNFSLFDLTTLIHPRSAAIASERHNISNGSALVVQEPPREKQRKVNFVTDIKNFGLFHRRSKQNAAEQNANQIFSVSEEVARQQAAGPLERNIQLESRGLASRGDLSIPGLSEQCVLVDHRERNTDTLGLQVGKRVCPFKSEKVVVEDTVPIIPKEKHAKEEDSSIDYDLNLPDTVTHEDYVTTRL

SEQ ID NO: 67598 - protein, 460 aa, Homo sapiens
MAQFYYKRNVNAPYRDRIPLRIVRAESELSPSEKAYLNAVEKGDYASVKKSLEEAEIYFKININCIDPLGRTALLIAIENENLELIELLLSFNVYVGDALLHAIRKEVVGAVELLLNHKKPSGEKQVPPILLDKQFSEFTPDITPIILAAHTNNYEIIKLLVQKGVSVPRPHEVRCNCVECVSSSDVDSLRHSRSRLNIYKALASPSLIALSSEDPFLTAFQLSWELQELSKVENEFKSEYEELSRQCKQFAKDLLDQTRSSRELEIILNYRDDNSLIEEQSGNDLARLKLAIKYRQKEFVAQPNCQQLLASRWYDEFPGWRRRHWAVKMVTCFIIGLLFPVFSVCYLIAPKSPLGLFIRKPFIKFICHTASYLTFLFLLLLASQHIDRSDLNRQGPPPTIVEWMILPWVLGFIWGEIKQMWDGGLQDYIHDWWNLMDFVMNSLYLATISLKIVAFVKVI

SEQ ID NO: 67599 - protein, 836 aa, Homo sapiens; identical to SEQ ID NO: 67592

SEQ ID NO: 67600 - protein, 797 aa, Homo sapiens
MAAAPVAAGSGAGRGRRSAATVAAWGGWGGRPRPGNILLQLRQGQLTGRGLVRAVQFTETFLTERDKQSKWSGIPQLLLKLHTTSHLHSDFVECQNILKEISPLLSMEAMAFVTEERKLTQETTYPNTYIFDLFGGVDLLVEILMRPTISIRGQKLKISDEMSKDCLSILYNTCVCTEGVTKRLAEKNDFVIFLFTLMTSKKTFLQTATLIEDILGVKKEMIRLDEVPNLSSLVSNFDQQQLANFCRILAVTISEMDTGNDDKHTLLAKNAQQKKSLSLGPSAAEINQAALLSIPGFVERLCKLATRKVSESTGTASFLQELEEWYTWLDNALVLDALMRVANEESEHNQASIVFPPPGASEENGLPHTSARTQLPQSMKIMHEIMYKLEVLYVLCVLLMGRQRNQVHRMIAEFKLIPGLNNLFDKLIWRKHSASALVLHGHNQNCDCSPDITLKIQFLRLLQSFSDHHENKYLLLNNQELNELSAISLKANIPEVEAVLNTDRSLVCDGKRGLLTRLLQVMKKEPAESSFRFWQARAVESFLRGTTSYADQMFLLKRGLLEHILYCIVDSECKSRDVLQSYFDLLGELMKFNVDAFKRFNKYINTDAKFQVFLKQINSSLVDSNMLVRCVTLSLDRFENQVDMKVAEVLSECRLLAYISQVPTQMSFLFRLINIIHVQTLTQENVSCLNTSLVILMLARRKERLPLYLRLLQRMEHSKKYPGFLLNNFHNLLRFWQQHYLHKDKDSTCLENSSCISFSYWKETVSILLNPDRQSPSALVSYIEEPYMDIDRDFTEE

SEQ ID NO: 67601 - protein, 758 aa, Homo sapiens
MAAAPVAAGSGAGRGRRSAATVAAWGGWGGRPRPGNILLQLRQGQLTGRGLVRAVQFTETFLTERDKQSKWSGIPQLLLKLHTTSHLHSDFVECQNILKLLVEILMRPTISIRGQKLKISDEMSKDCLSILYNTCVCTEGVTKRLAEKNDFVIFLFTLMTSKKTFLQTATLIEDILGVKKEMIRLDEVPNLSSLVSNFDQQQLANFCRILAVTISEMDTGNDDKHTLLAKNAQQKKSLSLGPSAAEINQAALLSIPGFVERLCKLATRKVSESTGTASFLQELEEWYTWLDNALVLDALMRVANEESEHNQASIVFPPPGASEENGLPHTSARTQLPQSMKIMHEIMYKLEVLYVLCVLLMGRQRNQVHRMIAEFKLIPGLNNLFDKLIWRKHSASALVLHGHNQNCDCSPDITLKIQFLRLLQSFSDHHENKYLLLNNQELNELSAISLKANIPEVEAVLNTDRSLVCDGKRGLLTRLLQVMKKEPAESSFRFWQARAVESFLRGTTSYADQMFLLKRGLLEHILYCIVDSECKSRDVLQSYFDLLGELMKFNVDAFKRFNKYINTDAKFQVFLKQINSSLVDSNMLVRCVTLSLDRFENQVDMKVAEVLSECRLLAYISQVPTQMSFLFRLINIIHVQTLTQENVSCLNTSLVILMLARRKERLPLYLRLLQRMEHSKKYPGFLLNNFHNLLRFWQQHYLHKDKDSTCLENSSCISFSYWKETVSILLNPDRQSPSALVSYIEEPYMDIDRDFTEE

SEQ ID NO: 67602 - protein, 789 aa, Homo sapiens
MAAAPVAAGSGAGRGRRSAATVAAWGGWGGRPRPGNILLQLRQGQLTGRGLVRAVQFTETFLTERDKQSKWSGIPQLLLKLHTTSHLHSDFVECQNILKEISPLLSMEAMAFVTEERKLTQETTYPNTYIFDLFGGVDLLVEILMRPTISIRGQKLKISDEMSKDCLSILYNTCVCTEGVTKRLAEKNDFVIFLFTLMTSKKTFLQTATLIEDILGVKKEMIRLDEVPNLSSLVSNFDQQQLANFCRILAVTISEMDTGNDDKHTLLAKNAQQKKSLSLGPSAAEINQAALLSIPGFVERLCKLATRKVSESTGTASFLQELEEWYTWLDNALVLDALMRVANEESEHNQGASEENGLPHTSARTQLPQSMKIMHEIMYKLEVLYVLCVLLMGRQRNQVHRMIAEFKLIPGLNNLFDKLIWRKHSASALVLHGHNQNCDCSPDITLKIQFLRLLQSFSDHHENKYLLLNNQELNELSAISLKANIPEVEAVLNTDRSLVCDGKRGLLTRLLQVMKKEPAESSFRFWQARAVESFLRGTTSYADQMFLLKRGLLEHILYCIVDSECKSRDVLQSYFDLLGELMKFNVDAFKRFNKYINTDAKFQVFLKQINSSLVDSNMLVRCVTLSLDRFENQVDMKVAEVLSECRLLAYISQVPTQMSFLFRLINIIHVQTLTQENVSCLNTSLVILMLARRKERLPLYLRLLQRMEHSKKYPGFLLNNFHNLLRFWQQHYLHKDKDSTCLENSSCISFSYWKETVSILLNPDRQSPSALVSYIEEPYMDIDRDFTEE

SEQ ID NO: 67603 - protein, 399 aa, Homo sapiens
MRSQSTIKVHRMIAEFKLIPGLNNLFDKLIWRKHSASALVLHGHNQNCDCSPDITLKIQFLRLLQSFSDHHENKYLLLNNQELNELSAISLKANIPEVEAVLNTDRSLVCDGKRGLLTRLLQVMKKEPAESSFRFWQARAVESFLRGTTSYADQMFLLKRGLLEHILYCIVDSECKSRDVLQSYFDLLGELMKFNVDAFKRFNKYINTDAKFQVFLKQINSSLVDSNMLVRCVTLSLDRFENQVDMKVAEVLSECRLLAYISQVPTQMSFLFRLINIIHVQTLTQENVSCLNTSLVILMLARRKERLPLYLRLLQRMEHSKKYPGFLLNNFHNLLRFWQQHYLHKDKDSTCLENSSCISFSYWKETVSILLNPDRQSPSALVSYIEEPYMDIDRDFTEE

SEQ ID NO: 67604 - protein, 782 aa, Homo sapiens
MAAAPVAAGSGAGRGRRSAATVAAWGGWGQLTGRGLVRAVQFTETFLTERDKQSKWSGIPQLLLKLHTTSHLHSDFVECQNILKEISPLLSMEAMAFVTEERKLTQETTYPNTYIFDLFGGVDLLVEILMRPTISIRGQKLKISDEMSKDCLSILYNTCVCTEGVTKRLAEKNDFVIFLFTLMTSKKTFLQTATLIEDILGVKKEMIRLDEVPNLSSLVSNFDQQQLANFCRILAVTISEMDTGNDDKHTLLAKNAQQKKSLSLGPSAAEINQAALLSIPGFVERLCKLATRKVSESTGTASFLQELEEWYTWLDNALVLDALMRVANEESEHNQASIVFPPPGASEENGLPHTSARTQLPQSMKIMHEIMYKLEVLYVLCVLLMGRQRNQVHRMIAEFKLIPGLNNLFDKLIWRKHSASALVLHGHNQNCDCSPDITLKIQFLRLLQSFSDHHENKYLLLNNQELNELSAISLKANIPEVEAVLNTDRSLVCDGKRGLLTRLLQVMKKEPAESSFRFWQARAVESFLRGTTSYADQMFLLKRGLLEHILYCIVDSECKSRDVLQSYFDLLGELMKFNVDAFKRFNKYINTDAKFQVFLKQINSSLVDSNMLVRCVTLSLDRFENQVDMKVAEVLSECRLLAYISQVPTQMSFLFRLINIIHVQTLTQENVSCLNTSLVILMLARRKERLPLYLRLLQRMEHSKKYPGFLLNNFHNLLRFWQQHYLHKDKDSTCLENSSCISFSYWKETVSILLNPDRQSPSALVSYIEEPYMDIDRDFTEE

SEQ ID NO: 67605 - protein, 973 aa, Homo sapiens
MAQLYYKKVNYSPYRDRIPLQIVRAETELSAEEKAFLNAVEKGDYATVKQALQEAEIYYNVNINCMDPLGRSALLIAIENENLEIMELLLNHSVYVGDALLYAIRKEVVGAVELLLSYRRPSGEKQVPTLMMDTQFSEFTPDITPIMLAAHTNNYEIIKLLVQKRVTIPRPHQIRCNCVECVSSSEVDSLRHSRSRLNIYKALASPSLIALSSEDPILTAFRLGWELKELSKVENEFKAEYEELSQQCKLFAKDLLDQARSSRELEIILNHRDDHSEELDPQKYHDLAKLKVAIKYHQKEFVAQPNCQQLLATLWYDGFPGWRRKHWVVKLLTCMTIGFLFPMLSIAYLISPRSNLGLFIKKPFIKFICHTASYLTFLFMLLLASQHIVRTDLHVQGPPPTVVEWMILPWVLGFIWGEIKEMWDGGFTEYIHDWWNLMDFAMNSLYLATISLKIVAYVKYNGSRPREEWEMWHPTLIAEALFAISNILSSLRLISLFTANSHLGPLQISLGRMLLDILKFLFIYCLVLLAFANGLNQLYFYYETRAIDEPNNCKGIRCEKQNNAFSTLFETLQSLFWSVFGLLNLYVTNVKARHEFTEFVGATMFGTYNVISLVVLLNMLIAMMNNSYQLIADHADIEWKFARTKLWMSYFDEGGTLPPPFNIIPSPKSFLYLGNWFNNTFCPKRDPDGRRRRRNLRSFTERNADSLIQNQHYQEVIRNLVKRYVAAMIRNSKTHEGLTEENFKELKQDISSFRYEVLDLLGNRKHPRSFSTSSTELSQRDDNNDGSGGARAKSKSVSFNLGCKKKTCHGPPLIRTMPRSSGAQGKSKAESSSKRSFMGPSLKKLGLLFSKFNGHMSEPSSEPMYTISDGIVQQHCMWQDIRYSQMEKGKAEACSQSEINLSEVELGEVQGAAQSSECPLACSSSLHCASSICSSNSKLLDSSEDVFETWGEACDLLMHKWGDGQEEQVTTRL

SEQ ID NO: 67606 - protein, 931 aa, Homo sapiens
MSQSPAFGPRRGSSPRGAAGAAARRNESQDYLLMDSELGEDGCPQAPLPCYGYYPCFRGSDNRLAHRRQTVLREKGRRLANRGPAYMFSDRSTSLSIEEERFLDAAEYGNIPVVRKMLEECHSLNVNCVDYMGQNALQLAVANEHLEITELLLKKENLSRVGDALLLAISKGYVRIVEAILSHPAFAEGKRLATSPSQSELQQDDFYAYDEDGTRFSHDVTPIILAAHCQEYEIVHTLLRKGARIERPHDYFCKCNDCNQKQKHDSFSHSRSRINAYKGLASPAYLSLSSEDPVMTALELSNELAVLANIEKEFKNDYKKLSMQCKDFVVGLLDLCRNTEEVEAILNGDVETLQSGDHGRPNLSRLKLAIKYEVKKFVAHPNCQQQLLSIWYENLSGLRQQTMAVKFLVVLAVAIGLPFLALIYWFAPCSKMGKIMRGPFMKFVAHAASFTIFLGLLVMNAADRFEGTKLLPNETSTDNAKQLFRMKTSCFSWMEMLIISWVIGMIWAECKEIWTQGPKEYLFELWNMLDFGMLAIFAASFIARFMAFWHASKAQSIIDANDTLKDLTKVTLGDNVKYYNLARIKWDPSDPQIISEGLYAIAVVLSFSRIAYILPANESFGPLQISLGRTVKDIFKFMVIFIMVFVAFMIGMFNLYSYYIGAKQNEAFTTVEESFKTLFWAIFGLSEVKSVVINYNHKFIENIGYVLYGVYNVTMVIVLLNMLIAMINSSFQEIEDDADVEWKFARAKLWFSYFEEGRTLPVPFNLVPSPKSLFYLLLKLKKWISELFQGHKKGFQEDAEMNKINEEKKLGILGSHEDLSKLSLDKKQVGHNKQPSIRSSEDFHLNSFNNPPRQYQKIMKRLIKRYVLQAQIDKESDEVNEGELKEIKQDISSLRYELLEEKSQNTEDLAELIRELGEKLSMEPNQEETNR

SEQ ID NO: 67607 - protein, 815 aa, Homo sapiens
MSQSPAFGPRRGSSPRGAAGAAARRNESQDYLLMDSELGEDGCPQAPLPCYGYYPCFRGSDNRLAHRRQTVLREKGRRLANRGPAYMFSDRSTSLSIEEERFLDAAEYGNIPVVRKMLEECHSLNVNCVDYMGQNALQLAVANEHLEITELLLKKENLSRVGDALLLAISKGYVRIVEAILSHPAFAEGKRLATSPSQSELQQDDFYAYDEDGTRFSHDVTPIILAAHCQEYEIVHTLLRKGARIERPHDYFCKCNDCNQKQKHDSFSHSRSRINAYKGLASPAYLSLSSEDPVMTALELSNELAVLANIEKEFKMGKIMRGPFMKFVAHAASFTIFLGLLVMNAADRFEGTKLLPNETSTDNAKQLFRMKTSCFSWMEMLIISWVIGMIWAECKEIWTQGPKEYLFELWNMLDFGMLAIFAASFIARFMAFWHASKAQSIIDANDTLKDLTKVTLGDNVKYYNLARIKWDPSDPQIISEGLYAIAVVLSFSRIAYILPANESFGPLQISLGRTVKDIFKFMVIFIMVFVAFMIGMFNLYSYYIGAKQNEAFTTVEESFKTLFWAIFGLSEVKSVVINYNHKFIENIGYVLYGVYNVTMVIVLLNMLIAMINSSFQEIEDDADVEWKFARAKLWFSYFEEGRTLPVPFNLVPSPKSLFYLLLKLKKWISELFQGHKKGFQEDAEMNKINEEKKLGILGSHEDLSKLSLDKKQVGHNKQPSIRSSEDFHLNSFNNPPRQYQKIMKRLIKRYVLQAQIDKESDEVNEGELKEIKQDISSLRYELLEEKSQNTEDLAELIRELGEKLSMEPNQEETNR

SEQ ID NO: 67608 - protein, 876 aa, Homo sapiens
MSQSPAFGPRRGSSPRGAAGAAARRNESQDYLLMDSELGEDGCPQAPLPCYGYYPCFRGSDNRLAHRRQTVLREKGRRLANRGPAYMFSDRSTSLSIEEERFLDAAEYGNIPVVRKMLEECHSLNVNCVDYMGQNALQLAVANEHLEITELLLKKENLSRVGDALLLAISKGYVRIVEAILSHPAFAEGKRLATSPSQSELQQDDFYAYDEDGTRFSHDVTPIILAAHCQEYEIVHTLLRKGARIERPHDYFCKCNDCNQKQKHDSFSHSRSRINAYKGLASPAYLSLSSEDPVMTALELSNELAVLANIEKEFKNDYKKLSMQCKDFVVGLLDLCRNTEEVEAILNGDVETLQSGDHGRPNLSRLKLAIKYEVKKMGKIMRGPFMKFVAHAASFTIFLGLLVMNAADRFEGTKLLPNETSTDNAKQLFRMKTSCFSWMEMLIISWVIGMIWAECKEIWTQGPKEYLFELWNMLDFGMLAIFAASFIARFMAFWHASKAQSIIDANDTLKDLTKVTLGDNVKYYNLARIKWDPSDPQIISEGLYAIAVVLSFSRIAYILPANESFGPLQISLGRTVKDIFKFMVIFIMVFVAFMIGMFNLYSYYIGAKQNEAFTTVEESFKTLFWAIFGLSEVKSVVINYNHKFIENIGYVLYGVYNVTMVIVLLNMLIAMINSSFQEIEDDADVEWKFARAKLWFSYFEEGRTLPVPFNLVPSPKSLFYLLLKLKKWISELFQGHKKGFQEDAEMNKINEEKKLGILGSHEDLSKLSLDKKQVGHNKQPSIRSSEDFHLNSFNNPPRQYQKIMKRLIKRYVLQAQIDKESDEVNEGELKEIKQDISSLRYELLEEKSQNTEDLAELIRELGEKLSMEPNQEETNR

SEQ ID NO: 67609 - protein, 801 aa, Homo sapiens
MLRNSTFKNMQRRHTTLREKGRRQAIRGPAYMFNEKGTSLTPEEERFLDSAEYGNIPVVRKMLEESKTLNFNCVDYMGQNALQLAVGNEHLEVTELLLKKENLARVGDALLLAISKGYVRIVEAILNHPAFAQGQRLTLSPLEQELRDDDFYAYDEDGTRFSHDITPIILAAHCQEYEIVHILLLKGARIERPHDYFCKCNECTEKQRKDSFSHSRSRMNAYKGLASAAYLSLSSEDPVLTALELSNELARLANIETEFKFVAHPNCQQQLLTMWYENLSGLRQQSIAVKFLAVFGVSIGLPFLAIAYWIAPCSKLGRTLRSPFMKFVAHAVSFTIFLGLLVVNASDRFEGVKTLPNETFTDYPKQIFRVKTTQFSWTEMLIMKWVLGMIWSECKEIWEEGPREYVLHLWNLLDFGMLSIFVASFTARFMAFLKATEAQLYVDQHVQDDTLHNVSLPPEVAYFTYARDKWWPSDPQIISEGLYAIAVVLSFSRIAYILPANESFGPLQISLGRTVKDIFKFMVIFIMVFVAFMIGMFNLYSYYRGAKYNPAFTTVEESFKTLFWSIFGLSEVISVVLKYDHKFIENIGYVLYGVYNVTMVVVLLNMLIAMINNSYQEIEEDADVEWKFARAKLWLSYFDEGRTLPAPFNLVPSPKSFYYLIMRIKMCLIKLCKSKAKSCENDLEMGMLNSKFKKTRYQAGMRNSENLTANNTLSKPTRYQKIMKRLIKRYVLKAQVDRENDEVNEGELKEIKQDISSLRYELLEEKSQATGELADLIQQLSEKFGKNLNKDHLRVNKGKDI

SEQ ID NO: 67610 - protein, 746 aa, Homo sapiens
MLRNSTFKNMQRRHTTLREKGRRQAIRGPAYMFNEKGTSLTPEEERFLDSAEYGNIPVVRKMLEESKTLNFNCVDYMGQNALQLAVGNEHLEVTELLLKKENLARVGDALLLAISKGYVRIVEAILNHPAFAQGQRLTLSPLEQELRDDDFYAYDEDGTRFSHDITPIILAAHCQEYEIVHILLLKGARIERPHDYFCKCNECTEKQRKDSFSHSRSRMNAYKGLASAAYLSLSSEDPVLTALELSNELARLANIETEFKLGRTLRSPFMKFVAHAVSFTIFLGLLVVNASDRFEGVKTLPNETFTDYPKQIFRVKTTQFSWTEMLIMKWVLGMIWSECKEIWEEGPREYVLHLWNLLDFGMLSIFVASFTARFMAFLKATEAQLYVDQHVQDDTLHNVSLPPEVAYFTYARDKWWPSDPQIISEGLYAIAVVLSFSRIAYILPANESFGPLQISLGRTVKDIFKFMVIFIMVFVAFMIGMFNLYSYYRGAKYNPAFTTVEESFKTLFWSIFGLSEVISVVLKYDHKFIENIGYVLYGVYNVTMVVVLLNMLIAMINNSYQEIEEDADVEWKFARAKLWLSYFDEGRTLPAPFNLVPSPKSFYYLIMRIKMCLIKLCKSKAKSCENDLEMGMLNSKFKKTRYQAGMRNSENLTANNTLSKPTRYQKIMKRLIKRYVLKAQVDRENDEVNEGELKEIKQDISSLRYELLEEKSQATGELADLIQQLSEKFGKNLNKDHLRVNKGKDI

SEQ ID NO: 67611 - protein, 862 aa, Homo sapiens
MLRNSTFKNMQRRHTTLREKGRRQAIRGPAYMFNEKGTSLTPEEERFLDSAEYGNIPVVRKMLEESKTLNFNCVDYMGQNALQLAVGNEHLEVTELLLKKENLARVGDALLLAISKGYVRIVEAILNHPAFAQGQRLTLSPLEQELRDDDFYAYDEDGTRFSHDITPIILAAHCQEYEIVHILLLKGARIERPHDYFCKCNECTEKQRKDSFSHSRSRMNAYKGLASAAYLSLSSEDPVLTALELSNELARLANIETEFKNDYRKLSMQCKDFVVGVLDLCRDTEEVEAILNGDVNFQVWSDHHRPSLSRIKLAIKYEVKKFVAHPNCQQQLLTMWYENLSGLRQQSIAVKFLAVFGVSIGLPFLAIAYWIAPCSKLGRTLRSPFMKFVAHAVSFTIFLGLLVVNASDRFEGVKTLPNETFTDYPKQIFRVKTTQFSWTEMLIMKWVLGMIWSECKEIWEEGPREYVLHLWNLLDFGMLSIFVASFTARFMAFLKATEAQLYVDQHVQDDTLHNVSLPPEVAYFTYARDKWWPSDPQIISEGLYAIAVVLSFSRIAYILPANESFGPLQISLGRTVKDIFKFMVIFIMVFVAFMIGMFNLYSYYRGAKYNPAFTTVEESFKTLFWSIFGLSEVISVVLKYDHKFIENIGYVLYGVYNVTMVVVLLNMLIAMINNSYQEIEEDADVEWKFARAKLWLSYFDEGRTLPAPFNLVPSPKSFYYLIMRIKMCLIKLCKSKAKSCENDLEMGMLNSKFKKTRYQAGMRNSENLTANNTLSKPTRYQKIMKRLIKRYVLKAQVDRENDEVNEGELKEIKQDISSLRYELLEEKSQATGELADLIQQLSEKFGKNLNKDHLRVNKGKDI

SEQ ID NO: 67612 - protein, 1449 aa, Homo sapiens
MEPSALRKAGSEQEEGFEGLPRRVTDLGMVSNLRRSNSSLFKSWRLQCPFGNNDKQESLSSWIPENIKKKECVYFVESSKLSDAGKVVCQCGYTHEQHLEEATKPHTFQGTQWDPKKHVQEMPTDAFGDIVFTGLSQKVKKYVRVSQDTPSSVIYHLMTQHWGLDVPNLLISVTGGAKNFNMKPRLKSIFRRGLVKVAQTTGAWIITGGSHTGVMKQVGEAVRDFSLSSSYKEGELITIGVATWGTVHRREGLIHPTGSFPAEYILDEDGQGNLTCLDSNHSHFILVDDGTHGQYGVEIPLRTRLEKFISEQTKERGGVAIKIPIVCVVLEGGPGTLHTIDNATTNGTPCVVVEGSGRVADVIAQVANLPVSDITISLIQQKLSVFFQEMFETFTESRIVEWTKKIQDIVRRRQLLTVFREGKDGQQDVDVAILQALLKASRSQDHFGHENWDHQLKLAVAWNRVDIARSEIFMDEWQWKPSDLHPTMTAALISNKPEFVKLFLENGVQLKEFVTWDTLLYLYENLDPSCLFHSKLQMHHVAQVLRELLGDFTQPLYPRPRHNDRLRLLLPVPHVKLNVQGVSLRSLYKRSSGHVTFTMDPIRDLLIWAIVQNRRELAGIIWAQSQDCIAAALACSKILKELSKEEEDTDSSEEMLALAEEYEHRAIGVFTECYRKDEERAQKLLTRVSEAWGKTTCLQLALEAKDMKFVSHGGIQAFLTKVWWGQLSVDNGLWRVTLCMLAFPLLLTGLISFREKRLQDVGTPAARARAFFTAPVVVFHLNILSYFAFLCLFAYVLMVDFQPVPSWCECAIYLWLFSLVCEEMRQLFYDPDECGLMKKAALYFSDFWNKLDVGAILLFVAGLTCRLIPATLYPGRVILSLDFILFCLRLMHIFTISKTLGPKIIIVKRMMKDVFFFLFLLAVWVVSFGVAKQAILIHNERRVDWLFRGAVYHSYLTIFGQIPGYIDGVNFNPEHCSPNGTDPYKPKCPESDATQQRPAFPEWLTVLLLCLYLLFTNILLLNLLIAMFNYTFQQVQEHTDQIWKFQRHDLIEEYHGRPAAPPPFILLSHLQLFIKRVVLKTPAKRHKQLKNKLEKNEEAALLSWEIYLKENYLQNRQFQQKQRPEQKIEDISNKVDAMVDLLDLDPLKRSGSMEQRLASLEEQVAQTAQALHWIVRTLRASGFSSEADVPTLASQKAAEEPDAEPGGRKKTEEPGDSYHVNARHLLYPNCPVTRFPVPNEKVPWETEFLIYDPPFYTAERKDAAAMDPMGENPMGRTGLRGRGSLSCFGPNHTLYPMVTRWRRNEDGAICRKSIKKMLEVLVVKLPLSEHWALPGGSREPGEMLPRKLKRILRQEHWPSFENLLKCGMEVYKGYMDDPRNTDNAWIETVAVSVHFQDQNDVELNRLNSNLHACDSGASIRWQVVDRRIPLYANHKTLLQKAAAEFGAHY

SEQ ID NO: 67613 - protein, 1503 aa, Homo sapiens
MEPSALRKAGSEQEEGFEGLPRRVTDLGMVSNLRRSNSSLFKSWRLQCPFGNNDKQESLSSWIPENIKKKECVYFVESSKLSDAGKVVCQCGYTHEQHLEEATKPHTFQGTQWDPKKHVQEMPTDAFGDIVFTGLSQKVKKYVRVSQDTPSSVIYHLMTQHWGLDVPNLLISVTGGAKNFNMKPRLKSIFRRGLVKVAQTTGAWIITGGSHTGVMKQVGEAVRDFSLSSSYKEGELITIGVATWGTVHRREGLIHPTGSFPAEYILDEDGQGNLTCLDSNHSHFILVDDGTHGQYGVEIPLRTRLEKFISEQTKERGGVAIKIPIVCVVLEGGPGTLHTIDNATTNGTPCVVVEGSGRVADVIAQVANLPVSDITISLIQQKLSVFFQEMFETFTESRIVEWTKKIQDIVRRRQLLTVFREGKDGQQDVDVAILQALLKASRSQDHFGHENWDHQLKLAVAWNRVDIARSEIFMDEWQWKPSDLHPTMTAALISNKPEFVKLFLENGVQLKEFVTWDTLLYLYENLDPSCLFHSKLQKVLVEDPERPACAPAAPRLQMHHVAQVLRELLGDFTQPLYPRPRHNDRLRLLLPVPHVKLNVQGVSLRSLYKRSSGHVTFTMDPIRDLLIWAIVQNRRELAGIIWAQSQDCIAAALACSKILKELSKEEEDTDSSEEMLALAEEYEHRAIGVFTECYRKDEERAQKLLTRVSEAWGKTTCLQLALEAKDMKFVSHGGIQAFLTKVWWGQLSVDNGLWRVTLCMLAFPLLLTGLISFREKRLQDVGTPAARARAFFTAPVVVFHLNILSYFAFLCLFAYVLMVDFQPVPSWCECAIYLWLFSLVCEEMRQLFYDPDECGLMKKAALYFSDFWNKLDVGAILLFVAGLTCRLIPATLYPGRVILSLDFILFCLRLMHIFTISKTLGPKIIIVKRMMKDVFFFLFLLAVWVVSFGVAKQAILIHNERRVDWLFRGAVYHSYLTIFGQIPGYIDGVNFNPEHCSPNGTDPYKPKCPESDATQQRPAFPEWLTVLLLCLYLLFTNILLLNLLIAMFNYTFQQVQEHTDQIWKFQRHDLIEEYHGRPAAPPPFILLSHLQLFIKRVVLKTPAKRHKQLKNKLEKNEEAALLSWEIYLKENYLQNRQFQQKQRPEQKIEDISNKVDAMVDLLDLDPLKRSGSMEQRLASLEEQVAQTAQALHWIVRTLRASGFSSEADVPTLASQKAAEEPDAEPGGRKKTEEPGDSYHVNARHLLYPNCPVTRFPVPNEKVPWETEFLIYDPPFYTAERKDAAAMDPMGDTLEPLSTIQYNVVDGLRDRRSFHGPYTVQAGLPLNPMGRTGLRGRGSLSCFGPNHTLYPMVTRWRRNEDGAICRKSIKKMLEVLVVKLPLSEHWALPGGSREPGEMLPRKLKRILRQEHWPSFENLLKCGMEVYKGYMDDPRNTDNAWIETVAVSVHFQDQNDVELNRLNSNLHACDSGASIRWQVVDRRIPLYANHKTLLQKAAAEFGAHY

SEQ ID NO: 67614 - protein, 1503 aa, Homo sapiens; identical to SEQ ID NO: 67613

SEQ ID NO: 67615 - protein, 144 aa, Homo sapiens
MEPSALRKAGSEQEEGFEGLPRRVTDLGMVSNLRRSNSSLFKSWRLQCPFGNNDKQESLSSWIPENIKKKECVYFVESSKLSDAGKVVCQCGYTHEQHLEEATKPHTFQGTQWDPKKHVQEMPTDAFGDIVFTGLSQKVKKYVR

SEQ ID NO: 67616 - protein, 247 aa, Homo sapiens [sequence omitted]

SEQ ID NO: 67617 - protein, 1711 aa, Homo sapiens
MGKKWRDAAEMERGCSDREDNAESRRRSRSASRGRFAESWKRLSSKQGSTKRSGLPSQQTPAQKSWIERAFYKRECVHIIPSTKDPHRCCCGRLIGQHVGLTPSISVLQNEKNESRLSRNDIQSEKWSISKHTQLSPTDAFGTIEFQGGGHSNKAMYVRVSFDTKPDLLLHLMTKEWQLELPKLLISVHGGLQNFELQPKLKQVFGKGLIKAAMTTGAWIFTGGVNTGVIRHVGDALKDHASKSRGKICTIGIAPWGIVENQEDLIGRDVVRPYQTMSNPMSKLTVLNSMHSHFILADNGTTGKYGAEVKLRRQLEKHISLQKINTRIGQGVPVVALIVEGGPNVISIVLEYLRDTPPVPVVVCDGSGRASDILAFGHKYSEEGGLINESLRDQLLVTIQKTFTYTRTQAQHLFIILMECMKKKELITVFRMGSEGHQDIDLAILTALLKGANASAPDQLSLALAWNRVDIARSQIFIYGQQWPVGSLEQAMLDALVLDRVDFVKLLIENGVSMHRFLTISRLEELYNTRHGPSNTLYHLVRDVKKREYPGFGWIYFKGNLPPDYRISLIDIGLVIEYLMGGAYRCNYTRKRFRTLYHNLFGPKRDDIPLRRGRKTTKKREEEVDIDLDDPEINHFPFPFHELMVWAVLMKRQKMALFFWQHGEEAMAKALVACKLCKAMAHEASENDMVDDISQELNHNSRDFGQLAVELLDQSYKQDEQLAMKLLTYELKNWSNATCLQLAVAAKHRDFIAHTCSQMLLTDMWMGRLRMRKNSGLKVILGILLPPSILSLEFKNKDDMPYMSQAQEIHLQEKEAEEPEKPTKEKEEEDMELTAMLGRNNGESSRKKDEEEVQSKHRLIPLGRKIYEFYNAPIVKFWFYTLAYIGYLMLFNYIVLVKMERWPSTQEWIVISYIFTLGIEKMREILMSEPGKLLQKVKVWLQEYWNVTDLIAILLFSVGMILRLQDQPFRSDGRVIYCVNIIYWYIRLLDIFGVNKYLGPYVMMIGKMMIDMMYFVIIMLVVLMSFGVARQAILFPNEEPSWKLAKNIFYMPYWMIYGEVFADQIDPPCGQNETREDGKIIQLPPCKTGAWIVPAIMACYLLVANILLVNLLIAVFNNTFFEVKSISNQVWKFQRYQLIMTFHERPVLPPPLIIFSHMTMIFQHLCCRWRKHESDPDERDYGLKLFITDDELKKVHDFEEQCIEEYFREKDDRFNSSNDERIRVTSERVENMSMRLEEVNEREHSMKASLQTVDIRLAQLEDLIGRMATALERLTGLERAESNKIRSRTSSDCTDAAYIVRQSSFNSQEGNTFKLQESIDPAGEETMSPTSPTLMPRMRSHSFYSVNMKDKGGIEKLESIFKERSLSLHRATSSHSVAKEPKAPAAPANTLAIVPDSRRPSSCIDIYVSAMDELHCDIDPLDNSVNILGLGEPSFSTPVPSTAPSSSAYATLAPTDRPPSRSIDFEDITSMDTRSFSSDYTHLPECQNPWDSEPPMYHTIERSKSSRYLATTPFLLEEAPIVKSHSFMFSPSRSYYANFGVPVKTAEYTSITDCIDTRCVNAPQAIADRAAFPGGLGDKVEDLTCCHPEREAELSHPSSDSEENEAKGRRATIAISSQEGDNSERTLSNNITVPKIERANSYSAEEPSAPYAHTRKSFSISDKLDRQRNTASLRNPFQRSKSSKPEGRGDSLSMRRLSRTSAFQSFESKHN

SEQ ID NO: 67618 - protein, 1569 aa, Homo sapiens
MYVRVSFDTKPDLLLHLMTKEWQLELPKLLISVHGGLQNFELQPKLKQVFGKGLIKAAMTTGAWIFTGGVNTGVIRHVGDALKDHASKSRGKICTIGIAPWGIVENQEDLIGRDVVRPYQTMSNPMSKLTVLNSMHSHFILADNGTTGKYGAEVKLRRQLEKHISLQKINTRCLPFFSLDSRLFYSFWGSCQLDSVGIGQGVPVVALIVEGGPNVISIVLEYLRDTPPVPVVVCDGSGRASDILAFGHKYSEEGGLINESLRDQLLVTIQKTFTYTRTQAQHLFIILMECMKKKELITVFRMGSEGHQDIDLAILTALLKGANASAPDQLSLALAWNRVDIARSQIFIYGQQWPVGSLEQAMLDALVLDRVDFVKLLIENGVSMHRFLTISRLEELYNTRHGPSNTLYHLVRDVKKGNLPPDYRISLIDIGLVIEYLMGGAYRCNYTRKRFRTLYHNLFGPKRDDIPLRRGRKTTKKREEEVDIDLDDPEINHFPFPFHELMVWAVLMKRQKMALFFWQHGEEAMAKALVACKLCKAMAHEASENDMVDDISQELNHNSRDFGQLAVELLDQSYKQDEQLAMKLLTYELKNWSNATCLQLAVAAKHRDFIAHTCSQMLLTDMWMGRLRMRKNSGLKVILGILLPPSILSLEFKNKDDMPYMSQAQEIHLQEKEAEEPEKPTKEKEEEDMELTAMLGRNNGESSRKKDEEEVQSKHRLIPLGRKIYEFYNAPIVKFWFYTLAYIGYLMLFNYIVLVKMERWPSTQEWIVISYIFTLGIEKMREILMSEPGKLLQKVKVWLQEYWNVTDLIAILLFSVGMILRLQDQPFRSDGRVIYCVNIIYWYIRLLDIFGVNKYLGPYVMMIGKMMIDMMYFVIIMLVVLMSFGVARQAILFPNEEPSWKLAKNIFYMPYWMIYGEVFADQIDPPCGQNETREDGKIIQLPPCKTGAWIVPAIMACYLLVANILLVNLLIAVFNNTFFEVKSISNQVWKFQRYQLIMTFHERPVLPPPLIIFSHMTMIFQHLCCRWRKHESDPDERDYGLKLFITDDELKKVHDFEEQCIEEYFREKDDRFNSSNDERIRVTSERVENMSMRLEEVNEREHSMKASLQTVDIRLAQLEDLIGRMATALERLTGLERAESNKIRSRTSSDCTDAAYIVRQSSFNSQEGNTFKLQESIDPAGEETMSPTSPTLMPRMRSHSFYSVNMKDKGGIEKLESIFKERSLSLHRATSSHSVAKEPKAPAAPANTLAIVPDSRRPSSCIDIYVSAMDELHCDIDPLDNSVNILGLGEPSFSTPVPSTAPSSSAYATLAPTDRPPSRSIDFEDITSMDTRSFSSDYTHLPECQNPWDSEPPMYHTIERSKSSRYLATTPFLLEEAPIVKSHSFMFSPSRSYYANFGVPVKTAEYTSITDCIDTRCVNAPQAIADRAAFPGGLGDKVEDLTCCHPEREAELSHPSSDSEENEAKGRRATIAISSQEGDNSERTLSNNITVPKIERANSYSAEEPSAPYAHTRKSFSISDKLDRQRNTASLRNPFQRSKSSKPEGRGDSLSMRRLSRTSAFQSFESKHN

SEQ ID NO: 67619 - protein, 1569 aa, Homo sapiens; identical to SEQ ID NO: 67618

SEQ ID NO: 67620 - protein, 1566 aa, Homo sapiens
MYVRVSFDTKPDLLLHLMTKEWQLELPKLLISVHGGLQNFELQPKLKQVFGKGLIKAAMTTGAWIFTGGVNTGVIRHVGDALKDHASKSRGKICTIGIAPWGIVENQEDLIGRDVVRPYQTMSNPMSKLTVLNSMHSHFILADNGTTGKYGAEVKLRRQLEKHISLQKINTRIGQGVPVVALIVEGGPNVISIVLEYLRDTPPVPVVVCDGSGRASDILAFGHKYSEEGGLINESLRDQLLVTIQKTFTYTRTQAQHLFIILMECMKKKELITVFRMGSEGHQDIDLAILTALLKGANASAPDQLSLALAWNRVDIARSQIFIYGQQWPVGSLEQAMLDALVLDRVDFVKLLIENGVSMHRFLTISRLEELYNTRHGPSNTLYHLVRDVKKREYPGFGWIYFKGNLPPDYRISLIDIGLVIEYLMGGAYRCNYTRKRFRTLYHNLFGPKRPKALKLLGMEDDIPLRRGRKTTKKREEEVDIDLDDPEINHFPFPFHELMVWAVLMKRQKMALFFWQHGEEAMAKALVACKLCKAMAHEASENDMVDDISQELNHNSRDFGQLAVELLDQSYKQDEQLAMKLLTYELKNWSNATCLQLAVAAKHRDFIAHTCSQMLLTDMWMGRLRMRKNSGLKVILGILLPPSILSLEFKNKDDMPYMSQAQEIHLQEKEAEEPEKPTKEKEEEDMELTAMLGRNNGESSRKKDEEEVQSKHRLIPLGRKIYEFYNAPIVKFWFYTLAYIGYLMLFNYIVLVKMERWPSTQEWIVISYIFTLGIEKMREILMSEPGKLLQKVKVWLQEYWNVTDLIAILLFSVGMILRLQDQPFRSDGRVIYCVNIIYWYIRLLDIFGVNKYLGPYVMMIGKMMIDMMYFVIIMLVVLMSFGVARQAILFPNEEPSWKLAKNIFYMPYWMIYGEVFADQIDPPCGQNETREDGKIIQLPPCKTGAWIVPAIMACYLLVANILLVNLLIAVFNNTFFEVKSISNQVWKFQRYQLIMTFHERPVLPPPLIIFSHMTMIFQHLCCRWRKHESDPDERDYGLKLFITDDELKKVHDFEEQCIEEYFREKDDRFNSSNDERIRVTSERVENMSMRLEEVNEREHSMKASLQTVDIRLAQLEDLIGRMATALERLTGLERAESNKIRSRTSSDCTDAAYIVRQSSFNSQEGNTFKLQESIDPAGEETMSPTSPTLMPRMRSHSFYSVNMKDKGGIEKLESIFKERSLSLHRATSSHSVAKEPKAPAAPANTLAIVPDSRRPSSCIDIYVSAMDELHCDIDPLDNSVNILGLGEPSFSTPVPSTAPSSSAYATLAPTDRPPSRSIDFEDITSMDTRSFSSDYTHLPECQNPWDSEPPMYHTIERSKSSRYLATTPFLLEEAPIVKSHSFMFSPSRSYYANFGVPVKTAEYTSITDCIDTRCVNAPQAIADRAAFPGGLGDKVEDLTCCHPEREAELSHPSSDSEENEAKGRRATIAISSQEGDNSERTLSNNITVPKIERANSYSAEEPSAPYAHTRKSFSISDKLDRQRNTASLRNPFQRSKSSKPEGRGDSLSMRRLSRTSAFQSFESKHN

SEQ ID NO: 67621 - protein, 1579 aa, Homo sapiens
MYVRVSFDTKPDLLLHLMTKEWQLELPKLLISVHGGLQNFELQPKLKQVFGKGLIKAAMTTGAWIFTGGVNTGVIRHVGDALKDHASKSRGKICTIGIAPWGIVENQEDLIGRDVVRPYQTMSNPMSKLTVLNSMHSHFILADNGTTGKYGAEVKLRRQLEKHISLQKINTRCLPFFSLDSRLFYSFWGSCQLDSVGIGQGVPVVALIVEGGPNVISIVLEYLRDTPPVPVVVCDGSGRASDILAFGHKYSEEGGLINESLRDQLLVTIQKTFTYTRTQAQHLFIILMECMKKKELITVFRMGSEGHQDIDLAILTALLKGANASAPDQLSLALAWNRVDIARSQIFIYGQQWPVGSLEQAMLDALVLDRVDFVKLLIENGVSMHRFLTISRLEELYNTRHGPSNTLYHLVRDVKKGNLPPDYRISLIDIGLVIEYLMGGAYRCNYTRKRFRTLYHNLFGPKRPKALKLLGMEDDIPLRRGRKTTKKREEEVDIDLDDPEINHFPFPFHELMVWAVLMKRQKMALFFWQHGEEAMAKALVACKLCKAMAHEASENDMVDDISQELNHNSRDFGQLAVELLDQSYKQDEQLAMKLLTYELKNWSNATCLQLAVAAKHRDFIAHTCSQMLLTDMWMGRLRMRKNSGLKVILGILLPPSILSLEFKNKDDMPYMSQAQEIHLQEKEAEEPEKPTKEKEEEDMELTAMLGRNNGESSRKKDEEEVQSKHRLIPLGRKIYEFYNAPIVKFWFYTLAYIGYLMLFNYIVLVKMERWPSTQEWIVISYIFTLGIEKMREILMSEPGKLLQKVKVWLQEYWNVTDLIAILLFSVGMILRLQDQPFRSDGRVIYCVNIIYWYIRLLDIFGVNKYLGPYVMMIGKMMIDMMYFVIIMLVVLMSFGVARQAILFPNEEPSWKLAKNIFYMPYWMIYGEVFADQIDPPCGQNETREDGKIIQLPPCKTGAWIVPAIMACYLLVANILLVNLLIAVFNNTFFEVKSISNQVWKFQRYQLIMTFHERPVLPPPLIIFSHMTMIFQHLCCRWRKHESDPDERDYGLKLFITDDELKKVHDFEEQCIEEYFREKDDRFNSSNDERIRVTSERVENMSMRLEEVNEREHSMKASLQTVDIRLAQLEDLIGRMATALERLTGLERAESNKIRSRTSSDCTDAAYIVRQSSFNSQEGNTFKLQESIDPAGEETMSPTSPTLMPRMRSHSFYSVNMKDKGGIEKLESIFKERSLSLHRATSSHSVAKEPKAPAAPANTLAIVPDSRRPSSCIDIYVSAMDELHCDIDPLDNSVNILGLGEPSFSTPVPSTAPSSSAYATLAPTDRPPSRSIDFEDITSMDTRSFSSDYTHLPECQNPWDSEPPMYHTIERSKSSRYLATTPFLLEEAPIVKSHSFMFSPSRSYYANFGVPVKTAEYTSITDCIDTRCVNAPQAIADRAAFPGGLGDKVEDLTCCHPEREAELSHPSSDSEENEAKGRRATIAISSQEGDNSERTLSNNITVPKIERANSYSAEEPSAPYAHTRKSFSISDKLDRQRNTASLRNPFQRSKSSKPEGRGDSLSMRRLSRTSAFQSFESKHN

SEQ ID NO: 67622 - protein, 1707 aa, Homo sapiens
MPEPWGTVYFLGIAQVFSFLFSWWNLEGVMNQADAPRPLNWTIRKLCHAAFLPSVRLLKAQKSWIERAFYKRECVHIIPSTKDPHRCCCGRLIGQHVGLTPSISVLQNEKNESRLSRNDIQSEKWSISKHTQLSPTDAFGTIEFQGGGHSNKAMYVRVSFDTKPDLLLHLMTKEWQLELPKLLISVHGGLQNFELQPKLKQVFGKGLIKAAMTTGAWIFTGGVNTGVIRHVGDALKDHASKSRGKICTIGIAPWGIVENQEDLIGRDVVRPYQTMSNPMSKLTVLNSMHSHFILADNGTTGKYGAEVKLRRQLEKHISLQKINTRIGQGVPVVALIVEGGPNVISIVLEYLRDTPPVPVVVCDGSGRASDILAFGHKYSEEGGLINESLRDQLLVTIQKTFTYTRTQAQHLFIILMECMKKKELITVFRMGSEGHQDIDLAILTALLKGANASAPDQLSLALAWNRVDIARSQIFIYGQQWPVGSLEQAMLDALVLDRVDFVKLLIENGVSMHRFLTISRLEELYNTRHGPSNTLYHLVRDVKKGNLPPDYRISLIDIGLVIEYLMGGAYRCNYTRKRFRTLYHNLFGPKRPKALKLLGMEDDIPLRRGRKTTKKREEEVDIDLDDPEINHFPFPFHELMVWAVLMKRQKMALFFWQHGEEAMAKALVACKLCKAMAHEASENDMVDDISQELNHNSRDFGQLAVELLDQSYKQDEQLAMKLLTYELKNWSNATCLQLAVAAKHRDFIAHTCSQMLLTDMWMGRLRMRKNSGLKVILGILLPPSILSLEFKNKDDMPYMSQAQEIHLQEKEAEEPEKPTKEKEEEDMELTAMLGRNNGESSRKKDEEEVQSKHRLIPLGRKIYEFYNAPIVKFWFYTLAYIGYLMLFNYIVLVKMERWPSTQEWIVISYIFTLGIEKMREILMSEPGKLLQKVKVWLQEYWNVTDLIAILLFSVGMILRLQDQPFRSDGRVIYCVNIIYWYIRLLDIFGVNKYLGPYVMMIGKMMIDMMYFVIIMLVVLMSFGVARQAILFPNEEPSWKLAKNIFYMPYWMIYGEVFADQIDPPCGQNETREDGKIIQLPPCKTGAWIVPAIMACYLLVANILLVNLLIAVFNNTFFEVKSISNQVWKFQRYQLIMTFHERPVLPPPLIIFSHMTMIFQHLCCRWRKHESDPDERDYGLKLFITDDELKKVHDFEEQCIEEYFREKDDRFNSSNDERIRVTSERVENMSMRLEEVNEREHSMKASLQTVDIRLAQLEDLIGRMATALERLTGLERAESNKIRSRTSSDCTDAAYIVRQSSFNSQEGNTFKLQESIDPAGEETMSPTSPTLMPRMRSHSFYSVNMKDKGGIEKLESIFKERSLSLHRATSSHSVAKEPKAPAAPANTLAIVPDSRRPSSCIDIYVSAMDELHCDIDPLDNSVNILGLGEPSFSTPVPSTAPSSSAYATLAPTDRPPSRSIDFEDITSMDTRSFSSDYTHLPECQNPWDSEPPMYHTIERSKSSRYLATTPFLLEEAPIVKSHSFMFSPSRSYYANFGVPVKTAEYTSITDCIDTRCVNAPQAIADRAAFPGGLGDKVEDLTCCHPEREAELSHPSSDSEENEAKGRRATIAISSQEGDNSERTLSNNITVPKIERANSYSAEEPSAPYAHTRKSFSISDKLDRQRNTASLRNPFQRSKSSKPEGRGDSLSMRRLSRTSAFQSFESKHN

SEQ ID NO: 67623 - protein, 1325 aa, Homo sapiens
MPEPWGTVYFLGIAQVFSFLFSWWNLEGVMNQADAPRPLNWTIRKLCHAAFLPSVRLLKAQKSWIERAFYKRECVHIIPSTKDPHRCCCGRLIGQHVGLTPSISVLQNEKNESRLSRNDIQSEKWSISKHTQLSPTDAFGTIEFQGGGHSNKAMYVRVSFDTKPDLLLHLMTKEWQLELPKLLISVHGGLQNFELQPKLKQVFGKGLIKAAMTTGAWIFTGGVNTGVIRHVGDALKDHASKSRGKICTIGIAPWGIVENQEDLIGRDVVRPYQTMSNPMSKLTVLNSMHSHFILADNGTTGKYGAEVKLRRQLEKHISLQKINTRIGQGVPVVALIVEGGPNVISIVLEYLRDTPPVPVVVCDGSGRASDILAFGHKYSEEGGLINESLRDQLLVTIQKTFTYTRTQAQHLFIILMECMKKKELITVFRMGSEGHQDIDLAILTALLKGANASAPDQLSLALAWNRVDIARSQIFIYGQQWPVGSLEQAMLDALVLDRVDFVKLLIENGVSMHRFLTISRLEELYNTRHGPSNTLYHLVRDVKKGNLPPDYRISLIDIGLVIEYLMGGAYRCNYTRKRFRTLYHNLFGPKRPKALKLLGMEDDIPLRRGRKTTKKREEEVDIDLDDPEINHFPFPFHELMVWAVLMKRQKMALFFWQHGEEAMAKALVACKLCKAMAHEASENDMVDDISQELNHNSRDFGQLAVELLDQSYKQDEQLAMKLLTYELKNWSNATCLQLAVAAKHRDFIAHTCSQMLLTDMWMGRLRMRKNSGLKVILGILLPPSILSLEFKNKDDMPYMSQAQEIHLQEKEAEEPEKPTKEKEEEDMELTAMLGRNNGESSRKKDEEEVQSKHRLIPLGRKIYEFYNAPIVKFWFYTLAYIGYLMLFNYIVLVKMERWPSTQEWIVISYIFTLGIEKMREILMSEPGKLLQKVKVWLQEYWNVTDLIAILLFSVGMILRLQDQPFRSDGRVIYCVNIIYWYIRLLDIFGVNKYLGPYVMMIGKMMIDMMYFVIIMLVVLMSFGVARQAILFPNEEPSWKLAKNIFYMPYWMIYGEVFADQIDPPCGQNETREDGKIIQLPPCKTGAWIVPAIMACYLLVANILLVNLLIAVFNNTFFEVKSISNQVWKFQRYQLIMTFHERPVLPPPLIIFSHMTMIFQHLCCRWRKHESDPDERDYGLKLFITDDELKKVHDFEEQCIEEYFREKDDRFNSSNDERIRVTSERVENMSMRLEEVNEREHSMKASLQTVDIRLAQLEDLIGRMATALERLTGLERAESNKIRSRTSSDCTDAAYIVRQSSFNSQEGNTFKLQESIDPAEHPLYSV

SEQ ID NO: 67624 - protein, 1556 aa, Homo sapiens
  VARIANT 1: note = MOD_RES - Any amino acid
XYVRVSFDTKPDLLLHLMTKEWQLELPKLLISVHGGLQNFELQPKLKQVFGKGLIKAAMTTGAWIFTGGVNTGVIRHVGDALKDHASKSRGKICTIGIAPWGIVENQEDLIGRDVVRPYQTMSNPMSKLTVLNSMHSHFILADNGTTGKYGAEVKLRRQLEKHISLQKINTRIGQGVPVVALIVEGGPNVISIVLEYLRDTPPVPVVVCDGSGRASDILAFGHKYSEEGGLINESLRDQLLVTIQKTFTYTRTQAQHLFIILMECMKKKELITVFRMGSEGHQDIDLAILTALLKGANASAPDQLSLALAWNRVDIARSQIFIYGQQWPVGSLEQAMLDALVLDRVDFVKLLIENGVSMHRFLTISRLEELYNTRHGPSNTLYHLVRDVKKREYPGFGWIYFKGNLPPDYRISLIDIGLVIEYLMGGAYRCNYTRKRFRTLYHNLFGPKRDDIPLRRGRKTTKKREEEVDIDLDDPEINHFPFPFHELMVWAVLMKRQKMALFFWQHGEEAMAKALVACKLCKAMAHEASENDMVDDISQELNHNSRDFGQLAVELLDQSYKQDEQLAMKLLTYELKNWSNATCLQLAVAAKHRDFIAHTCSQMLLTDMWMGRLRMRKNSGLKVILGILLPPSILSLEFKNKDDMPYMSQAQEIHLQEKEAEEPEKPTKEKEEEDMELTAMLGRNNGESSRKKDEEEVQSKHRLIPLGRKIYEFYNAPIVKFWFYTLAYIGYLMLFNYIVLVKMERWPSTQEWIVISYIFTLGIEKMREILMSEPGKLLQKVKVWLQEYWNVTDLIAILLFSVGMILRLQDQPFRSDGRVIYCVNIIYWYIRLLDIFGVNKYLGPYVMMIGKMMIDMMYFVIIMLVVLMSFGVARQAILFPNEEPSWKLAKNIFYMPYWMIYGEVFADQIDPPCGQNETREDGKIIQLPPCKTGAWIVPAIMACYLLVANILLVNLLIAVFNNTFFEVKSISNQVWKFQRYQLIMTFHERPVLPPPLIIFSHMTMIFQHLCCRWRKHESDPDERDYGLKLFITDDELKKVHDFEEQCIEEYFREKDDRFNSSNDERIRVTSERVENMSMRLEEVNEREHSMKASLQTVDIRLAQLEDLIGRMATALERLTGLERAESNKIRSRTSSDCTDAAYIVRQSSFNSQEGNTFKLQESIDPAGEETMSPTSPTLMPRMRSHSFYSVNMKDKGGIEKLESIFKERSLSLHRATSSHSVAKEPKAPAAPANTLAIVPDSRRPSSCIDIYVSAMDELHCDIDPLDNSVNILGLGEPSFSTPVPSTAPSSSAYATLAPTDRPPSRSIDFEDITSMDTRSFSSDYTHLPECQNPWDSEPPMYHTIERSKSSRYLATTPFLLEEAPIVKSHSFMFSPSRSYYANFGVPVKTAEYTSITDCIDTRCVNAPQAIADRAAFPGGLGDKVEDLTCCHPEREAELSHPSSDSEENEAKGRRATIAISSQEGDNSERTLSNNITVPKIERANSYSAEEPSAPYAHTRKSFSISDKLDRQRNTASLRNPFQRSKSSKPEGRGDSLSMRRLSRTSAFQSFESKHN

SEQ ID NO: 67625 - protein, 1566 aa, Homo sapiens
MYVRVSFDTKPDLLLHLMTKEWQLELPKLLISVHGGLQNFELQPKLKQVFGKGLIKAAMTTGAWIFTGGVNTGVIRHVGDALKDHASKSRGKICTIGIAPWGIVENQEDLIGRDVVRPYQTMSNPMSKLTVLNSMHSHFILADNGTTGKYGAEVKLRRQLEKHISLQKINTRIGQGVPVVALIVEGGPNVISIVLEYLRDTPPVPVVVCDGSGRASDILAFGHKYSEEGGLINESLRDQLLVTIQKTFTYTRTQAQHLFIILMECMKKKELITVFRMGSEGHQDIDLAILTALLKGANASAPDQLSLALAWNRVDIARSQIFIYGQQWPVGSLEQAMLDALVLDRVDFVKLLIENGVSMHRFLTISRLEELYNTRHGPSNTLYHLVRDVKKGNLPPDYRISLIDIGLVIEYLMGGAYRCNYTRKRFRTLYHNLFGPKRPKALKLLGMEDDIPLRRGRKTTKKREEEVDIDLDDPEINHFPFPFHELMVWAVLMKRQKMALFFWQHGEEAMAKALVACKLCKAMAHEASENDMVDDISQELNHNSRDFGQLAVELLDQSYKQDEQLAMKLLTYELKNWSNATCLQLAVAAKHRDFIAHTCSQMLLTDMWMGRLRMRKNSGLKVILGILLPPSILSLEFKNKDDMPYMSQAQEIHLQEKEAEEPEKPTKEKEEEDMELTAMLGRNNGESSRKKDEEEVQSKHRLIPLGRKIYEFYNAPIVKFWFYTLAYIGYLMLFNYIVLVKMERWPSTQEWIVISYIFTLGIEKMREILMSEPGKLLQKVKVWLQEYWNVTDLIAILLFSVGMILRLQDQPFRSDGRVIYCVNIIYWYIRLLDIFGVNKYLGPYVMMIGKMMIDMMYFVIIMLVVLMSFGVARQAILFPNEEPSWKLAKNIFYMPYWMIYGEVFADQIDRKQVYDSHTPKSAPCGQNETREDGKIIQLPPCKTGAWIVPAIMACYLLVANILLVNLLIAVFNNTFFEVKSISNQVWKFQRYQLIMTFHERPVLPPPLIIFSHMTMIFQHLCCRWRKHESDPDERDYGLKLFITDDELKKVHDFEEQCIEEYFREKDDRFNSSNDERIRVTSERVENMSMRLEEVNEREHSMKASLQTVDIRLAQLEDLIGRMATALERLTGLERAESNKIRSRTSSDCTDAAYIVRQSSFNSQEGNTFKLQESIDPAGEETMSPTSPTLMPRMRSHSFYSVNMKDKGGIEKLESIFKERSLSLHRATSSHSVAKEPKAPAAPANTLAIVPDSRRPSSCIDIYVSAMDELHCDIDPLDNSVNILGLGEPSFSTPVPSTAPSSSAYATLAPTDRPPSRSIDFEDITSMDTRSFSSDYTHLPECQNPWDSEPPMYHTIERSKSSRYLATTPFLLEEAPIVKSHSFMFSPSRSYYANFGVPVKTAEYTSITDCIDTRCVNAPQAIADRAAFPGGLGDKVEDLTCCHPEREAELSHPSSDSEENEAKGRRATIAISSQEGDNSERTLSNNITVPKIERANSYSAEEPSAPYAHTRKSFSISDKLDRQRNTASLRNPFQRSKSSKPEGRGDSLSMRRLSRTSAFQSFESKHN

SEQ ID NO: 67626 - protein, 1579 aa, Homo sapiens; identical to SEQ ID NO: 67621

SEQ ID NO: 67627 - protein, 1566 aa, Homo sapiens; identical to SEQ ID NO: 67620

SEQ ID NO: 67628 - protein, 1734 aa, Homo sapiens
MGKKWRDAAEMERGCSDREDNAESRRRSRSASRGRFAESWKRLSSKQGSTKRSGLPSQQTPAQKSWIERAFYKRECVHIIPSTKDPHRCCCGRLIGQHVGLTPSISVLQNEKNESRLSRNDIQSEKWSISKHTQLSPTDAFGTIEFQGGGHSNKAMYVRVSFDTKPDLLLHLMTKEWQLELPKLLISVHGGLQNFELQPKLKQVFGKGLIKAAMTTGAWIFTGGVNTGVIRHVGDALKDHASKSRGKICTIGIAPWGIVENQEDLIGRDVVRPYQTMSNPMSKLTVLNSMHSHFILADNGTTGKYGAEVKLRRQLEKHISLQKINTRCLPFFSLDSRLFYSFWGSCQLDSVGIGQGVPVVALIVEGGPNVISIVLEYLRDTPPVPVVVCDGSGRASDILAFGHKYSEEGGLINESLRDQLLVTIQKTFTYTRTQAQHLFIILMECMKKKELITVFRMGSEGHQDIDLAILTALLKGANASAPDQLSLALAWNRVDIARSQIFIYGQQWPVGSLEQAMLDALVLDRVDFVKLLIENGVSMHRFLTISRLEELYNTRHGPSNTLYHLVRDVKKGNLPPDYRISLIDIGLVIEYLMGGAYRCNYTRKRFRTLYHNLFGPKRPKALKLLGMEDDIPLRRGRKTTKKREEEVDIDLDDPEINHFPFPFHELMVWAVLMKRQKMALFFWQHGEEAMAKALVACKLCKAMAHEASENDMVDDISQELNHNSRDFGQLAVELLDQSYKQDEQLAMKLLTYELKNWSNATCLQLAVAAKHRDFIAHTCSQMLLTDMWMGRLRMRKNSGLKVILGILLPPSILSLEFKNKDDMPYMSQAQEIHLQEKEAEEPEKPTKEKEEEDMELTAMLGRNNGESSRKKDEEEVQSKHRLIPLGRKIYEFYNAPIVKFWFYTLAYIGYLMLFNYIVLVKMERWPSTQEWIVISYIFTLGIEKMREILMSEPGKLLQKVKVWLQEYWNVTDLIAILLFSVGMILRLQDQPFRSDGRVIYCVNIIYWYIRLLDIFGVNKYLGPYVMMIGKMMIDMMYFVIIMLVVLMSFGVARQAILFPNEEPSWKLAKNIFYMPYWMIYGEVFADQIDPPCGQNETREDGKIIQLPPCKTGAWIVPAIMACYLLVANILLVNLLIAVFNNTFFEVKSISNQVWKFQRYQLIMTFHERPVLPPPLIIFSHMTMIFQHLCCRWRKHESDPDERDYGLKLFITDDELKKVHDFEEQCIEEYFREKDDRFNSSNDERIRVTSERVENMSMRLEEVNEREHSMKASLQTVDIRLAQLEDLIGRMATALERLTGLERAESNKIRSRTSSDCTDAAYIVRQSSFNSQEGNTFKLQESIDPAGEETMSPTSPTLMPRMRSHSFYSVNMKDKGGIEKLESIFKERSLSLHRATSSHSVAKEPKAPAAPANTLAIVPDSRRPSSCIDIYVSAMDELHCDIDPLDNSVNILGLGEPSFSTPVPSTAPSSSAYATLAPTDRPPSRSIDFEDITSMDTRSFSSDYTHLPECQNPWDSEPPMYHTIERSKSSRYLATTPFLLEEAPIVKSHSFMFSPSRSYYANFGVPVKTAEYTSITDCIDTRCVNAPQAIADRAAFPGGLGDKVEDLTCCHPEREAELSHPSSDSEENEAKGRRATIAISSQEGDNSERTLSNNITVPKIERANSYSAEEPSAPYAHTRKSFSISDKLDRQRNTASLRNPFQRSKSSKPEGRGDSLSMRRLSRTSAFQSFESKHN

SEQ ID NO: 67629 - protein, 214 aa, Homo sapiens
MYVRVSFDTKPDLLLHLMTKEWQLELPKLLISVHGGLQNFELQPKLKQVFGKGLIKAAMTTGAWIFTGGVNTGVIRHVGDALKDHASKSRGKICTIGIAPWGIVENQEDLIGRDVVRPYQTMSNPMSKLTVLNSMHSHFILADNGTTGKYGAEVKLRRQLEKHISLQKINTSFHSYKTAHVDLQDKRQVKTALEQAEWQPGRGMFDHDNLMQST

SEQ ID NO: 67630 - protein, 1214 aa, Homo sapiens
MVVPEKEQSWIPKIFKKKTCTTFIVDSTDPGGTLCQCGRPRTAHPAVAMEDAFGAAVVTVWDSDAHTTEKPTDAYGELDFTGAGRKHSNFLRLSDRTDPAAVYSLVTRTWGFRAPNLVVSVLGGSGGPVLQTWLQDLLRRGLVRAAQSTGAWIVTGGLHTGIGRHVGVAVRDHQMASTGGTKVVAMGVAPWGVVRNRDTLINPKGSFPARYRWRGDPEDGVQFPLDYNYSAFFLVDDGTHGCLGGENRFRLRLESYISQQKTGVGGTGIDIPVLLLLIDGDEKMLTRIENATQAQLPCLLVAGSGGAADCLAETLEDTLAPGSGGARQGEARDRIRRFFPKGDLEVLQAQVERIMTRKELLTVYSSEDGSEEFETIVLKALVKACGSSEASAYLDELRLAVAWNRVDIAQSELFRGDIQWRSFHLEASLMDALLNDRPEFVRLLISHGLSLGHFLTPMRLAQLYSAAPSNSLIRNLLDQASHSAGTKAPALKGGAAELRPPDVGHVLRMLLGKMCAPRYPSGGAWDPHPGQGFGESMYLLSDKATSPLSLDAGLGQAPWSDLLLWALLLNRAQMAMYFWEMGSNAVSSALGACLLLRVMARLEPDAEEAARRKDLAFKFEGMGVDLFGECYRSSEVRAARLLLRRCPLWGDATCLQLAMQADARAFFAQDGVQSLLTQKWWGDMASTTPIWALVLAFFCPPLIYTRLITFRKSEEEPTREELEFDMDSVINGEGPVGTADPAEKTPLGVPRQSGRPGCCGGRCGGRRCLRRWFHFWGAPVTIFMGNVVSYLLFLLLFSRVLLVDFQPAPPGSLELLLYFWAFTLLCEELRQGLSGGGGSLASGGPGPGHASLSQRLRLYLADSWNQCDLVALTCFLLGVGCRLTPGLYHLGRTVLCIDFMVFTVRLLHIFTVNKQLGPKIVIVSKMMKDVFFFLFFLGVWLVAYGVATEGLLRPRDSDFPSILRRVFYRPYLQIFGQIPQEDMDVALMEHSNCSSEPGFWAHPPGAQAGTCVSQYANWLVVLLLVIFLLVANILLVNLLIAMFSYTFGKVQGNSDLYWKAQRYRLIREFHSRPALAPPFIVISHLRLLLRQLCRRPRSPQPSSPALEHFRVYLSKEAERKLLTWESVHKENFLLARARDKRESDSERLKRTSQKVDLALKQLGHIREYEQRLKVLEREVQQCSRVLGWVAEALSRSALLPPGGPPPPDLPGSKD

SEQ ID NO: 67631 - protein, 860 aa, Homo sapiens
MLTRIENATQAQLPCLLVAGSGGAADCLAETLEDTLAPGSGGARQGEARDRIRRFFPKGDLEVLQAQSFHLEASLMDALLNDRPEFVRLLISHGLSLGHFLTPMRLAQLYSAAPSNSLIRNLLDQASHSAGTKAPALKGGAAELRPPDVGHVLRMLLGKMCAPRYPSGGAWDPHPGQGFGESMYLLSDKATSPLSLDAGLGQAPWSDLLLWALLLNRAQMAMYFWEMGSNAVSSALGACLLLRVMARLEPDAEEAARRKDLAFKFEGMGVDLFGECYRSSEVRAARLLLRRCPLWGDATCLQLAMQADARAFFAQDGVQSLLTQKWWGDMASTTPIWALVLAFFCPPLIYTRLITFRKSEEEPTREELEFDMDSVINGEGPVGTADPAEKTPLGVPRQSGRPGCCGGRCGGRRCLRRWFHFWGAPVTIFMGNVVSYLLFLLLFSRVLLVDFQPAPPGSLELLLYFWAFTLLCEELRQGLSGGGGSLASGGPGPGHASLSQRLRLYLADSWNQCDLVALTCFLLGVGCRLTPGLYHLGRTVLCIDFMVFTVRLLHIFTVNKQLGPKIVIVSKMMKDVFFFLFFLGVWLVAYGVATEGLLRPRDSDFPSILRRVFYRPYLQIFGQIPQEDMDVALMEHSNCSSEPGFWAHPPGAQAGTCVSQYANWLVVLLLVIFLLVANILLVNLLIAMFSYTFGKVQGNSDLYWKAQRYRLIREFHSRPALAPPFIVISHLRLLLRQLCRRPRSPQPSSPALEHFRVYLSKEAERKLLTWESVHKENFLLARARDKRESDSERLKRTSQKVDLALKQLGHIREYEQRLKVLEREVQQCSRVLGWVAEALSRSALLPPGGPPPPDLPGSKD

SEQ ID NO: 67632 - protein, 1069 aa, Homo sapiens
MVVPEKEQSWIPKIFKKKTCTTFIVDSTDPGGTLCQCGRPRTAHPAVAMEDAFGAAVVTVWDSDAHTTEKPTDAYGELDFTGAGRKHSNFLRLSDRTDPAAVYSLVTRTWGFRAPNLVVSVLGGSGGPVLQTWLQDLLRRGLVRAAQSTGAWIVTGGLHTGIGRHVGVAVRDHQMASTGGTKVVAMGVAPWGVVRNRDTLINPKGSFPARYRWRGDPEDGVQFPLDYNYSAFFLVDDGTHGCLGGENRFRLRLESYISQQKTGVGGTGIDIPVLLLLIDGDEKMLTRIENATQAQLPCLLVAGSGGAADCLAETLEDTLAPGSGGARQGEARDRIRRFFPKGDLEVLQAQVERIMTRKELLTVYSSEDGSEEFETIVLKALVKACGSSEASAYLDELRLAVAWNRVDIAQSELFRGDIQWRSFHLEASLMDALLNDRPEFVRLLISHGLSLGHFLTPMRLAQLYSAAPSNSLIRNLLDQASHSAGTKAPALKGGAAELRPPDVGHVLRMLLGKMCAPRYPSGGAWDPHPGQGFGESMYLLSDKATSPLSLDAGLGQAPWSDLLLWALLLNRAQMAMYFWEMGSNAVSSALGACLLLRVMARLEPDAEEAARRKDLAFKFEGMGVDLFGECYRSSEVRAARLLLRRCPLWGDATCLQLAMQADARAFFAQDGVQSLLTQKWWGDMASTTPIWALVLAFFCPPLIYTRLITFRKSEEEPTREELEFDMDSVINGEGPVGLTPGLYHLGRTVLCIDFMVFTVRLLHIFTVNKQLGPKIVIVSKMMKDVFFFLFFLGVWLVAYGVATEGLLRPRDSDFPSILRRVFYRPYLQIFGQIPQEDMDVALMEHSNCSSEPGFWAHPPGAQAGTCVSQYANWLVVLLLVIFLLVANILLVNLLIAMFSYTFGKVQGNSDLYWKAQRYRLIREFHSRPALAPPFIVISHLRLLLRQLCRRPRSPQPSSPALEHFRVYLSKEAERKLLTWESVHKENFLLARARDKRESDSERLKRTSQKVDLALKQLGHIREYEQRLKVLEREVQQCSRVLGWVAEALSRSALLPPGGPPPPDLPGSKD

SEQ ID NO: 67633 - protein, 1165 aa, Homo sapiens
MQDVQGPRPGSPGDAEDRRELGLHRGEVNFGGSGKKRGKFVRVPSGVAPSVLFDLLLAEWHLPAPNLVVSLVGEEQPFAMKSWLRDVLRKGLVKAAQSTGAWILTSALRVGLARHVGQAVRDHSLASTSTKVRVVAVGMASLGRVLHRRILEEAQEDFPVHYPEDDGGSQGPLCSLDSNLSHFILVEPGPPGKGDGLTELRLRLEKHISEQRAGYGGTGSIEIPVLCLLVNGDPNTLERISRAVEQAAPWLILVGSGGIADVLAALVNQPHLLVPKVAEKQFKEKFPSKHFSWEDIVRWTKLLQNITSHQHLLTVYDFEQEGSEELDTVILKALVKACKSHSQEPQDYLDELKLAVAWDRVDIAKSEIFNGDVEWKSCDLEEVMVDALVSNKPEFVRLFVDNGADVADFLTYGRLQELYRSVSRKSLLFDLLQRKQEEARLTLAGLGTQQAREPPAGPPAFSLHEVSRVLKDFLQDACRGFYQDGRPGDRRRAEKGPAKRPTGQKWLLDLNQKSENPWRDLFLWAVLQNRHEMATYFWAMGQEGVAAALAACKILKEMSHLETEAEAARATREAKYERLALDLFSECYSNSEARAFALLVRRNRCWSKTTCLHLATEADAKAFFAHDGVQAFLTRIWWGDMAAGTPILRLLGAFLCPALVYTNLITFSEEAPLRTGLEDLQDLDSLDTEKSPLYGLQSRVEELVEAPRAQGDRGPRAVFLLTRWRKFWGAPVTVFLGNVVMYFAFLFLFTYVLLVDFRPPPQGPSGPEVTLYFWVFTLVLEEIRQGFFTDEDTHLVKKFTLYVGDNWNKCDMVAIFLFIVGVTCRMLPSAFEAGRTVLAMDFMVFTLRLIHIFAIHKQLGPKIIVVERMMKDVFFFLFFLSVWLVAYGVTTQALLHPHDGRLEWIFRRVLYRPYLQIFGQIPLDEIDEARVNCSTHPLLLEDSPSCPSLYANWLVILLLVTFLLVTNVLLMNLLIAMFSYTFQVVQGNADMFWKFQRYNLIVEYHERPALAPPFILLSHLSLTLRRVFKKEAEHKREHLERDLPDPLDQKVVTWETVQKENFLSKMEKRRRDSEGEVLRKTAHRVDFIAKYLGGLREQEKRIKCLESQINYCSVLVSSVADVLAQGGGPRSSQHCGEGSQLVAADHRGGLDGWEQPGAGQPPSDT

SEQ ID NO: 67634 - protein, 872 aa, Homo sapiens
MQDVQGPRPGSPGDAEDRRELGLHRGEVNFGGSGKKRGKFVRVPSGVAPSVLFDLLLAEWHLPAPNLVVSLVGEEQPFAMKSWLRDVLRKGLVKAAQSTGAWILTSALRVGLARHVGQAVRDHSLASTSTKVRVVAVGMASLGRVLHRRILEEAQEDFPVHYPEDDGGSQGPLCSLDSNLSHFILVEPGPPGKGDGLTELRLRLEKHISEQRAGYGGTGSIEIPVLCLLVNGDPNTLERISRAVEQAAPWLILVGSGGIADVLAALVNQPHLLVPKVAEKQFKEKFPSKHFSWEDIVRWTKLLQNITSHQHLLTVYDFEQEGSEELDTVILKALVKACKSHSQEPQDYLDELKLAVAWDRVDIAKSEIFNGDVEWKSCDLEEVMVDALVSNKPEFVRLFVDNGADVADFLTYGRLQELYRSVSRKSLLFDLLQRKQEEARLTLAGLGTQQAREPPAGPPAFSLHEVSRVLKDFLQDACRGFYQDGRPGDRRRAEKGPAKRPTGQKWLLDLNQKSENPWRDLFLWAVLQNRHEMATYFWAMGQEGVAAALAACKILKEMSHLETEAEAARATREAKYERLALDLFSECYSNSEARAFALLVRRNRCWSKTTCLHLATEADAKAFFAHDGVQAFLTRIWWGDMAAGTPILRLLGAFLCPALVYTNLITFSEEAPLRTGLEDLQDLDSLDTEKSPLYGLQSRVEELVEAPRAQGDRGPRAVFLLTRWRKFWGAPVTVFLGNVVMYFAFLFLFTYVLLVDFRPPPQGPSGPEVTLYFWVFTLVLEEIRQGFFTDEDTHLVKKFTLYVGDNWNKCDMVAIFLFIVGVTCRMLPSAFEAGRTVLAMDFMVFTLRLIHIFAIHKQLGPKIIVVERMKPV

SEQ ID NO: 67635 - protein, 1167 aa, Homo sapiens
MQDVQGPRPGSPGDAEDRRELGLHRGEVNFGGSGKKRGKFVRVPSGVAPSVLFDLLLAEWHLPAPNLVVSLVGEEQPFAMKSWLRDVLRKGLVKAAQSTGAWILTSALRVGLARHVGQAVRDHSLASTSTKVRVVAVGMASLGRVLHRRILEEAQVHEDFPVHYPEDDGGSQGPLCSLDSNLSHFILVEPGPPGKGDGLTELRLRLEKHISEQRAGYGGTGSIEIPVLCLLVNGDPNTLERISRAVEQAAPWLILVGSGGIADVLAALVNQPHLLVPKVAEKQFKEKFPSKHFSWEDIVRWTKLLQNITSHQHLLTVYDFEQEGSEELDTVILKALVKACKSHSQEPQDYLDELKLAVAWDRVDIAKSEIFNGDVEWKSCDLEEVMVDALVSNKPEFVRLFVDNGADVADFLTYGRLQELYRSVSRKSLLFDLLQRKQEEARLTLAGLGTQQAREPPAGPPAFSLHEVSRVLKDFLQDACRGFYQDGRPGDRRRAEKGPAKRPTGQKWLLDLNQKSENPWRDLFLWAVLQNRHEMATYFWAMGQEGVAAALAACKILKEMSHLETEAEAARATREAKYERLALDLFSECYSNSEARAFALLVRRNRCWSKTTCLHLATEADAKAFFAHDGVQAFLTRIWWGDMAAGTPILRLLGAFLCPALVYTNLITFSEEAPLRTGLEDLQDLDSLDTEKSPLYGLQSRVEELVEAPRAQGDRGPRAVFLLTRWRKFWGAPVTVFLGNVVMYFAFLFLFTYVLLVDFRPPPQGPSGPEVTLYFWVFTLVLEEIRQGFFTDEDTHLVKKFTLYVGDNWNKCDMVAIFLFIVGVTCRMLPSAFEAGRTVLAMDFMVFTLRLIHIFAIHKQLGPKIIVVERMMKDVFFFLFFLSVWLVAYGVTTQALLHPHDGRLEWIFRRVLYRPYLQIFGQIPLDEIDEARVNCSTHPLLLEDSPSCPSLYANWLVILLLVTFLLVTNVLLMNLLIAMFSYTFQVVQGNADMFWKFQRYNLIVEYHERPALAPPFILLSHLSLTLRRVFKKEAEHKREHLERDLPDPLDQKVVTWETVQKENFLSKMEKRRRDSEGEVLRKTAHRVDFIAKYLGGLREQEKRIKCLESQINYCSVLVSSVADVLAQGGGPRSSQHCGEGSQLVAADHRGGLDGWEQPGAGQPPSDT

SEQ ID NO: 67636 - protein, 1159 aa, Homo sapiens
PGSPGDAEDRRELGLHRGEVNFGGSGKKRGKFVRVPSGVAPSVLFDLLLAEWHLPAPNLVVSLVGEEQPFAMKSWLRDVLRKGLVKAAQSTGAWILTSALRVGLARHVGQAVRDHSLASTSTKVRVVAVGMASLGRVLHRRILEEAQVHEDFPVHYPEDDGGSQGPLCSLDSNLSHFILVEPGPPGKGDGLTELRLRLEKHISEQRAGYGGTGSIEIPVLCLLVNGDPNTLERISRAVEQAAPWLILVGSGGIADVLAALVNQPHLLVPKVAEKQFKEKFPSKHFSWEDIVRWTKLLQNITSHQHLLTVYDFEQEGSEELDTVILKALVKACKSHSQEPQDYLDELKLAVAWDRVDIAKSEIFNGDVEWKSCDLEEVMVDALVSNKPEFVRLFVDNGADVADFLTYGRLQELYRSVSRKSLLFDLLQRKQEEARLTLAGLGTQQAREPPAGPPAFSLHEVSRVLKDFLQDACRGFYQDGRPGDRRRAEKGPAKRPTGQKWLLDLNQKSENPWRDLFLWAVLQNRHEMATYFWAMGQEGVAAALAACKILKEMSHLETEAEAARATREAKYERLALDLFSECYSNSEARAFALLVRRNRCWSKTTCLHLATEADAKAFFAHDGVQAFLTRIWWGDMAAGTPILRLLGAFLCPALVYTNLITFSEEAPLRTGLEDLQDLDSLDTEKSPLYGLQSRVEELVEAPRAQGDRGPRAVFLLTRWRKFWGAPVTVFLGNVVMYFAFLFLFTYVLLVDFRPPPQGPSGPEVTLYFWVFTLVLEEIRQGFFTDEDTHLVKKFTLYVGDNWNKCDMVAIFLFIVGVTCRMLPSAFEAGRTVLAMDFMVFTLRLIHIFAIHKQLGPKIIVVERMMKDVFFFLFFLSVWLVAYGVTTQALLHPHDGRLEWIFRRVLYRPYLQIFGQIPLDEIDEARVNCSTHPLLLEDSPSCPSLYANWLVILLLVTFLLVTNVLLMNLLIAMFSYTFQVVQGNADMFWKFQRYNLIVEYHERPALAPPFILLSHLSLTLRRVFKKEAEHKREHLERDLPDPLDQKVVTWETVQKENFLSKMEKRRRDSEGEVLRKTAHRVDFIAKYLGGLREQEKRIKCLESQINYCSVLVSSVADVLAQGGGPRSSQHCGEGSQLVAADHRGGLDGWEQPGAGQPPSDT

SEQ ID NO: 67637 - protein, 1133 aa, Homo sapiens
MLRPQVKEEIICMIQNTFNFSLKQSKHLFQILMECMVHRDCITIFDADSEEQQDLDLAILTALLKGTNLSASEQLNLAMAWDRVDIAKKHILIYEQHWKPDALEQAMSDALVMDRVDFVKLLIEYGVNLHRFLTIPRLEELYNTKQGPTNTLLHHLVQDVKQHTLLSGYRITLIDIGLVVEYLIGRAYRSNYTRKHFRALYNNLYRKYKHQRHSSGNRNESAESTLHSQFIRTAQPYKFKEKSIVLHKSRKKSKEQNVSDDPESTGFLYPYNDLLVWAVLMKRQKMAMFFWQHGEEATVKAVIACILYRAMAHEAKESHMVDDASEELKNYSKQFGQLALDLLEKAFKQNERMAMTLLTYELRNWSNSTCLKLAVSGGLRPFVSHTCTQMLLTDMWMGRLKMRKNSWLKIIISIILPPTILTLEFKSKAEMSHVPQSQDFQFMWYYSDQNASSSKESASVKEYDLERGHDEKLDENQHFGLESGHQHLPWTRKVYEFYSAPIVKFWFYTMAYLAFLMLFTYTVLVEMQPQPSVQEWLVSIYIFTNAIEVVREICISEPGKFTQKVKVWISEYWNLTETVAIGLFSAGFVLRWGDPPFHTAGRLIYCIDIIFWFSRLLDFFAVNQHAGPYVTMIAKMTANMFYIVIIMAIVLLSFGVARKAILSPKEPPSWSLARDIVFEPYWMIYGEVYAGEIDVCSSQPSCPPGSFLTPFLQAVYLFVQYIIMVNLLIAFFNNVYLDMESISNNLWKYNRYRYIMTYHEKPWLPPPLILLSHVGLLLRRLCCHRAPHDQEEGDVGLKLYLSKEDLKKLHDFEEQCVEKYFHEKMEDVNCSCEERIRVTSERVTEMYFQLKEMNEKVSFIKDSLLSLDSQVGHLQDLSALTVDTLKVLSAVDTLQEDEALLAKRKHSTCKKLPHSWSNVICAEVLGSMEIAGEKKYQYYSMPSSLLRSLAGGRHPPRVQRGALLEITNSKREATNVRNDQERQETQSSIVVSGVSPNRQAHSKYGQFLLVPSNLKRVPFSAETVLPLSRPSVPDVLATEQDIQTEVLVHLTGQTPVVSDWASVDEPKEKHEPIAHLLDGQDKAEQVLPTLSCTPEPMTMSSPLRRYRPFARSHSFRFHKEEKLMKICKIKSKE

SEQ ID NO: 67638 - protein, 303 aa, Homo sapiens
MKEQPVLERLQSQKSWIKGVFDKRECSTIIPSSKNPHRCTPVCQVCQNLIRCYCGRLIGDHAGIDYSWTISAAKGKESEQWSVEKHTTKSPTDTFGTINFQDGEHTHHAKYIRTSYDTKLDHLLHLMLKEWKMELPKLVISVHGGIQNFTMPSKFKEIFSQGLVKAAETTGAWIITEGINTGVSKHVGDALKSHSSHSLRKIWTVGIPPWGVIENQRDLIGKDVVCLYQTLDNPLSKLTTLNSMHSHFILSDDGTVGKYGNEMKLRRNLEKYLSLQKIHCREYHRGSVTQSGCRPAEVFHGLP

SEQ ID NO: 67639 - protein, 2022 aa, Homo sapiens
MKEQPVLERLQSQKSWIKGVFDKRECSTIIPSSKNPHRCTPVCQVCQNLIRCYCGRLIGDHAGIDYSWTISAAKGKESEQWSVEKHTTKSPTDTFGTINFQDGEHTHHAKYIRTSYDTKLDHLLHLMLKEWKMELPKLVISVHGGIQNFTMPSKFKEIFSQGLVKAAETTGAWIITEGINTGVSKHVGDALKSHSSHSLRKIWTVGIPPWGVIENQRDLIGKDVVCLYQTLDNPLSKLTTLNSMHSHFILSDDGTVGKYGNEMKLRRNLEKYLSLQKIHCRSRQGVPVVGLVVEGGPNVILSVWETVKDKDPVVVCEGTGRAADLLAFTHKHLADEGMLRPQVKEEIICMIQNTFNFSLKQSKHLFQILMECMVHRDCITIFDADSEEQQDLDLAILTALLKGTNLSASEQLNLAMAWDRVDIAKKHILIYEQHWKPDALEQAMSDALVMDRVDFVKLLIEYGVNLHRFLTIPRLEELYNTKQGPTNTLLHHLVQDVKQHTLLSGYRITLIDIGLVVEYLIGRAYRSNYTRKHFRALYNNLYRKYKHQRHSSGNRNESAESTLHSQFIRTAQPYKFKEKSIVLHKSRKKSKEQNVSDDPESTGFLYPYNDLLVWAVLMKRQKMAMFFWQHGEEATVKAVIACILYRAMAHEAKESHMVDDASEELKNYSKQFGQLALDLLEKAFKQNERMAMTLLTYELRNWSNSTCLKLAVSGGLRPFVSHTCTQMLLTDMWMGRLKMRKNSWLKIIISIILPPTILTLEFKSKAEMSHVPQSQDFQFMWYYSDQNASSSKESASVKEYDLERGHDEKLDENQHFGLESGHQHLPWTRKVYEFYSAPIVKFWFYTMAYLAFLMLFTYTVLVEMQPQPSVQEWLVSIYIFTNAIEVVREICISEPGKFTQKVKVWISEYWNLTETVAIGLFSAGFVLRWGDPPFHTAGRLIYCIDIIFWFSRLLDFFAVNQHAGPYVTMIAKMTANMFYIVIIMAIVLLSFGVARKAILSPKEPPSWSLARDIVFEPYWMIYGEVYAGEIDVCSSQPSCPPGSFLTPFLQAVYLFVQYIIMVNLLIAFFNNVYLDMESISNNLWKYNRYRYIMTYHEKPWLPPPLILLSHVGLLLRRLCCHRAPHDQEEGDVGLKLYLSKEDLKKLHDFEEQCVEKYFHEKMEDVNCSCEERIRVTSERVTEMYFQLKEMNEKVSFIKDSLLSLDSQVGHLQDLSALTVDTLKVLSAVDTLQEDEALLAKRKHSTCKKLPHSWSNVICAEVLGSMEIAGEKKYQYYSMPSSLLRSLAGGRHPPRVQRGALLEITNSKREATNVRNDQERQETQSSIVVSGVSPNRQAHSKYGQFLLVPSNLKRVPFSAETVLPLSRPSVPDVLATEQDIQTEVLVHLTGQTPVVSDWASVDEPKEKHEPIAHLLDGQDKAEQVLPTLSCTPEPMTMSSPLSQAKIMQTGGGYVNWAFSEGDETGVFSIKKKWQTCLPSTCDSDSSRSEQHQKQAQDSSLSDNSTRSAQSSECSEVGPWLQPNTSFWINPLRRYRPFARSHSFRFHKEEKLMKICKIKNLSGSSEIGQGAWVKAKMLTKDRRLSKKKKNTQGLQVPIITVNACSQSDQLNPEPGENSISEEEYSKNWFTVSKFSHTGVEPYIHQKMKTKEIGQCAIQISDYLKQSQEDLSKNSLWNSRSTNLNRNSLLKSSIGVDKISASLKSPQEPHHHYSAIERNNLMRLSQTIPFTPVQLFAGEEITVYRLEESSPLNLDKSMSSWSQRGRAAMIQVLSREEMDGGLRKAMRVVSTWSEDDILKPGQVFIVKSFLPEVVRTWHKIFQESTVLHLCLREIQQQRAAQKLIYTFNQVKPQTIPYTPRFLEVFLIYCHSANQWLTIEKYMTGEFRKYNNNNGDEITPTNTLEELMLAFSHWTYEYTRGELLVLDLQGVGENLTDPSVIKPEVKQSRGMVFGPANLGEDAIRNFIAKHHCNSCCRKLKLPDLKRNDYSPERINSTFGLEIKIESAEEPPARETGRNSPEDDMQL

SEQ ID NO: 67640 - protein, 2017 aa, Homo sapiens
MTAPVTSQKSWIKGVFDKRECSTIIPSSKNPHRCTPVCQVCQNLIRCYCGRLIGDHAGIDYSWTISAAKGKESEQWSVEKHTTKSPTDTFGTINFQDGEHTHHAKYIRTSYDTKLDHLLHLMLKEWKMELPKLVISVHGGIQNFTMPSKFKEIFSQGLVKAAETTGAWIITEGINTGVSKHVGDALKSHSSHSLRKIWTVGIPPWGVIENQRDLIGKDVVCLYQTLDNPLSKLTTLNSMHSHFILSDDGTVGKYGNEMKLRRNLEKYLSLQKIHCRSRQGVPVVGLVVEGGPNVILSVWETVKDKDPVVVCEGTGRAADLLAFTHKHLADEGMLRPQVKEEIICMIQNTFNFSLKQSKHLFQILMECMVHRDCITIFDADSEEQQDLDLAILTALLKGTNLSASEQLNLAMAWDRVDIAKKHILIYEQHWKPDALEQAMSDALVMDRVDFVKLLIEYGVNLHRFLTIPRLEELYNTKQGPTNTLLHHLVQDVKQHTLLSGYRITLIDIGLVVEYLIGRAYRSNYTRKHFRALYNNLYRKYKHQRHSSGNRNESAESTLHSQFIRTAQPYKFKEKSIVLHKSRKKSKEQNVSDDPESTGFLYPYNDLLVWAVLMKRQKMAMFFWQHGEEATVKAVIACILYRAMAHEAKESHMVDDASEELKNYSKQFGQLALDLLEKAFKQNERMAMTLLTYELRNWSNSTCLKLAVSGGLRPFVSHTCTQMLLTDMWMGRLKMRKNSWLKIIISIILPPTILTLEFKSKAEMSHVPQSQDFQFMWYYSDQNASSSKESASVKEYDLERGHDEKLDENQHFGLESGHQHLPWTRKVYEFYSAPIVKFWFYTMAYLAFLMLFTYTVLVEMQPQPSVQEWLVSIYIFTNAIEVVREICISEPGKFTQKVKVWISEYWNLTETVAIGLFSAGFVLRWGDPPFHTAGRLIYCIDIIFWFSRLLDFFAVNQHAGPYVTMIAKMTANMFYIVIIMAIVLLSFGVARKAILSPKEPPSWSLARDIVFEPYWMIYGEVYAGEIDVCSSQPSCPPGSFLTPFLQAVYLFVQYIIMVNLLIAFFNNVYLDMESISNNLWKYNRYRYIMTYHEKPWLPPPLILLSHVGLLLRRLCCHRAPHDQEEGDVGLKLYLSKEDLKKLHDFEEQCVEKYFHEKMEDVNCSCEERIRVTSERVTEMYFQLKEMNEKVSFIKDSLLSLDSQVGHLQDLSALTVDTLKVLSAVDTLQEDEALLAKRKHSTCKKLPHSWSNVICAEVLGSMEIAGEKKYQYYSMPSSLLRSLAGGRHPPRVQRGALLEITNSKREATNVRNDQERQETQSSIVVSGVSPNRQAHSKYGQFLLVPSNLKRVPFSAETVLPLSRPSVPDVLATEQDIQTEVLVHLTGQTPVVSDWASVDEPKEKHEPIAHLLDGQDKAEQVLPTLSCTPEPMTMSSPLSQAKIMQTGGGYVNWAFSEGDETGVFSIKKKWQTCLPSTCDSDSSRSEQHQKQAQDSSLSDNSTRSAQSSECSEVGPWLQPNTSFWINPLRRYRPFARSHSFRFHKEEKLMKICKIKNLSGSSEIGQGAWVKAKMLTKDRRLSKKKKNTQGLQVPIITVNACSQSDQLNPEPGENSISEEEYSKNWFTVSKFSHTGVEPYIHQKMKTKEIGQCAIQISDYLKQSQEDLSKNSLWNSRSTNLNRNSLLKSSIGVDKISASLKSPQEPHHHYSAIERNNLMRLSQTIPFTPVQLFAGEEITVYRLEESSPLNLDKSMSSWSQRGRAAMIQVLSREEMDGGLRKAMRVVSTWSEDDILKPGQVFIVKSFLPEVVRTWHKIFQESTVLHLCLREIQQQRAAQKLIYTFNQVKPQTIPYTPRFLEVFLIYCHSANQWLTIEKYMTGEFRKYNNNNGDEITPTNTLEELMLAFSHWTYEYTRGELLVLDLQGVGENLTDPSVIKPEVKQSRGMVFGPANLGEDAIRNFIAKHHCNSCCRKLKLPDLKRNDYSPERINSTFGLEIKIESAEEPPARETGRNSPEDDMQL

SEQ ID NO: 67641 - protein, 1947 aa, Homo sapiens
MKEQPVLERLQSQKSWIKGVFDKRECSTIIPSSKNPHRCTPVCQVCQNLIRCYCGRLIGDHAGIDYSWTISAAKGKESEQWSVEKHTTKSPTDTFGTINFQDGEHTHHAKYIRTSYDTKLDHLLHLMLKEWKMELPKLVISVHGGIQNFTMPSKFKEIFSQGLVKAAETTGAWIITEGINTGVSKHVGDALKSHSSHSLRKIWTVGIPPWGVIENQRDLIGKDVVCLYQTLDNPLSKLTTLNSMHSHFILSDDGTVGKYGNEMKLRRNLEKYLSLQKIHCRSRQGVPVVGLVVEGGPNVILSVWETVKDKDPVVVCEGTGRAADLLAFTHKHLADEGMLRPQVKEEIICMIQNTFNFSLKQSKHLFQILMECMVHRDCITIFDADSEEQQDLDLAILTALLKGTNLSASEQLNLAMAWDRVDIAKKHILIYEQHWKPDALEQAMSDALVMDRVDFVKLLIEYGVNLHRFLTIPRLEELYNTKQGPTNTLLHHLVQDVKQHTLLSGYRITLIDIGLVVEYLIGRAYRSNYTRKHFRALYNNLYRKYKHQRHSSGNRNESAESTLHSQFIRTAQPYKFKEKSIVLHKSRKKSKEQNVSDDPESTGFLYPYNDLLVWAVLMKRQKMAMFFWQHGEEATVKAVIACILYRAMAHEAKESHMVDDASEELKNYSKQFGQLALDLLEKAFKQNERMAMTLLTYELRNWSNSTCLKLAVSGGLRPFVSHTCTQMLLTDMWMGRLKMRKNSWLKIIISIILPPTILTLEFKSKAEMSHVPQSQDFQFMWYYSDQNASSSKESASVKEYDLERGHDEKLDENQHFGLESGHQHLPWTRKVYEFYSAPIVKFWFYTMAYLAFLMLFTYTVLVEMQPQPSVQEWLVSIYIFTNAIEVVREICISEPGKFTQKVKVWISEYWNLTETVAIGLFSAGFVLRWGDPPFHTAGRLIYCIDIIFWFSRLLDFFAVNQHAGPYVTMIAKMTANMFYIVIIMAIVLLSFGVARKAILSPKEPPSWSLARDIVFEPYWMIYGEVYAGEIDVCSSQPSCPPGSFLTPFLQAVYLFVQYIIMVNLLIAFFNNVYLDMESISNNLWKYNRYRYIMTYHEKPWLPPPLILLSHVGLLLRRLCCHRAPHDQEEGDVGLKLYLSKEDLKKLHDFEEQCVEKYFHEKMEDVNCSCEERIRVTSERVTEMYFQLKEMNEKVSFIKDSLLSLDSQVGHLQDLSALTVDTLKVLSAVDTLQEDEALLAKRKHSTCKKLPHSWSNVICAEVLGSMEIAGEKKYQYYSMPSSLLRSLAGGRHPPRVQRGALLEITNSKREATNVRNDQERQETQSSIVVSGVSPNRQAHSKYGQFLLVPSNLKRVPFSAETVLPLSRPSVPDVLATEQDIQTEVLVHLTGQTPVVSDWASVDEPKEKHEPIAHLLDGQDKAEQVLPTLSCTPEPMTMSSPLSQAKIMQTGGGYVNWAFSEGDETGVFSIKKKWQTCLPSTCDSDSSRSEQHQKQAQDSSLSDNSTRSAQSSECSEVGPWLQPNTSFWINPLRRYRPFARSHSFRFHKEEKLMKICKIKNLSGSSEIGQGAWVKAKMLTKDRRLSKKKKNTQGLQVPIITVNACSQSDQLNPEPGENSISEEEYSKNWFTVSKFSHTGVEPYIHQKMKTKEIGQCAIQISDYLKQSQEDLSKNSLWNSRSTNLNRNSLHVIKMPISSLISEISASLKSPQEPHHHYSAIERNNLMRLSQTIPFTPVQLFAGEEITVYRLEESSPLNLDKSMSSWSQRGRAAMIQVLSREEMDGGLRKAMRVVSTWSEDDILKPGQVFIVKSFLPEVVRTWHKIFQESTVLHLCLREIQQQRAAQKLIYTFNQVKPQTIPYTPRFLEVFLIYCHSANQWLTIEKYMTGEFRKYNNNNGDEITPTNTLEELMLAFSHWTYEYTRGELLVLDLQALWFWDSMLKARLGGWRM

SEQ ID NO: 67642 - protein, 568 aa, Homo sapiens
RESPHPALLQSQKSWIKGVFDKRECSTIIPSSKNPHRCTPVCQVCQNLIRCYCGRLIGDHAGIDYSWTISAAKGKESEQWSVEKHTTKSPTDTFGTINFQDGEHTHHAKYIRTSYDTKLDHLLHLMLKEWKMELPKLVISVHGGIQNFTMPSKFKEIFSQGLVKAAETTGAWIITEGINTGVSKHVGDALKSHSSHSLRKIWTVGIPPWGVIENQRDLIGKDVVCLYQTLDNPLSKLTTLNSMHSHFILSDDGTVGKYGNEMKLRRNLEKYLSLQKIHCPGEEITVYRLEESSPLNLDKSMSSWSQRGRAAMIQVLSREEMDGGLRKAMRVVSTWSEDDILKPGQVFIVKSFLPEVVRTWHKIFQESTVLHLCLREIQQQRAAQKLIYTFNQVKPQTIPYTPRFLEVFLIYCHSANQWLTIEKYMTGEFRKYNNNNGDEITPTNTLEELMLAFSHWTYEYTRGELLVLDLQGVGENLTDPSVIKPEVKQSRGMVFGPANLGEDAIRNFIAKHHCNSCCRKLKLPDLKRNDYSPERINSTFGLEIKIESAEEPPARETGRNSPEDDMQL

SEQ ID NO: 67643 - protein, 859 aa, Homo sapiens
MKEQPVLERLQSQKSWIKGVFDKRECSTIIPSSKNPHRCTPVCQVCQNLIRCYCGRLIGDHAGIDYSWTISAAKGKESEQWSVEKHTTKSPTDTFGTINFQDGEHTHHAKYIRTSYDTKLDHLLHLMLKEWKMELPKLVISVHGGIQNFTMPSKFKEIFSQGLVKAAETTGAWIITEGINTGVSKHVGDALKSHSSHSLRKIWTVGIPPWGVIENQRDLIGKDVVCLYQTLDNPLSKLTTLNSMHSHFILSDDGTVGKYGNEMKLRRNLEKYLSLQKIHCRSRQGVPVVGLVVEGGPNVILSVWETVKDKDPVVVCEGTGRAADLLAFTHKHLADEGMLRPQVKEEIICMIQNTFNFSLKQSKHLFQILMECMVHRDCITIFDADSEEQQDLDLAILTALLKGTNLSASEQLNLAMAWDRVDIAKKHILIYEQHWKPDALEQAMSDALVMDRVDFVKLLIEYGVNLHRFLTIPRLEELYNTKQGPTNTLLHHLVQDVKQDLSKNSLWNSRSTNLNRNSLHVIKMPISSLISEISASLKSPQEPHHHYSAIERNNLMRLSQTIPFTPVQLFAGEEITVYRLEESSPLNLDKSMSSWSQRGRAAMIQVLSREEMDGGLRKAMRVVSTWSEDDILKPGQVFIVKSFLPEVVRTWHKIFQESTVLHLCLREIQQQRAAQKLIYTFNQVKPQTIPYTPRFLEVFLIYCHSANQWLTIEKYMTGEFRKYNNNNGDEITPTNTLEELMLAFSHWTYEYTRGELLVLDLQGVGENLTDPSVIKPEVKQSRGMVFGPANLGEDAIRNFIAKHHCNSCCRKLKLPDLKRNDYSPERINSTFGLEIKIESAEEPPARETGRNSPEDDMQL

SEQ ID NO: 67644 - protein, 977 aa, Homo sapiens
MKEQPVLERLQSQKSWIKGVFDKRECSTIIPSSKNPHRCTPVCQVCQNLIRCYCGRLIGDHAGIDYSWTISAAKGKESEQWSVEKHTTKSPTDTFGTINFQDGEHTHHAKYIRTSYDTKLDHLLHLMLKEWKMELPKLVISVHGGIQNFTMPSKFKEIFSQGLVKAAETTGAWIITEGINTGVSKHVGDALKSHSSHSLRKIWTVGIPPWGVIENQRDLIGKDVVCLYQTLDNPLSKLTTLNSMHSHFILSDDGTVGKYGNEMKLRRNLEKYLSLQKIHCRSRQGVPVVGLVVEGGPNVILSVWETVKDKDPVVVCEGTGRAADLLAFTHKHLADEGMLRPQVKEEIICMIQNTFNFSLKQSKHLFQILMECMVHRDCITIFDADSEEQQDLDLAILTALLKGTNLSASEQLNLAMAWDRVDIAKKHILIYEQHWKPDALEQAMSDALVMDRVDFVKLLIEYGVNLHRFLTIPRLEELYNTKQGPTNTLLHHLVQDVKQHTLLSGYRITLIDIGLVVEYLIGRAYRSNYTRKHFRALYNNLYRKYKIITVNACSQSDQLNPEPGENSISEEEYSKNWFTVSKFSHTGVEPYIHQKMKTKEIGQCAIQISDYLKQSQEDLSKNSLWNSRSTNLNRNSLHVIKMPISSLISEISASLKSPQEPHHHYSAIERNNLMRLSQTIPFTPVQLFAGEEITVYRLEESSPLNLDKSMSSWSQRGRAAMIQVLSREEMDGGLRKAMRVVSTWSEDDILKPGQVFIVKSFLPEVVRTWHKIFQESTVLHLCLREIQQQRAAQKLIYTFNQVKPQTIPYTPRFLEVFLIYCHSANQWLTIEKYMTGEFRKYNNNNGDEITPTNTLEELMLAFSHWTYEYTRGELLVLDLQGVGENLTDPSVIKPEVKQSRGMVFGPANLGEDAIRNFIAKHHCNSCCRKLKLPDLKRNDYSPERINSTFGLEIKIESAEEPPARETGRNSPEDDMQL

SEQ ID NO: 67645 - protein, 1133 aa, Homo sapiens
MLRPQVKEEIICMIQNTFNFSLKQSKHLFQILMECMVHRDCITIFDADSEEQQDLDLAILTALLKGTNLSASEQLNLAMAWDRVDIAKKHILIYEQHWKPDALEQAMSDALVMDRVDFVKLLIEYGVNLHRFLTIPRLEELYNTKQGPTNTLLHHLVQDVKQHTLLSGYRITLIDIGLVVEYLIGRAYRSNYTRKHFRALYNNLYRKYKHQRHSSGNRNESAESTLHSQFIRTAQPYKFKEKSIVLHKSRKKSKEQNVSDDPESTGFLYPYNDLLVWAVLMKRQKMAMFFWQHGEEATVKAVIACILYRAMAHEAKESHMVDDASEELKNYSKQFGQLALDLLEKAFKQNERMAMTLLTYELRNWSNSTCLKLAVSGGLRPFVSHTCTQMLLTDMWMGRLKMRKNSWLKIIISIILPPTILTLEFKSKAEMSHVPQSQDFQFMWYYSDQNASSSKESASVKEYDLERGHDEKLDENQHFGLESGHQHLPWTRKVYEFYSAPIVKFWFYTMAYLAFLMLFTYTVLVEMQPQPSVQEWLVSIYIFTNAIEVVREICISEPGKFTQKVKVWISEYWNLTETVAIGLFSAGFVLRWGDPPFHTAGRLIYCIDIIFWFSRLLDFFAVNQHAGPYVTMIAKMTANMFYIVIIMAIVLLSFGVARKAILSPKEPPSWSLARDIVFEPYWMIYGEVYAGEIDVCSSQPSCPPGSFLTPFLQAVYLFVQYIIMVNLLIAFFNNVYLDMESISNNLWKYNRYRYIMTYHEKPWLPPPLILLSHVGLLLRRLCCHRAPHDQEEGDVGLKLYLSKEDLKKLHDFEEQCVEKYFHEKMEDVNCSCEERIRVTSERVTEMYFQLKEMNEKVSFIKDSLLSLDSQVGHLQDLSALTVDTLKVLSAVDTLQEDEALLAKRKHSTCKKLPHSWSNVICAEVLGSMEIAGEKKYQYYSMPSSLLRSLAGGRHPPRVQRGALLEITNSKREATNVRNDQERQETQSSIVVSGVSPNRQAHSKYGQFLLVPSNLKRVPFSAETVLPLSRPSVPDVLATEQDIQTEVLVHLTGQTPVVSDWASVDEPKEKHEPIAHLLDGQDKAEQVLPTLSCTPEPMTMSSPLSRYRPFARSHSFRFHKEEKLMKICKIKSKE

SEQ ID NO: 67646 - protein, 2017 aa, Homo sapiens
MIILSKSQKSWIKGVFDKRECSTIIPSSKNPHRCTPVCQVCQNLIRCYCGRLIGDHAGIDYSWTISAAKGKESEQWSVEKHTTKSPTDTFGTINFQDGEHTHHAKYIRTSYDTKLDHLLHLMLKEWKMELPKLVISVHGGIQNFTMPSKFKEIFSQGLVKAAETTGAWIITEGINTGVSKHVGDALKSHSSHSLRKIWTVGIPPWGVIENQRDLIGKDVVCLYQTLDNPLSKLTTLNSMHSHFILSDDGTVGKYGNEMKLRRNLEKYLSLQKIHCRSRQGVPVVGLVVEGGPNVILSVWETVKDKDPVVVCEGTGRAADLLAFTHKHLADEGMLRPQVKEEIICMIQNTFNFSLKQSKHLFQILMECMVHRDCITIFDADSEEQQDLDLAILTALLKGTNLSASEQLNLAMAWDRVDIAKKHILIYEQHWKPDALEQAMSDALVMDRVDFVKLLIEYGVNLHRFLTIPRLEELYNTKQGPTNTLLHHLVQDVKQHTLLSGYRITLIDIGLVVEYLIGRAYRSNYTRKHFRALYNNLYRKYKHQRHSSGNRNESAESTLHSQFIRTAQPYKFKEKSIVLHKSRKKSKEQNVSDDPESTGFLYPYNDLLVWAVLMKRQKMAMFFWQHGEEATVKAVIACILYRAMAHEAKESHMVDDASEELKNYSKQFGQLALDLLEKAFKQNERMAMTLLTYELRNWSNSTCLKLAVSGGLRPFVSHTCTQMLLTDMWMGRLKMRKNSWLKIIISIILPPTILTLEFKSKAEMSHVPQSQDFQFMWYYSDQNASSSKESASVKEYDLERGHDEKLDENQHFGLESGHQHLPWTRKVYEFYSAPIVKFWFYTMAYLAFLMLFTYTVLVEMQPQPSVQEWLVSIYIFTNAIEVVREICISEPGKFTQKVKVWISEYWNLTETVAIGLFSAGFVLRWGDPPFHTAGRLIYCIDIIFWFSRLLDFFAVNQHAGPYVTMIAKMTANMFYIVIIMAIVLLSFGVARKAILSPKEPPSWSLARDIVFEPYWMIYGEVYAGEIDVCSSQPSCPPGSFLTPFLQAVYLFVQYIIMVNLLIAFFNNVYLDMESISNNLWKYNRYRYIMTYHEKPWLPPPLILLSHVGLLLRRLCCHRAPHDQEEGDVGLKLYLSKEDLKKLHDFEEQCVEKYFHEKMEDVNCSCEERIRVTSERVTEMYFQLKEMNEKVSFIKDSLLSLDSQVGHLQDLSALTVDTLKVLSAVDTLQEDEALLAKRKHSTCKKLPHSWSNVICAEVLGSMEIAGEKKYQYYSMPSSLLRSLAGGRHPPRVQRGALLEITNSKREATNVRNDQERQETQSSIVVSGVSPNRQAHSKYGQFLLVPSNLKRVPFSAETVLPLSRPSVPDVLATEQDIQTEVLVHLTGQTPVVSDWASVDEPKEKHEPIAHLLDGQDKAEQVLPTLSCTPEPMTMSSPLSQAKIMQTGGGYVNWAFSEGDETGVFSIKKKWQTCLPSTCDSDSSRSEQHQKQAQDSSLSDNSTRSAQSSECSEVGPWLQPNTSFWINPLRRYRPFARSHSFRFHKEEKLMKICKIKNLSGSSEIGQGAWVKAKMLTKDRRLSKKKKNTQGLQVPIITVNACSQSDQLNPEPGENSISEEEYSKNWFTVSKFSHTGVEPYIHQKMKTKEIGQCAIQISDYLKQSQEDLSKNSLWNSRSTNLNRNSLLKSSIGVDKISASLKSPQEPHHHYSAIERNNLMRLSQTIPFTPVQLFAGEEITVYRLEESSPLNLDKSMSSWSQRGRAAMIQVLSREEMDGGLRKAMRVVSTWSEDDILKPGQVFIVKSFLPEVVRTWHKIFQESTVLHLCLREIQQQRAAQKLIYTFNQVKPQTIPYTPRFLEVFLIYCHSANQWLTIEKYMTGEFRKYNNNNGDEITPTNTLEELMLAFSHWTYEYTRGELLVLDLQGVGENLTDPSVIKPEVKQSRGMVFGPANLGEDAIRNFIAKHHCNSCCRKLKLPDLKRNDYSPERINSTFGLEIKIESAEEPPARETGRNSPEDDMQL

SEQ ID NO: 67647 - protein, 2026 aa, Homo sapiens
MKEQPVLERLQSQKSWIKGVFDKRECSTIIPSSKNPHRCTPVCQVCQNLIRCYCGRLIGDHAGIDYSWTISAAKGKESEQWSVEKHTTKSPTDTFGTINFQDGEHTHHAKYIRTSYDTKLDHLLHLMLKEWKMELPKLVISVHGGIQNFTMPSKFKEIFSQGLVKAAETTGAWIITEGINTGVSKHVGDALKSHSSHSLRKIWTVGIPPWGVIENQRDLIGKDVVCLYQTLDNPLSKLTTLNSMHSHFILSDDGTVGKYGNEMKLRRNLEKYLSLQKIHCRSRQGVPVVGLVVEGGPNVILSVWETVKDKDPVVVCEGTGRAADLLAFTHKHLADEGMLRPQVKEEIICMIQNTFNFSLKQSKHLFQILMECMVHRDCITIFDADSEEQQDLDLAILTALLKGTNLSASEQLNLAMAWDRVDIAKKHILIYEQHWKPDALEQAMSDALVMDRVDFVKLLIEYGVNLHRFLTIPRLEELYNTKQGPTNTLLHHLVQDVKQHTLLSGYRITLIDIGLVVEYLIGRAYRSNYTRKHFRALYNNLYRKYKHQRHSSGNRNESAESTLHSQFIRTAQPYKFKEKSIVLHKSRKKSKEQNVSDDPESTGFLYPYNDLLVWAVLMKRQKMAMFFWQHGEEATVKAVIACILYRAMAHEAKESHMVDDASEELKNYSKQFGQLALDLLEKAFKQNERMAMTLLTYELRNWSNSTCLKLAVSGGLRPFVSHTCTQMLLTDMWMGRLKMRKNSWLKIIISIILPPTILTLEFKSKAEMSHVPQSQDFQFMWYYSDQNASSSKESASVKEYDLERGHDEKLDENQHFGLESGHQHLPWTRKVYEFYSAPIVKFWFYTMAYLAFLMLFTYTVLVEMQPQPSVQEWLVSIYIFTNAIEVVREICISEPGKFTQKVKVWISEYWNLTETVAIGLFSAGFVLRWGDPPFHTAGRLIYCIDIIFWFSRLLDFFAVNQHAGPYVTMIAKMTANMFYIVIIMAIVLLSFGVARKAILSPKEPPSWSLARDIVFEPYWMIYGEVYAGEIDVCSSQPSCPPGSFLTPFLQAVYLFVQYIIMVNLLIAFFNNVYLDMESISNNLWKYNRYRYIMTYHEKPWLPPPLILLSHVGLLLRRLCCHRAPHDQEEGDVGLKLYLSKEDLKKLHDFEEQCVEKYFHEKMEDVNCSCEERIRVTSERVTEMYFQLKEMNEKVSFIKDSLLSLDSQVGHLQDLSALTVDTLKVLSAVDTLQEDEALLAKRKHSTCKKLPHSWSNVICAEVLGSMEIAGEKKYQYYSMPSSLLRSLAGGRHPPRVQRGALLEITNSKREATNVRNDQERQETQSSIVVSGVSPNRQAHSKYGQFLLVPSNLKRVPFSAETVLPLSRPSVPDVLATEQDIQTEVLVHLTGQTPVVSDWASVDEPKEKHEPIAHLLDGQDKAEQVLPTLSCTPEPMTMSSPLSQAKIMQTGGGYVNWAFSEGDETGVFSIKKKWQTCLPSTCDSDSSRSEQHQKQAQDSSLSDNSTRSAQSSECSEVGPWLQPNTSFWINPLRRYRPFARSHSFRFHKEEKLMKICKIKNLSGSSEIGQGAWVKAKMLTKDRRLSKKKKNTQGLQVPIITVNACSQSDQLNPEPGENSISEEEYSKNWFTVSKFSHTGVEPYIHQKMKTKEIGQCAIQISDYLKQSQEDLSKNSLWNSRSTNLNRNSLHVIKMPISSLISEISASLKSPQEPHHHYSAIERNNLMRLSQTIPFTPVQLFAGEEITVYRLEESSPLNLDKSMSSWSQRGRAAMIQVLSREEMDGGLRKAMRVVSTWSEDDILKPGQVFIVKSFLPEVVRTWHKIFQESTVLHLCLREIQQQRAAQKLIYTFNQVKPQTIPYTPRFLEVFLIYCHSANQWLTIEKYMTGEFRKYNNNNGDEITPTNTLEELMLAFSHWTYEYTRGELLVLDLQGVGENLTDPSVIKPEVKQSRGMVFGPANLGEDAIRNFIAKHHCNSCCRKLKLPDLKRNDYSPERINSTFGLEIKIESAEEPPARETGRNSPEDDMQL

SEQ ID NO: 67648 - protein, 1865 aa, Homo sapiens
MSQKSWIESTLTKRECVYIIPSSKDPHRCLPGCQICQQLVRCFCGRLVKQHACFTASLAMKYSDVKLGDHFNQAIEEWSVEKHTEQSPTDAYGVINFQGGSHSYRAKYVRLSYDTKPEVILQLLLKEWQMELPKLVISVHGGMQKFELHPRIKQLLGKGLIKAAVTTGAWILTGGVNTGVAKHVGDALKEHASRSSRKICTIGIAPWGVIENRNDLVGRDVVAPYQTLLNPLSKLNVLNNLHSHFILVDDGTVGKYGAEVRLRRELEKTINQQRIHARIGQGVPVVALIFEGGPNVILTVLEYLQESPPVPVVVCEGTGRAADLLAYIHKQTEEGGNLPDAAEPDIISTIKKTFNFGQNEALHLFQTLMECMKRKELITVFHIGSDEHQDIDVAILTALLKGTNASAFDQLILTLAWDRVDIAKNHVFVYGQQWLVGSLEQAMLDALVMDRVAFVKLLIENGVSMHKFLTIPRLEELYNTKQGPTNPMLFHLVRDVKQGNLPPGYKITLIDIGLVIEYLMGGTYRCTYTRKRFRLIYNSLGGNNRRSGRNTSSSTPQLRKSHESFGNRADKKEKMRHNHFIKTAQPYRPKIDTVMEEGKKKRTKDEIVDIDDPETKRFPYPLNELLIWACLMKRQVMARFLWQHGEESMAKALVACKIYRSMAYEAKQSDLVDDTSEELKQYSNDFGQLAVELLEQSFRQDETMAMKLLTYELKNWSNSTCLKLAVSSRLRPFVAHTCTQMLLSDMWMGRLNMRKNSWYKVILSILVPPAILLLEYKTKAEMSHIPQSQDAHQMTMDDSENNFQNITEEIPMEVFKEVRILDSNEGKNEMEIQMKSKKLPITRKFYAFYHAPIVKFWFNTLAYLGFLMLYTFVVLVQMEQLPSVQEWIVIAYIFTYAIEKVREIFMSEAGKVNQKIKVWFSDYFNISDTIAIISFFIGFGLRFGAKWNFANAYDNHVFVAGRLIYCLNIIFWYVRLLDFLAVNQQAGPYVMMIGKMVANMFYIVVIMALVLLSFGVPRKAILYPHEAPSWTLAKDIVFHPYWMIFGEVYAYEIDVCANDSVIPQICGPGTWLTPFLQAVYLFVQYIIMVNLLIAFFNNVYLQVKAISNIVWKYQRYHFIMAYHEKPVLPPPLIILSHIVSLFCCICKRRKKDKTSDGPKLFLTEEDQKKLHDFEEQCVEMYFNEKDDKFHSGSEERIRVTFERVEQMCIQIKEVGDRVNYIKRSLQSLDSQIGHLQDLSALTVDTLKTLTAQKASEASKVHNEITRELSISKHLAQNLIDDGPVRPSVWKKHGVVNTLSSSLPQGDLESNNPFHCNILMKDDKDPQCNIFGQDLPAVPQRKEFNFPEAGSSSGALFPSAVSPPELRQRLHGVELLKIFNKNQKLGSSSTSIPHLSSPPTKFFVSTPSQPSCKSHLETGTKDQETVCSKATEGDNTEFGAFVGHRDSMDLQRFKETSNKIKILSNNNTSENTLKRVSSLAGFTDCHRTSIPVHSKQAEKISRRPSTEDTHEVDSKAALIPDWLQDRPSNREMPSEEGTLNGLTSPFKPAMDTNYYYSAVERNNLMRLSQSIPFTPVPPRGEPVTVYRLEESSPNILNNSMSSWSQLGLCAKIEFLSKEEMGGGLRRAVKVQCTWSEHDILKSGHLYIIKSFLPEVVNTWSSIYKEDTVLHLCLREIQQQRAAQKLTFAFNQMKPKSIPYSPRFLEVFLLYCHSAGQWFAVEECMTGEFRKYNNNNGDEIIPTNTLEEIMLAFSHWTYEYTRGELLVLDLQGVGENLTDPSVIKAEEKRSCDMVFGPANLGEDAIKNFRAKHHCNSCCRKLKLPDLKRNDYTPDKIIFPQDEPSDLNLQPGNSTKESESTNSVRLML

SEQ ID NO: 67649 - protein, 1104 aa, Homo sapiens
MSFRAARLSMRNRRNDTLDSTRTLYSSASRSTDLSYSESDLVNFIQANFKKRECVFFTKDSKATENVCKCGYAQSQHMEGTQINQSEKWNYKKHTKEFPTDAFGDIQFETLGKKGKYIRLSCDTDAEILYELLTQHWHLKTPNLVISVTGGAKNFALKPRMRKIFSRLIYIAQSKGAWILTGGTHYGLMKYIGEVVRDNTISRSSEENIVAIGIAAWGMVSNRDTLIRNCDAEGYFLAQYLMDDFTRDPLYILDNNHTHLLLVDNGCHGHPTVEAKLRNQLEKYISERTIQDSNYGGKIPIVCFAQGGGKETLKAINTSIKNKIPCVVVEGSGQIADVIASLVEVEDALTSSAVKEKLVRFLPRTVSRLPEEETESWIKWLKEILECSHLLTVIKMEEAGDEIVSNAISYALYKAFSTSEQDKDNWNGQLKLLLEWNQLDLANDEIFTNDRRWESADLQEVMFTALIKDRPKFVRLFLENGLNLRKFLTHDVLTELFSNHFSTLVYRNLQIAKNSYNDALLTFVWKLVANFRRGFRKEDRNGRDEMDIELHDVSPITRHPLQALFIWAILQNKKELSKVIWEQTRGCTLAALGASKLLKTLAKVKNDINAAGESEELANEYETRAVELFTECYSSDEDLAEQLLVYSCEAWGGSNCLELAVEATDQHFIAQPGVQNFLSKQWYGEISRDTKNWKIILCLFIIPLVGCGFVSFRKKPVDKHKKLLWYYVAFFTSPFVVFSWNVVFYIAFLLLFAYVLLMDFHSVPHPPELVLYSLVFVLFCDEVRQWYVNGVNYFTDLWNVMDTLGLFYFIAGIVFRLHSSNKSSLYSGRVIFCLDYIIFTLRLIHIFTVSRNLGPKIIMLQRMLIDVFFFLFLFAVWMVAFGVARQGILRQNEQRWRWIFRSVIYEPYLAMFGQVPSDVDGTTYDFAHCTFTGNESKPLCVELDEHNLPRFPEWITIPLVCIYMLSTNILLVNLLVAMFGYTVGTVQENNDQVWKFQRYFLVQEYCSRLNIPFPFIVFAYFYMVVKKCFKCCCKEKNMESSVCCFKNEDNETLAWEGVMKENYLVKINTKANDTSEEMRHRFRQLDTKLNDLKGLLKEIANKIK

SEQ ID NO: 67650 - protein, 192 aa, Homo sapiens
MKSFLPVHTIVLIRENVCKCGYAQSQHMEGTQINQSEKWNYKKHTKEFPTDAFGDIQFETLGKKGKYIRLSCDTDAEILYELLTQHWHLKTPNLVISVTGGAKNFALKPRMRKIFSRLIYIAQSKGAWILTGGTHYGLMKYIGEVVRDNTISRSSEENIVAIGIAAWGMVSNRDTLIRNCDAEVPVGQEEVC

SEQ ID NO: 67651 - protein, 165 aa, Homo sapiens
MEGTQINQSEKWNYKKHTKEFPTDAFGDIQFETLGKKGKYIRLSCDTDAEILYELLTQHWHLKTPNLVISVTGGAKNFALKPRMRKIFSRLIYIAQSKGAWILTGGTHYGLMKYIGEVVRDNTISRSSEENIVAIGIAAWGMVSNRDTLIRNCDAEVPVGQEEVC

SEQ ID NO: 67652 - protein, 682 aa, Homo sapiens
MQAINTSIKNKIPCVVVEGSGQIADVIASLVEVEDALTSSAVKEKLVRFLPRTVSRLPEEETESWIKWLKEILECSHLLTVIKMEEAGDEIVSNAISYALYKAFSTSEQDKDNWNGQLKLLLEWNQLDLANDEIFTNDRRWESADLQEVMFTALIKDRPKFVRLFLENGLNLRKFLTHDVLTELFSNHFSTLVYRNLQIAKNSYNDALLTFVWKLVANFRRGFRKEDRNGRDEMDIELHDVSPITRHPLQALFIWAILQNKKELSKVIWEQTRGCTLAALGASKLLKTLAKVKNDINAAGESEELANEYETRAVELFTECYSSDEDLAEQLLVYSCEAWGGSNCLELAVEATDQHFIAQPGVQWYVNGVNYFTDLWNVMDTLGLFYFIAGIVFRLHSSNKSSLYSGRVIFCLDYIIFTLRLIHIFTVSRNLGPKIIMLQRMLIDVFFFLFLFAVWMVAFGVARQGILRQNEQRWRWIFRSVIYEPYLAMFGQVPSDVDGTTYDFAHCTFTGNESKPLCVELDEHNLPRFPEWITIPLVCIYMLSTNILLVNLLVAMFGYTVGTVQENNDQVWKFQRYFLVQEYCSRLNIPFPFIVFAYFYMVVKKCFKCCCKEKNMESSVCCFKNEDNETLAWEGVMKENYLVKINTKANDTSEEMRHRFRQLDTKLNDLKGLLKEIANKIK

SEQ ID NO: 67653 - protein, 837 aa, Homo sapiens
METLTPGHLQPSPSSPRPRAAPGSLGRVTRRRLSRWIALTRKVSWTPARPSQSALLSPSRGQETAPPVPGCCPRTLSPPAPRRPSGSMIAGVSLKPLLRITARIWRACCSSCRRARSTSQTTSSKVAPALGSGRAPALACPDPPLCLSDPETGKTCLLKAMLNLHDGQNTTIPLLLEIARQTDSLKELVNASYTDSYYKGQTALHIAIERRNMALVTLLVENGADVQAAAHGDFFKKTKGRPGFYFGELPLSLAACTNQLGIVKFLLQNSWQTADISARDSVGNTVLHALVEVADNTADNTKFVTSMYNEILMLGAKLHPTLKLEELTNKKGMTPLALAAGTGKIGVLAYILQREIQEPECRHLSRKFTEWAYGPVHSSLYDLSCIDTCEKNSVLEVIAYSSSETPNRHDMLLVEPLNRLLQDKWDRFVKRIFYFNFLVYCLYMIIFTMAAYYRPVDGLPPFKMEKTGDYFRVTGEILSVLGGVYFFFRGIQYFLQRRPSMKTLFVDSYSEMLFFLQSLFMLATVVLYFSHLKEYVASMVFSLALGWTNMLYYTRGFQQMGIYAVMIEKMILRDLCRFMFVYIVFLFGFSTAVVTLIEDGKNDSLPSESTSHRWRGPACRPPDSSYNSLYSTCLELFKFTIGMGDLEFTENYDFKAVFIILLLAYVILTYILLLNMLIALMGETVNKIAQESKNIWKLQRAITILDTEKSFLKCMRKAFRSGKLLQVGYTPDGKDDYRWCFRVDEVNWTTWNTNVGIINEDPGNCEGVKRTLSFSLRSSRVSGRHWKNFALVPLLREASARDRQSAQPEEVYLRQFSGSLKPEDAEVFKSPAASGEK

SEQ ID NO: 67654 - protein, 779 aa, Homo sapiens
MKKWSSTDLGAAADPLQKDTCPDPLDGDPNSRPPPAKPQLSTAKSRTRLFGKGDSEEAFPVDCPHEEGELDSCPTITVSPVITIQRPGDGPTGARLLSQDSVAASTEKTLRLYDRRSIFEAVAQNNCQDLESLLLFLQKSKKHLTDNEFKDPETGKTCLLKAMLNLHDGQNTTIPLLLEIARQTDSLKELVNASYTDSYYKGQTALHIAIERRNMALVTLLVENGADVQAAAHGDFFKKTKGRPGFYFGELPLSLAACTNQLGIVKFLLQNSWQTADISARDSVGNTVLHALVEVADNTADNTKFVTSMYNEILMLGAKLHPTLKLEELTNKKGMTPLALAAGTGKIGNRHDMLLVEPLNRLLQDKWDRFVKRIFYFNFLVYCLYMIIFTMAAYYRPVDGLPPFKMEKTGDYFRVTGEILSVLGGVYFFFRGIQYFLQRRPSMKTLFVDSYSEMLFFLQSLFMLATVVLYFSHLKEYVASMVFSLALGWTNMLYYTRGFQQMGIYAVMIEKMILRDLCRFMFVYIVFLFGFSTAVVTLIEDGKNDSLPSESTSHRWRGPACRPPDSSYNSLYSTCLELFKFTIGMGDLEFTENYDFKAVFIILLLAYVILTYILLLNMLIALMGETVNKIAQESKNIWKLQRAITILDTEKSFLKCMRKAFRSGKLLQVGYTPDGKDDYRWCFRVDEVNWTTWNTNVGIINEDPGNCEGVKRTLSFSLRSSRVSGRHWKNFALVPLLREASARDRQSAQPEEVYLRQFSGSLKPEDAEVFKSPAASGEK

SEQ ID NO: 67655 - protein, 839 aa, Homo sapiens [sequence omitted]

SEQ ID NO: 67656 - protein, 839 aa, Homo sapiens [sequence omitted]

SEQ ID NO: 67657 - protein, 850 aa, Homo sapiens
MKKWSSTDLGAAADPLQKDTCPDPLDGDPNSRPPPAKPQLSTAKSRTRLFGKGDSEEAFPVDCPHEEGELDSCPTITVSPVITIQRPGDGPTGARLLSQDSVAASTEKTLRLYDRRSIFEAVAQNNCQDLESLLLFLQKSKKHLTDNEFKDPETGKTCLLKAMLNLHDGQNTTIPLLLEIARQTDSLKELVNASYTDSYYKGQTALHIAIERRNMALVTLLVENGADVQAAAHGDFFKKTKGRPGFYFGELPLSLAACTNQLGIVKFLLQNSWQTADISARDSVGNTVLHALVEVADNTADNTKFVTSMYNEILMLGAKLHPTLKLEELTNKKGMTPLALAAGTGKIGVIENGPPLSFMVLAYILQREIQEPECRHLSRKFTEWAYGPVHSSLYDLSCIDTCEKNSVLEVIAYSSSETPNRHDMLLVEPLNRLLQDKWDRFVKRIFYFNFLVYCLYMIIFTMAAYYRPVDGLPPFKMEKTGDYFRVTGEILSVLGGVYFFFRGIQYFLQRRPSMKTLFVDSYSEMLFFLQSLFMLATVVLYFSHLKEYVASMVFSLALGWTNMLYYTRGFQQMGIYAVMIEKMILRDLCRFMFVYIVFLFGFSTAVVTLIEDGKNDSLPSESTSHRWRGPACRPPDSSYNSLYSTCLELFKFTIGMGDLEFTENYDFKAVFIILLLAYVILTYILLLNMLIALMGETVNKIAQESKNIWKLQRAITILDTEKSFLKCMRKAFRSGKLLQVGYTPDGKDDYRWCFRVDEVNWTTWNTNVGIINEDPGNCEGVKRTLSFSLRSSRVSGRHWKNFALVPLLREASARDRQSAQPEEVYLRQFSGSLKPEDAEVFKSPAASGEK

SEQ ID NO: 67658 - protein, 764 aa, Homo sapiens
MTSPSSSPVFRLETLDGGQEDGSEADRGKLDFGSGLPPMESQFQGEDRKFAPQIRVNLNYRKGTGASQPDPNRFDRDRLFNAVSRGVPEDLAGLPEYLSKTSKYLTDSEYTEGSTGKTCLMKAVLNLKDGVNACILPLLQIDRDSGNPQPLVNAQCTDDYYRGHSALHIAIEKRSLQCVKLLVENGANVHARACGRFFQKGQGTCFYFGELPLSLAACTKQWDVVSYLLENPHQPASLQATDSQGNTVLHALVMISDNSAENIALVTSMYDGLLQAGARLCPTVQLEDIRNLQDLTPLKLAAKEGKIEIFRHILQREFSGLSHLSRKFTEWCYGPVRVSLYDLASVDSCEENSVLEIIAFHCKSPHRHRMVVLEPLNKLLQAKWDLLIPKFFLNFLCNLIYMFIFTAVAYHQPTLKKQAAPHLKAEVGNSMLLTGHILILLGGIYLLVGQLWYFWRRHVFIWISFIDSYFEILFLFQALLTVVSQVLCFLAIEWYLPLLVSALVLGWLNLLYYTRGFQHTGIYSVMIQKVILRDLLRFLLIYLVFLFGFAVALVSLSQEAWRPEAPTGPNATESVQPMEGQEDEGNGAQYRGILEASLELFKFTIGMGELAFQEQLHFRGMVLLLLLAYVLLTYILLLNMLIALMSETVNSVATDSWSIWKLQKAISVLEMENGYWWCRKKQRAGVMLTVGTKPDGSPDERWCFRVEEVNWASWEQTLPTLCEDPSGAGVPRTLENPVLASPPKEDEDGASEENYVPVQLLQSN

SEQ ID NO: 67659 - protein, 266 aa, Homo sapiens
  VARIANT 1: note = MOD_RES - Any amino acid
XDFSLGVPSWWCLICFNIGPSVGPSQPDPNRFDRDRLFNAVSRGVPEDLAGLPEYLSKTSKYLTDSEYTEGSTGKTCLMKAVLNLKDGVNACILPLLQIDRDSGNPQPLVNAQCTDDYYRGHSALHIAIEKRSLQCVKLLVENGANVHARACGRFFQKGQGTCFYFGELPLSLAACTKQWDVVSYLLENPHQPASLQATDSQGNTVLHALVMISDNSAENIALVTSMYDGLLQAGARLCPTVQLEDIRNLQDLTPLKLAAKEGKIE

SEQ ID NO: 67660 - protein, 790 aa, Homo sapiens; identical to SEQ ID NO: 67586

SEQ ID NO: 67661 - protein, 791 aa, Homo sapiens
MKAHPKEMVPLMGKRVAAPSGNPAILPEKRPAEITPTKKSAHFFLEIEGFEPNPTVAKTSPPVFSKPMDSNIRQCISGNCDDMDSPQSPQDDVTETPSNPNSPSAQLAKEEQRRKKRRLKKRIFAAVSEGCVEELVELLVELQELCRRRHDEDVPDFLMHKLTASDTGKTCLMKALLNINPNTKEIVRILLAFAEENDILGRFINAEYTEEAYEGQTALNIAIERRQGDIAALLIAAGADVNAHAKGAFFNPKYQHEGFYFGETPLALAACTNQPEIVQLLMEHEQTDITSRDSRGNNILHALVTVAEDFKTQNDFVKRMYDMILLRSGNWELETTRNNDGLTPLQLAAKMGKAEILKYILSREIKEKRLRSLSRKFTDWAYGPVSSSLYDLTNVDTTTDNSVLEITVYNTNIDNRHEMLTLEPLHTLLHMKWKKFAKHMFFLSFCFYFFYNITLTLVSYYRPREEEAIPHPLALTHKMGWLQLLGRMFVLIWAMCISVKEGIAIFLLRPSDLQSILSDAWFHFVFFIQAVLVILSVFLYLFAYKEYLACLVLAMALGWANMLYYTRGFQSMGMYSVMIQKVILHDVLKFLFVYIVFLLGFGVALASLIEKCPKDNKDCSSYGSFSDAVLELFKLTIGLGDLNIQQNSKYPILFLFLLITYVILTFVLLLNMLIALMGETVENVSKESERIWRLQRARTILEFEKMLPEWLRSRFRMGELCKVAEDDFRLCLRINEVKWTEWKTHVSFLNEDPGPVRRTADFNKIQDSSRNNSKTTLNAFEEVEEFPETSV

SEQ ID NO: 67662 - protein, 775 aa, Homo sapiens
MSHHTWPSPALNLDFATYLLRDLGAHFFLEIEGFEPNPTVAKTSPPVFSKPMDSNIRQCISGNCDDMDSPQSPQDDVTETPSNPNSPSAQLAKEEQRRKKRRLKKRIFAAVSEGCVEELVELLVELQELCRRRHDEDVPDFLMHKLTASDTGKTCLMKALLNINPNTKEIVRILLAFAEENDILGRFINAEYTEEAYEGQTALNIAIERRQGDIAALLIAAGADVNAHAKGAFFNPKYQHEGFYFGETPLALAACTNQPEIVQLLMEHEQTDITSRDSRGNNILHALVTVAEDFKTQNDFVKRMYDMILLRSGNWELETTRNNDGLTPLQLAAKMGKAEILKYILSREIKEKRLRSLSRKFTDWAYGPVSSSLYDLTNVDTTTDNSVLEITVYNTNIDNRHEMLTLEPLHTLLHMKWKKFAKHMFFLSFCFYFFYNITLTLVSYYRPREEEAIPHPLALTHKMGWLQLLGRMFVLIWAMCISVKEGIAIFLLRPSDLQSILSDAWFHFVFFIQAVLVILSVFLYLFAYKEYLACLVLAMALGWANMLYYTRGFQSMGMYSVMIQKVILHDVLKFLFVYIVFLLGFGVALASLIEKCPKDNKDCSSYGSFSDAVLELFKLTIGLGDLNIQQNSKYPILFLFLLITYVILTFVLLLNMLIALMGETVENVSKESERIWRLQRARTILEFEKMLPEWLRSRFRMGELCKVAEDDFRLCLRINEVKWTEWKTHVSFLNEDPGPVRRTADFNKIQDSSRNNSKTTLNAFEEVEEFPETSV

SEQ ID NO: 67663 - protein, 871 aa, Homo sapiens
MADSSEGPRAGPGEVAELPGDESGTPGGEAFPLSSLANLFEGEDGSLSPSPADASRPAGPGDGRPNLRMKFQGAFRKGVPNPIDLLESTLYESSVVPGPKKAPMDSLFDYGTYRHHSSDNKRWRKKIIEKQPQSPKAPAPQPPPILKVFNRPILFDIVSRGSTADLDGLLPFLLTHKKRLTDEEFREPSTGKTCLPKALLNLSNGRNDTIPVLLDIAERTGNMREFINSPFRDIYYRGQTALHIAIERRCKHYVELLVAQGADVHAQARGRFFQPKDEGGYFYFGELPLSLAACTNQPHIVNYLTENPHKKADMRRQDSRGNTVLHALVAIADNTRENTKFVTKMYDLLLLKCARLFPDSNLEAVLNNDGLSPLMMAAKTGKIGIFQHIIRREVTDEDTRHLSRKFKDWAYGPVYSSLYDLSSLDTCGEEASVLEILVYNSKIENRHEMLAVEPINELLRDKWRKFGAVSFYINVVSYLCAMVIFTLTAYYQPLEGTPPYPYRTTVDYLRLAGEVITLFTGVLFFFTNIKDLFMKKCPGVNSLFIDGSFQLLYFIYSVLVIVSAALYLAGIEAYLAVMVFALVLGWMNALYFTRGLKLTGTYSIMIQKILFKDLFRFLLVYLLFMIGYASALVSLLNPCANMKVCNEDQTNCTVPTYPSCRDSETFSTFLLDLFKLTIGMGDLEMLSSTKYPVVFIILLVTYIILTFVLLLNMLIALMGETVGQVSKESKHIWKLQWATTILDIERSFPVFLRKAFRSGEMVTVGKSSDGTPDRRWCFRVDEVNWSHWNQNLGIINEDPGKNETYQYYGFSHTVGRLRRDRWSSVVPRVVELNKNSNPDEVVVPLDSMGNPRCDGHQQGYPRKWRTDDAPL

SEQ ID NO: 67664 - protein, 811 aa, Homo sapiens
MADSSEGPRAGPGEVAELPGDESGTPGGEAFPLSSLANLFEGEDGSLSPSPADASRPAGPGDGRPNLRMKFQGAFRKGVPNPIDLLESTLYESSVVPGPKKAPMDSLFDYGTYRHHSSDNKRWRKKIIEKQPQSPKAPAPQPPPILKVFNRPILFDIVSRGSTADLDGLLPFLLTHKKRLTDEEFREPSTGKTCLPKALLNLSNGRNDTIPVLLDIAERTGNMREFINSPFRDIYYRGQTALHIAIERRCKHYVELLVAQGADVHAQARGRFFQPKDEGGYFYFGELPLSLAACTNQPHIVNYLTENPHKKADMRRQDSRGNTVLHALVAIADNTRENTKFVTKMYDLLLLKCARLFPDSNLEAVLNNDGLSPLMMAAKTGKIGNRHEMLAVEPINELLRDKWRKFGAVSFYINVVSYLCAMVIFTLTAYYQPLEGTPPYPYRTTVDYLRLAGEVITLFTGVLFFFTNIKDLFMKKCPGVNSLFIDGSFQLLYFIYSVLVIVSAALYLAGIEAYLAVMVFALVLGWMNALYFTRGLKLTGTYSIMIQKILFKDLFRFLLVYLLFMIGYASALVSLLNPCANMKVCNEDQTNCTVPTYPSCRDSETFSTFLLDLFKLTIGMGDLEMLSSTKYPVVFIILLVTYIILTFVLLLNMLIALMGETVGQVSKESKHIWKLQWATTILDIERSFPVFLRKAFRSGEMVTVGKSSDGTPDRRWCFRVDEVNWSHWNQNLGIINEDPGKNETYQYYGFSHTVGRLRRDRWSSVVPRVVELNKNSNPDEVVVPLDSMGNPRCDGHQQGYPRKWRTDDAPL

SEQ ID NO: 67665 - protein, 824 aa, Homo sapiens
MADSSEGPRAGPGEVAELPGDESGTPGGEAFPLSSLANLFEGEDGSLSPSPADASRPAGPGDGRPNLRMKFQGAFRKGVPNPIDLLESTLYESSVVPGPKKAPMDSLFDYGTYRHHSSDNKRWRKKIIEKQPQSPKAPAPQPPPILKVFNRPILFDIVSRGSTADLDGLLPFLLTHKKRLTDEEFREPSTGKTCLPKALLNLSNGRNDTIPVLLDIAERTGNMREFINSPFRDIYYRGELPLSLAACTNQPHIVNYLTENPHKKADMRRQDSRGNTVLHALVAIADNTRENTKFVTKMYDLLLLKCARLFPDSNLEAVLNNDGLSPLMMAAKTGKIGIFQHIIRREVTDEDTRHLSRKFKDWAYGPVYSSLYDLSSLDTCGEEASVLEILVYNSKIENRHEMLAVEPINELLRDKWRKFGAVSFYINVVSYLCAMVIFTLTAYYQPLEGTPPYPYRTTVDYLRLAGEVITLFTGVLFFFTNIKDLFMKKCPGVNSLFIDGSFQLLYFIYSVLVIVSAALYLAGIEAYLAVMVFALVLGWMNALYFTRGLKLTGTYSIMIQKILFKDLFRFLLVYLLFMIGYASALVSLLNPCANMKVCNEDQTNCTVPTYPSCRDSETFSTFLLDLFKLTIGMGDLEMLSSTKYPVVFIILLVTYIILTFVLLLNMLIALMGETVGQVSKESKHIWKLQWATTILDIERSFPVFLRKAFRSGEMVTVGKSSDGTPDRRWCFRVDEVNWSHWNQNLGIINEDPGKNETYQYYGFSHTVGRLRRDRWSSVVPRVVELNKNSNPDEVVVPLDSMGNPRCDGHQQGYPRKWRTDDAPL

SEQ ID NO: 67666 - protein, 871 aa, Homo sapiens; identical to SEQ ID NO: 67663

SEQ ID NO: 67667 - protein, 837 aa, Homo sapiens
MADSSEGPRAGPGEVAELPGDESGTPGDGRPNLRMKFQGAFRKGVPNPIDLLESTLYESSVVPGPKKAPMDSLFDYGTYRHHSSDNKRWRKKIIEKQPQSPKAPAPQPPPILKVFNRPILFDIVSRGSTADLDGLLPFLLTHKKRLTDEEFREPSTGKTCLPKALLNLSNGRNDTIPVLLDIAERTGNMREFINSPFRDIYYRGQTALHIAIERRCKHYVELLVAQGADVHAQARGRFFQPKDEGGYFYFGELPLSLAACTNQPHIVNYLTENPHKKADMRRQDSRGNTVLHALVAIADNTRENTKFVTKMYDLLLLKCARLFPDSNLEAVLNNDGLSPLMMAAKTGKIGIFQHIIRREVTDEDTRHLSRKFKDWAYGPVYSSLYDLSSLDTCGEEASVLEILVYNSKIENRHEMLAVEPINELLRDKWRKFGAVSFYINVVSYLCAMVIFTLTAYYQPLEGTPPYPYRTTVDYLRLAGEVITLFTGVLFFFTNIKDLFMKKCPGVNSLFIDGSFQLLYFIYSVLVIVSAALYLAGIEAYLAVMVFALVLGWMNALYFTRGLKLTGTYSIMIQKILFKDLFRFLLVYLLFMIGYASALVSLLNPCANMKVCNEDQTNCTVPTYPSCRDSETFSTFLLDLFKLTIGMGDLEMLSSTKYPVVFIILLVTYIILTFVLLLNMLIALMGETVGQVSKESKHIWKLQWATTILDIERSFPVFLRKAFRSGEMVTVGKSSDGTPDRRWCFRVDEVNWSHWNQNLGIINEDPGKNETYQYYGFSHTVGRLRRDRWSSVVPRVVELNKNSNPDEVVVPLDSMGNPRCDGHQQGYPRKWRTDDAPL

SEQ ID NO: 67668 - protein, 811 aa, Homo sapiens; identical to SEQ ID NO: 67664

SEQ ID NO: 67669 - protein, 824 aa, Homo sapiens; identical to SEQ ID NO: 67665

SEQ ID NO: 67670 - protein, 764 aa, Homo sapiens
MADSSEGPRAGPGEVAELPGDESGTPGGEAFPLSSLANLFEGEDGSLSPSPADASRPAGPGDGRPNLRMKFQGAFRKGVPNPIDLLESTLYESSVVPGPKKAPMDSLFDYGTYRHHSSDNKRWRKKIIEKQPQSPKAPAPQPPPILKVFNRPILFDIVSRGSTADLDGLLPFLLTHKKRLTDEEFREPSTGKTCLPKALLNLSNGRNDTIPVLLDIAERTGNMREFINSPFRDIYYRGELPLSLAACTNQPHIVNYLTENPHKKADMRRQDSRGNTVLHALVAIADNTRENTKFVTKMYDLLLLKCARLFPDSNLEAVLNNDGLSPLMMAAKTGKIGNRHEMLAVEPINELLRDKWRKFGAVSFYINVVSYLCAMVIFTLTAYYQPLEGTPPYPYRTTVDYLRLAGEVITLFTGVLFFFTNIKDLFMKKCPGVNSLFIDGSFQLLYFIYSVLVIVSAALYLAGIEAYLAVMVFALVLGWMNALYFTRGLKLTGTYSIMIQKILFKDLFRFLLVYLLFMIGYASALVSLLNPCANMKVCNEDQTNCTVPTYPSCRDSETFSTFLLDLFKLTIGMGDLEMLSSTKYPVVFIILLVTYIILTFVLLLNMLIALMGETVGQVSKESKHIWKLQWATTILDIERSFPVFLRKAFRSGEMVTVGKSSDGTPDRRWCFRVDEVNWSHWNQNLGIINEDPGKNETYQYYGFSHTVGRLRRDRWSSVVPRVVELNKNSNPDEVVVPLDSMGNPRCDGHQQGYPRKWRTDDAPL

SEQ ID NO: 67671 - protein, 729 aa, Homo sapiens
MGGFLPKAEGPGSQLQKLLPSFLVREQDWDQHLDKLHMLQQKRILESPLLRASKENDLSVLRQLLLDCTCDVRQRGALGETALHIAALYDNLEAALVLMEAAPELVFEPTTCEAFAGQTALHIAVVNQNVNLVRALLTRRASVSARATGTAFRRSPRNLIYFGEHPLSFAACVNSEEIVRLLIEHGADIRAQDSLGNTVLHILILQPNKTFACQMYNLLLSYDGHGDHLQPLDLVPNHQGLTPFKLAGVEGNTVMFQHLMQKRRHIQWTYGPLTSILYDLTEIDSWGEELSFLELVVSSDKREARQILEQTPVKELVSFKWNKYGRPYFCILAALYLLYMICFTTCCVYRPLKFRGGNRTHSRDITILQQKLLQEAYETREDIIRLVGELVSIVGAVIILLLEIPDIFRVGASRYFGKTILGGPFHVIIITYASLVLVTMVMRLTNTNGEVVPMSFALVLGWCSVMYFTRGFQMLGPFTIMIQKMIFGDLMRFCWLMAVVILGFASAFYIIFQTEDPTSLGQFYDYPMALFTTFELFLTVIDAPANYDVDLPFMFSIVNFAFAIIATLLMLNLFIAMMGDTHWRVAQERDELWRAQVVATTVMLERKLPRCLWPRSGICGCEFGLGDRWFLRVENHNDQNPLRVLRYVEVFKNSDKEDDQEHPSEKQPSGAESGTLARASLALPTSSLSRTASQSSSHRGWEILRQNTLGHLNLGLNLSEGDGEEVYHF

SEQ ID NO: 67672 - protein, 381 aa, Homo sapiens [sequence omitted]

SEQ ID NO: 67673 - protein, 557 aa, Homo sapiens
MGLSLPKEKGLILCLWSKFCRWFQDSLGNTVLHILILQPNKTFACQMYNLLLSYDRHGDHLQPLDLVPNHQGLTPFKLAGVEGNTVMFQHLMQKRKHTQWTYGPLTSTLYDLTEIDSSGDEQSLLELIITTKKREARQILDQTPVKELVSLKWKRYGRPYFCMLGAIYLLYIICFTMCCIYRPLKPRTNNRTSPRDNTLLQQKLLQEAYMTPKDDIRLVGELVTVIGAIIILLVEVPDIFRMGVTRFFGQTILGGPFHVLIITYAFMVLVTMVMRLISASGEVVPMSFALVLGWCNVMYFARGFQMLGPFTIMIQKMIFGDLMRFCWLMAVVILGFASAFYIIFQTEDPEELGHFYDYPMALFSTFELFLTIIDGPANYNVDLPFMYSITYAAFAIIATLLMLNLLIAMMGDTHWRVAHERDELWRAQIVATTVMLERKLPRCLWPRSGICGREYGLGDRWFLRVEDRQDLNRQRIQRYAQAFHTRGSEDLDKDSVEKLELGCPFSPHLSLPMPSVSRSTSRSSANWERLRQGTLRRDLRGIINRGLEDGESWEYQI

SEQ ID NO: 67674 - protein, 725 aa, Homo sapiens
MGLSLPKEKGLILCLWSKFCRWFQRRESWAQSRDEQNLLQQKRIWESPLLLAAKDNDVQALNKLLKYEDCKVHQRGAMGETALHIAALYDNLEAAMVLMEAAPELVFEPMTSELYEGQTALHIAVVNQNMNLVRALLARRASVSARATGTAFRRSPCNLIYFGEHPLSFAACVNSEEIVRLLIEHGADIRAQDSLGNTVLHILILQPNKTFACQMYNLLLSYDRHGDHLQPLDLVPNHQGLTPFKLAGVEGNTVMFQHLMQKRKHTQWTYGPLTSTLYDLTEIDSSGDEQSLLELIITTKKREARQILDQTPVKELVSLKWKRYGRPYFCMLGAIYLLYIICFTMCCIYRPLKPRTNNRTSPRDNTLLQQKLLQEAYMTPKDDIRLVGELVTVIGAIIILLVEVPDIFRMGVTRFFGQTILGGPFHVLIITYAFMVLVTMVMRLISASGEVVPMSFALVLGWCNVMYFARGFQMLGPFTIMIQKMIFGDLMRFCWLMAVVILGFASAFYIIFQTEDPEELGHFYDYPMALFSTFELFLTIIDGPANYNVDLPFMYSITYAAFAIIATLLMLNLLIAMMGDTHWRVAHERDELWRAQIVATTVMLERKLPRCLWPRSGICGREYGLGDRWFLRVEDRQDLNRQRIQRYAQAFHTRGSEDLDKDSVEKLELGCPFSPHLSLPMPSVSRSTSRSSANWERLRQGTLRRDLRGIINRGLEDGESWEYQI

SEQ ID NO: 67675 - protein, 55 aa, Homo sapiens
MSTSRKLKSHGMRRSKSRSPHKGVKRGGSKRKYRKGNLKSRKRGDDANRNYRSHL

SEQ ID NO: 67676 - protein, 138 aa, Homo sapiens
MDTQTHSLPITHTQLHSNSQPQSRTCTRHCQTFSQSCRQSHRGSRSQSSSQSPASHRNPTGAHSSSGHQSQSPNTSPPPKRHKKTMNSHHSPMRPTILHCRCPKNRKNLEGKLKKKKMAKRIQQVYKTKTRSSGWKSN

SEQ ID NO: 67677 - protein, 576 aa, Homo sapiens
MAVLFFHTMRYKSQDPRNPHNDRFVLSKGHAAPILYAVWAEAGFLAEAELLNLRKISSDLDGHPVPKQAFTDVATGSLGQGLGAACGMAYTGKYFDKASYRVYCLLGDGELSEGSVWEAMAFASIYKLDNLVAILDINRLGQSDPAPLQHQMDIYQKRCEAFGWHAIIVDGHSVEELCKAFGQAKHQPTAIIAKTFKGRGITGVEDKESWHGKPLPKNMAEQIIQEIYSQIQSKKKILATPPQEDAPSVDIANIRMPSLPSYKVGDKIATRKAYGQALAKLGHASDRIIALDGDTKNSTFSEIFKKEHPDRFIECYIAEQNMVSIAVGCATRNRTVPFCSTFAAFFTRAFDQIRMAAISESNINLCGSHCGVSIGEDGPSQMALEDLAMFRSVPTSTVFYPSDGVATEKAVELAANTKGICFIRTSRPENAIIYNNNEDFQVGQAKVVLKSKDDQVTVIGAGVTLHEALAAAELLKKEKINIRVLDPFTIKPLDRKLILDSARATKGRILTVEDHYYEGGIGEAVSSAVVGEPGITVTHLAVNRVPRSGKPAELLKMFGIDRDAIAQAVRGLITKA

SEQ ID NO: 67678 - protein, 457 aa, Homo sapiens
MAFASIYKLDNLVAILDINRLGQSDPAPLQHQMDIYQKRCEAFGWHAIIVDGHSVEELCKAFGQAKHQPTAIIAKTFKGRGITGVEDKESWHGKPLPKNMAEQIIQEIYSQIQSKKKILATPPQEDAPSVDIANIRMPSLPSYKVGDKIATRKAYGQALAKLGHASDRIIALDGDTKNSTFSEIFKKEHPDRFIECYIAEQNMVSIAVGCATRNRTVPFCSTFAAFFTRAFDQIRMAAISESNINLCGSHCGVSIGEDGPSQMALEDLAMFRSVPTSTVFYPSDGVATEKAVELAANTKGICFIRTSRPENAIIYNNNEDFQVGQAKVVLKSKDDQVTVIGAGVTLHEALAAAELLKKEKINIRVLDPFTIKPLDRKLILDSARATKGRILTVEDHYYEGGIGEAVSSAVVGEPGITVTHLAVNRVPRSGKPAELLKMFGIDRDAIAQAVRGLITKA

SEQ ID NO: 67679 - protein, 623 aa, Homo sapiens
MESYHKPDQQKLQALKDTANRLRISSIQATTAAGSGHPTSCCSAAEIMAVLFFHTMRYKSQDPRNPHNDRFVLSKGHAAPILYAVWAEAGFLAEAELLNLRKISSDLDGHPVPKQAFTDVATGSLGQGLGAACGMAYTGKYFDKASYRVYCLLGDGELSEGSVWEAMAFASIYKLDNLVAILDINRLGQSDPAPLQHQMDIYQKRCEAFGWHAIIVDGHSVEELCKAFGQAKHQPTAIIAKTFKGRGITGVEDKESWHGKPLPKNMAEQIIQEIYSQIQSKKKILATPPQEDAPSVDIANIRMPSLPSYKVGDKIATRKAYGQALAKLGHASDRIIALDGDTKNSTFSEIFKKEHPDRFIECYIAEQNMVSIAVGCATRNRTVPFCSTFAAFFTRAFDQIRMAAISESNINLCGSHCGVSIGEDGPSQMALEDLAMFRSVPTSTVFYPSDGVATEKAVELAANTKGICFIRTSRPENAIIYNNNEDFQVGQAKVVLKSKDDQVTVIGAGVTLHEALAAAELLKKEKINIRVLDPFTIKPLDRKLILDSARATKGRILTVEDHYYEGGIGEAVSSAVVGEPGITVTHLAVNRVPRSGKPAELLKMFGIDRDAIAQAVRGLITKA

SEQ ID NO: 67680 - protein, 623 aa, Homo sapiens; identical to SEQ ID NO: 67679

SEQ ID NO: 67681 - protein, 631 aa, Homo sapiens
MESYHKPDQQKLQALKDTANRLRISSIQATTAAGSGHPTSCCSAAEIMAVLFFHTMRYKSQDPRNPHNDRFVLSKGHAAPILYAVWAEAGFLAEAELLNLRKISSDLDGHPVPKQAFTDVATGSLGQGLGAACGMAYTGKYFDKASLPSSWDYSYRVYCLLGDGELSEGSVWEAMAFASIYKLDNLVAILDINRLGQSDPAPLQHQMDIYQKRCEAFGWHAIIVDGHSVEELCKAFGQAKHQPTAIIAKTFKGRGITGVEDKESWHGKPLPKNMAEQIIQEIYSQIQSKKKILATPPQEDAPSVDIANIRMPSLPSYKVGDKIATRKAYGQALAKLGHASDRIIALDGDTKNSTFSEIFKKEHPDRFIECYIAEQNMVSIAVGCATRNRTVPFCSTFAAFFTRAFDQIRMAAISESNINLCGSHCGVSIGEDGPSQMALEDLAMFRSVPTSTVFYPSDGVATEKAVELAANTKGICFIRTSRPENAIIYNNNEDFQVGQAKVVLKSKDDQVTVIGAGVTLHEALAAAELLKKEKINIRVLDPFTIKPLDRKLILDSARATKGRILTVEDHYYEGGIGEAVSSAVVGEPGITVTHLAVNRVPRSGKPAELLKMFGIDRDAIAQAVRGLITKA

SEQ ID NO: 67682 - protein, 336 aa, Homo sapiens
MSVLFFYIMRYKQSDPENPDNDRFVLAKIATRKACGLALAKLGYANNRVVVLDGDTRYSTFSEIFNKEYPERFIECFMAEQNMVSVALGCASRGRTIAFASTFAAFLTRAFDHIRIGGLAESNINIIGSHCGVSVGDDGASQMALEDIAMFRTIPKCTIFYPTDAVSTEHAVALAANAKGMCFIRTTRPETMVIYTPQERFEIGQAKVLRHCVSDKVTVIGAGITVYEALAAADELSKQDIFIRVIDLFTIKPLDVATIVSSAKATEGRIITVEDHYPQGGIGEAVCAAVSMDPDIQVHSLAVSGVPQSGKSEELLDMYGISARHIIVAVKCMLLN

SEQ ID NO: 67683 - protein, 596 aa, Homo sapiens
MADAEARAEFPEEARPDRGTLQVLQDMASRLRIHSIRATCSTSSGHPTSCSSSSEIMSVLFFYIMRYKQSDPENPDNDRFVLAKRLSFVDVATGWLGQGLGVACGMAYTGKYFDRASYRVFCLMSDGESSEGSVWEAMAFASYYSLDNLVAIFDVNRLGHSGALPAEHCINIYQRRCEAFGWNTYVVDGRDVEALCQVFWQASQVKHKPTAVVAKTFKGRGTPSIEDAESWHAKPMPRERADAIIKLIESQIQTSRNLDPQPPIEDSPEVNITDVRMTSPPDYRVGDKIATRKACGLALAKLGYANNRVVVLDGDTRYSTFSEIFNKEYPERFIECFMAEQNMVSVALGCASRGRTIAFASTFAAFLTRAFDHIRIGGLAESNINIIGSHCGVSVGDDGASQMALEDIAMFRTIPKCTIFYPTDAVSTEHAVALAANAKGMCFIRTTRPETMVIYTPQERFEIGQAKVLRHCVSDKVTVIGAGITVYEALAAADELSKQDIFIRVIDLFTIKPLDVATIVSSAKATEGRIITVEDHYPQGGIGEAVCAAVSMDPDIQVHSLAVSGVPQSGKSEELLDMYGISARHIIVAVKCMLLN

SEQ ID NO: 67684 - protein, 557 aa, Homo sapiens
MSVLFFYIMRYKQSDPENPDNDRFVLAKRLSFVDVATGWLGQGLGVACGMAYTGKYFDRASYRVFCLMSDGESSEGSVWEAMAFASYYSLDNLVAIFDVNRLGHSGALPAEHCINIYQRRCEAFGWNTYVVDGRDVEALCQVFWQASQVKHKPTAVVAKTFKGRGTPSIEDAESWHAKPMPRERADAIIKLIESQIQTSRNLDPQPPIEDSPEVNITDVRMTSPPDYRVGDKIATRKACGLALAKLGYANNRVVVLDGDTRYSTFSEIFNKEYPERFIECFMAEQNMVSVALGCASRGRTIAFASTFAAFLTRAFDHIRIGGLAESNINIIGSHCGVSVGDDGASQMALEDIAMFRTIPKCTIFYPTDAVSTEHAVALAANAKGMCFIRTTRPETMVIYTPQERFEIGQAKGVSMLQDSWSSVISYQKVLRHCVSDKVTVIGAGITVYEALAAADELSKQDIFIRVIDLFTIKPLDVATIVSSAKATEGRIITVEDHYPQGGIGEAVCAAVSMDPDIQVHSLAVSGVPQSGKSEELLDMYGISARHIIVAVKCMLLN

SEQ ID NO: 67685 - protein, 540 aa, Homo sapiens
MSVLFFYIMRYKQSDPENPDNDRFVLAKRLSFVDVATGWLGQGLGVACGMAYTGKYFDRASYRVFCLMSDGESSEGSVWEAMAFASYYSLDNLVAIFDVNRLGHSGALPAEHCINIYQRRCEAFGWNTYVVDGRDVEALCQVFWQASQVKHKPTAVVAKTFKGRGTPSIEDAESWHAKPMPRERADAIIKLIESQIQTSRNLDPQPPIEDSPEVNITDVRMTSPPDYRVGDKIATRKACGLALAKLGYANNRVVVLDGDTRYSTFSEIFNKEYPERFIECFMAEQNMVSVALGCASRGRTIAFASTFAAFLTRAFDHIRIGGLAESNINIIGSHCGVSVGDDGASQMALEDIAMFRTIPKCTIFYPTDAVSTEHAVALAANAKGMCFIRTTRPETMVIYTPQERFEIGQAKVLRHCVSDKVTVIGAGITVYEALAAADELSKQDIFIRVIDLFTIKPLDVATIVSSAKATEGRIITVEDHYPQGGIGEAVCAAVSMDPDIQVHSLAVSGVPQSGKSEELLDMYGISARHIIVAVKCMLLN

SEQ ID NO: 67686 - protein, 297 aa, Homo sapiens
MSAWAAASLSRAAARCLLARGPGVRAAPPRDPRPSHPEPRGCGAAPGRTLHFTAAVPAGHNKWSKVRHIKGPKDVERSRIFSKLCLNIRLAVKEGGPNPEHNSNLANILEVCRSKHMPKSTIETALKMEKSKDTYLLYEGRGPGGSSLLIEALSNSSHKCQADIRHILNKNGGVMAVGARHSFDKKGVIVVEVEDREKKAVNLERALEMAIEAGAEDVKETEDEEERNVFKFICDASSLHQVRKKLDSLGLCSVSCALEFIPNSKVQLAEPDLEQAAHLIQALSNHEDVIHVYDNIE

SEQ ID NO: 67687 - protein, 228 aa, Homo sapiens
MSVSEIFVELQGFLAAEQDIREEIRKVVQSLEQTAREILTLLQGVHQGAGFQDIPKRCLKAREHFGTVKTHLTSLKTKFPAEQYYRFHEHWRFVLQRLVFLAAFVVYLETETLVTREAVTEILGIEPDREKGFHLDVEDYLSGVLILASELSRLSVNSVTAGDYSRPLHISTFINELDSGFRLLNLKNDSLRKRYDGLKYDVKKVEEVVYDLSIRGFNKETAAACVEK

SEQ ID NO: 67688 - protein, 194 aa, Homo sapiens
MSVSEIFVELQGFLAAEQDIPKRCLKAREHFGTVKTHLTSLKTKFPAEQYYRFHEHWRFVLQRLVFLAAFVVYLETETLVTREAVTEILGIEPDREKGFHLDVEDYLSGVLILASELSRLSVNSVTAGDYSRPLHISTFINELDSGFRLLNLKNDSLRKRYDGLKYDVKKVEEVVYDLSIRGFNKETAAACVEK

SEQ ID NO: 67689 - protein, 148 aa, Homo sapiens
MSVSEIFVELQGFLAAEQDIREEIRKVVQSLEQTAREILTLLQGVHQGAGFQDIPKRCLKAREHFGTVKTHLTSLKTKFPAEQYYRFHEHWRFVLQRLVFLAAFVVYLETETLVTREAVTEILGIEAVCQQRDCWRLLPTPPHLHLHQ

SEQ ID NO: 67690 - protein, 290 aa, Homo sapiens
MSNKEGSGGFRKRKHDNFPHNQRREGKDVNSSSPVMLAFKSFQQELDARHDKYERLVKLSRDITVESKRTIFLLHRITSAPDMEDILTESEIKLDGVRQKIFQVAQELSGEDMHQFHRAITTGLQEYVEAVSFQHFIKTRSLISMDEINKQLIFTTEDNGKENKTPSSDAQDKQFGTWRLRVTPVDYLLGVADLTGELMRMCINSVGNGDIDTPFEVSQFLRQVYDGFSFIGNTGPYEVSKKLYTLKQSLAKVENACYALKVRGSEIPKHMLADVFSVKTEMIDQEEGIS

SEQ ID NO: 67691 - protein, 163 aa, Homo sapiens
MSNKEGSGGFRKRKHDNFPHNQRREGKDVNSSSPVMLAFKSFQQELDARHDKYERLVKLSRDITVESKRTIFLLHRITSSQYLDHSAPDMEDILTESEIKLDGVRQKIFQVAQELSGEDMHQFHRAITTGLQEYVEAVSFQHFIKTRSLISMDEINKQLIFTT

SEQ ID NO: 67692 - protein, 90 aa, Homo sapiens
MDPLRAQQLAAELEVEMMADMYNRMTSACHRKCVPPHYKEAELSKGESVCLDRCVSKYLDIHERMGKKLTELSMQDEELMKRVQQSSGPA

SEQ ID NO: 67693 - protein, 90 aa, Homo sapiens; identical to SEQ ID NO: 67692

SEQ ID NO: 67694 - protein, 90 aa, Homo sapiens; identical to SEQ ID NO: 67692

SEQ ID NO: 67695 - protein, 95 aa, Homo sapiens
MEGGFGSDFGGSGSGKLDPGLIMEQVKVQIAVANAQELLQRMTDKCFRKCIGKPGGSLDNSEQKCIAMCMDRYMDAWNTVSRAYNSRLQRERANM

SEQ ID NO: 67696 - protein, 171 aa, Homo sapiens
MEEYAREPCPWRIVDDCGGAFTMGTIGGGIFQAIKGFRNSPVGVNHRLRGSLTAIKTRAPQLGGSFAVWGGLFSMIDCSMVQVRGKEDPWNSITSGALTGAILAARNGPVAMVGSAAMGGILLALIEGAGILLTRFASAQFPNGPQFAEDPSQLPSTQLPSSPFGDYRQYQ

SEQ ID NO: 67697 - protein, 172 aa, Homo sapiens
MEEYAREPCPWRIVDDCGGAFTMGVIGGGVFQAIKGFRNAPVGIRHRLRGSANAVRIRAPQIGGSFAVWGGLFSTIDCGLVRLRGKEDPWNSITSGALTGAVLAARSGPLAMVGSAMMGGILLALIEGVGILLTRYTAQQFRNAPPFLEDPSQLPPKDGTPAPGYPSYQQYH

SEQ ID NO: 67698 - protein, 222 aa, Homo sapiens
MEEYAREPCPWRIVDDCGGAFTMGVIGGGVFQAIKGFRNAPVCRLLSEAPLFIYSCSRSVSPTVNVSSERAESRPTLFMAVSLHMAWCLAHIGIRHRLRGSANAVRIRAPQIGGSFAVWGGLFSTIDCGLVRLRGKEDPWNSITSGALTGAVLAARSGPLAMVGSAMMGGILLALIEGVGILLTRYTAQQFRNAPPFLEDPSQLPPKDGTPAPGYPSYQQYH

SEQ ID NO: 67699 - protein, 194 aa, Homo sapiens
MAAAAPNAGGSAPETAGSAEAPLQYSLLLQYLVGDKRQPRLLEPGSLGGIPSPAKSEEQKMIEKAMESCAFKAALACVGGFVLGGAFGVFTAGIDTNVGFDPKDPYRTPTAKEVLKDMGQRGMSYAKNFAIVGAMFSCTECLIESYRGTSDWKNSVISGCITGGAIGFRAGLKAGAIGCGGFAAFSAAIDYYLR

SEQ ID NO: 67700 - protein, 209 aa, Homo sapiens
MEGGGGSGNKTTGGLAGFFGAGGAGYSHADLAGVPLTGMNPLSPYLNVDPRYLVQDTDEFILPTGANKTRGRFELAFFTIGGCCMTGAAFGAMNGLRLGLKETQNMAWSKPRNVQILNMVTRQGALWANTLGSLALLYSAFGVIIEKTRGAEDDLNTVAAGTMTGMLYKCTGGLRGIARGGLTGLTLTSLYALYNNWEHMKGSLLQQSL

SEQ ID NO: 67701 - protein, 161 aa, Homo sapiens
MEGGGGSGNKTTGGLAGFFGAGGAGYSHADLAGVPLTGMNPLSPYLNVDPRYLVQDTDEFILPTGANKTRGRFELAFFTIGGCCMTALLYSAFGVIIEKTRGAEDDLNTVAAGTMTGMLYKCTGGLRGIARGGLTGLTLTSLYALYNNWEHMKGSLLQQSL

SEQ ID NO: 67702 - protein, 172 aa, Homo sapiens
MEGGGGSGNKTTGGLAGFFGAGGAGYSHADLAGVPLTGMNPLSPYLNVDPRYLVQDTDEFILPTGANKTRGRFELAFFTIGGCCMTGALWANTLGSLALLYSAFGVIIEKTRGAEDDLNTVAAGTMTGMLYKCTGGLRGIARGGLTGLTLTSLYALYNNWEHMKGSLLQQSL

SEQ ID NO: 67703 - protein, 126 aa, Homo sapiens
MTGAAFGAMNGLRLGLKETQNMAWSKPRNVQILNMVTRQGALWANTLGSLALLYSAFGVIIEKTRGAEDDLNTVAAGTMTGMLYKCTASASQSARIADGLIFTEFCSVARLQGSGTILAHYNLHLP

SEQ ID NO: 67704 - protein, 107 aa, Homo sapiens
  VARIANT 1: note = MOD_RES - Any amino acid
XGGSGNKTTGGLAGFFGAGGAGYSHADLAGVPPLLYSAFGVIIEKTRGAEDDLNTVAAGTMTGMLYKCTGGLRGIARGGLTGLTLTSLYALYNNWEHMKGSLLQQSL

SEQ ID NO: 67705 - protein, 452 aa, Homo sapiens
MAAAALRSGWCRCPRRCLGSGIQFLSSHNLPHGSTYQMRRPGGELPLSKSYSSGNRKGFLSGLLDNVKQELAKNKEMKESIKKFRDEARRLEESDVLQEARRKYKTIESETVRTSEVLRKKLGELTGTVKESLHEVSKSDLGRKIKEGVEEAAKTAKQSAESVSKGGEKLGRTAAFRALSQGVESVKKEIDDSVLGQTGPYRRPQRLRKRTEFAGDKFKEEKVFEPNEEALGVVLHKDSKWYQQWKDFKENNVVFNRFFEMKMKYDESDNAFIRASRALTDKVTDLLGGLFSKTEMSEVLTEILRVDPAFDKDRFLKQCENDIIPNVLEAMISGELDILKDWCYEATYSQLAHPIQQAKALGLQFHSRILDIDNVDLAMGKMMEQGPVLIITFQAQLVMVVRNPKGEVVEGDPDKVLRMLYVWALCRDQDELNPYAAWRLLDISASSTEQIL

SEQ ID NO: 67706 - protein, 97 aa, Homo sapiens
MDSSSSSSAAGLGAVDPQLQHFIEVETQKQRFQQLVHQMTELCWEKCMDKPGPKLDSRAEACFVNCVERFIDTSQFILNRLEQTQKSKPVFSESLSD

SEQ ID NO: 67707 - protein, 89 aa, Homo sapiens
MAAQIPESDQIKQFKEFLGTYNKLTETCFLDCVKDFTTREVKPEETTCSEHCLQKYLKMTQRISMRFQEYHIQQNEALAAKAGLLGQPR

SEQ ID NO: 67708 - protein, 89 aa, Homo sapiens; identical to SEQ ID NO: 67707

SEQ ID NO: 67709 - protein, 44 aa, Homo sapiens
MAAQIPESDQIKQFKEFLGTYNKLTETCFLDCVKDFTTREVKPE

SEQ ID NO: 67710 - protein, 89 aa, Homo sapiens; identical to SEQ ID NO: 67707

SEQ ID NO: 67711 - protein, 89 aa, Homo sapiens; identical to SEQ ID NO: 67707

SEQ ID NO: 67712 - protein, 142 aa, Homo sapiens
MAAAVAAAGAGEPQSPDELLPKGDAEKPEEELEEDDDEELDETLSERLWGLTEMFPERVRSAAGATFDLSLFVAQKMYRFSRAALWIGTTSFMILVLPVVFETEKLQMEQQQQLQQRQILLGPNTGLSGGMPGALPSLPGKI

SEQ ID NO: 67713 - protein, 361 aa, Homo sapiens
MGNVLAASSPPAGPPPPPAPALVGLPPPPPSPPGFTLPPLGGSLGAGTSTSRSSERTPGAATASASGAAEDGACGCLPNPGTFEECHRKCKELFPIQMEGVKLTVNKGLSNHFQVNHTVALSTIGESNYHFGVTYVGTKQLSPTEAFPVLVGDMDNSGSLNAQVIHQLGPGLRSKMAIQTQQSKFVNWQVDGEYRGSDFTAAVTLGNPDVLVGSGILVAHYLQSITPCLALGGELVYHRRPGEEGTVMSLAGKYTLNNWLATVTLGQAGMHATYYHKASDQLQVGVEFEASTRMQDTSVSFGYQLDLPKANLLFKGSVDSNWIVGATLEKKLPPLPLTLALGAFLNHRKNKFQCGFGLTIG

SEQ ID NO: 67714 - protein, 361 aa, Homo sapiens; identical to SEQ ID NO: 67713

SEQ ID NO: 67715 - protein, 361 aa, Homo sapiens; identical to SEQ ID NO: 67713

SEQ ID NO: 67716 - protein, 150 aa, Homo sapiens
MPSSGSVSRSRQRGRSMASRGFDGSRRGSLRRAGAREPPSEVIEAAAQASGSCWSSPFFSASTPSAAATGVPGPTDMAAVLQQVLERTELNKLPKSVQNKLEKFLADQQSEIDGLKGRHEKFKVESEQQYFEIEKRLSHSQERLVNETRE

SEQ ID NO: 67717 - protein, 2363 aa, Homo sapiens
MAAVLQQVLERTELNKLPKSVQNKLEKFLADQQSEIDGLKGRHEKFKVESEQQYFEIEKRLSHSQERLVNETRECQSLRLELEKLNNQLKALTEKNKELEIAQDRNIAIQSQFTRTKEELEAEKRDLIRTNERLSQELEYLTEDVKRLNEKLKESNTTKGELQLKLDELQASDVSVKYREKRLEQEKELLHSQNTWLNTELKTKTDELLALGREKGNEILELKCNLENKKEEVSRLEEQMNGLKTSNEHLQKHVEDLLTKLKEAKEQQASMEEKFHNELNAHIKLSNLYKSAADDSEAKSNELTRAVEELHKLLKEAGEANKAIQDHLLEVEQSKDQMEKEMLEKIGRLEKELENANDLLSATKRKGAILSEEELAAMSPTAAAVAKIVKPGMKLTELYNAYVETQDQLLLEKLENKRINKYLDEIVKEVEAKAPILKRQREEYERAQKAVASLSVKLEQAMKEIQRLQEDTDKANKQSSVLERDNRRMEIQVKDLSQQIRVLLMELEEARGNHVIRDEEVSSADISSSSEVISQHLVSYRNIEELQQQNQRLLVALRELGETREREEQETTSSKITELQLKLESALTELEQLRKSRQHQMQLVDSIVRQRDMYRILLSQTTGVAIPLHASSLDDVSLASTPKRPSTSQTVSTPAPVPVIESTEAIEAKAALKQLQEIFENYKKEKAENEKIQNEQLEKLQEQVTDLRSQNTKISTQLDFASKRYEMLQDNVEGYRREITSLHERNQKLTATTQKQEQIINTMTQDLRGANEKLAVAEVRAENLKKEKEMLKLSEVRLSQQRESLLAEQRGQNLLLTNLQTIQGILERSETETKQRLSSQIEKLEHEISHLKKKLENEVEQRHTLTRNLDVQLLDTKRQLDTETNLHLNTKELLKNAQKEIATLKQHLSNMEVQVASQSSQRTGKGQPSNKEDVDDLVSQLRQTEEQVNDLKERLKTSTSNVEQYQAMVTSLEESLNKEKQVTEEVRKNIEVRLKESAEFQTQLEKKLMEVEKEKQELQDDKRRAIESMEQQLSELKKTLSSVQNEVQEALQRASTALSNEQQARRDCQEQAKIAVEAQNKYERELMLHAADVEALQAAKEQVSKMASVRQHLEETTQKAESQLLECKASWEERERMLKDEVSKCVCRCEDLEKQNRLLHDQIEKLSDKVVASVKEGVQGPLNVSLSEEGKSQEQILEILRFIRREKEIAETRFEVAQVESLRYRQRVELLERELQELQDSLNAEREKVQVTAKTMAQHEELMKKTETMNVVMETNKMLREEKERLEQDLQQMQAKVRKLELDILPLQEANAELSEKSGMLQAEKKLLEEDVKRWKARNQHLVSQQKDPDTEEYRKLLSEKEVHTKRIQQLTEEIGRLKAEIARSNASLTNNQNLIQSLKEDLNKVRTEKETIQKDLDAKIIDIQEKVKTITQVKKIGRRYKTQYEELKAQQDKVMETSAQSSGDHQEQHVSVQEMQELKETLNQAETKSKSLESQVENLQKTLSEKETEARNLQEQTVQLQSELSRLRQDLQDRTTQEEQLRQQITEKEEKTRKAIVAAKSKIAHLAGVKDQLTKENEELKQRNGALDQQKDELDVRITALKSQYEGRISRLERELREHQERHLEQRDEPQEPSNKVPEQQRQITLKTTPASGERGIASTSDPPTANIKPTPVVSTPSKVTAAAMAGNKSTPRASIRPMVTPATVTNPTTTPTATVMPTTQVESQEAMQSEGPVEHVPVFGSTSGSVRSTSPNVQPSISQPILTVQQQTQATAFVQPTQQSHPQIEPANQELSSNIVEVVQSSPVERPSTSTAVFGTVSATPSSSLPKRTREEEEDSTIEASDQVSDDTVEMPLPKKLKSVTPVGTEEEVMAEESTDGEVETQVYNQDSQDSIGEGVTQGDYTPMEDSEETSQSLQIDLGPLQSDQQTTTSSQDGQGKGDDVIVIDSDDEEEDDDENDGEHEDYEEDEEDDDDDEDDTGMGDEGEDSNEGTGSADGNDGYEADDAEGGDGTDPGTETEESMGGGEGNHRAADSQNSGEGNTGAAESSFSQEVSREQQPSSASERQAPRAPQSPRRPPHPLPPRLTIHAPPQELGPPVQRIQMTRRQSVGRGLQLTPGIGGMQQHFFDDEDRTVPSTPTLVVPHRTDGFAEAIHSPQVAGVPRFRFGPPEDMPQTSSSHSDLGQLASQGGLGMYETPLFLAHEEESGGRSVPTTPLQVAAPVTVFTESTTSDASEHASQSVPMVTTSTGTLSTTNETATGDDGDEVFVEAESEGISSEAGLEIDSQQEEEPVQASDESDLPSTSQDPPSSSSVDTSSSQPKPFRRVRLQTTLRQGVRGRQFNRQRGVSHAMGGRGGINRGNIN

SEQ ID NO: 67718 - protein, 150 aa, Homo sapiens; identical to SEQ ID NO: 67716

SEQ ID NO: 67719 - protein, 169 aa, Homo sapiens
MAPPWVPAMGFTLAPSLGCFVGSRFVHGEGLRWYAGLQKPSWHPPHWVLGPVWGTLYSAMGYGSYLVWKELGGFTEKAVVPLGLYTGQLALNWAWPPIFFGARQMGWALVDLLLVSGAAAATTVAWYQVSPLAARLLYPYLAWLAFTTTLNYCVWRDNHGWRGGRRLPE

SEQ ID NO: 67720 - protein, 169 aa, Homo sapiens; identical to SEQ ID NO: 67719

SEQ ID NO: 67721 - protein, 102 aa, Homo sapiens
MAPHLLWCPTNGLGLGGSPAGQWGGGSHYRGLVPGEPAGRPPALPLPGLAGLHDHTQLLRMAGQPWLAWGTAAARVSARPTRDCSCTSRCHHACDVVAVTLS

SEQ ID NO: 67722 - protein, 107 aa, Homo sapiens
MAPPWVPAMGFTLAPSLGCFVGSRFVHGEGLRWYAGLQKPSWHPPHWVLGPVWGTLYSAMGYGSYLVWKELGGFTEKAVVPLGLYTGQLALNWAWPPIFFGARQMGW

SEQ ID NO: 67723 - protein, 202 aa, Homo sapiens
MCYGKCARCIGHSLVGLALLCIAANILLYFPNGETKYASENHLSRFVWFFSGIVGGGLLMLLPAFVFIGLEQDDCCGCCGHENCGKRCAMLSSVLAALIGIAGSGYCVIVAALGLAEGPLCLDSLGQWNYTFASTEGQYLLDTSTWSECTEPKHIVEWNVSLFSILLALGGIEFILCLIQVINGVLGGICGFCCSHQQQYDC

SEQ ID NO: 67724 - protein, 232 aa, Homo sapiens
MCYGKCARCIGHSLVGLALLCIAANILLYFPNGETKYASENHLSRFVWFFSGIVGGGLLMLLPAFVFIGLEQDDCCGCCGHENCGKRCAMLSSVLAALIGIAGSGYCVIVAALGLAEGPLCLDSLGQWNYTFASTEGQYLLDTSTWSECTEPKHIVEWNVSLFSILLALGGIEFILCLIQVINGVLGGICGFCCSHQQQMTAKRTNPGQSHNLPLFHCNLYISLVFICKTLY

SEQ ID NO: 67725 - protein, 202 aa, Homo sapiens
MCTGGCARCLGGTLIPLAFFGFLANILLFFPGGKVIDDNDHLSQEIWFFGGILGSGVLMIFPALVFLGLKNNDCCGCCGNEGCGKRFAMFTSTIFAVVGFLGAGYSFIISAISINKGPKCLMANSTWGYPFHDGDYLNDEALWNKCREPLNVVPWNLTLFSILLVVGGIQMVLCAIQVVNGLLGTLCGDCQCCGCCGGDGPV

SEQ ID NO: 67726 - protein, 197 aa, Homo sapiens
MCTGKCARCVGLSLITLCLVCIVANALLLVPNGETSWTNTNHLSLQVWLMGGFIGGGLMVLCPGIAAVRAGGKGCCGAGCCGNRCRMLRSVFSSAFGVLGAIYCLSVSGAGLRNGPRCLMNGEWGYHFEDTAGAYLLNRTLWDRCEAPPRVVPWNVTLFSLLVAASCLEIVLCGIQLVNATIGVFCGDCRKKQDTPH

SEQ ID NO: 67727 - protein, 145 aa, Homo sapiens
MSASAATGVFVLSLSAIPVTYVFNHLAAQHDSWTIVGVAALILFLVALLARVLVKRKPPRDPLFYVYAVFGFTSVVNLIIGLEQDGIIDGFMTHYLREGEPYLNTAYGHMICYWDGSAHYLMYLVMVAAIAWECWHICSILFLTL

SEQ ID NO: 67728 - protein, 370 aa, Homo sapiens
MSASAATGVFVLSLSAIPVTYVFNHLAAQHDSWTIVGVAALILFLVALLARVLVKRKPPRDPLFYVYAVFGFTSVVNLIIGLEQDGIIDGFMTHYLREGEPYLNTAYGHMICYWDGSAHYLMYLVMVAAIAWEETYRTIGLYWVGSIIMSVVVFVPGNIVGKYGTRICPAFFLSIPYTCLPVWAGFRIYNQPSENYNYPSKVIQEAQAKDLLRRPFDLMLVVCLLLATGFCLFRGLIALDCPSELCRLYTQFQEPYLKDPAAYPKIQMLAYMFYSVPYFVTALYGLVVPGCSWMPDITLIHAGGLAQAQFSHIGASLHARTAYVYRVPEEAKILFLALNIAYGVLPQLLAYRCIYKPEFFIKTKAEEKVE

SEQ ID NO: 67729 - protein, 339 aa, Homo sapiens
MSASAATGVFVLSLSAIPVTYVFNHLAAQHDSWTIVGVAALILFLVALLARVLVKRKPPRDPLFYVYAVFGFTSVVNLIIGLEQDGIIDGFMTHYLREGEPYLNTAYGHMICYWDGSAHYLMYLVMVAAIAWEETYRTIGLYWVGSIIMSVVVFVPGNIVGKYGTRICPAFFLSIPYTCLPVWAGFRIYNQPSENYNYPSKVIQEAQAKDLLRRPFDLMLVVCLLLATGFCLFRGLMLAYMFYSVPYFVTALYGLVVPGCSWMPDITLIHAGGLAQAQFSHIGASLHARTAYVYRVPEEAKILFLALNIAYGVLPQLLAYRCIYKPEFFIKTKAEEKVE

SEQ ID NO: 67730 - protein, 373 aa, Homo sapiens
MSASAATGVFVLSLSAIPVTYVFNHLAAQHDSWTIVGVAALILFLVALLARVLVKRKPPRDPLFYVYAVFGFTSVVNLIIGLEQDGIIDGFMTHYLREGEPYLNTAYGHMICYWDGSAHYLMYLVMVAAIAWDCYRETYRTIGLYWVGSIIMSVVVFVPGNIIGKYGTRICPAFFLSIPYTCLPVWAGFRIYNQPSENYNYPSKVIQEAQAKDLLRRPFDLMLVVCLLLATGFCLFRGLIALDCPSELCRLYTQFQEPYLKDPAAYPKIQMLAYMFYSVPYFVTALYGLVVPGCSWMPDITLIHAGGLAQAQFSHIGASLHARTAYVYRVPEEAKILFLALNIAYGVLPQLLAYRCIYKPEFFIKTKAEEKVE

SEQ ID NO: 67731 - protein, 188 aa, Homo sapiens
MSASAATGVFVLSLSAIPVTYVFNHLAAQHDSWTIVGVAALILFLVALLARVLVKRKPPRDPLFYVYAVFGFTSVVNLIIGLEQDGIIDGFMTHYLREGEPYLNTAYGHMICYWDGSAHYLMYLVMVAAIAWEETYRTIGLYWVGSIIMSVVVFVPGNIVDAGIYVLFCSLLCDCTVWLSGSWMFLDA

SEQ ID NO: 67732 - protein, 339 aa, Homo sapiens; identical to SEQ ID NO: 67729

SEQ ID NO: 67733 - protein, 351 aa, Homo sapiens
MDIPPLAGKIAALSLSALPVSYALNHVSALSHPLWVALMSALILGLLFVAVYSLSHGEVSYDPLYAVFAVFAFTSVVDLIIALQEDSYVVGFMEFYTKEGEPYLRTAHGVFICYWDGTVHYLLYLAMAGAICRRKRYRNFGLYWLGSFAMSILVFLTGNILGKYSSEIRPAFFLTIPYLLVPCWAGMKVFSQPRALTRCTANMVQEEQRKGLLQRPADLALVIYLILAGFFTLFRGLVVLDCPTDACFVYIYQYEPYLRDPVAYPKVQMLMYMFYVLPFCGLAAYALTFPGCSWLPDWALVFAGGIGQAQFSHMGASMHLRTPFTYRCLQWPAFFHQPPPSDPLALHKKQH

SEQ ID NO: 67734 - protein, 377 aa, Homo sapiens
MDIPPLAGKIAALSLSALPVSYALNHVSALSHPLWVALMSALILGLLFVAVYSLSHGEVSYDPLYAVFAVFAFTSVVDLIIALQEDSYVVGFMEFYTKEGEPYLRTAHGVFICYWDGTVHYLLYLAMAGAICRRKRYRNFGLYWLGSFAMSILVFLTGNILGKYSSEIRPAFFLTIPYLLVPCWAGMKVFSQPRALTRCTANMVQEEQRKGLLQRPADLALVIYLILAGFFTLFRGLVVLDCPTDACFVYIYQYEPYLRDPVAYPKVQMLMYMFYVLPFCGLAAYALTFPGCSWLPDWALVFAGGIGQAQFSHMGASMHLRTPFTYRVPEDTWGCFFVCNLLYALGPHLLAYRCLQWPAFFHQPPPSDPLALHKKQH

SEQ ID NO: 67735 - protein, 213 aa, Homo sapiens
MDIPPLAGKIAALSLSALPVSYALNHVSALSHPLWVALMSALILGLLFVAVYSLSHGEVSYDPLYAVFAVFAFTSVVDLIIALQEDSYVVGFMEFYTKEVLGGRPGSPLPHCPSESPTCPHRESHTCAQRTESSSATGMALFTTSSTWPWPAPSAEGAGGRERVAPDPGREVASSDGVPGQGGARSVCRRNQDASLGLQPGVARRRFQGTSQV

SEQ ID NO: 67736 - protein, 418 aa, Homo sapiens
MAPTQGPRAPLEFGGPLGAAALLLLLPATMFHLLLAARSGPARLLGPPASLPGLEVLWSPRALLLWLAWLGLQAALYLLPARKVAEGQELKDKSRLRYPINGFQALVLTALLVGLGMSAGLPLGALPEMLLPLAFVATLTAFIFSLFLYMKAQVAPVSALAPGGNSGNPIYDFFLGRELNPRICFFDFKYFCELRPGLIGWVLINLALLMKEAELRGSPSLAMWLVNGFQLLYVGDALWHEEAVLTTMDITHDGFGFMLAFGDMAWVPFTYSLQAQFLLHHPQPLGLPMASVICLINATGYYIFRGANSQKNTFRKNPSDPRVAGLETISTATGRKLLVSGWWGMVRHPNYLGDLIMALAWSLPCGVSHLLPYFYLLYFTALLVHREARDERQCLQKYGLAWQEYCRRVPYRIMPYIY

SEQ ID NO: 67737 - protein, 391 aa, Homo sapiens
MAPTQGPRAPLEFGGPLGAAALLLLLPATMFHLLLAARSGPARLLGPPASLPGLEVLWSPRALLLWLAWLGLQAALYLLPARKVAEGQELKDKSRLRYPINGFQALVLTALLVGLGMSAGLPLGALPEMLLPLAFVATLTAFIFSLFLYMKAQVAPVSALAPGGNSGNPIYDFFLGRELNPRICFFDFKYFCELRPGLIGWVLINLALLMKEAELRGSPSLAMWLVNGFQLLYVGDALWHEEAVLTTMDITHDGFGFMLAFGDMAWVPFTYSLQAQFLLHHPQPLGLPMASVICLINGLETISTATGRKLLVSGWWGMVRHPNYLGDLIMALAWSLPCGVSHLLPYFYLLYFTALLVHREARDERQCLQKYGLAWQEYCRRVPYRIMPYIY

SEQ ID NO: 67738 - protein, 302 aa, Homo sapiens
MSAGLPLGALPEMLLPLAFVATLTAFIFSLFLYMKAQVAPVSALAPGGNSGNPIYDFFLGRELNPRICFFDFKYFCELRPGLIGWVLINLALLMKEAELRGSPSLAMWLVNGFQLLYVGDALWHEEAVLTTMDITHDGFGFMLAFGDMAWVPFTYSLQAQFLLHHPQPLGLPMASVICLINATGYYIFRGANSQKNTFRKNPSDPRVAGLETISTATGRKLLVSGWWGMVRHPNYLGDLIMALAWSLPCGVSHLLPYFYLLYFTALLVHREARDERQCLQKYGLAWQEYCRRVPYRIMPYIY

SEQ ID NO: 67739 - protein, 570 aa, Homo sapiens
MGFLQLLVVAVLASEHRVAGAAEVFGNSSEGLIEFSVGKFRYFELNRPFPEEAILHDISSNVTFLIFQIHSQYQNTTVSFSPTLLSNSSETGTASGLVFILRPEQSTCTWYLGTSGIQPVQNMAILLSYSERDPVPGGCNLEFDLDIDPNIYLEYNFFETTIKFAPANLGYARGVDPPPCDAGTDQDSRWRLQYDVYQYFLPENDLTEEMLLKHLQRMVSVPQVKASALKVVTLTANDKTSVSFSSLPGQGVIYNVIVWDPFLNTSAAYIPAHTYACSFEAGEGSCASLGRVSSKVFFTLFALLGFFICFFGHRFWKTELFFIGFIIMGFFFYILITRLTPIKYDVNLILTAVTGSVGGMFLVAVWWRFGILSICMLCVGLVLGFLISSVTFFTPLGNLKIFHDDGVFWVTFSCIAILIPVVFMGCLRILNILTCGVIGSYSVVLAIDSYWSTSLSYITLNVLKRALNKDFHRAFTNVPFQTNDFIILAVWGMLAVSGITLQIRRERGRPFFPPHPYKLWKQERERRVTNILDPSYHIPPLRERLYGRLTQIKGLFQKEQPAGERTPLLL

SEQ ID NO: 67740 - protein, 116 aa, Homo sapiens
MGFLQLLVVAVLASEHRVAGAAEVFGNSSEVYLVVGLIEFSVGKFRYFELNRPFPEEAILHDISSNVTFLIFQIHSQYQNTTVSFSPTLLSNSSETGTASGLVFILRPEQSTCTWY

SEQ ID NO: 67741 - protein, 470 aa, Homo sapiens
MGIWTSGTDIFLSLWEIYVSPRSPGWMDFIQHLGVCCLVALISVGLLSVAACWFLPSIIAAAASWIITCVLLCCSKHARCFILLVFLSCGLREGRNALIAAGTGIVILGHVENIFHNFKGLLDGMTCNLRAKSFSIHFPLLKKYIEAIQWIYGLATPLSVFDDLVSWNQTLAVSLFSPSHVLEAQLNDSKGEVLSVLYQMATTTEVLSSLGQKLLAFAGLSLVLLGTGLFMKRFLGPCGWKYENIYITRQFVQFDERERHQQRPCVLPLNKEERRKYVIIPTFWPTPKERKNLGLFFLPILIHLCIWVLFAAVDYLLYRLIFSVSKQFQSLPGFEVHLKLHGEKQGTQDIIHDSSFNISVFEPNCIPKPKFLLSETWVPLSVILLILVMLGLLSSILMQLKILVSASFYPSVERKRIQYLHAKLLKKRSKQPLGEVKRRLSLYLTKIHFWLPVLKMIRKKQMDMASADKS

SEQ ID NO: 67742 - protein, 188 aa, Homo sapiens
MSTMFADTLLIVFISVCTALLAEGITWVLVYRTDKYKRLKAEVEKQSKKLEKKKETITESAGRQQKKKIERQEEKLKNNNRDLSMVRMKSMFAIGFCFTALMGMFNSIFDGRVVAKLPFTPLSYIQGLSHRNLLGDDTTDCSFIFLYILCTMSIRQNIQKILGLAPSRAATKQAGGFLGPPPPSGKFS

SEQ ID NO: 67743 - protein, 169 aa, Homo sapiens
MSTMFADTLLIVFISVCTALLAEGITWVLVYRTDKYKRLKAEVEKQSKKLEKKKETITESAGRQQKVRMKSMFAIGFCFTALMGMFNSIFDGRVVAKLPFTPLSYIQGLSHRNLLGDDTTDCSFIFLYILCTMSIRQNIQKILGLAPSRAATKQAGGFLGPPPPSGKFS

SEQ ID NO: 67744 - protein, 200 aa, Homo sapiens
MMHYVDYSMMYHLIRGQSVIKLYIIYNMLEVADRLFSSFGQDILDALYWTATEPKERKRAHIGFVEIKGSVFKKFEKNNLFQMSNSDIKERFTNYVLLLIVCLRNMEQFSWNPDHLWVLFPDVCMVIASEIAVDIVKHAFITKFNDITADVYSEYRASLAFDLVSSRQKNAYTDYSDSVARRMGFIPLPLAVLVDIPEST

SEQ ID NO: 67745 - protein, 456 aa, Homo sapiens
MVFGIFLCLDAFLYVFTLLPLRVFLALFRLLTLPCYGLRDRRLLQPAQVCDILKGVILVICYFMMHYVDYSMMYHLIRGQSVIKLYIIYNMLEVADRLFSSFGQDILDALYWTATEPKERKRAHIGVIPHFFMAVLYVFLHAILIMVQATTLNVAFNSHNKSLLTIMMSNNFVEIKGSVFKKFEKNNLFQMSNSDIKERFTNYVLLLIVCLRNMEQFSWNPDHLWVLFPDVCMVIASEIAVDIVKHAFITKFNDITADVYSEYRASLAFDLVSSRQKNAYTDYSDSVARRMGFIPLPLAVLLIRVVTSSIKVQGILSYACVILFYFGLISLKVLNSIVLLGKSCQYVKEAKMEEKLSNPPATCTPGKPSSKSQNKCKPSQGLSTEENLSASITKQPIHQKENIIPLLVTSNSDQFLTTPDGDEKDITQDNSELKHRSSKKDLLEIDRFTICGNRID

SEQ ID NO: 67746 - protein, 567 aa, Homo sapiens
MAGVGDAAAPGEGGGGGVDGPQRDGRGEAEQPGGSGGQGPPPAPQLTETLGFYESDRRRERRRGRTELSLLRFLSAELTRGYFLEHNEAKYTERRERVYTCLRIPRELEKLMVFGIFLCLDAFLYVFTLLPLRVFLALFRLLTLPCYGLRDRRLLQPAQVCDILKGVILVICYFMMHYVDYSMMYHLIRGQSVIKLYIIYNMLEVADRLFSSFGQDILDALYWTATEPKERKRAHIGVIPHFFMAVLYVFLHAILIMVQATTLNVAFNSHNKSLLTIMMSNNFVEIKGSVFKKFEKNNLFQMSNSDIKERFTNYVLLLIVCLRNMEQFSWNPDHLWVLFPDVCMVIASEIAVDIVKHAFITKFNDITADVYSEYRASLAFDLVSSRQKNAYTDYSDSVARRMGFIPLPLAVLLIRVVTSSIKVQGILSYACVILFYFGLISLKVLNSIVLLGKSCQYVKEAKMEEKLSNPPATCTPGKPSSKSQNKCKPSQGLSTEENLSASITKQPIHQKENIIPLLVTSNSDQFLTTPDGDEKDITQDNSELKHRSSKKDLLEIDRFTICGNRID

SEQ ID NO: 67747 - protein, 562 aa, Homo sapiens
MAGVGDAAAPGEGGGGGVDGPQRDGRGEAEQPGGSGGQGPPPAPQLTETLGFYESDRRRERRRGRTELSLLRFLSAELTRGYFLEHNEAKYTERRERVYTCLRIPRELEKLMVFGIFLCLDAFLYVFTLLPLRVFLALFRLLTLPCYGLRDRRLLQPAQVCDILKGVILVICYFMMHYVDYSMMYHLIRGQSVIKLYIIYNMLEVADRLFSSFGQDILDALYWTATEPKERKRAHIGVIPHFFMAVLYVFLHAILIMVQATTLNVAFNSHNKSLLTIMMSNNFVEIKGSVFKKFEKNNLFQMSNSDIKERFTNYVLLLIVCLRNMEQFSWNPDHLWVLFPDVCMVIASEIAVDIVKHAFITKFNDITADVYSEYRASLAFDLVSSRQKNAYTDYSDSVARRMGFIPLPLAVLLIRVVTSSIKVQGILSYACVILFYFGLISLKVLNSIVLLGKSCQYVKEAKMEEKLSNPPATCTPGKPSSKSQNKCKPSQGLSTEENLSASITKQPIHQKENIIPLLVTSNSDQFLTTPDGDEKDITQDNSELKHRSSKSVLLCQSGLPEC

SEQ ID NO: 67748 - protein, 760 aa, Homo sapiens
MSPKKVQIKVEEKEDETEESSSEEEEEVEDKLPRRESLRPKRKRTRDVINEDDPEPEPEDEETRKAREKERRRRLKRGAEEEEIDEEELERLKAELDEKRQIIATVKCKPWKMEKKIEVLKEAKKFVSENEGALGKGKGKRWFAFKMMMAKKWAKFLRDFENFKAACVPWENKIKAIESQFGSSVASYFLFLRWMYGVNMVLFILTFSLIMLPEYLWGLPYGSLPRKTVPRAEEASAANFGVLYDFNGLAQYSVLFYGYYDNKRTIGWMNFRLPLSYFLVGIMCIGYSFLVVLKAMTKNIGDDGGGDDNTFNFSWKVFTSWDYLIGNPETADNKFNSITMNFKEAITEEKAAQVEENVHLIRFLRFLANFFVFLTLGGSGYLIFWAVKRSQEFAQQDPDTLGWWEKNEMNMVMSLLGMFCPTLFDLFAELEDYHPLIALKWLLGRIFALLLGNLYVFILALMDEINNKIEEEKLVKANITLWEANMIKAYNASFSENSTGPPFFVHPADVPRGPCWETMVGQEFVRLTVSDVLTTYVTILIGDFLRACFVRFCNYCWCWDLEYGYPSYTEFDISGNVLALIFNQGMIWMGSFFAPSLPGINILRLHTSMYFQCWAVMCCNVPEARVFKASRSNNFYLGMLLLILFLSTMPVLYMIVSLPPSFDCGPFSGKNRMFEVIGETLEHDFPSWMAKILRQLSNPGLVIAVILVMVLAIYYLNATAKGQKAANLDLKKKMKMQALENKMRNKKMAAARAAAAAGRQ

SEQ ID NO: 67749 - protein, 760 aa, Homo sapiens; identical to SEQ ID NO: 67748

SEQ ID NO: 67750 - protein, 740 aa, Homo sapiens
VEWSGECLRSCRREVQIKVEEKEDETEESSSEEEEEVEDKLPRRESLRPKRKRTRDVINEDDPEPEPEDEETRKAREKERRRRLKRGAEAKKFVSENEGALGKGKGKRWFAFKMMMAKKWAKFLRDFENFKAACVPWENKIKAIESQFGSSVASYFLFLRWMYGVNMVLFILTFSLIMLPEYLWGLPYGSLPRKTVPRAEEASAANFGVLYDFNGLAQYSVLFYGYYDNKRTIGWMNFRLPLSYFLVGIMCIGYSFLVVLKAMTKNIGDDGGGDDNTFNFSWKVFTSWDYLIGNPETADNKFNSITMNFKEAITEEKAAQVEENVHLIRFLRFLANFFVFLTLGGSGYLIFWAVKRSQEFAQQDPDTLGWWEKNEMNMVMSLLGMFCPTLFDLFAELEDYHPLIALKWLLGRIFALLLGNLYVFILALMDEINNKIEEEKLVKANITLWEANMIKAYNASFSENSTGPPFFVHPADVPRGPCWETMVGQEFVRLTVSDVLTTYVTILIGDFLRACFVRFCNYCWCWDLEYGYPSYTEFDISGNVLALIFNQGMIWMGSFFAPSLPGINILRLHTSMYFQCWAVMCCNVPEARVFKASRSNNFYLGMLLLILFLSTMPVLYMIVSLPPSFDCGPFSGKNRMFEVIGETLEHDFPSWMAKILRQLSNPGLVIAVILVMVLAIYYLNATAKGQKAANLDLKKKMKMLQLLVASNKYPESPEKVHFALLFKSNAICERPENKHC

SEQ ID NO: 67751 - protein, 760 aa, Homo sapiens; identical to SEQ ID NO: 67748

SEQ ID NO: 67752 - protein, 727 aa, Homo sapiens
VEWSGECLRSCRREVQIKVEEKEDETEESSSEEEEEVEDKLPRRESLRPKRKRTRDVINEDDPEPEPEDEETRKAREKERRRRLKRGAEAKKFVSENEGALGKGKGKRWFAFKMMMAKKWAKFLRDFENFKAACVPWENKIKAIESQFGSSVASYFLFLRWMYGVNMVLFILTFSLIMLPEYLWGLPYGSLPRKTVPRAEEASAANFGVLYDFNGLAQYSVLFYGYYDNKRTIGWMNFRLPLSYFLVGIMCIGYSFLVVLKAMTKNIGDDGGGDDNTFNFSWKVFTSWDYLIGNPETADNKFNSITMNFKEAITEEKAAQVEENVHLIRFLRFLANFFVFLTLGGSGYLIFWAVKRSQEFAQQDPDTLGWWEKNEMNMVMSLLGMFCPTLFDLFAELEDYHPLIALKWLLGRIFALLLGNLYVFILALMDEINNKIEEEKLVKANITLWEANMIKAYNASFSENSTGPPFFVHPADVPRGPCWETMVGQEFVRLTVSDVLTTYVTILIGDFLRACFVRFCNYCWCWDLEYGYPSYTEFDISGNVLALIFNQGMIWMGSFFAPSLPGINILRLHTSMYFQCWAVMCCNVPEARVFKASRSNNFYLGMLLLILFLSTMPVLYMIVSLPPSFDCGPFSGKNRMFEVIGETLEHDFPSWMAKILRQLSNPGLVIAVILVMVLAIYYLNATAKGQKAANLDLKKKMKMQALENKMRNKKMAAARAAAAAGRQ

SEQ ID NO: 67753 - protein, 554 aa, Homo sapiens
VEWSGECLRSCRREVQIKVEEKEDETEESSSEEEEEVEDKLPRRESLRPKRKRTRDVINEDDPEPEPEDEETRKAREKERRRRLKRGAEAKKFVSENEGALGKGKGKRWFAFKMMMAKKWAKFLRDFENFKAACVPWENKIKAIESQFGSSVASYFLFLRWMYGVNMVLFILTFSLIMLPEYLWGLPYGSLPRKTVPRAEEASAANFGVLYDFNGLAQYSVLFYGYYDNKRTIGWMNFRLPLSYFLVGIMCIGYSFLVVLKAMTKNIGDDGGGDDNTFNFSWKVFTSWDYLIGNPETADNKFNSITMNFKEAITEEKAAQVEENVHLIRFLRFLANFFVFLTLGGSGYLIFWAVKRSQEFAQQDPDTLGWWEKNEMNMVMSLLGMFCPTLFDLFAELEDYHPLIALKWLLGRIFALLLGNLYVFILALMDEINNKIEEEKLVKANITLWEANMIKAYNASFSENSTGPPFFVHPADVPRGPCWETMVGQEFVRLTVSDVLTTYVTILIGDFLRACFVRFCNYCWCWDLEYGYPSYTEFDISGNVLALIFNQGMI

SEQ ID NO: 67754 - protein, 754 aa, Homo sapiens
QIKVEEKEDETEESSSEEEEEVEDKLPRRESLRPKRKRTRDVINEDDPEPEPEDEETRKAREKERRRRLKRGAEEEEIDEEELERLKAELDEKRQIIATVKCKPWKMEKKIEVLKEAKKFVSENEGALGKGKGKRWFAFKMMMAKKWAKFLRDFENFKAACVPWENKIKAIESQFGSSVASYFLFLRWMYGVNMVLFILTFSLIMLPEYLWGLPYGSLPRKTVPRAEEASAANFGVLYDFNGLAQYSVLFYGYYDNKRTIGWMNFRLPLSYFLVGIMCIGYSFLVVLKAMTKNIGDDGGGDDNTFNFSWKVFTSWDYLIGNPETADNKFNSITMNFKEAITEEKAAQVEENVHLIRFLRFLANFFVFLTLGGSGYLIFWAVKRSQEFAQQDPDTLGWWEKNEMNMVMSLLGMFCPTLFDLFAELEDYHPLIALKWLLGRIFALLLGNLYVFILALMDEINNKIEEEKLVKANITLWEANMIKAYNASFSENSTGPPFFVHPADVPRGPCWETMVGQEFVRLTVSDVLTTYVTILIGDFLRACFVRFCNYCWCWDLEYGYPSYTEFDISGNVLALIFNQGMIWMGSFFAPSLPGINILRLHTSMYFQCWAVMCCNVPEARVFKASRSNNFYLGMLLLILFLSTMPVLYMIVSLPPSFDCGPFSGKNRMFEVIGETLEHDFPSWMAKILRQLSNPGLVIAVILVMVLAIYYLNATAKGQKAANLDLKKKMKMQALENKMRNKKMAAARADGAAGRA

SEQ ID NO: 67755 - protein, 906 aa, Homo sapiens
MSHQVKGLKEEARGGVKGRVKSGSPHTGDRLGRRSSSKRALKAEGTPGRRGAQRSQKERAGGSPSPGSPRRKQTGRRRHREELGEQERGEAERTCEGRRKRDERASFQERTAAPKREKEIPRREEKSKRQKKPRSSSLASSASGGESLSEEELAQILEQVEEKKKLIATMRSKPWPMAKKLTELREAQEFVEKYEGALGKGKGKQLYAYKMLMAKKWVKFKRDFDNFKTQCIPWEMKIKDIESHFGSSVASYFIFLRWMYGVNLVLFGLIFGLVIIPEVLMGMPYGSIPRKTVPRAEEEKAMDFSVLWDFEGYIKYSALFYGYYNNQRTIGWLRYRLPMAYFMVGVSVFGYSLIIVIRSMASNTQGSTGEGESDNFTFSFKMFTSWDYLIGNSETADNKYASITTSFKESIVDEQESNKEENIHLTRFLRVLANFLIICCLCGSGYLIYFVVKRSQQFSKMQNVSWYERNEVEIVMSLLGMFCPPLFETIAALENYHPRTGLKWQLGRIFALFLGNLYTFLLALMDDVHLKLANEETIKNITHWTLFNYYNSSGWNESVPRPPLHPADVPRGSCWETAVGIEFMRLTVSDMLVTYITILLGDFLRACFVRFMNYCWCWDLEAGFPSYAEFDISGNVLGLIFNQGMIWMGSFYAPGLVGINVLRLLTSMYFQCWAVMSSNVPHERVFKASRSNNFYMGLLLLVLFLSLLPVAYTIMSLPPSFDCGPFSGKNRMYDVLQETIENDFPTFLGKIFAFLANPGLIIPAILLMFLAIYYLNSVSKSLSRANAQLRKKIQVLREVEKSHKSVKGKATARDSEDTPKSSSKNATQLQLTKEETTPPSASQSQAMDKKAQGPGTSNSASRTTLPASGHLPISRPPGIGPDSGHAPSQTHPWRSASGKSAQRPPH

SEQ ID NO: 67756 - protein, 454 aa, Homo sapiens
MAQPLAFILDVPETPGDQGQGPSPYDESEVHDSFQQLIQEQSQCTAQEGLELQQREREVTGSSQQTLWRPEGTQSTATLRILASMPSRTIGRSRGAIISQYYNRTVQLRCRSSRPLLGNFVRSAWPSLRLYDLELDPTALEEEEKQSLLVKELQSLAVAQRDHMLRGMPLSLAEKRSLREKSRTPRGKWRGQPGSGGVCSCCGRLRYACVLALHSLGLALLSALQALMPWRYALKRIGGQFGSSVLSYFLFLKTLLAFNALLLLLLVAFIMGPQVAFPPALPGPAPVCTGLELLTGAGCFTHTVMYYGHYSNATLNQPCGSPLDGSQCTPRVGGLPYNMPLAYLSTVGVSFFITCITLVYSMAHSFGESYRVGSTSGIHAITVFCSWDYKVTQKRASRLQQDNIRTRLKGEDKIFLINKLHSIYERKEREERSRVGTTEEAAAPPALLTDEQDA

SEQ ID NO: 67757 - protein, 805 aa, Homo sapiens
MAQPLAFILDVPETPGDQGQGPSPYDESEVHDSFQQLIQEQSQCTAQEGLELQQREREVTGSSQQTLWRPEGTQSTATLRILASMPSRTIGRSRGAIISQYYNRTVQLRCRSSRPLLGNFVRSAWPSLRLYDLELDPTALEEEEKQSLLVKELQSLAVAQRDHMLRGMPLSLAEKRSLREKSRTPRGKWRGQPGSGGVCSCCGRLRYACVLALHSLGLALLSALQALMPWRYALKRIGGQFGSSVLSYFLFLKTLLAFNALLLLLLVAFIMGPQVAFPPALPGPAPVCTGLELLTGAGCFTHTVMYYGHYSNATLNQPCGSPLDGSQCTPRVGGLPYNMPLAYLSTVGVSFFITCITLVYSMAHSFGESYRVGSTSGIHAITVFCSWDYKVTQKRASRLQQDNIRTRLKELLAEWQLRHSPRSVCGRLRQAAVLGLVWLLCLGTALGCAVAVHVFSEFMIQSPEAAGQEAVLLVLPLVVGLLNLGAPYLCRVLAALEPHDSPVLEVYVAICRNLILKLAILGTLCYHWLGRRVGVLQGQCWEDFVGQELYRFLVMDFVLMLLDTLFGELVWRIISEKKLKRRRKPEFDIARNVLELIYGQTLTWLGVLFSPLLPAVQIIKLLLVFYVKKTSLLANCQAPRRPWLASHMSTVFLTLLCFPAFLGAAVFLCYAVWQVKPSSTCGPFRTLDTMYEAGRVWVRHLEAAGPRVSWLPWVHRYLMENTFFVFLVSALLLAVIYLNIQVVRGQRKVICLLKEQISNEGEDKIFLINKLHSIYERKEREERSRVGTTEEAAAPPALLTDEQDA

SEQ ID NO: 67758 - protein, 384 aa, Homo sapiens
MAHSFGESYRVGSTSGIHAITVFCSWDYKVTQKRASRLQQDNIRTRLKELLAEWQLRHSPRSVCGRLRQAAVLGLVWLLCLGTALGCAVAVHVFSEFMIQSPEAAGQEAVLLVLPLVVGLLNLGAPYLCRVLAALEPHDSPVLEVYVAICRIISEKKLKRRRKPEFDIARNVLELIYGQTLTWLGVLFSPLLPAVQIIKLLLVFYVKKTSLLANCQAPRRPWLASHMSTVFLTLLCFPAFLGAAVFLCYAVWQVKPSSTCGPFRTLDTMYEAGRVWVRHLEAAGPRVSWLPWVHRYLMENTFFVFLVSALLLAVIYLNIQVVRGQRKVICLLKEQISNEGEDKIFLINKLHSIYERKEREERSRVGTTEEAAAPPALLTDEQDA

SEQ ID NO: 67759 - protein, 138 aa, Homo sapiens
QCWEDFVGQELYRFLVMDFVLMLLDTLFGELENRFQSDVFSSRIWAWWRKPEFDIARNVLELIYGQTLTWLGVLFSPLLPAVQIIKLLLVFYVKKTSLLANCQAPRRPWLASHMSTVFLTLLCFPAFLGAAVFLCYAV

SEQ ID NO: 67760 - protein, 805 aa, Homo sapiens; identical to SEQ ID NO: 67757

SEQ ID NO: 67761 - protein, 227 aa, Homo sapiens
MMAAGAALALALWLLMPPVEVGGAGPPPIQDGEFTFLLPAGRKQCFYQSAPANASLETEYQVIGGAGLDVDFTLESPQGVLLVSESRKADGVHTVEPTEAGDYKLCFDNSFSTISEKLVFFELIFDSLQDDEEVEGWAEAVEPEEMLDVKMEDIKESIETMRTRLERSIQMLTLLRAFEARDRNLQEGNLERVNFWSAVNVAVLLLVAVLQVCTLKRFFQDKRPVPT

SEQ ID NO: 67762 - protein, 211 aa, Homo sapiens
MAGVGAGPLRAMGRQALLLLALCATGAQGLYFHIGETEKRCFIEEIPDETMVIGNYRTQGMHVEVKDPDGKVVLSRQYGSEGRFTFTSHTPGDHQICLHSNSTRMALFAGGKLRVHLDIQVGEHANNYPEIAAKDKLTELQLRARQLLDQVEQIQKEQDYQRYREERFRLTSESTNQRVLWWSIAQTVILILTGIWQMRHLKSFFEAKKLV

SEQ ID NO: 67763 - protein, 227 aa, Homo sapiens
MAGVGAGPLRAMGRQALLLLALCATGAQGLYFHIGETEKRCFIEEIPDETMVIGNYRTQMWDKQKEVFLPSTPGLGMHVEVKDPDGKVVLSRQYGSEGRFTFTSHTPGDHQICLHSNSTRMALFAGGKLRVHLDIQVGEHANNYPEIAAKDKLTELQLRARQLLDQVEQIQKEQDYQRYREERFRLTSESTNQRVLWWSIAQTVILILTGIWQMRHLKSFFEAKKLV

SEQ ID NO: 67764 - protein, 219 aa, Homo sapiens
MSGLSGPPARRGPFPLALLLLFLLGPRLVLAISFHLPINSRKCLREEIHKDLLVTGAYEISDQSGGAGGLRSHLKITDSAGHILYSKEDATKGKFAFTTEDYDMFEVCFESKGTGRIPDQLVILDMKHGVEAKNYEEIAKVEKLKPLEVELRRLEDLSESIVNDFAYMKKREEEMRDTNESTNTRVLYFSIFSMFCLIGLATWQVFYLRRFFKAKKLIE

SEQ ID NO: 67765 - protein, 156 aa, Homo sapiens
MAGWPGAGPLCVLGGAALGVCLAGVAGQLVEPSTAPPKPKPPPLTKETVVFWDMRLWHVVGIFSLFVLSIIITLCCVFNCRVPRTRKEIEARYLQRKAAKMYTDKLETVPPLNELTEVPGEDKKKKKKKKKDSVDTVAIKVEEDEKNEAKKKKGEK

SEQ ID NO: 67766 - protein, 533 aa, Homo sapiens
MNESPDPTDLAGVIIELGPNDSPQTSEFKGATEEAPAKESVLARLSKFEVEDAENVASYDSKIKKIVHSIVSSFAFGLFGVFLVLLDVTLILADLIFTDSKLYIPLEYRSISLAIALFFLMDVLLRVFVERRQQYFSDLFNILDTAIIVILLLVDVVYIFFDIKLLRNIPRWTHLLRLLRLIILLRIFHLFHQKRQLEKLIRRRVSENKRRYTRDGFDLDLTYVTERIIAMSFPSSGRQSFYRNPIKEVVRFLDKKHRNHYRVYNLCSERAYDPKHFHNRVVRIMIDDHNVPTLHQMVVFTKEVNEWMAQDLENIVAIHCKGGTDRTGTMVCAFLIASEICSTAKESLYYFGERRTDKTHSEKFQGVKTPSQKRYVAYFAQVKHLYNWNLPPRRILFIKHFIIYSIPRYVRDLKIQIEMEKKVVFSTISLGKCSVLDNITTDKILIDVFDGLPLYDDVKVQFFYSNLPTYYDNCSFYFWLHTSFIENNRLYLPKNELDNLHKQKARRIYPSDFAVEILFGEKMTSSDVVAGSD

SEQ ID NO: 67767 - protein, 513 aa, Homo sapiens
MNESPDPTDLAGVIIELGPNDSPQTSEFKGATEEAPAKESSKIKKIVHSIVSSFAFGLFGVFLVLLDVTLILADLIFTDSKLYIPLEYRSISLAIALFFLMDVLLRVFVERRQQYFSDLFNILDTAIIVILLLVDVVYIFFDIKLLRNIPRWTHLLRLLRLIILLRIFHLFHQKRQLEKLIRRRVSENKRRYTRDGFDLDLTYVTERIIAMSFPSSGRQSFYRNPIKEVVRFLDKKHRNHYRVYNLCSERAYDPKHFHNRVVRIMIDDHNVPTLHQMVVFTKEVNEWMAQDLENIVAIHCKGGTDRTGTMVCAFLIASEICSTAKESLYYFGERRTDKTHSEKFQGVKTPSQKRYVAYFAQVKHLYNWNLPPRRILFIKHFIIYSIPRYVRDLKIQIEMEKKVVFSTISLGKCSVLDNITTDKILIDVFDGLPLYDDVKVQFFYSNLPTYYDNCSFYFWLHTSFIENNRLYLPKNELDNLHKQKARRIYPSDFAVEILFGEKMTSSDVVAGSD

SEQ ID NO: 67768 - protein, 551 aa, Homo sapiens
MNESPDPTDLAGVIIELGPNDSPQTSEFKGATEEAPAKESPHTSEFKGAARVSPISESVLARLSKFEVEDAENVASYDSKIKKIVHSIVSSFAFGLFGVFLVLLDVTLILADLIFTDSKLYIPLEYRSISLAIALFFLMDVLLRVFVERRQQYFSDLFNILDTAIIVILLLVDVVYIFFDIKLLRNIPRWTHLLRLLRLIILLRIFHLFHQKRQLEKLIRRRVSENKRRYTRDGFDLDLTYVTERIIAMSFPSSGRQSFYRNPIKEVVRFLDKKHRNHYRVYNLCSERAYDPKHFHNRVVRIMIDDHNVPTLHQMVVFTKEVNEWMAQDLENIVAIHCKGGTDRTGTMVCAFLIASEICSTAKESLYYFGERRTDKTHSEKFQGVKTPSQKRYVAYFAQVKHLYNWNLPPRRILFIKHFIIYSIPRYVRDLKIQIEMEKKVVFSTISLGKCSVLDNITTDKILIDVFDGLPLYDDVKVQFFYSNLPTYYDNCSFYFWLHTSFIENNRLYLPKNELDNLHKQKARRIYPSDFAVEILFGEKMTSSDVVAGSD

SEQ ID NO: 67769 - protein, 563 aa, Homo sapiens
MERDSHGNASPARTPSAGASPAQASPAGTPPGRASPAQASPAQASPAGTPPGRASPAQASPAGTPPGRASPGRASPAQASPAQASPARASPALASLSRSSSGRSSSARSASVTTSPTRVYLVRATPVGAVPIRSSPARSAPATRATRESPGTSLPKFTWREGQKQLPLIGCVLLLIALVVSLIILFQFWQGHTGIRYKEQRESCPKHAVRCDGVVDCKLKSDELGCVRFDWDKSLLKIYSGSSHQWLPICSSNWNDSYSEKTCQQLGFESAHRTTEVAHRDFANSFSILRYNSTIQESLHRSECPSQRYISLQCSHCGLRAMTGRIVGGALASDSKWPWQVSLHFGTTHICGGTLIDAQWVLTAAHCFFVTREKVLEGWKVYAGTSNLHQLPEAASIAEIIINSNYTDEEDDYDIALMRLSKPLTLSAHIHPACLPMHGQTFSLNETCWITGFGKTRETDDKTSPFLREVQVNLIDFKKCNDYLVYDSYLTPRMMCAGDLRGGRDSCQGDSGGPLVCEQNNRWYLAGVTSWGTGCGQRNKPGVYTKVTEVLPWIYSKMESSAG

SEQ ID NO: 67770 - protein, 397 aa, Homo sapiens
MDPDSDQPLNSLVKVILDKYYFLCGQPLHFIPRKQLCDGELDCPLGEDEEHCVKSFPEGPAVAVRLSKDRSTLQVLDSATGNWFSACFDNFTEALAETACRQMGYSSKPTFRAVEIGPDQDLDVVEITENSQELRMRNSSGPCLSGSLVSLHCLACGKSLKTPRVVGVEEASVDSWPWQVSIQYDKQHVCGGSILDPHWVLTAAHCFRKHTDVFNWKVRAGSDKLGSFPSLAVAKIIIIEFNPMYPKDNDIALMKLQFPLTFSGTVRPICLPFFDEELTPATPLWIIGWGFTKQNGGKMSDILLQASVQVIDSTRCNADDAYQGEVTEKMMCAGIPEGGVDTCQGDSGGPLMYQSDQWHVVGIVSWGYGCGGPSTPGVYTKVSAYLNWIYNVWKAEL

SEQ ID NO: 67771 - protein, 421 aa, Homo sapiens
MMYRTVGFGTRSRNLKPWMIAVLIVLSLTVVAVTIGLLVHFLVFDQKKEYYHGSFKILDPQINNNFGQSNTYQLKDLRETTENLVSQVDEIFIDSAWKKNYIKNQVVRLTPEEDGVKVDVIMVFQFPSTEQRAVREKKIQSILNQKIRNLRALPINASSVQVNAMSSSTGELTVQASCGKRVVPLNVNRIASGVIAPKAAWPWQASLQYDNIHQCGATLISNTWLVTAAHCFQKYKNPHQWTVSFGTKINPPLMKRNVRRFIIHEKYRSAAREYDIAVVQVSSRVTFSDDIRQICLPEASASFQPNLTVHITGFGALYYGGESQNDLREARVKIISDDVCKQPQVYGNDIKPGMFCAGYMEGIYDACRGDSGGPLVTRDLKDTWYLIGIVSWGDNCGQKDKPGVYTQVTYYRNWIASKTGI

SEQ ID NO: 67772 - protein, 418 aa, Homo sapiens
MMYRTVGFGTRSRNLKPWMIAVLIVLSLTVVAVTIGLLVHFLVFDQKKEYYHGSFKILDPQINNNFGQSNTYQLKDLRETTENLVDEIFIDSAWKKNYIKNQVVRLTPEEDGVKVDVIMVFQFPSTEQRAVREKKIQSILNQKIRNLRALPINASSVQVNAMSSSTGELTVQASCGKRVVPLNVNRIASGVIAPKAAWPWQASLQYDNIHQCGATLISNTWLVTAAHCFQKYKNPHQWTVSFGTKINPPLMKRNVRRFIIHEKYRSAAREYDIAVVQVSSRVTFSDDIRQICLPEASASFQPNLTVHITGFGALYYGGESQNDLREARVKIISDDVCKQPQVYGNDIKPGMFCAGYMEGIYDACRGDSGGPLVTRDLKDTWYLIGIVSWGDNCGQKDKPGVYTQVTYYRNWIASKTGI

SEQ ID NO: 67773 - protein, 417 aa, Homo sapiens
MYRTVGFGTRSRNLKPWMIAVLIVLSLTVVAVTIGLLVHFLVFDQKKEYYHGSFKILDPQINNNFGQSNTYQLKDLRETTENLVDEIFIDSAWKKNYIKNQVVRLTPEEDGVKVDVIMVFQFPSTEQRAVREKKIQSILNQKIRNLRALPINASSVQVNAMSSSTGELTVQASCGKRVVPLNVNRIASGVIAPKAAWPWQASLQYDNIHQCGATLISNTWLVTAAHCFQKYKNPHQWTVSFGTKINPPLMKRNVRRFIIHEKYRSAAREYDIAVVQVSSRVTFSDDIRQICLPEASASFQPNLTVHITGFGALYYGGESQNDLREARVKIISDDVCKQPQVYGNDIKPGMFCAGYMEGIYDACRGDSGGPLVTRDLKDTWYLIGIVSWGDNCGQKDKPGVYTQVTYYRNWIASKTGI

SEQ ID NO: 67774 - protein, 562 aa, Homo sapiens
MERDSHGNASPARTPSAGASPAQASPAGTPPGRASPAQASPAQASPAGTPPGRASPAQASPAGTPPGRASPGRASPLQASPARASPALASLSRSSSGRSSSARSASVTTSPTRVYLVRATPVGAVPIRSSPARSAPATRATRESPGTSLPKFTWREGQKQLPLIGCVLLLIALVVSLIILFQFWQGHTGIRYKEQRESCPKHAVRCDGVVDCKLKSDELGCVRFDWDKSLLKIYSGSSHQWLPICSSNWNDSYSEKTCQQLGFESAHRTTEVAHRDFANSFSILRYNSTIQESLHRSECPSQRYISLQCSHCGLRAMTGRIVGGALASDSKWPWQVSLHFGTTHICGGTLIDAQWVLTAAHCFFVTREKVLEGWKVYAGTSNLHQLPEAASIAEIIINSNYTDEEDDYDIALMRLSKPLTLSAHIHPACLPMHGQTFSLNETCWITGFGKTRETDDKTSPFLREVQVNLIDFKKCNDYLVYDSYLTPRMMCAGDLRGGRDSCQGDSGGPLVCEQNNRWYLAGVTSWGTGCGQRNKPGVYTKVTEVLPWIYSKMESEVRFRKS

SEQ ID NO: 67775 - protein, 586 aa, Homo sapiens
MERDSHGNASPARTPSAGASPAQASPAGTPPGRASPAQASPAQASPAGTPPGRASPAQASPAGTPPGRASPGRASPAQASPAQASPARASPALASLSRSSSGRSSSARSASVTTSPTRVYLVRATPVGAVPIRSSPARSAPATRATRESPGTSLPKFTWREGQKQLPLIGCVLLLIALVVSLIILFQFWQGHTGIRYKEQRESCPKHAVRCDGVVDCKLKSDELGCVRFDWDKSLLKIYSGSSHQWLPICSSNWNDSYSEKTCQQLGFESAHRTTEVAHRDFANSFSILRYNSTIQESLHRSECPSQRYISLQCSHCGLRAMTGRIVGGALASDSKWPWQVSLHFGTTHICGGTLIDAQWVLTAAHCFFVTREKVLEGWKVYAGTSNLHQLPEAASIAEIIINSNYTDEEDDYDIALMRLSKPLTLSAHIHPACLPMHGQTFSLNETCWITGFGKTRETDDKTSPFLREVQVNLIDFKKCNDYLVYDSYLTPRMMCAGDLRGGRDSCQGDSGGPLVCEQNNRWYLAGVTSWGTGCGQRNKPGVYTKVTEVLPWIYSKMEVRSLQQDTAPSRLGTSSGGDPGGAPRL

SEQ ID NO: 67776 - protein, 567 aa, Homo sapiens
MERDSHGNASPARTPSAGASPAQASPAGTPPGRASPAQASPAQASPAGTPPGRASPAQASPAGTPPGRASPGRASPAQASPAQASPARASPALASLSRSSSGRSSSARSASVTTSPTRVYLVRATPVGAVPIRSSPARSAPATRATRESPGTSLPKFTWREGQKQLPLIGCVLLLIALVVSLIILFQFWQGHTGIRYKEQRESCPKHAVRCDGVVDCKLKSDELGCVRFDWDKSLLKIYSGSSHQWLPICSSNWNDSYSEKTCQQLGFESAHRTTEVAHRDFANSFSILRYNSTIQESLHRSECPSQRYISLQCSHCGLRAMTGRIVGGALASDSKWPWQVSLHFGTTHICGGTLIDAQWVLTAAHCFFVTREKVLEGWKVYAGTSNLHQLPEAASIAEIIINSNYTDEEDDYDIALMRLSKPLTLSAHIHPACLPMHGQTFSLNETCWITGFGKTRETDDKTSPFLREVQVNLIDFKKCNDYLVYDSYLTPRMMCAGDLRGGRDSCQGDSGGPLVCEQNNRWYLAGVTSWGTGCGQRNKPGVYTKVTEVLPWIYSKMESEVRFRKS

SEQ ID NO: 67777 - protein, 491 aa, Homo sapiens
MERDSHGNASPARTPSAGASPAQASPAGTPPGRASPAQASPAQASPAGTPPGRASPAQASPAGTPPGRASPGRASPAQASPAQASPARASPALASLSRSSSGRSSSARSASVTTSPTRVYLVRATPVGAVPIRSSPARSAPATRATRESPGTSLPKFTWREGQKQLPLIGCVLLLIALVVSLIILFQFWQGHTGIRYKEQRESCPKHAVRCDGVVDCKLKSDELGCVRFDWDKSLLKIYSGSSHQWLPICSSNWNDSYSEKTCQQLGFESAHRTTEVAHRDFANSFSILRYNSTIQESLHRSECPSQRYISLQCSHCGLRAMTGRIVGGALASDSKWPWQVSLHFGTTHICGGTLIDAQWVLTAAHCFFVTREKVLEGWKVYAGTSNLHQLPEAASIAEIIINSNYTDEEDDYDIALMRLSKPLTLSGEGICTPRSPAPQPQHPLQPSHLSASVNSYPGPKASAGQKSKTLKDPYMEHFCFIIRETEAQGL

SEQ ID NO: 67778 - protein, 532 aa, Homo sapiens
MERDSHGNASPARTPSAGASPAQASPAGTPPGRASPAQASPAQASPAGTPPGRASPAQASPAGTPPGRASPGRASPAQASPAQASPARASPALASLSRSSSGRSSSARSASVTTSPTRVYLVRATPVGAVPIRSSPARSAPATRATRESPVQFWQGHTGIRYKEQRESCPKHAVRCDGVVDCKLKSDELGCVRFDWDKSLLKIYSGSSHQWLPICSSNWNDSYSEKTCQQLGFESAHRTTEVAHRDFANSFSILRYNSTIQESLHRSECPSQRYISLQCSHCGLRAMTGRIVGGALASDSKWPWQVSLHFGTTHICGGTLIDAQWVLTAAHCFFVTREKVLEGWKVYAGTSNLHQLPEAASIAEIIINSNYTDEEDDYDIALMRLSKPLTLSAHIHPACLPMHGQTFSLNETCWITGFGKTRETDDKTSPFLREVQVNLIDFKKCNDYLVYDSYLTPRMMCAGDLRGGRDSCQGDSGGPLVCEQNNRWYLAGVTSWGTGCGQRNKPGVYTKVTEVLPWIYSKMESEVRFRKS

SEQ ID NO: 67779 - protein, 454 aa, Homo sapiens
MGENDPPAVEAPFSFRSLFGLDDLKISPVAPDADAVAAQILSLLPLKFFPIIVIGIIALILALAIGLGIHFDCSGKYRCRSSFKCIELIARCDGVSDCKDGEDEYRCVRVGGQNAVLQVFTAASWKTMCSDDWKGHYANVACAQLGFPSYVSSDNLRVSSLEGQFREEFVSIDHLLPDDKVTALHHSVYVREGCASGHVVTLQCTACGHRRGYSSRIVGGNMSLLSQWPWQASLQFQGYHLCGGSVITPLWIITAAHCVYDLYLPKSWTIQVGLVSLLDNPAPSHLVEKIVYHSKYKPKRLGNDIALMKLAGPLTFNEMIQPVCLPNSEENFPDGKVCWTSGWGATEDGAGDASPVLNHAAVPLISNKICNHRDVYGGIISPSMLCAGYLTGGVDSCQGDSGGPLVCQERRLWKLVGATSFGIGCAEVNKPGVYTRVTSFLDWIHEQMERDLKT

SEQ ID NO: 67780 - protein, 538 aa, Homo sapiens
MQAVGPKPLPTLLCGGRTGHRTARVLSFLIRSCPCEPGKGCVYGKPVTLWPTISSVVPSTFLGLGNYEVEVEAEPDVRGPEIVTMGENDPPAVEAPFSFRSLFGLDDLKISPVAPDADAVAAQILSLLPLKFFPIIVIGIIALILALAIGLGIHFDCSGKYRCRSSFKCIELIARCDGVSDCKDGEDEYRCVRVGGQNAVLQVFTAASWKTMCSDDWKGHYANVACAQLGFPSYVSSDNLRVSSLEGQFREEFVSIDHLLPDDKVTALHHSVYVREGCASGHVVTLQCTACGHRRGYSSRIVGGNMSLLSQWPWQASLQFQGYHLCGGSVITPLWIITAAHCVYDLYLPKSWTIQVGLVSLLDNPAPSHLVEKIVYHSKYKPKRLGNDIALMKLAGPLTFNEMIQPVCLPNSEENFPDGKVCWTSGWGATEDGAGDASPVLNHAAVPLISNKICNHRDVYGGIISPSMLCAGYLTGGVDSCQGDSGGPLVCQERRLWKLVGATSFGIGCAEVNKPGVYTRVTSFLDWIHEQMERDLKT

SEQ ID NO: 67781 - protein, 344 aa, Homo sapiens
MGENDPPAVEAPFSFRSLFGLDDLKISPVAPDADAVAAQILSLLPLKFFPIIVIGIIALILALAIGLGIHFDCSGKYRCRSSFKCIELIARCDGVSDCKDGEDEYRCVRVGGQNAVLQVFTAASWKTMCSDDWKGHYANVACAQLGFPSYVSSDNLRVSSLEGQFREEFVSIDHLLPDDKVTALHHSVYVREGCASGHVVTLQCTACGHRRGYSSRIVGGNMSLLSQWPWQASLQFQGYHLCGGSVITPLWIITAAHCVYDLYLPKSWTIQVGLVSLLDNPAPSHLVEKIVYHSKYKPKRLGNDIALMKLAGPLTFNGTSGSLCGSAALPLFQEDLQLLIEAFL

SEQ ID NO: 67782 - protein, 453 aa, Homo sapiens
MGENDPPAVEAPFSFRSLFGLDDLKISPVAPDADAVAAQILSLLPLKFFPIIVIGIIALILALAIGLGIHFDCSGKYRCRSSFKCIELIARCDGVSDCKDGEDEYRCVRVGGQNAVLQVFTAASWKTMCSDDWKGHYANVACAQLGFPSYVSSDNLRVSSLEGQFREEFVSIDHLLPDDKVTALHHSVYVREGCASGHVVTLQCTACGHRRGYSSRIVGGNMSLLSQWPWQASLQFQGYHLCGGSVITPLWIITAAHCVYDLYLPKSWTIQVGLVSLLDNPAPSHLVEKIVYHSKYKPKRLGNDIALMKLAGPLTFNEMIQPVCLPNSEENFPDGKVCWTSGWGATEDGGDASPVLNHAAVPLISNKICNHRDVYGGIISPSMLCAGYLTGGVDSCQGDSGGPLVCQERRLWKLVGATSFGIGCAEVNKPGVYTRVTSFLDWIHEQMERDLKT

SEQ ID NO: 67783 - protein, 437 aa, Homo sapiens
MLQDPDSDQPLNSLDVKPLRKPRIPMETFRKVGIPIIIALLSLASIIIVVVLIKVILDKYYFLCGQPLHFIPRKQLCDGELDCPLGEDEEHCVKSFPEGPAVAVRLSKDRSTLQVLDSATGNWFSACFDNFTEALAETACRQMGYSSKPTFRAVEIGPDQDLDVVEITENSQELRMRNSSGPCLSGSLVSLHCLACGKSLKTPRVVGVEEASVDSWPWQVSIQYDKQHVCGGSILDPHWVLTAAHCFRKHTDVFNWKVRAGSDKLGSFPSLAVAKIIIIEFNPMYPKDNDIALMKLQFPLTFSGTVRPICLPFFDEELTPATPLWIIGWGFTKQNGGKMSDILLQASVQVIDSTRCNADDAYQGEVTEKMMCAGIPEGGVDTCQGDSGGPLMYQSDQWHVVGIVSWGYGCGGPSTPGVYTKVSAYLNWIYNVWKAEL

SEQ ID NO: 67784 - protein, 432 aa, Homo sapiens
MLQDPDSDQPLNSLDVKPLRKPRIPMETFRKVGIPIIIALLSLASIIIVVVLIKVILDKYYFLCGQPLHFIPRKQLCDGELDCPLGEDEEHCVKSFPEGPAVAVRLSKDRSTLQVLDSATGNWFSACFDNFTEALAETACRQMGYSRAVEIGPDQDLDVVEITENSQELRMRNSSGPCLSGSLVSLHCLACGKSLKTPRVVGVEEASVDSWPWQVSIQYDKQHVCGGSILDPHWVLTAAHCFRKHTDVFNWKVRAGSDKLGSFPSLAVAKIIIIEFNPMYPKDNDIALMKLQFPLTFSGTVRPICLPFFDEELTPATPLWIIGWGFTKQNGGKMSDILLQASVQVIDSTRCNADDAYQGEVTEKMMCAGIPEGGVDTCQGDSGGPLMYQSDQWHVVGIVSWGYGCGGPSTPGVYTKVSAYLNWIYNVWKAEL

SEQ ID NO: 67785 - protein, 435 aa, Homo sapiens
MDPDSDQPLNSLDVKPLRKPRIPMETFRKVGIPIIIALLSLASIIIVVVLIKVILDKYYFLCGQPLHFIPRKQLCDGELDCPLGEDEEHCVKSFPEGPAVAVRLSKDRSTLQVLDSATGNWFSACFDNFTEALAETACRQMGYSSKPTFRAVEIGPDQDLDVVEITENSQELRMRNSSGPCLSGSLVSLHCLACGKSLKTPRVVGVEEASVDSWPWQVSIQYDKQHVCGGSILDPHWVLTAAHCFRKHTDVFNWKVRAGSDKLGSFPSLAVAKIIIIEFNPMYPKDNDIALMKLQFPLTFSGTVRPICLPFFDEELTPATPLWIIGWGFTKQNGGKMSDILLQASVQVIDSTRCNADDAYQGEVTEKMMCAGIPEGGVDTCQGDSGGPLMYQSDQWHVVGIVSWGYGCGGPSTPGVYTKVSAYLNWIYNVWKAEL

SEQ ID NO: 67786 - protein, 457 aa, Homo sapiens
MSLMLDDQPPMEAQYAEEGPGPGIFRAEPGDQQHPISQAVCWRSMRRGCAVLGALGLLAGAGVGSWLLVLYLCPAASQPISGTLQDEEITLSCSEASAEEALLPALPKTVSFRINSEDFLLEAQVRDQPRWLLVCHEGWSPALGLQICWSLGHLRLTHHKGVNLTDIKLNSSQEFAQLSPRLGGFLEEAWQPRNNCTSGQVVSLRCSECGARPLASRIVGGQSVAPGRWPWQASVALGFRHTCGGSVLAPRWVVTAAHCMHSFRLARLSSWRVHAGLVSHSAVRPHQGALVERIIPHPLYSAQNHDYDVALLRLQTALNFSDTVGAVCLPAKEQHFPKGSRCWVSGWGHTHPSHTYSSDMLQDTVVPLFSTQLCNSSCVYSGALTPRMLCAGYLDGRADACQGDSGGPLVCPDGDTWRLVGVVSWGRGCAEPNHPGVYAKVAEFLDWIHDTAQDSLL

SEQ ID NO: 67787 - protein, 811 aa, Homo sapiens
MLLLFHSKRMPVAEAPQVAGGQGDGGDGEEAEPEGMFKACEDSKRKARGYLRLVPLFVLLALLVLASAGVLLWYFLGYKAEVMVSQVYSGSLRVLNRHFSQDLTRRESSAFRSETAKAQKMLKELITSTRLGTYYNSSSVYSFGEGPLTCFFWFILQIPEHRRLMLSPEVVQALLVEELLSTVNSSAAVPYRAEYEVDPEGLVILEASVKDIAALNSTLGCYRYSYVGQGQVLRLKGPDHLASSCLWHLQGPKDLMLKLRLEWTLAECRDRLAMYDVAGPLEKRLITSVYGCSRQEPVVEVLASGAIMAVVWKKGLHSYYDPFVLSVQPVVFQACEVNLTLDNRLDSQGVLSTPYFPSYYSPQTHCSWHLTVPSLDYGLALWFDAYALRRQKYDLPCTQGQWTIQNRRLCGLRILQPYAERIPVVATAGITINFTSQISLTGPGVRVHYGLYNQSDPCPGEFLCSVNGLCVPACDGVKDCPNGLDERNCVCRATFQCKEDSTCISLPKVCDGQPDCLNGSDEEQCQEGVPCGTFTFQCEDRSCVKKPNPQCDGRPDCRDGSDEEHCDCGLQGPSSRIVGGAVSSEGEWPWQASLQVRGRHICGGALIADRWVITAAHCFQEDSMASTVLWTVFLGKVWQNSRWPGEVSFKVSRLLLHPYHEEDSHDYDVALLQLDHPVVRSAAVRPVCLPARSHFFEPGLHCWITGWGALREGGPISNALQKVDVQLIPQDLCSEVYRYQVTPRMLCAGYRKGKKDACQGDSGGPLVCKALSGRWFLAGLVSWGLGCGRPNYFGVYTRITGVISWIQQVVT

SEQ ID NO: 67788 - protein, 824 aa, Homo sapiens
MPVAEAPQVAGGQGDGGDGEEAEPEGMFKACEDSKRKARGYLRLVPLFVLLALLVLASAGVLLWYFLGYKAEVMVSQVYSGSLRVLNRHFSQDLTRRESSAFRSETAKAQKMLKELITSTRLGTYYNSSSVYSFGEGPLTCFFWFILQIPEHRRLMLSPEVVQALLVEELLSTVNSSAAVPYRAEYEVDPEGLVILEASVKDIAALNSTLGCYRYSYVGQGQVLRLKGPDHLASSCLWHLQGPKDLMLKLRLEWTLAECRDRLAMYDVAGPLEKRLITSVYGCSRQEPVVEVLASGAIMAVVWKKGLHSYYDPFVLSVQPVVFQACEVNLTLDNRLDSQGVLSTPYFPSYYSPQTHCSWHLTVPSLDYGLALWFDAYALRRQKYDLPCTQGQWTIQNRRLCGLRILQPYAERIPVVATAGITINFTSQISLTGPGVRVHYGLYNQSDPCPGEFLCSVNGLCVPACDGVKDCPNGLDERNCVCRATFQCKEDSTCISLPKVCDGQPDCLNGSDEEQCQEGVPCGTFTFQCEDRSCVKKPNPQCDGRPDCRDGSDEEHCDCGLQGPSSRIVGGAVSSEGEWPWQASLQVRGRHICGGALIADRWVITAAHCFQEDSMASTVLWTVFLGKVWQNSRWPGEVSFKVSRLLLHPYHEEDSHDYDVALLQLDHPVVRSAAVRPVCLPARSHFFEPGLHCWITGWGALREGALRADAVALFYGWRNQGSETCCCPISNALQKVDVQLIPQDLCSEVYRYQVTPRMLCAGYRKGKKDACQGDSGGPLVCKALSGRWFLAGLVSWGLGCGRPNYFGVYTRITGVISWIQQVVT

SEQ ID NO: 67789 - protein, 802 aa, Homo sapiens
MPVAEAPQVAGGQGDGGDGEEAEPEGMFKACEDSKRKARGYLRLVPLFVLLALLVLASAGVLLWYFLGYKAEVMVSQVYSGSLRVLNRHFSQDLTRRESSAFRSETAKAQKMLKELITSTRLGTYYNSSSVYSFGEGPLTCFFWFILQIPEHRRLMLSPEVVQALLVEELLSTVNSSAAVPYRAEYEVDPEGLVILEASVKDIAALNSTLGCYRYSYVGQGQVLRLKGPDHLASSCLWHLQGPKDLMLKLRLEWTLAECRDRLAMYDVAGPLEKRLITSVYGCSRQEPVVEVLASGAIMAVVWKKGLHSYYDPFVLSVQPVVFQACEVNLTLDNRLDSQGVLSTPYFPSYYSPQTHCSWHLTVPSLDYGLALWFDAYALRRQKYDLPCTQGQWTIQNRRLCGLRILQPYAERIPVVATAGITINFTSQISLTGPGVRVHYGLYNQSDPCPGEFLCSVNGLCVPACDGVKDCPNGLDERNCVCRATFQCKEDSTCISLPKVCDGQPDCLNGSDEEQCQEGVPCGTFTFQCEDRSCVKKPNPQCDGRPDCRDGSDEEHCDCGLQGPSSRIVGGAVSSEGEWPWQASLQVRGRHICGGALIADRWVITAAHCFQEDSMASTVLWTVFLGKVWQNSRWPGEVSFKVSRLLLHPYHEEDSHDYDVALLQLDHPVVRSAAVRPVCLPARSHFFEPGLHCWITGWGALREGGPISNALQKVDVQLIPQDLCSEVYRYQVTPRMLCAGYRKGKKDACQGDSGGPLVCKALSGRWFLAGLVSWGLGCGRPNYFGVYTRITGVISWIQQVVT

SEQ ID NO: 67790 - protein, 824 aa, Homo sapiens; identical to SEQ ID NO: 67788

SEQ ID NO: 67791 - protein, 141 aa, Homo sapiens
MPVAEAPQVAGGQGDGGDGEEAEPEGMFKACEDSKRKARGYLRLVPLFVLLALLVLASAGVLLWYFLGYKAEVMVSQVYSGSLRVLNRHFSQDLTRRESSAFRSETAKAQKMLKELITSTRLGTYYNSSSVYSFGEGPLTC

SEQ ID NO: 67792 - protein, 461 aa, Homo sapiens
MLLLFHSKRMPVAEAPQVAGGQGDGGDGEEAEPEGMFKACEDSKRKARGYLRLVPLFVLLALLVLASAGVLLWYFLGYKAEVMVSQVYSGSLRVLNRHFSQDLTRRESSAFRSETAKAQKMLKELITSTRLGTYYNSSSVYSFGEGPLTCFFWFILQIPEHRRLMLSPEVVQALLVEELLSTVNSSAAVPYRAEYEVDPEGLVILEASVKDIAALNSTLGCYRYSYVGQGQVLRLKGPDHLASSCLWHLQGPKDLMLKLRLEWTLAECRDRLAMYDVAGPLEKRLITSVYGCSRQEPVVEVLASGAIMAVVWKKGLHSYYDPFVLSVQPVVFQACEVNLTLDNRLDSQGVLSTPYFPSYYSPQTHCSWHLTVPSLDYGLALWFDAYALRRQKYDLPCTQGQWTIQNRRYHFLSSLWLPFLPPPPSLPSSIVTPSLEAQVPNLRGAARGASRGWGWCQACCP

SEQ ID NO: 67793 - protein, 508 aa, Homo sapiens
MASAVWGSAPWWGPPPPAPARPLTDIDFCSGAQLQELTQLIQELGVQESWSDGPKPGADLLRAKDFVFSLLGLVHRRDPRFPPQAELLLLRGGIREGSLDLGHAPLGPYARGPHYDAGFTLLVPMFSLDGTELQLDLESCYAQVCLPEMVCGTPIREMWQDCLGPPVPGARDSIHRTESEESSKDWQSSVDQPHSYVTEHEAPVSLEKSPSDVSASESPQHDVVDLGSTAPLKTMSSDVTKAAVESPVPKPSEAREAWPTLCSAQVAAWFFATLAAVAESLIPVPGAPRLVHAARHAGFTTVLLATPEPPRRLLLFDLIPVVSVAGWPEGARSHSWAGPLASESASFYLVPGGGTERPCASAWQLCFARQELALKARIPAPLLQAHAAAQALLRPLVAGTRAAAPYLLRTLLYWACERLPALYLARPENAGACCLGLLDELGRVLEAGTLPHYFLNGRQLRTGDDSAALLGELARLRGDPARALRAAVEEAKVARKGGGLAGVGGGAH

SEQ ID NO: 67794 - protein, 508 aa, Homo sapiens; identical to SEQ ID NO: 67793

SEQ ID NO: 67795 - protein, 274 aa, Homo sapiens
MGKSLSHLPLHSSKEDAYDGVTSENMRNGLVNSEVHNEDGRNGDVSQFPYVEFTGRDSVTCPTCQGTGRIPRGQENQLVALIPYSDQRLRPRRTKLYVMASVFVCLLLSGLAVFFLFPRSIDVKYIGVKSAYVSYDVQKRTIYLNITNTLNITNNNYYSVEVENITAQVQFSKTVIGKARLNNITIIGPLDMKQIDYTVPTVIAEEMSYMYDFCTLISIKVHNIVLMMQVTVTTTYFGHSEQISQERYQYVDCGRNTTYQLGQSEYLNVLQPQQ

SEQ ID NO: 67796 - protein, 274 aa, Homo sapiens; identical to SEQ ID NO: 67795

SEQ ID NO: 67797 - protein, 25 aa, Homo sapiens
MGKSLSHLPLHSSKEDAYDGVTSEN

SEQ ID NO: 67798 - protein, 110 aa, Homo sapiens
MGKSLSHLPLHSSKEDAYDGVTSENMRNGLVNSEVHNEDGRNGDVSQFPYVEFTGRDSVTCPTCQGTGRIPRGQENQLVALIPYSDQRLRPRRTKLYVMASVFVCLLLSG

SEQ ID NO: 67799 - protein, 122 aa, Homo sapiens
MHGTFVILLPLSLILMVFGGMTGFLSFLLQAYLLLLLTGILFLFGAMVTLAGISVYIAYSAAAFREALCLLEEKALLDQVDISFGWSLALGWISFIAELLTGAAFLAAARELSLRRRQDQAI

SEQ ID NO: 67800 - protein, 189 aa, Homo sapiens
MGLGARGAWAALLLGTLQVLALLGAAHESAAMAETLQHVPSDHTNETSNSTVKPPTSVASDSSNTTVTTMKPTAASNTTTPGMVSTNMTSTTLKSTPKTTSVSQNTSQISTSTMTVTHNSSVTSAASSVTITTTMHSEAKKGSKFDTGSFVGGIVLTLGVLSILYIGCKMYYSRRGIRYRTIDEHDAII

SEQ ID NO: 67801 - protein, 208 aa, Homo sapiens
MGLGARGAWAALLLGTLQVLALLGAAHESAAMAASANIENSGLPHNSSANSTETLQHVPSDHTNETSNSTVKPPTSVASDSSNTTVTTMKPTAASNTTTPGMVSTNMTSTTLKSTPKTTSVSQNTSQISTSTMTVTHNSSVTSAASSVTITTTMHSEAKKGSKFDTGSFVGGIVLTLGVLSILYIGCKMYYSRRGIRYRTIDEHDAII

SEQ ID NO: 67802 - protein, 195 aa, Homo sapiens
MENHKSNNKENITIVDISRKINQLPEAERNLLENGSVYVGLNAALCGLIANSLFRRILNVTKARIAAGLPMAGIPFLTTDLTYRCFVSFPLNTGDLDCETCTITRSGLTGLVIGGLYPVFLAIPVNGGLAARYQSALLPHKGNILSYWIRTSKPVFRKMLFPILLQTMFSAYLGSEQYKLLIKALQLSEPGKEIH

SEQ ID NO: 67803 - protein, 125 aa, Homo sapiens
MAGIPFLTTDLTYRCFVSFPLNTGDLDCETCTITRSGLTGLVIGGLYPVFLAIPVNGGLAARYQSALLPHKGNILSYWIRTSKPVFRKMLFPILLQTMFSAYLGSEQYKLLIKALQLSEPGKEIH

SEQ ID NO: 67804 - protein, 162 aa, Homo sapiens
MLQTSNYSLVLSLQFLLLSYDLFVNSFSELLQKTPVIQLVLFIIQDIAVLFNIIIIFLMFFNTFVFQAGLVNLLFHKFKGTIILTAVYFALSISLHVWVMNLRWKNSNSFIWTDGLQMLFVFQRLAAVLYCYFYKRTAVRLGDPHFYQDSLWLRKEFMQVRR

SEQ ID NO: 67805 - protein, 105 aa, Homo sapiens
MLQTSNYSLVLSLQFLLLSYDLFVNSFSELLQKTPVIQLVLFIIQDIAVLFNIIIIFLMFFNTFVFQAGLVNLLFHKFKGTIILTAVYFALSISLHVWVMVRVAV

SEQ ID NO: 67806 - protein, 379 aa, Homo sapiens
MPHSSLHPSIPCPRGHGAQKAALVLLSACLVTLWGLGEPPEHTLRYLVLHLASLQLGLLLNGVCSLAEELRHIHSRYRGSYWRTVRACLGCPLRRGALLLLSIYFYYSLPNAVGPPFTWMLALLGLSQALNILLGLKGLAPAEISAVCEKGNFNVAHGLAWSYYIGYLRLILPELQARIRTYNQHYNNLLRGAVSQRLYILLPLDCGVPDNLSMADPNIRFLDKLPQQTGDHAGIKDRVYSNSIYELLENGQRAGTCVLEYATPLQTLFAMSQYSQAGFSREDRLEQAKLFCRTLEDILADAPESQNNCRLIAYQEPADDSSFSLSQEVLRHLRQEEKEEVTVGSLKTSAVPSTSTMSQEPELLISGMEKPLPLRTDFS

SEQ ID NO: 67807 - protein, 253 aa, Homo sapiens
MPHSSLHPSIPCPRGHGAQKAALVLLSACLVTLWGLGEPPEHTLRYLVLHLASLQLGLLLNGVCSLAEELRHIHSRYRGSYWRTVRACLGCPLRRGALLLLSIYFYYSLPNAVGPPFTWMLALLGLSQALNILLGLKGLAPAEISAVCEKGNFNVAHGLAWSYYIGYLRLILPELQARIRTYNQHYNNLLRGAVSQRLYILLPLDCGVPDNLSMADPNIRFLDKLPQQTGDHAGIKDRVYSNSIYELLENGQR

SEQ ID NO: 67808 - protein, 140 aa, Homo sapiens
MPSAFSVSSFPVSIPAVLTQTDWTEPWLMGLATFHALCVLLTCLSSRSYRLQIGHFLCLVILVYCAEYINEAAAMNWRLFSKYQYFDSRGMFISIVFSAPLLVNAMIIVVMWVWKTLNVMTDLKNAQERRKEKKRRRKED

SEQ ID NO: 67809 - protein, 127 aa, Homo sapiens
MLSGYLQTDWTEPWLMGLATFHALCVLLTCLSSRSYRLQIGHFLCLVILVYCAEYINEAAAMNWRLFSKYQYFDSRGMFISIVFSAPLLVNAMIIVVMWVWKTLNVMTDLKNAQERRKEKKRRRKED

SEQ ID NO: 67810 - protein, 519 aa, Homo sapiens
GPAQRASSPIPSAGRREGAQAATQRVERRDRDPGGCAAWTPSTLPLSPRSAASSSTCAGGCGKRTASSRRTSRPSRMTATTGPKVIQTSAANFSLNNSKKLKPIQILSNPLSTYNQQLWLTCVVELDQSKETSIKTSFPMTVKVDGVAQDGTTMYIHNKVHNRTRTLTCAGKCAEIIVAHLGYLNYTQYTVIVGFEHLKLPIKGMNFTWKTYNPAFSRLEIWFRFFFVVLTFIVTCLFAHSLRKFSMRDWGIEQKWMSVLLPLLLLYNDPFFPLSFLVNSWLPGMLDDLFQSMFLCALLLFWLCVYHGIRVQGERKCLTFYLPKFFIVGLLWLASVTLGIWQTVNELHDPMYQYRVDTGNFQGMKVFFMVVAAVYILYLLFLIVRACSELRHMPYVDLRLKFLTALTFVVLVISIAILYLRFGAQVLQDNFVAELSTHYQKPAEFLSFYGLLNFYLYTLAFVYSPSKNALYESQLKDNPAFSMLNDSDDDVIYGSDYEEMPLQNGQAIRAKYKEESDSD

SEQ ID NO: 67811 - protein, 612 aa, Homo sapiens
MGAAPSPTQASSRGGGPGPPAPTRAVSSSSRARGGALSALGPSPARPLTTSPAPAPPPRSRPARQQPDPQCWEKRGGAGGDTKGGAAGPGPGRLRGMDAEYPAFEPPLCSELKHLCRRLREAYRELKEDLTPFKDDRYYRLAPMRLYTLSKRHFVLVFVVFFICFGLTIFVGIRGPKVIQTSAANFSLNNSKKLKPIQILSNPLSTYNQQLWLTCVVELDQSKETSIKTSFPMTVKVDGVAQDGTTMYIHNKVHNRTRTLTCAGKCAEIIVAHLGYLNYTQYTVIVGFEHLKLPIKGMNFTWKTYNPAFSRLEIWFRFFFVVLTFIVTCLFAHSLRKFSMRDWGIEQKWMSVLLPLLLLYNDPFFPLSFLVNSWLPGMLDDLFQSMFLCALLLFWLCVYHGIRVQGERKCLTFYLPKFFIVGLLWLASVTLGIWQTVNELHDPMYQYRVDTGNFQGMKVFFMVVAAVYILYLLFLIVRACSELRHMPYVDLRLKFLTALTFVVLVISIAILYLRFGAQVLQDNFVAELSTHYQNSAEFLSFYGLLNFYLYTLAFVYSPSKNALYESQLKDNPAFSMLNDSDDDVIYGSDYEEMPLQNGQAIRAKYKEESDSD

SEQ ID NO: 67812 - protein, 438 aa, Homo sapiens
MPCTCTWRNWRQWIRPLVAVIYLVSIVVAVPLCVWELQKLEVGIHTKAWFIAGIFLLLTIPISLWVILQHLVHYTQPELQKPIIRILWMVPIYSLDSWIALKYPGIAIYVDTCRECYEAYVIYNFMGFLTNYLTNRYPNLVLILEAKDQQKHFPPLCCCPPWAMGEVLLFRCKLGVLQYTVVRPFTTIVALICELLGIYDEGNFSFSNAWTYLVIINNMSQLFAMYCLLLFYKVLKEELSPIQPVGKFLCVKLVVFVSFWQAVVIALLVKVGVISEKHTWEWQTVEAVATGLQDFIICIEMFLAAIAHHYTFSYKPYVQEAEEGSCFDSFLAMWDVSDIRDDISEQVRHVGRTVRGHPRKKLFPEDQDQNEHTSLLSSSSQDAISIASSMPPSPMGHYQGFGHTVTPQTTPTTAKISDEILSDTIGEKKEPSDKSVDS

SEQ ID NO: 67813 - protein, 1383 aa, Homo sapiens
MYATDSRGHSPAFLQPQNGNSRHPSGYVPGKVVPLRPPPPPKSQASAKFTSIRREDRATFAFSPEEQQAQRESQKQKRHKNTFICFAITSFSFFIALAIILGISSKYAPDENCPDQNPRLRNWDPGQDSAKQVVIKEGDMLRLTSDATVHSIVIQDGGLLVFGDNKDGSRNITLRTHYILIQDGGALHIGAEKCRYKSKATITLYGKSDEGESMPTFGKKFIGVEAGGTLELHGARKASWTLLARTLNSSGLPFGSYTFEKDFSRGLNVRVIDQDTAKILESERFDTHEYRNESRRLQEFLRFQDPGRIVAIAVGDSAAKSLLQGTIQMIQERLGSELIQGLGYRQAWALVGVIDGGSTSCNESVRNYENHSSGGKALAQREFYTVDGQKFSVTAYSEWIEGVSLSGFRVEVVDGVKLNLLDDVSSWKPGDQIVVASTDYSMYQAEEFTLLPCSECSHFQVKVKETPQFLHMGEIIDGVDMRAEVGILTRNIVIQGEVEDSCYAENQCQFFDYDTFGGHIMIMKNFTSVHLSYVELKHMGQQQMGRYPVHFHLCGDVDYKGGYRHATFVDGLSIHHSFSRCITVHGTNGLLIKDTIGFDTLGHCFFLEDGIEQRNTLFHNLGLLTKPGTLLPTDRNNSMCTTMRDKVFGNYIPVPATDCMAVSTFWIAHPNNNLINNAAAGSQDAGIWYLFHKEPTGESSGLQLLAKPELTPLGIFYNNRVHSNFKAGLFIDKGVKTTNSSAADPREYLCLDNSARFRPHQDANPEKPRVAALIDRLIAFKNNDNGAWVRGGDIIVQNSAFADNGIGLTFASDGSFPSDEGSSQEVSESLFVGESRNYGFQGGQNKYVGTGGIDQKPRTLPRNRTFPIRGFQIYDGPIHLTRSTFKKYVPTPDRYSSAIGFLMKNSWQITPRNNISLVKFGPHVSLNVFFGKPGPWFEDCEMDGDKNSIFHDIDGSVTGYKDAYVGRMDNYLIRHPSCVNVSKWNAVICSGTYAQVYVQTWSTQNLSMTITRDEYPSNPMVLRGINQKAAFPQYQPVVMLEKGYTIHWNGPAPRTTFLYLVNFNKNDWIRVGLCYPSNTSFQVTFGYLQRQNGSLSKIEEYEPVHSLEELQRKQSERKFYFDSSTGLLFLYLKAKSHRHGHSYCSSQGCERVKIQAATDSKDISNCMAKAYPQYYRKPSVVKRMPAMLTGLCQGCGTRQVVFTSDPHKSYLPVQFQSPDKAETQRGDPSVISVNGTDFTFRSAGVLLLVVDPCSVPFRLTEKTVFPLADVSRIEEYLKTGIPPRSIVLLSTRGEIKQLNISHLLVPLGLAKPAHLYDKGSTIFLGFSGNFKPSWTKLFTSPAGQGLGVLEQFIPLQLDEYGCPRATTVRRRDLELLKQASKAH

SEQ ID NO: 67814 - protein, 1320 aa, Homo sapiens
MYATDSRGHSPAFLQPQNGNSRHPSGYVPGKVVPLRPPPPPKSQASAKFTSIRREDRATFAFSPEEQQAQRESQKQKRHKNTFICFAITSFSFFIALAIILGISSKYAPDENCPDQNPRLRNWDPGQDSAKQVVIKEGDMLRLTSDATVHSIVIQDGGLLVFGDNKDGSRNITLRTHYILIQDGGALHIGAEKCRYKSKATITLYGKSDEGESMPTFGKKFIGVEAGGTLELHGARKASWTLLARTLNSSGLPFGSYTFEKDFSRGLNVRVIDQDTAKILESERFDTHEYRNESRRLQEFLRFQDPGRIVAIAVGDSAAKSLLQGTIQMIQERLGSELIQGLGYRQAWALVGVIDGGSTSCNESVRNYENHSSGGKALAQREFYTVDGQKFSVTAYSEWIEETPQFLHMGEIIDGVDMRAEVGILTRNIVIQGEVEDSCYAENQCQFFDYDTFGGHIMIMKNFTSVHLSYVELKHMGQQQMGRYPVHFHLCGDVDYKGGYRHATFVDGLSIHHSFSRCITVHGTNGLLIKDTIGFDTLGHCFFLEDGIEQRNTLFHNLGLLTKPGTLLPTDRNNSMCTTMRDKVFGNYIPVPATDCMAVSTFWIAHPNNNLINNAAAGSQDAGIWYLFHKEPTGESSGLQLLAKPELTPLGIFYNNRVHSNFKAGLFIDKGVKTTNSSAADPREYLCLDNSARFRPHQDANPEKPRVAALIDRLIAFKNNDNGAWVRGGDIIVQNSAFADNGIGLTFASDGSFPSDEGSSQEVSESLFVGESRNYGFQGGQNKYVGTGGIDQKPRTLPRNRTFPIRGFQIYDGPIHLTRSTFKKYVPTPDRYSSAIGFLMKNSWQITPRNNISLVKFGPHVSLNVFFGKPGPWFEDCEMDGDKNSIFHDIDGSVTGYKDAYVGRMDNYLIRHPSCVNVSKWNAVICSGTYAQVYVQTWSTQNLSMTITRDEYPSNPMVLRGINQKAAFPQYQPVVMLEKGYTIHWNGPAPRTTFLYLVNFNKNDWIRVGLCYPSNTSFQVTFGYLQRQNGSLSKIEEYEPVHSLEELQRKQSERKFYFDSSTGLLFLYLKAKSHRHGHSYCSSQGCERVKIQAATDSKDISNCMAKAYPQYYRKPSVVKRMPAMLTGLCQGCGTRQVVFTSDPHKSYLPVQFQSPDKAETQRGDPSVISVNGTDFTFRSAGVLLLVVDPCSVPFRLTEKTVFPLADVSRIEEYLKTGIPPRSIVLLSTRGEIKQLNISHLLVPLGLAKPAHLYDKGSTIFLGFSGNFKPSWTKLFTSPAGQGLGVLEQFIPLQLDEYGCPRATTVRRRDLELLKQASKAH

SEQ ID NO: 67815 - protein, 376 aa, Homo sapiens
MTITRDEYPSNPMVLRGINQKAAFPQYQPVVMLEKGYTIHWNGPAPRTTFLYLVNFNKNDWIRVGLCYPSNTSFQVTFGYLQRQNGSLSKIEEYEPVHSLEELQRKQSERKFYFDSSTGLLFLYLKAKSHRHGHSYCSSQGCERVKIQAATDSKDISNCMAKAYPQYYRKPSVVKRMPAMLTGLCQGCGTRQVVFTSDPHKSYLPVQFQSPDKAETQRGDPSVISVNGTDFTFRSAGVLLLVVDPCSVPFRLTEKTVFPLADVSRIEEYLKTGIPPRSIVLLSTRGEIKQLNISHLLVPLGLAKPAHLYDKGSTIFLGFSGNFKPSWTKLFTSPAGQGLGVLEQFIPLQLDEYGCPRATTVRRRDLELLKQASKAH

SEQ ID NO: 67816 - protein, 18 aa, Homo sapiens
MYATDSRGHSPAFLQPQN

SEQ ID NO: 67817 - protein, 189 aa, Homo sapiens
MEEGGNLGGLIKMVHLLVLSGAWGMQMWVTFVSGFLLFRSLPRHTFGLVQSKLFPFYFHISMGCAFINLCILASQHAWAQLTFWEASQLYLLFLSLTLATVNARWLEPRTTAAMWALQTVEKERGLGGEVPGSHQGPDPYRQLREKDPKYSALRQNFFRYHGLSSLCNLGCVLSNGLCLAGLALEIRSL

SEQ ID NO: 67818 - protein, 189 aa, Homo sapiens; identical to SEQ ID NO: 67817

SEQ ID NO: 67819 - protein, 189 aa, Homo sapiens; identical to SEQ ID NO: 67817

SEQ ID NO: 67820 - protein, 148 aa, Homo sapiens
MLPRGLKMAPRGKRLSSTPLEILFFLNGWYNATYFLLELFIFLYKGVLLPYPTANLVLDVVMLLLYLGIEVIRLFFGTKGNLCQRKMPLSISVALTFPSAMMASYYLLLQTYVLRLEAIMNGILLFFCGSELLLEVLTLAAFSSMDRI

SEQ ID NO: 67821 - protein, 145 aa, Homo sapiens
MLPRGLKMAPRGKRLSSTPLEILFFLNGWYNATYFLLELFIFLYKGVLLPYPTANLVLDVVMLLLYLGIEVIRLFFGTKGNLCQRKMPLSISVALTFPSAMMASYYLLLQTYVLRLEAIMNGILLFFCGSELLLEVLTLAAFSRI

SEQ ID NO: 67822 - protein, 313 aa, Homo sapiens
MRTDSGARLEEGHLRPPRALPPVPSIDDIPLSRPKKKKTQPAELQYANELGVEDEDIITDEQTTVEQQSVFTAPTGISQPVGKVFVEKSRRFQAADRSELIKTTENIDVSMDVKPSWTTRDVALTVHRAFRMIGLFSHGFLAGCAVWNIVVIYVLAGDQLSNLSNLLQQYKTLAYPFQSLLYLLLALSTISAFDRIDFAKISVAIRNFLALDPTALASFLYFTALILSLSQQMTSDRIHLYTPSSVNGSLWEAGIEEQILQPWIVVNLVVALLVGLSWLFLSYRPGMDLSEELMFSSEVEEYPDKEKEIKASS

SEQ ID NO: 67823 - protein, 400 aa, Homo sapiens
MGKNPVRPPRALPPVPSQDDIPLSRPKKKKPRTKNTPASASLEGLAQTAGRRPSEGNEPSTKELKEHPEAPVQRRQKKTRLPLELETSSTQKKSSSSSLLRNENGIDAEPAEEAVIQKPRRKTKKTQPAELQYANELGVEDEDIITDEQTTVEQQSVFTAPTGISQPVGKVFVEKSRRFQAADRSELIKTTENIDVSMDVKPSWTTRDVALTVHRAFRMIGLFSHGFLAGCAVWNIVVIYVLAGDQLSNLSNLLQQYKTLAYPFQSLLYLLLALSTISAFDRIDFAKISVAIRNFLALDPTALASFLYFTALILSLSQQMTSDRIHLYTPSSVNGSLWEAGIEEQILQPWIVVNLVVALLVGLSWLFLSYRPGMDLSEELMFSSEVEEYPDKEKEIKASS

SEQ ID NO: 67824 - protein, 408 aa, Homo sapiens
MRTDSGARLEEGHLRPPRALPPVPSQDDIPLSRPKKKKPRTKNTPASASLEGLAQTAGRRPSEGNEPSTKELKEHPEAPVQRRQKKTRLPLELETSSTQKKSSSSSLLRNENGIDAEPAEEAVIQKPRRKTKKTQPAELQYANELGVEDEDIITDEQTTVEQQSVFTAPTGISQPVGKVFVEKSRRFQAADRSELIKTTENIDVSMDVKPSWTTRDVALTVHRAFRMIGLFSHGFLAGCAVWNIVVIYVLAGDQLSNLSNLLQQYKTLAYPFQSLLYLLLALSTISAFDRIDFAKISVAIRNFLALDPTALASFLYFTALILSLSQQMTSDRIHLYTPSSVNGSLWEAGIEEQILQPWIVVNLVVALLVGLSWLFLSYRPGMDLSEELMFSSEVEEYPDKEKEIKASS

SEQ ID NO: 67825 - protein, 430 aa, Homo sapiens
MTHCACARDRREGWGARCLGRRPPRPAKRRMGKNPVRPPRALPPVPSIDDIPLSRPKKKKPRTKNTPASASLEGLAQTAGRRPSEGNEPSTKELKEHPEAPVQRRQKKTRLPLELETSSTQKKSSSSSLLRNENGIDAEPAEEAVIQKPRRKTKKTQPAELQYANELGVEDEDIITDEQTTVEQQSVFTAPTGISQPVGKVFVEKSRRFQAADRSELIKTTENIDVSMDVKPSWTTRDVALTVHRAFRMIGLFSHGFLAGCAVWNIVVIYVLAGDQLSNLSNLLQQYKTLAYPFQSLLYLLLALSTISAFDRIDFAKISVAIRNFLALDPTALASFLYFTALILSLSQQMTSDRIHLYTPSSVNGSLWEAGIEEQILQPWIVVNLVVALLVGLSWLFLSYRPGMDLSEELMFSSEVEEYPDKEKEIKASS

SEQ ID NO: 67826 - protein, 408 aa, Homo sapiens
MRTDSGARLEEGHLRPPRALPPVPSIDDIPLSRPKKKKPRTKNTPASASLEGLAQTAGRRPSEGNEPSTKELKEHPEAPVQRRQKKTRLPLELETSSTQKKSSSSSLLRNENGIDAEPAEEAVIQKPRRKTKKTQPAELQYANELGVEDEDIITDEQTTVEQQSVFTAPTGISQPVGKVFVEKSRRFQAADRSELIKTTENIDVSMDVKPSWTTRDVALTVHRAFRMIGLFSHGFLAGCAVWNIVVIYVLAGDQLSNLSNLLQQYKTLAYPFQSLLYLLLALSTISAFDRIDFAKISVAIRNFLALDPTALASFLYFTALILSLSQQMTSDRIHLYTPSSVNGSLWEAGIEEQILQPWIVVNLVVALLVGLSWLFLSYRPGMDLSEELMFSSEVEEYPDKEKEIKASS

SEQ ID NO: 67827 - protein, 366 aa, Homo sapiens
MALPPGPAALRHTLLLLPALLSSGWGELEPQIDGQTWAERALRENERHAFTCRVAGGPGTPRLAWYLDGQLQEASTSRLLSVGGEAFSGGTSTFTVTAHRAQHELNCSLQDPRSGRSANASVILNVQFKPEIAQVGAKYQEAQGPGLLVVLFALVRANPPANVTWIDQDGPVTVNTSDFLVLDAQNYPWLTNHTVQLQLRSLAHNLSVVATNDVGVTSASLPAPGLLATRVEVPLLGIVVAAGLALGTLVGFSTLVACLVCRKEKKTKGPSRHPSLISSDSNNLKLNNVRLPRENMSLPSNLQLNDLTPDSRAVKPADRQMAQNNSRPELLDPEPGGLLTSQGFIRLPVLGYIYRVSSVSSDEIWL

SEQ ID NO: 67828 - protein, 218 aa, Homo sapiens
MALPPGPAALRHTLLLLPALLSSVKPEIAQVGAKYQEAQGPGLLVVLFALVRANPPANVTWIDQDGPVTVNTSDFLVLDAQNYPWLTNHTVQLQLRSLAHNLSVVATNDVGVTSASLPAPGPSRHPSLISSDSNNLKLNNVRLPRENMSLPSNLQLNDLTPDSRAVKPADRQMAQNNSRPELLDPEPGGLLTSQGFIRLPVLGYIYRVSSVSSDEIWL

SEQ ID NO: 67829 - protein, 351 aa, Homo sapiens
MALPPGPAALRHTLLLLPALLSSGWGELEPQIDGQTWAERALRENERHAFTCRVAGGPGTPRLAWYLDGQLQEASTSRLLSVGGEAFSGGTSTFTVTAHRAQHELNCSLQDPRSGRSANASVILNVQFKPEIAQVGAKYQEAQGPGLLVVLFALVRANPPANVTWIDQDGPVTVNTSDFLVLDAQNYPWLTNHTVQLQLRSLAHNLSVVATNDVGVTSASLPAPGLLATRVEVPLLGIVVAAGLALGTLVGFSTLVACLVCRKEKKTKGPSRHPSLISSDSNNLKLNNVRLPRENMSLPSNLQLNDLTPDSRAVKPADRQMAQNNSRPELLDPEPGGLLTSQGRRNQDKDA

SEQ ID NO: 67830 - protein, 322 aa, Homo sapiens
MALPPGPAALRHTLLLLPALLSSGWGELEPQIDGQTWAERALRENERHAFTCRVAGGPGTPRLAWYLDGQLQEASTSRLLSVGGEAFSGGTSTFTVTAHRAQHELNCSLQDPRSGRSANASVILNVQFKPEIAQVGAKYQEAQGPGLLVVLFALVRANPPANVTWIDQDGPVTVNTSDFLVLDAQNYPWLTNHTVQLQLRSLAHNLSVVATNDVGVTSASLPAPGPSRHPSLISSDSNNLKLNNVRLPRENMSLPSNLQLNDLTPDSRAVKPADRQMAQNNSRPELLDPEPGGLLTSQGFIRLPVLGYIYRVSSVSSDEIWL

SEQ ID NO: 67831 - protein, 322 aa, Homo sapiens; identical to SEQ ID NO: 67830

SEQ ID NO: 67832 - protein, 306 aa, Homo sapiens
MALPPGPAALRHTLLLLPALLSSGWGELEPQIDGQTWAERALRENERHAFTCRVAGGPGTPRLAWYLDGQLQEASTSRLLSVGGEAFSGGTSTFTVTAHRAQHELNCSLQDPRSGRSANASVILNVQFKPEIAQVGAKYQEAQGPGLLVVLFALVRANPPANVTWIDQDGPVTVNTSDFLVLDAQNYPWLTNHTVQLQLRSLAHNLSVVATNDVGVTSASLPAPGPSRHPSLISSDSNNLKLNNVRLPRENMSLPSNLQLNDLTPDSRVKPADRQMAQNNSRPELLDPEPGGLLTSQGRRNQDKDA

SEQ ID NO: 67833 - protein, 381 aa, Homo sapiens
MALPPGPAALRHTLLLLPALLSSGWGELEPQIDGQTWAERALRENERHAFTCRVAGGPGTPRLAWYLDGQLQEASTSRLLSVGGEAFSGGTSTFTVTAHRAQHELNCSLQDPRSGRSANASVILNVQFKPEIAQVGAKYQEAQGPGLLVVLFALVRANPPANVTWIDQDGPVTVNTSDFLVLDAQNYPWLTNHTVQLQLRSLAHNLSVVATNDVGVTSASLPAPGLLATRVEVPLLGIVVAAGLALGTLVGFSTLVACLVCRKEKKTKGPSRHPSLISSDSNNLKLNNVRLPRENMSLPSNLQLNDLTPDSRVKPADRQMAQNNSRPELLDPEPGGLLTSQACLLHHGTPALTNPWLPHQQEGALPGGWSPQAHNSTVWKL

SEQ ID NO: 67834 - protein, 269 aa, Homo sapiens
MALPPGPAALRHTLLLLPALLSSGWGELEPQIDGQTWAERALRENERHAFTCRVAGGPGTPRLAWYLDGQLQEASTSRLLSVGGEAFSGGTSTFTVTAHRAQHELNCSLQDPRSGRSANASVILNVQWLLATRVEVPLLGIVVAAGLALGTLVGFSTLVACLVCRKEKKTKGPSRHPSLISSDSNNLKLNNVRLPRENMSLPSNLQLNDLTPDSRAVKPADRQMAQNNSRPELLDPEPGGLLTSQGFIRLPVLGYIYRVSSVSSDEIWL

SEQ ID NO: 67835 - protein, 222 aa, Homo sapiens
MLWLLFFLVTAIHAELCQPGAENAFKVRLSIRTALGDKAYAWDTNEEYLFKAMVAFSMRKVPNREATEISHVLLCNVTQRVSFWFVVTDPSKNHTLPAVEVQSAIRMNKNRINNAFFLNDQTLEFLKIPSTLAPPMDPSVPIWIIIFGVIFCIIIVAIALLILSGIWQRRRKNKEPSEVDDAEDKCENMITIENGIPSDPLDMKGGHINDAFMTEDERLTPL

SEQ ID NO: 67836 - protein, 361 aa, Homo sapiens
MAMNYNAKDEVDGGPPCAPGGTAKTRRPDNTAFKQQRLPAWQPILTAGTVLPIFFIIGLIFIPIGIGIFVTSNNIREIEIDYTGTEPSSPCNKCLSPDVTPCFCTINFTLEKSFEGNVFMYYGLSNFYQNHRRYVKSRDDSQLNGDSSALLNPSKECEPYRRNEDKPIAPCGAIANSMFNDTLELFLIGNDSYPIPIALKKKGIAWWTDKNVKFRNPPGGDNLEERFKGTTKPVNWLKPVYMLDSDPDNNGFINEDFIVWMRTAALPTFRKLYRLIERKSDLHPTLPAGRYSLNVTYNYPVHYFDGRKRMILSTISWMGGKNPFLGIAYIAVGSISFLLGVVLLVINHKYRNSSNTADITI

SEQ ID NO: 67837 - protein, 242 aa, Homo sapiens
MYYGLSNFYQNHRRYVKSRDDSQLNGDSSALLNPSKECEPYRRNEDKPIAPCGAIANSMFNDTLELFLIGNDSYPIPIALKKKGIAWWTDKNVKFRNPPGGDNLEERFKGTTKPVNWLKPVYMLDSDPDNNGFINEDFIVWMRTAALPTFRKLYRLIERKSDLHPTLPAGRYSLNVTYNYPVHYFDGRKRMILSTISWMGGKNPFLGIAYIAVGSISFLLGVVLLVINHKYRNSSNTADITI

SEQ ID NO: 67838 - protein, 325 aa, Homo sapiens
MAMNYNAKDEVDGGPPCAPGGTAKTRRPDNTAFKQQRLPAWQPILTAGTVLPIFFIIGLIFIPIGIGIFVTSNNIREIEGNVFMYYGLSNFYQNHRRYVKSRDDSQLNGDSSALLNPSKECEPYRRNEDKPIAPCGAIANSMFNDTLELFLIGNDSYPIPIALKKKGIAWWTDKNVKFRNPPGGDNLEERFKGTTKPVNWLKPVYMLDSDPDNNGFINEDFIVWMRTAALPTFRKLYRLIERKSDLHPTLPAGRYSLNVTYNYPVHYFDGRKRMILSTISWMGGKNPFLGIAYIAVGSISFLLGVVLLVINHKYRNSSNTADITI

SEQ ID NO: 67839 - protein, 77 aa, Homo sapiens
MYYGLSNFYQNHRRYVKSRDDSQLNGDSSALLNPSKECEPYRRNEDKPIAPCGAIANSMFNDTLELFLIGNDSYPIP

SEQ ID NO: 67840 - protein, 345 aa, Homo sapiens [sequence omitted]

SEQ ID NO: 67841 - protein, 351 aa, Homo sapiens
MTWSATARGAHQPDNTAFTQQRLPAWQPLLSASIALPLFFCAGLAFIGLGLGLYYSSNGIKELEYDYTGDPGTGNCSVCAAAGQGRALPPPCSCAWYFSLPELFQGPVYLYYELTNFYQNNRRYGVSRDDAQLSGLPSALRHPVNECAPYQRSAAGLPIAPCGAIANSLFNDSFSLWHQRQPGGPYVEVPLDRSGIAWWTDYHVKFRNPPLVNGSLALAFQGTAPPPNWRRPVYELSPDPNNTGFINQDFVVWMRTAALPTFRKLYARIRQGNYSAGLPRGAYRVNITYNYPVRAFGGHKLLIFSSISWMGGKNPFLGIAYLVVGSLCILTGFVMLVVYIRYQDQDDDDEE

SEQ ID NO: 67842 - protein, 351 aa, Homo sapiens; identical to SEQ ID NO: 67841

SEQ ID NO: 67843 - protein, 113 aa, Homo sapiens
MEERAQHCLSRLLDNSALKQQELPIHRLYFTARRVLFVFFATGIFCLCMGIILILSARSTQEIEINYTRICANCAKLRENASNFDKECTCSIPFYLSGKMMVGEIQETRLTLH

SEQ ID NO: 67844 - protein, 68 aa, Homo sapiens
  VARIANT 1: note = MOD_RES - Any amino acid
XLCMGIILILSARSTQEIEINYTRICANCAKLRENASNFDKECTCSIPFYLSGKMMVGEIQETRLTLH

SEQ ID NO: 67845 - protein, 400 aa, Homo sapiens
MAANYSSTSTRREHVKVKTSSQPGFLERLSETSGGMFVGLMAFLLSFYLIFTNEGRALKTATSLAEGLSLVVSPDSIHSVAPENEGRLVHIIGALRTSKLLSDPNYGVHLPAVKLRRHVEMYQWVETEESREYTEDGQVKKETRYSYNTEWRSEIINSKNFDREIGHKNPSAMAVESFMATAPFVQIGRFFLSSGLIDKVDNFKSLSLSKLEDPHVDIIRRGDFFYHSENPKYPEVGDLRVSFSYAGLSGDDPDLGPAHVVTVIARQRGDQLVPFSTKSGDTLLLLHHGDFSAEEVFHRELRSNSMKTWGLRAAGWMAMFMGLNLMTRILYTLVDWFPVFRDLVNIGLKAFAFCVATSLTLLTVAAGWLFYRPLWALLIAGLALVPILVARTRVPAKKLE

SEQ ID NO: 67846 - protein, 181 aa, Homo sapiens
MASAGSGMEEVRVSVLTPLKLVGLVCIFLALCLDLGAVLSPAWVTADHQYYLSLWESCRKPASLDIWHCESTLSSDWQIATLALLLGGAAIILIAFLVGLISICVGSRRRFYRPVAVMLFAAVVLQVCSLVLYPIKFIETVSLKIYHEFNWGYGLAWGATIFSFGGAILYCLNPKNYEDYY

SEQ ID NO: 67847 - protein, 559 aa, Homo sapiens
MHSFIHAAMGMVMAWCAAVITQGQYSFLVVPCTGTNSFGSPAAQTCLNEYHLFFLLTGAFMGYSYSLLYFVNNMNYLPFPIIQQYKFLRFRRSLLLLVKHSCVESLFLVRNFCILYYFLGYIPKAWISTAMNLHIDEQVHRPLDTVSGLLNLSLLYHVWLCGVFLLTTWYVSWILFKIYATEAHVFPVQPPFAEGSDECLPKVLNSNPPPIIKYLALQDLMLLSQYSPSRRQEVFSLSQPGGHPHNWTAISRECLNLLNGMTQKLILYQEAAATNGRVSSSYPVEPKKLNSPEETAFQTPKSSQMPRPSVPPLVKTSLFSSKLSTPDVVSPFGTPFGSSVMNRMAGIFDVNTCYGSPQSPQLIRRGPRLWTSASDQQMTEFSNPSPSTSISAEGKTMRQPSVIYSWIQNKREQIKNFLSKRVLIMYFFSKHPEASIQAVFSDAQMHIWALEGLSHLVAASFTEDRFGVVQTTLPAILNTLLTLQEAVDKYFKLPHASSKPPRISGSLVDTSYKTLRFAFRASLKTAIYRITTTFGEHLNAVQASAEHQKRLQQFLEFKE

SEQ ID NO: 67848 - protein, 557 aa, Homo sapiens
MATAVSRPCAGRSRDILWRVLGWRIVASIVWSVLFLPICTTVFIIFSRIDLFHPIQWLSDSFSDLYSSYVIFYFLLLSVVIIIISIFNVEFYAVVPSIPCSRLALIGKIIHPQQLMHSFIHAAMGMVMAWCAAVITQGQYSFLVVPCTGTNSFGSPAAQTCLNEYHLFFLLTGAFMGYSYSLLYFVNNMNYLPFPIIQQYKFLRFRRSLLLLVKHSCVESLFLVRNFCILYYFLGYIPKAWISTAMNLHIDEQVHRPLDTVSGLLNLSLLYHVWLCGVFLLTTWYVSWILFKIYATEAHVFPVQPPFAEGSDECLPKVLNSNPPPIIKYLALQDLMLLSQYSPSRRQEVFSLSQPGGHPHNWTAISRECLNLLNEMTEFSNPSPSTSISAEGKTMRQPSVIYSWIQNKREQIKNFLSKRVLIMYFFSKHPEASIQAVFSDAQMHIWALEGLSHLVAASFTEDRFGVVQTTLPAILNTLLTLQEAVDKYFKLPHASSKPPRISGSLVDTSYKTLRFAFRASLKTAIYRITTTFGEHLNAVQASAEHQKRLQQFLEFKE

SEQ ID NO: 67849 - protein, 674 aa, Homo sapiens
MATAVSRPCAGRSRDILWRVLGWRIVASIVWSVLFLPICTTVFIIFSRIDLFHPIQWLSDSFSDLYSSYVIFYFLLLSVVIIIISIFNVEFYAVVPSIPCSRLALIGKIIHPQQLMHSFIHAAMGMVMAWCAAVITQGQYSFLVVPCTGTNSFGSPAAQTCLNEYHLFFLLTGAFMGYSYSLLYFVNNMNYLPFPIIQQYKFLRFRRSLLLLVKHSCVESLFLVRNFCILYYFLGYIPKAWISTAMNLHIDEQVHRPLDTVSGLLNLSLLYHVWLCGVFLLTTWYVSWILFKIYATEAHVFPVQPPFAEGSDECLPKVLNSNPPPIIKYLALQDLMLLSQYSPSRRQEVFSLSQPGGHPHNWTAISRECLNLLNGMTQKLILYQEAAATNGRVSSSYPVEPKKLNSPEETAFQTPKSSQMPRPSVPPLVKTSLFSSKLSTPDVVSPFGTPFGSSVMNRMAGIFDVNTCYGSPQSPQLIRRGPRLWTSASDQQMTEFSNPSPSTSISAEGKTMRQPSVIYSWIQNKREQIKNFLSKRVLIMYFFSKHPEASIQAVFSDAQMHIWALEGLSHLVAASFTEDRFGVVQTTLPAILNTLLTLQEAVDKYFKLPHASSKPPRISGSLVDTSYKTLRFAFRASLKTAIYRITTTFGEHLNAVQASAEHQKRLQQFLEFKE

SEQ ID NO: 67850 - protein, 339 aa, Homo sapiens
MLLSQYSPSRRQEVFSLSQPGGHPHNWTAISRECLNLLNGMTQKLILYQEAAATNGRVSSSYPVEPKKLNSPEETAFQTPKSSQMPRPSVPPLVKTSLFSSKLSTPDVVSPFGTPFGSSVMNRMAGIFDVNTCYGSPQSPQLIRRGPRLWTSASDQQMTEFSNPSPSTSISAEGKTMRQPSVIYSWIQNKREQIKNFLSKRVLIMYFFSKHPEASIQAVFSDAQMHIWALEGLSHLVAASFTEDRFGVVQTTLPAILNTLLTLQEAVDKYFKLPHASSKPPRISGSLVDTSYKTLRFAFRASLKTAIYRITTTFGEHLNAVQASAEHQKRLQQFLEFKE

SEQ ID NO: 67851 - protein, 542 aa, Homo sapiens
MATAVSRPCAGRSRDILWRVLGWRIVASIVWSVLFLPICTTVFIIFSRIDLFHPIQWLSDSFSDLYSSYVIFYFLLLSVVIIIISIFNVEFYAVVPSIPCSRLALIGKIIHPQQLMHSFIHAAMGMVMAWCAAVITQGQYSFLVVPCTGTNSFGSPAAQTCLNEYHLFFLLTGAFMGYSYSLLYFVNNMNYLPFPIIQQYKFLRFRRSLLLLVKHSCVESLFLVRNFCILYYFLGYIPKAWISTAMNLHIDEQVHRPLDTVSGLLNLSLLYHVWLCGVFLLTTWYVSWILFKIYATEAHVFPVQPPFAEGSDECLPKVLNSNPPPIIKYLALQDLMLLSQYSPSRRQEVFSLSQPGGHPHNWTAISRECLNLLNGMTQKLILYQEAAATNGRVSSSYPVEPKKLNSPEETAFQTPKSSQMPRPSVPPLVKTSLFSSKLSTPDVVSPFGTPFGSSVMNRMAGIFDVNTCYGSPQSPQLIRRGPRLWTSASDQQMTEFSNPSPSTSISAEAPRGLHSGCFFRCPNAYLGIRRSVALSSSIIYRG

SEQ ID NO: 67852 - protein, 443 aa, Homo sapiens
MRLTRKRLCSFLIALYCLFSLYAAYHVFFGRRRQAPAGSPRGLRKGAAPARERRGREQSTLESEEWNPWEGDEKNEQQHRFKTSLQILDKSTKGKTDLSVQIWGKAAIGLYLWEHIFEGLLDPSDVTAQWREGKSIVGRTQYSFITGPAVIPGYFSVDVNNVVLILNGREKAKIFYATQWLLYAQNLVQIQKLQHLAVVLLGNEHCDNEWINPFLKRNGGFVELLFIIYDSPWINDVDVFQWPLGVATYRNFPVVEASWSMLHDERPYLCNFLGTIYENSSRQALMNILKKDGNDKLCWVSAREHWQPQETNESLKNYQDALLQSDLTLCPVGVNTECYRIYEACSYGSIPVVEDVMTAGNCGNTSVHHGAPLQLLKSMGAPFIFIKNWKELPAVLEKEKTIILQEKIERRKMLLQWYQHFKTELKMKFTNILESSFLMNNKS

SEQ ID NO: 67853 - protein, 257 aa, Homo sapiens
MAADGVDERSPLLSASHSGNVTPTAPPYLQESSPRAELPPPYTAIASPDASGIPVINCRVCQSLINLDGKLHQHVVKCTVCNEATPIKNPPTGKKYVRCPCNCLLICKDTSRRIGCPRPNCRRIINLGPVMLISEEQPAQPALPIQPEGTRVVCGHCGNTFLWMELRFNTLAKCPHCKKISSVGSALPRRRCCAYITIGMICIFIGVGLTVGTPDFARRFRATYVSWAIAYLLGLICLIRACYWGAIRVSYPEHSFA

SEQ ID NO: 67854 - protein, 914 aa, Homo sapiens
MSLSHWPYFRLVLNFRPQVICLPQPPKVLGYRLEPPHLTLACTLEGMYNIIEEILERDINGTLLSQATCELCDGNENSFMVVNALGDRCVRCEPTFVNTSRSCACSEPNILTGGLCFSSTGNFPLRRISAARYGEVGMSLTSEWFAKYLQSSAAACWVYANLTSCQALGNMCVMNMNSYDFATFDACGLFQFIFENTAGLSTVHSISFWRQNLPWLFYGDQLGLAPQVLSSTSLPTNFSFKGENQNTKLKFVAASYDIRGNFLKWQTLEGGVLQLCPDTETRLNAAYSFGTTYQQNCEIPISKILIDFPTPIFYDVYLEYTDENQHQYILAVPVLNLNLQHNKIFVNQDSNSGKWLLTRRIFLVDAVSGRENDLGTQPRVIRVATQISLSVHLVPNTINGNIYPPLITIAYSDIDIKDANSQSVKVSFSVTYEMDHGEAHVQTDIALGVLGGLAVLASLLKTAGWKRRIGSPMIDLQTVVKFLVYYAGDLANVFFIITVGTGLYWLIFFKAQKSVSVLLPMPIQEERFVTYVGCAFALKALQFLHKLISQITIDVFFIDWERPKGKVLKAVEGEGGVRSATVPVSIWRTYFVANEWNEIQTVRKINSLFQVLTVLFFLEVVGFKNLALMDSSSSLSRNPPSYIAPYSCILRYAVSAALWLAIGIIQVVFFAVFYERFIEDKIRQFVDLCSMSNISVFLLSHKCFGYYIHGRSVHGHADTNMEEMNMNLKREAENLCSQRGLVPNTDGQTFEIAISNQMRQHYDRIHETLIRKNGPARLLSSSASTFEQSIKAYHMMNKFLGSFIDHVHKEMDYFIKDKLLLERILGMEFMEPMEKSIFYNDEGYSFSSVLYYGNEATLLIFDLLFFCVVDLACQNFILASFLTYLQQEIFRYIRNTVGQKNLASKTLVDQRFLI

SEQ ID NO: 67855 - protein, 995 aa, Homo sapiens
MATRGGAGVAMAVWSLLSARAVTAFLLLFLPRFLQAQTFSFPFQQPEKCDNNQYFDISALSCVPCGANQRQDARGTSCVCLPGFQMISNNGGPAIICKKCPENMKGVTEDGWNCISCPSDLTAEGKCHCPIGHILVERDINGTLLSQATCELCDGNENSFMVVNALGDRCVRCEPTFVNTSRSCACSEPNILTGGLCFSSTGNFPLRRISAARYGEVGMSLTSEWFAKYLQSSAAACWVYANLTSCQALGNMCVMNMNSYDFATFDACGLFQFIFENTAGLSTVHSISFWRQNLPWLFYGDQLGLAPQVLSSTSLPTNFSFKGENQNTKLKFVAASYDIRGNFLKWQTLEGGVLQLCPDTETRLNAAYSFGTTYQQNCEIPISKILIDFPTPIFYDVYLEYTDENQHQYILAVPVLNLNLQHNKIFVNQDSNSGKWLLTRRIFLVDAVSGRENDLGTQPRVIRVATQISLSVHLVPNTINGNIYPPLITIAYSDIDIKDANSQSVKVSFSVTYEMDHGEAHVQTDIALGVLGGLAVLASLLKTAGWKRRIGSPMIDLQTVVKFLVYYAGDLANVFFIITVGTGLYWLIFFKAQKSVSVLLPMPIQEERFVTYVGCAFALKALQFLHKLISQITIDVFFIDWERPKGKVLKAVEGEGGVRSATVPVSIWRTYFVANEWNEIQTVRKINSLFQVLTVLFFLEVVGFKNLALMDSSSSLSRNPPSYIAPYSCILRYAVSAALWLAIGIIQVVFFAVFYERFIEDKIRQFVDLCSMSNISVFLLSHKCFGYYIHGRSVHGHADTNMEEMNMNLKREAENLCSQRGLVPNTDGQTFEIAISNQMRQHYDRIHETLIRKNGPARLLSSSASTFEQSIKAYHMMNKFLGSFIDHVHKEMDYFIKDKLLLERILGMEFMEPMEKSIFYNDEGYSFSSVLYYGNEATLLIFDLLFFCVVDLACQNFILASFLTYLQQEIFRYIRNTVGQKNLASKTLVDQRFLI

SEQ ID NO: 67856 - protein, 260 aa, Homo sapiens
MLFLALGSPWAVELPLCGRRTALCAAAALRGPRASVSRASSSSGPSGPVAGWSTGPSGAARLLRRPGRAQIPVYWEGYVRFLNTPSDKSEDGRLIYTGNMARAVFGVKCFSYSTSLIGLTFLPYIFTQNNAISESVPLPIQIIFYGIMGSFTVITPVLLHFITKGYVIRLYHEATTDTYKAITYNAMLAETSTVFHQNDVKIPDAKHVFTTFYAKTKSLLVNPVLFPNREDYIHLMGYDKEEFILYMEETSEEKRHKDDK

SEQ ID NO: 67857 - protein, 107 aa, Homo sapiens
MLFLALGSPWAVELPLCGRRTALCAAAALRGPRASVSRASSSSGPSGPVAGWSTGPSGAARLLRRPGRAQIPVYWEGYVRFLNTPSDKSEDGRLIYTGNMARAVFGK

SEQ ID NO: 67858 - protein, 305 aa, Homo sapiens
MELHYLAKKSNQADLCDARDWSSRGLPGDQADTAATRAALCCQKQCASTPRATEMEGSKLSSSPASPSSSLQNSTLQPDAFPPGLLHSGNNQITAERKVCNCCSQELETSFTYVDKNINLEQRNRSSPSAKGHNHPGELGWENPNEWSQEAAISLISEEEDDTSSEATSSGKSIDYGFISAILFLVTGILLVIISYIVPREVTVDPNTVAAREMERLEKESARLGAHLDRCVIAGLCLLTLGGVILSCLLMMSMWKGELYRRNRFASSKESAKLYGSFNFRMKTSTNENTLELSLVEEDALAVQS

SEQ ID NO: 67859 - protein, 176 aa, Homo sapiens
MGAPATRRCVEWLLGLYFLSHIPITLFMDLQAVLPRELYPVEFRNLLKWYAKEFKDPLLQEPPAWFKSFLFCELVFQLPFFPIATYAFLKGSCKWIRTPAIIYSVHTMTTLIPILSTFLFEDFSKASGFKGQRPETLHERLTLVSVYAPYLLIPFILLIFMLRSPYYKYEEKRKKK

SEQ ID NO: 67860 - protein, 69 aa, Homo sapiens
MTTLIPILSTFLFEDFSKASGFKGQRPETLHERLTLVSVYAPYLLIPFILLIFMLRSPYYKYEEKRKKK

SEQ ID NO: 67861 - protein, 374 aa, Homo sapiens
MVLWESPRQCSSWTLCEGFCWLLLLPVMLLIVARPVKLAAFPTSLSDCQTPTGWNCSGYDDRENDLFLCDTNTCKFDGECLRIGDTVTCVCQFKCNNDYVPVCGSNGESYQNECYLRQAACKQQSEILVVSEGSCATDAGSGSGDGVHEGSGETSQKETSTCDICQFGAECDEDAEDVWCVCNIDCSQTNFNPLCASDGKSYDNACQIKEASCQKQEKIEVMSLGRCQDNTTTTTKSEDGHYARTDYAENANKLEESAREHHIPCPEHYNGFCMHGKCEHSINMQEPSCRCDAGYTGQHCEKKDYSVLYVVPGPVRFQYVLIAAVIGTIQIAVICVVVLCITRKCPRSNRIHRQKQNTGHYSSDNTTRASTRLI

SEQ ID NO: 67862 - protein, 175 aa, Homo sapiens
MVLWESPRQCSSWTLCEGFCWLLLLPVMLLIVARPVKLAAFPTSLSDCQTPTGWNCSGYDDRENDLFLCDTNTCKFDGECLRIGDTVTCVCQFKCNNDYVPVCGSNGESYQNECYLRQAACKQQSEILVVSEGSCATDAGSGSGDGGRSCLFTYLKIYWWILLCIFTYVCSISDI

SEQ ID NO: 67863 - protein, 808 aa, Homo sapiens
MAELLASAGSACSWDFPRAPPSFPPPAASRGGLGGTRSFRPHRGAESPRPGRDRDGVRVPMASSRCPAPRGCRCLPGASLAWLGTVLLLLADWVLLRTALPRIFSLLVPTALPLLRVWAVGLSRWAVLWLGACGVLRATVGSKSENAGAQGWLAALKPLAAALGLALPGLALFRELISWGAPGSADSTRLLHWGSHPTAFVVSYAAALPAAALWHKLGSLWVPGGQGGSGNPVRRLLGCLGSETRRLSLFLVLVVLSSLGEMAIPFFTGRLTDWILQDGSADTFTRNLTLMSILTIASAVLEFVGDGIYNNTMGHVHSHLQGEVFGAVLRQETEFFQQNQTGNIMSRVTEDTSTLSDSLSENLSLFLWYLVRGLCLLGIMLWGSVSLTMVTLITLPLLFLLPKKVGKWYQLLEVQVRESLAKSSQVAIEALSAMPTVRSFANEEGEAQKFREKLQEIKTLNQKEAVAYAVNSWTTSISGMLLKVGILYIGGQLVTSGAVSSGNLVTFVLYQMQFTQAVEVLLSIYPRVQKAVGSSEKIFEYLDRTPRCPPSGLLTPLHLEGLVQFQDVSFAYPNRPDVLVLQGLTFTLRPGEVTALVGPNGSGKSTVAALLQNLYQPTGGQLLLDGKPLPQYEHRYLHRQVAAVGQEPQVFGRSLQENIAYGLTQKPTMEEITAAAVKSGAHSFISGLPQGYDTEVDEAGSQLSGGQRQAVALARALIRKPCVLILDDATSALDANSQLQVEQLLYESPERYSRSVLLITQHLSLVEQADHILFLEGGAIREGGTHQQLMEKKGCYWAMVQAPADAPE

SEQ ID NO: 67864 - protein, 808 aa, Homo sapiens; identical to SEQ ID NO: 67863

SEQ ID NO: 67865 - protein, 808 aa, Homo sapiens; identical to SEQ ID NO: 67863

SEQ ID NO: 67866 - protein, 808 aa, Homo sapiens; identical to SEQ ID NO: 67863

SEQ ID NO: 67867 - protein, 808 aa, Homo sapiens; identical to SEQ ID NO: 67863

SEQ ID NO: 67868 - protein, 547 aa, Homo sapiens
MAIPFFTGRLTDWILQDGSADTFTRNLTLMSILTIASAVLEFVGDGIYNNTMGHVHSHLQGEVFGAVLRQETEFFQQNQTGNIMSRVTEDTSTLSDSLSENLSLFLWYLVRGLCLLGIMLWGSVSLTMVTLITLPLLFLLPKKVGKWYQLLEVQVRESLAKSSQVAIEALSAMPTVRSFANEEGEAQKFREKLQEIKTLNQKEAVAYAVNSWTTSISGMLLKVGILYIGGQLVTSGAVSSGNLVTFVLYQMQFTQAVEVLLSIYPRVQKAVGSSEKIFEYLDRTPRCPPSGLLTPLHLEGLVQFQDVSFAYPNRPDVLVLQGLTFTLRPGEVTALVGPNGSGKSTVAALLQNLYQPTGGQLLLDGKPLPQYEHRYLHRQVAAVGQEPQVFGRSLQENIAYGLTQKPTMEEITAAAVKSGAHSFISGLPQGYDTEVDEAGSQLSGGQRQAVALARALIRKPCVLILDDATSALDANSQLQVEQLLYESPERYSRSVLLITQHLSLVEQADHILFLEGGAIREGGTHQQLMEKKGCYWAMVQAPADAPE

SEQ ID NO: 67869 - protein, 808 aa, Homo sapiens
MAELLASAGSACSWDFPRAPPSFPPPAASRGGLGGTRSFRPHRGAESPRPGRDRDGVRVPMASSRCPAPRGCRCLPGASLAWLGTVLLLLADWVLLRTALPRIFSLLVPTALPLLRVWAVGLSRWAVLWLGACGVLRATGGSKSENAGAQGWLAALKPLAAALGLALPGLALFRELISWGAPGSADSTRLLHWGSHPTAFVVSYAAALPAAALWHKLGSLWVPGGQGGSGNPVRRLLGCLGSETRRLSLFLVLVVLSSLGEMAIPFFTGRLTDWILQDGSADTFTRNLTLMSILTIASAVLEFVGDGIYNNTMGHVHSHLQGEVFGAVLRQETEFFQQNQTGNIMSRVTEDTSTLSDSLSENLSLFLWYLVRGLCLLGIMLWGSVSLTMVTLITLPLLFLLPKKVGKWYQLLEVQVRESLAKSSQVAIEALSAMPTVRSFANEEGEAQKFREKLQEIKTLNQKEAVAYAVNSWTTSISGMLLKVGILYIGGQLVTSGAVSSGNLVTFVLYQMQFTQAVEVLLSIYPRVQKAVGSSEKIFEYLDRTPRCPPSGLLTPLHLEGLVQFQDVSFAYPNRPDVLVLQGLTFTLRPGEVTALVGPNGSGKSTVAALLQNLYQPTGGQLLLDGKPLPQYEHRYLHRQVAAVGQEPQVFGRSLQENIAYGLTQKPTMEEITAAAVKSGAHSFISGLPQGYDTEVDEAGSQLSGGQRQAVALARALIRKPCVLILDDATSALDANSQLQVEQLLYESPERYSRSVLLITQHLSLVEQADHILFLEGGAIREGGTHQQLMEKKGCYWAMVQAPADAPE

SEQ ID NO: 67870 - protein, 808 aa, Homo sapiens; identical to SEQ ID NO: 67863

SEQ ID NO: 67871 - protein, 808 aa, Homo sapiens; identical to SEQ ID NO: 67863

SEQ ID NO: 67872 - protein, 547 aa, Homo sapiens; identical to SEQ ID NO: 67868

SEQ ID NO: 67873 - protein, 547 aa, Homo sapiens; identical to SEQ ID NO: 67868

SEQ ID NO: 67874 - protein, 547 aa, Homo sapiens; identical to SEQ ID NO: 67868

SEQ ID NO: 67875 - protein, 547 aa, Homo sapiens; identical to SEQ ID NO: 67868

SEQ ID NO: 67876 - protein, 547 aa, Homo sapiens; identical to SEQ ID NO: 67868

SEQ ID NO: 67877 - protein, 547 aa, Homo sapiens; identical to SEQ ID NO: 67868

SEQ ID NO: 67878 - protein, 547 aa, Homo sapiens; identical to SEQ ID NO: 67868

SEQ ID NO: 67879 - protein, 686 aa, Homo sapiens
MRLPDLRPWTSLLLVDAALLWLLQGPLGTLLPQGLPGLWLEGTLRLGGLWGLLKLRGLLGFVGTLLLPLCLATPLTVSLRALVAGASRAPPARVASAPWSWLLVGYGAAGLSWSLWAVLSPPGAQEKEQDQVNNKVLMWRLLKLSRPDLPLLVAAFFFLVLAVLGETLIPHYSGRVIDILGGDFDPHAFASAIFFMCLFSFGSSLSAGCRGGCFTYTMSRINLRIREQLFSSLLRQDLGFFQETKTGELNSRLSSDTTLMSNWLPLNANVLLRSLVKVVGLYGFMLSISPRLTLLSLLHMPFTIAAEKVYNTRHQEVLREIQDAVARAGQVVREAVGGLQTVRSFGAEEHEVCRYKEALEQCRQLYWRRDLERALYLLVRRVLHLGVQMLMLSCGLQQMQDGELTQGSLLSFMIYQESVGSYVQTLVYIYGDMLSNVGAAEKVFSYMDRQPNLPSPGTLAPTTLQGVVKFQDVSFAYPNRPDRPVLKGLTFTLRPGEVTALVGPNGSGKSTVAALLQNLYQPTGGQVLLDEKPISQYEHCYLHSQVVSVGQEPVLFSGSVRNNIAYGLQSCEDDKVMAAAQAAHADDFIQEMEHGIYTDVGEKGSQLAAGQKQRLAIARALVRDPRVLILDEATSALDVQCEQALQDWNSRGDRTVLVIAHRLQTVQRAHQILVLQEGKLQKLAQL

SEQ ID NO: 67880 - protein, 653 aa, Homo sapiens
MRLPDLRPWTSLLLVDAALLWLLQGPLGTLLPQGLPGLWLEGTLRLGGLWGLLKLRGLLGFVGTLLLPLCLATPLTVSLRALVAGASRAPPARVASAPWSWLLVGYGAAGLSWSLWAVLSPPGAQEKEQDQVNNKVLMWRLLKLSRPDLPLLVAAFFFLVLAVLGETLIPHYSGRVIDILGGDFDPHAFASAIFFMCLFSFGSSLSAGCRGGCFTYTMSRINLRIREQLFSSLLRQDLGFFQETKTGELNSRLSSDTTLMSNWLPLNANVLLRSLVKVVGLYGFMLSISPRLTLLSLLHMPFTIAAEKVYNTRHQEVLREIQDAVARAGQVVREAVGGLQTVRSFGAEEHEVCRYKEALEQCRQLYWRRDLERALYLLVRRVLHLGVQMLMLSCGLQQMQDGELTQGSLLSFMIYQESVGSYVQTLVYIYGDMLSNVGAAEKVFSYMDRQPNLPSPGTLAPTTLQGVVKFQDVSFAYPNRPDRPVLKGLTFTLRPGEVTALVGPNGSGKSTVAALLQNLYQPTGGQVLLDEKPISQYEHCYLHSQVVSVGQEPVLFSGSVRNNIAYGLQSCEDDKVMAAAQAAHADDFIQEMEHGIYTDVGEKGSQLAAGQKQRLAIARALVRDPRVLILDEATSALDVQCEQAKTLWKFMIF

SEQ ID NO: 67881 - protein, 686 aa, Homo sapiens; identical to SEQ ID NO: 67879

SEQ ID NO: 67882 - protein, 653 aa, Homo sapiens; identical to SEQ ID NO: 67880

SEQ ID NO: 67883 - protein, 686 aa, Homo sapiens; identical to SEQ ID NO: 67879

SEQ ID NO: 67884 - protein, 653 aa, Homo sapiens; identical to SEQ ID NO: 67880

SEQ ID NO: 67885 - protein, 653 aa, Homo sapiens; identical to SEQ ID NO: 67880

SEQ ID NO: 67886 - protein, 686 aa, Homo sapiens
MRLPDLRPWTSLLLVDAALLWLLQGPLGTLLPQGLPGLWLEGTLRLGGLWGLLKLRGLLGFVGTLLLPLCLATPLTVSLRALVAGASRAPPARVASAPWSWLLVGYGAAGLSWSLWAVLSPPGAQEKEQDQVNNKVLMWRLLKLSRPDLPLLVAAFFFLVLAVLGETLIPHYSGRVIDILGGDFDPHAFASAIFFMCLFSFGSSLSAGCRGGCFTYTMSRINLRIREQLFSSLLRQDLGFFQETKTGELNSRLSSDTTLMSNWLPLNANVLLRSLVKVVGLYGFMLSISPRLTLLSLLHMPFTIAAEKVYNTRHQEVLREIQDAVARAGQVVREAVGGLQTVRSFGAEEHEVCRYKEALEQCRQLYWRRDLERALYLLIRRVLHLGVQMLMLSCGLQQMQDGELTQGSLLSFMIYQESVGSYVQTLVYIYGDMLSNVGAAEKVFSYMDRQPNLPSPGTLAPTTLQGVVKFQDVSFAYPNRPDRPVLKGLTFTLRPGEVTALVGPNGSGKSTVAALLQNLYQPTGGQVLLDEKPISQYEHCYLHSQVVSVGQEPVLFSGSVRNNITYGLQSCEDDKVMAAAQAAHADDFIQEMEHGIYTDVGEKGSQLAAGQKQRLAIARALVRDPRVLILDEATSALDVQCEQALQDWNSRGDRTVLVIAHRLQTVQRAHQILVLQEGKLQKLAQL

SEQ ID NO: 67887 - protein, 653 aa, Homo sapiens; identical to SEQ ID NO: 67880

SEQ ID NO: 67888 - protein, 653 aa, Homo sapiens; identical to SEQ ID NO: 67880

SEQ ID NO: 67889 - protein, 686 aa, Homo sapiens; identical to SEQ ID NO: 67879

SEQ ID NO: 67890 - protein, 653 aa, Homo sapiens
MRLPDLRPWTSLLLVDAALLWLLQGPLGTLLPQGLPGLWLEGTLRLGGLWGLLKLRGLLGFVGTLLLPLCLATPLTVSLRALVAGASRAPPARVASAPWSWLLVGYGAAGLSWSLWAVLSPPGAQEKEQDQVNNKVLMWRLLKLSRPDLPLLVAAFFFLVLAVLGETLIPHYSGRVIDILGGDFDPHAFASAIFFMCLFSFGSSLSAGCRGGCFTYTMSRINLRIREQLFSSLLRQDLGFFQETKTGELNSRLSSDTTLMSNWLPLNANVLLRSLVKVVGLYGFMLSISPRLTLLSLLHMPFTIAAEKVYNTRHQEVLREIQDAVARAGQVVREAVGGLQTVRSFGAEEHEVCRYKEALEQCRQLYWRRDLERALYLLIRRVLHLGVQMLMLSCGLQQMQDGELTQGSLLSFMIYQESVGSYVQTLVYIYGDMLSNVGAAEKVFSYMDRQPNLPSPGTLAPTTLQGVVKFQDVSFAYPNRPDRPVLKGLTFTLRPGEVTALVGPNGSGKSTVAALLQNLYQPTGGQVLLDEKPISQYEHCYLHSQVVSVGQEPVLFSGSVRNNITYGLQSCEDDKVMAAAQAAHADDFIQEMEHGIYTDVGEKGSQLAAGQKQRLAIARALVRDPRVLILDEATSALDVQCEQAKTLWKFMIF

SEQ ID NO: 67891 - protein, 653 aa, Homo sapiens; identical to SEQ ID NO: 67880

SEQ ID NO: 67892 - protein, 703 aa, Homo sapiens
MRLPDLRPWTSLLLVDAALLWLLQGPLGTLLPQGLPGLWLEGTLRLGGLWGLLKLRGLLGFVGTLLLPLCLATPLTVSLRALVAGASRAPPARVASAPWSWLLVGYGAAGLSWSLWAVLSPPGAQEKEQDQVNNKVLMWRLLKLSRPDLPLLVAAFFFLVLAVLGETLIPHYSGRVIDILGGDFDPHAFASAIFFMCLFSFGSSLSAGCRGGCFTYTMSRINLRIREQLFSSLLRQDLGFFQETKTGELNSRLSSDTTLMSNWLPLNANVLLRSLVKVVGLYGFMLSISPRLTLLSLLHMPFTIAAEKVYNTRHQEVLREIQDAVARAGQVVREAVGGLQTVRSFGAEEHEVCRYKEALEQCRQLYWRRDLERALYLLVRRVLHLGVQMLMLSCGLQQMQDGELTQGSLLSFMIYQESVGSYVQTLVYIYGDMLSNVGAAEKVFSYMDRQPNLPSPGTLAPTTLQGVVKFQDVSFAYPNRPDRPVLKGLTFTLRPGEVTALVGPNGSGKSTVAALLQNLYQPTGGQVLLDEKPISQYEHCYLHSQVVSVGQEPVLFSGSVRNNIAYGLQSCEDDKVMAAAQAAHADDFIQEMEHGIYTDVGEKGSQLAAGQKQRLAIARALVRDPRVLILDEATSALDVQCEQALQDWNSRGDRTVLVIAHRLQAVQRAHQILVLQEGKLQKLAQLQEGQDLYSRLVQQRLMD

SEQ ID NO: 67893 - protein, 703 aa, Homo sapiens; identical to SEQ ID NO: 67892

SEQ ID NO: 67894 - protein, 703 aa, Homo sapiens; identical to SEQ ID NO: 67892

SEQ ID NO: 67895 - protein, 769 aa, Homo sapiens
MRLPDLRPWTSLLLVDAALLWLLQGPLGTLLPQGLPGLWLEGTLRLGGLWGLLKLRGLLGFVGTLLLPLCLATPLTVSLRALVAGASRAPPARVASAPWSWLLVGYGAAGLSWSLWAVLSPPGAQEKEQDQVNNKVLMWRLLKLSRPDLPLLVAAFFFLVLAVLGETLIPHYSGRVIDILGGDFDPHAFASAIFFMCLFSFGSSLSAGCRGGCFTYTMSRINLRIREQLFSSLLRQDLGFFQETKTGELNSRLSSDTTLMSNWLPLNANVLLRSLVKVVGLYGFMLSISPRLTLLSLLHMPFTIAAEKVYNTRHQEVLREIQDAVARAGQVVREAVGGLQTVRSFGAEEHEVCRYKEALEQCRQLYWRRDLERALYLLVRRVLHLGVQMLMLSCGLQQMQDGELTQGSLLSFMIYQESVGSYVQTLVYIYGDMLSNVGAAEKVFSYMDRQPNLPSPGTLAPTTLQGVVKFQDVSFAYPNRPDRPVLKGLTFTLRPGEVTALVGPNGSGKSTVAALLQNLYQPTGGQVLLDEKPISQYEHCYLHSQVVSVGQEPVLFSGSVRNNIAYGLQSCEDDKVMAAAQAAHADDFIQEMEHGIYTDVGEKGSQLAAGQKQRLAIARALVRDPRVLILDEATSALDVQCEQANGFWVGPLGGGSASESDPTGFLHDSRHRLSSDVGMFVALTKLGQPDAEQWNSRLDLLERSRQAVDGVCRHNYRLGAPFTVGRKVQPEVTVYPERTPLLHQHNLLHCSVTGFYPGDIKIKWFLNGQ

SEQ ID NO: 67896 - protein, 769 aa, Homo sapiens; identical to SEQ ID NO: 67895

SEQ ID NO: 67897 - protein, 769 aa, Homo sapiens; identical to SEQ ID NO: 67895

SEQ ID NO: 67898 - protein, 769 aa, Homo sapiens
MRLPDLRPWTSLLLVDAALLWLLQGPLGTLLPQGLPGLWLEGTLRLGGLWGLLKLRGLLGFVGTLLLPLCLATPLTVSLRALVAGASRAPPARVASAPWSWLLVGYGAAGLSWSLWAVLSPPGAQEKEQDQVNNKVLMWRLLKLSRPDLPLLVAAFFFLVLAVLGETLIPHYSGRVIDILGGDFDPHAFASAIFFMCLFSFGSSLSAGCRGGCFTYTMSRINLRIREQLFSSLLRQDLGFFQETKTGELNSRLSSDTTLMSNWLPLNANVLLRSLVKVVGLYGFMLSISPRLTLLSLLHMPFTIAAEKVYNTRHQEVLREIQDAVARAGQVVREAVGGLQTVRSFGAEEHEVCRYKEALEQCRQLYWRRDLERALYLLIRRVLHLGVQMLMLSCGLQQMQDGELTQGSLLSFMIYQESVGSYVQTLVYIYGDMLSNVGAAEKVFSYMDRQPNLPSPGTLAPTTLQGVVKFQDVSFAYPNRPDRPVLKGLTFTLRPGEVTALVGPNGSGKSTVAALLQNLYQPTGGQVLLDEKPISQYEHCYLHSQVVSVGQEPVLFSGSVRNNITYGLQSCEDDKVMAAAQAAHADDFIQEMEHGIYTDVGEKGSQLAAGQKQRLAIARALVRDPRVLILDEATSALDVQCEQANGFWVGPLGGGSASESDPTGFLHDSRHRLSSDVGMFVALTKLGQPDAEQWNSRLDLLERSRQAVDGVCRHNYRLGAPFTVGRKVQPEVTVYPERTPLLHQHNLLHCSVTGFYPGDIKIKWFLNGQ

SEQ ID NO: 67899 - protein, 769 aa, Homo sapiens; identical to SEQ ID NO: 67895

SEQ ID NO: 67900 - protein, 769 aa, Homo sapiens; identical to SEQ ID NO: 67895

SEQ ID NO: 67901 - protein, 898 aa, Homo sapiens
MVWDRQTKMEYEWKPDEQGLQQILQLLKESQSPDTTIQRTVQQKLEQLNQYPDFNNYLIFVLTKLKSEDEPTRSLSGLILKNNVKAHFQNFPNGVTDFIKSECLNNIGDSSPLIRATVGILITTIASKGELQNWPDLLPKLCSLLDSEDYNTCEGAFGALQKICEDSAEILDSDVLDRPLNIMIPKFLQFFKHSSPKIRSHAVACVNQFIISRTQALMLHIDSFIENLFALAGDEEPEVRKNVCRALVMLLEVRMDRLLPHMHNIVEYMLQRTQDQDENVALEACEFWLTLAEQPICKDVLVRHLPKLIPVLVNGMKYSDIDIILLKGDVEEDETIPDSEQDIRPRFHRSRTVAQQHDEDGIEEEDDDDDEIDDDDTISDWNLRKCSAAALDVLANVYRDELLPHILPLLKELLFHHEWVVKESGILVLGAIAEGCMQGMIPYLPELIPHLIQCLSDKKALVRSITCWTLSRYAHWVVSQPPDTYLKPLMTELLKRILDSNKRVQEAACSAFATLEEEACTELVPYLAYILDTLVFAFSKYQHKNLLILYDAIGTLADSVGHHLNKPEYIQMLMPPLIQKWNMLKDEDKDLFPLLECLSSVATALQSGFLPYCEPVYQRCVNLVQKTLAQAMLNNAQPDQYEAPDKDFMIVALDLLSGLAEGLGGNIEQLVARSNILTLMYQCMQDKMPEVRQSSFALLGDLTKACFQHVKPCIADFMPILGTNLNPEFISVCNNATWAIGEISIQMGIEMQPYIPMVLHQLVEIINRPNTPKTLLENTAITIGRLGYVCPQEVAPMLQQFIRPWCTSLRNIRDNEEKDSAFRGICTMISVNPSGVIQDFIFFCDAVASWINPKDDLRDMFCKILHGFKNQVGDENWRRFSDQFPLPLKERLAAFYGV

SEQ ID NO: 67902 - protein, 128 aa, Homo sapiens
MEYEWKPDEQGLQQILQLLKESQSPDTTIQRTVQQKLEQLNQYPDFNNYLIFVLTKLKSEDEPTRSLSGLILKNNVKAHFQNFPNGVTDFIKSECLNNIGDSSPLIRATVGLTLLHVSISLSSVGLKL

SEQ ID NO: 67903 - protein, 848 aa, Homo sapiens
MVWDRQTKMEYEWKPDEQGLQQILQLLKESQSPDTTIQRTVQQKLEQLNQYPDFNNYLIFVLTKLKSEGILITTIASKGELQNWPDLLPKLCSLLDSEDYNTCEGAFGALQKICEDSAEILDSDVLDRPLNIMIPKFLQFFKHSSPKIRSHAVACVNQFIISRTQALMLHIDSFIENLFALAGDEEPEVRKNVCRALVMLLEVRMDRLLPHMHNIVEYMLQRTQDQDENVALEACEFWLTLAEQPICKDVLVRHLPKLIPVLVNGMKYSDIDIILLKGDVEEDETIPDSEQDIRPRFHRSRTVAQQHDEDGIEEEDDDDDEIDDDDTISDWNLRKCSAAALDVLANVYRDELLPHILPLLKELLFHHEWVVKESGILVLGAIAEGCMQGMIPYLPELIPHLIQCLSDKKALVRSITCWTLSRYAHWVVSQPPDTYLKPLMTELLKRILDSNKRVQEAACSAFATLEEEACTELVPYLAYILDTLVFAFSKYQHKNLLILYDAIGTLADSVGHHLNKPEYIQMLMPPLIQKWNMLKDEDKDLFPLLECLSSVATALQSGFLPYCEPVYQRCVNLVQKTLAQAMLNNAQPDQYEAPDKDFMIVALDLLSGLAEGLGGNIEQLVARSNILTLMYQCMQDKMPEVRQSSFALLGDLTKACFQHVKPCIADFMPILGTNLNPEFISVCNNATWAIGEISIQMGIEMQPYIPMVLHQLVEIINRPNTPKTLLENTAITIGRLGYVCPQEVAPMLQQFIRPWCTSLRNIRDNEEKDSAFRGICTMISVNPSGVIQDFIFFCDAVASWINPKDDLRDMFCKILHGFKNQVGDENWRRFSDQFPLPLKERLAAFYGV

SEQ ID NO: 67904 - protein, 890 aa, Homo sapiens
MEYEWKPDEQGLQQILQLLKESQSPDTTIQRTVQQKLEQLNQYPDFNNYLIFVLTKLKSEDEPTRSLSGLILKNNVKAHFQNFPNGVTDFIKSECLNNIGDSSPLIRATVGILITTIASKGELQNWPDLLPKLCSLLDSEDYNTCEGAFGALQKICEDSAEILDSDVLDRPLNIMIPKFLQFFKHSSPKIRSHAVACVNQFIISRTQALMLHIDSFIENLFALAGDEEPEVRKNVCRALVMLLEVRMDRLLPHMHNIVEYMLQRTQDQDENVALEACEFWLTLAEQPICKDVLVRHLPKLIPVLVNGMKYSDIDIILLKGDVEEDETIPDSEQDIRPRFHRSRTVAQQHDEDGIEEEDDDDDEIDDDDTISDWNLRKCSAAALDVLANVYRDELLPHILPLLKELLFHHEWVVKESGILVLGAIAEGCMQGMIPYLPELIPHLIQCLSDKKALVRSITCWTLSRYAHWVVSQPPDTYLKPLMTELLKRILDSNKRVQEAACSAFATLEEEACTELVPYLAYILDTLVFAFSKYQHKNLLILYDAIGTLADSVGHHLNKPEYIQMLMPPLIQKWNMLKDEDKDLFPLLECLSSVATALQSGFLPYCEPVYQRCVNLVQKTLAQAMLNNAQPDQYEAPDKDFMIVALDLLSGLAEGLGGNIEQLVARSNILTLMYQCMQDKMPEVRQSSFALLGDLTKACFQHVKPCIADFMPILGTNLNPEFISVCNNATWAIGEISIQMGIEMQPYIPMVLHQLVEIINRPNTPKTLLENTAITIGRLGYVCPQEVAPMLQQFIRPWCTSLRNIRDNEEKDSAFRGICTMISVNPSGVIQDFIFFCDAVASWINPKDDLRDMFCKILHGFKNQVGDENWRRFSDQFPLPLKERLAAFYGV

SEQ ID NO: 67905 - protein, 887 aa, Homo sapiens
MDWQPDEQGLQQVLQLLKDSQSPNTATQRIVQDKLKQLNQFPDFNNYLIFVLTRLKSEDEPTRSLSGLILKNNVKAHYQSFPPPVADFIKQECLNNIGDASSLIRATIGILITTIASKGELQMWPELLPQLCNLLNSEDYNTCEGAFGALQKICEDSSELLDSDALNRPLNIMIPKFLQFFKHCSPKIRSHAIACVNQFIMDRAQALMDNIDTFIEHLFALAVDDDPEVRKNVCRALVMLLEVRIDRLIPHMHSIIQYMLQRTQDHDENVALEACEFWLTLAEQPICKEVLASHLVQLIPILVNGMKYSEIDIILLKGDVEEDEAVPDSEQDIKPRFHKSRTVTLPHEAERPDGSEDAEDDDDDDALSDWNLRKCSAAALDVLANVFREELLPHLLPLLKGLLFHPEWVVKESGILVLGAIAEGCMQGMVPYLPELIPHLIQCLSDKKALVRSIACWTLSRYAHWVVSQPPDMHLKPLMTELLKRILDGNKRVQEAACSAFATLEEEACTELVPYLSYILDTLVFAFGKYQHKNLLILYDAIGTLADSVGHHLNQPEYIQKLMPPLIQKWNELKDEDKDLFPLLECLSSVATALQSGFLPYCEPVYQRCVTLVQKTLAQAMMYTQHPEQYEAPDKDFMIVALDLLSGLAEGLGGHVEQLVARSNIMTLLFQCMQDSMPEVRQSSFALLGDLTKACFIHVKPCIAEFMPILGTNLNPEFISVCNNATWAIGEICMQMGAEMQPYVQMVLNNLVEIINRPNTPKTLLENTAITIGRLGYVCPQEVAPMLQQFIRPWCTSLRNIRDNEEKDSAFRGICMMIGVNPGGVVQDFIFFCDAVASWVSPKDDLRDMFYKILHGFKDQVGEDNWQQFSEQFPPLLKERLAAFYGV

SEQ ID NO: 67906 - protein, 699 aa, Homo sapiens
MDWQPDEQGLQQVLQLLKDSQSPNTATQRIVQDKLKQLNQFPDFNNYLIFVLTRLKSEDEPTRSLSGLILKNNVKAHYQSFPPPVADFIKQECLNNIGDASSLIRATIGILITTIASKGELQMWPELLPQLCNLLNSEDYNTCEGAFGALQKICEDSSELLDSDALNRPLNIMIPKFLQFFKHCSPKIRSHAIACVNQFIMDRAQALMDNIDTFIEHLFALAVDDDPEVRKNVCRALVMLLEVRIDRLIPHMHSIIQYMLQRTQDHDENVALEACEFWLTLAEQPICKEVLASHLVQLIPILVNGMKYSEIDIILLKGDVEEDEAVPDSEQDIKPRFHKSRTVTLPHEAERPDGSEDAEDDDDDDALSDWNLRKCSAAALDVLANVFREELLPHLLPLLKGLLFHPEWVVKESGILVLGAIAEGCMQGMVPYLPELIPHLIQCLSDKKALVRSIACWTLSRYAHWVVSQPPDMHLKPLMTELLKRILDGNKRVQEAACSAFATLEEEACTELVPYLSYILDTLVFAFGKYQHKNLLILYDAIGTLADSVGHHLNQPEYIQKLMPPLIQKWNELKDEDKDLFPLLECLSSVATALQSGFLPYCEPVYQRCVTLVQKTLAQAMMYTQHPEQYEAPDKDFMIVALDLLSGLAEGLGGHVEQLVAHSPSFPPHPLPPAGSRVCPFVTVLCWGLAPRWREIPLV

SEQ ID NO: 67907 - protein, 897 aa, Homo sapiens
MDWQPDEQGLQQVLQLLKDSQSPNTATQRIVQDKLKQLNQFPDFNNYLIFVLTRLKSEDEPTRSLSGLILKNNVKAHYQSFPPPVADFIKQECLNNIGDASSLIRATIGILITTIASKGELQMWPELLPQLCNLLNSEDYNTCEGAFGALQKICEDSSELLDSDALNRPLNIMIPKFLQFFKHCSPKIRSHAIACVNQFIMDRAQALMDNIDTFIEHLFALAVDDDPEVRKNVCRALVMLLEVRIDRLIPHMHSIIQYMLQRTQDHDENVALEACEFWLTLAEQPICKEVLASHLVQLIPILVNGMKYSEIDIILLKGDVEEDEAVPDSEQDIKPRFHKSRTVTLPHEAERPDGSEDAEDDDDDDALSDWNLRKCSAAALDVLANVFREELLPHLLPLLKGLLFHPEWVVKESGILVLGAIAEGCMQGMVPYLPELIPHLIQCLSDKKALVRSIACWTLSRYAHWVVSQPPDMHLKPLMTELLKRILDGNKRVQEAACSAFATLEEEACTELVPYLSYILDTLVFAFGKYQHKNLLILYDAIGTLADSVGHHLNQPEYIQKLMPPLIQKWNELKDEDKDLFPLLECLSSVATALQSGFLPYCEPVYQRCVTLVQKTLAQAMMYTQHPEQYEAPDKDFMIVALDLLSGLAEGLGGHVEQLVARSNIMTLLFQCMQDSMPEVRQSSFALLGDLTKACFIHVKPCIAEFMPILGTNLNPEFISVCNNATWAIGEICMQMGAEMQPYVQMVLNNLVEIINRPNTPKTLLENTGRLTSPSAIPAITIGRLGYVCPQEVAPMLQQFIRPWCTSLRNIRDNEEKDSAFRGICMMIGVNPGGVVQDFIFFCDAVASWVSPKDDLRDMFYKILHGFKDQVGEDNWQQFSEQFPPLLKERLAAFYGV

SEQ ID NO: 67908 - protein, 887 aa, Homo sapiens; identical to SEQ ID NO: 67905

SEQ ID NO: 67909 - protein, 897 aa, Homo sapiens; identical to SEQ ID NO: 67907

SEQ ID NO: 67910 - protein, 1051 aa, Homo sapiens
GQSVGGRGLFRDCACIEETTGAGALSRSGAGPLDVEAAGPSPSRCEGGGSLRARSRGQRHGPPWDEGSSLGPMRIRRAPPPPPVARFHIPPPALPSPRLRGRGWRSWRGPRTWAGVDRRPPPVRRGRSRRHAATAASGAPPGSHTEPQRPSADPGPYLRSLPCAMDWQPDEQGLQQVLQLLKDSQSPNTATQRIVQDKLKQLNQFPDFNNYLIFVLTRLKSEDEPTRSLSGLILKNNVKAHYQSFPPPVADFIKQECLNNIGDASSLIRATIGILITTIASKGELQMWPELLPQLCNLLNSEDYNTCEGAFGALQKICEDSSELLDSDALNRPLNIMIPKFLQFFKHCSPKIRSHAIACVNQFIMDRAQALMDNIDTFIEHLFALAVDDDPEVRKNVCRALVMLLEVRIDRLIPHMHSIIQYMLQRTQDHDENVALEACEFWLTLAEQPICKEVLASHLVQLIPILVNGMKYSEIDIILLKGDVEEDEAVPDSEQDIKPRFHKSRTVTLPHEAERPDGSEDAEDDDDDDALSDWNLRKCSAAALDVLANVFREELLPHLLPLLKGLLFHPEWVVKESGILVLGAIAEGCMQGMVPYLPELIPHLIQCLSDKKALVRSIACWTLSRYAHWVVSQPPDMHLKPLMTELLKRILDGNKRVQEAACSAFATLEEEACTELVPYLSYILDTLVFAFGKYQHKNLLILYDAIGTLADSVGHHLNQPEYIQKLMPPLIQKWNELKDEDKDLFPLLECLSSVATALQSGFLPYCEPVYQRCVTLVQKTLAQAMMYTQHPEQYEAPDKDFMIVALDLLSGLAEGLGGHVEQLVARSNIMTLLFQCMQDSMPEVRQSSFALLGDLTKACFIHVKPCIAEFMPILGTNLNPEFISVCNNATWAIGEICMQMGAEMQPYVQMVLNNLVEIINRPNTPKTLLENTAITIGRLGYVCPQEVAPMLQQFIRPWCTSLRNIRDNEEKDSAFRGICMMIGVNPGGVVQDFIFFCDAVASWVSPKDDLRDMFYKILHGFKDQVGEDNWQQFSEQFPPLLKERLAAFYGV

SEQ ID NO: 67911 - protein, 771 aa, Homo sapiens
MDWQPDEQGLQQVLQLLKDSQSPNTATQRIVQDKLKQLNQFPDFNNYLIFVLTRLKSEDEPTRSLSGLILKNNVKAHYQSFPPPVADFIKQECLNNIGDASSLIRATIGILITTIASKGELQMWPELLPQLCNLLNSEDYNTCEGAFGALQKICEDSSELLDSDALNRPLNIMIPKFLQFFKHCSPKIRSHAIACVNQFIMDRAQALMDNIDTFIEHLFALAVDDDPEVRKNVCRALVMLLEVRIDRLIPHMHSIIQYMLQRTQDHDENVALEACEFWLTLAEQPICKEVLASHLVQLIPILVNGMKYSEIDIILLKGDVEEDEAVPDSEQDIKPRFHKSRTVTLPHEAERPDGSEDAEDDDDDDALSDWNLRKCSAAALDVLANVFREELLPHLLPLLKGLLFHPEWVVKESGILVLGAIAEGCMQGMVPYLPELIPHLIQCLSDKKALVRSIACWTLSRYAHWVVSQPPDMHLKPLMTELLKRILDGNKRVQEAACSAFATLEEEACTELVPYLSYILDTLVFAFGKYQHKNLLILYDAIGTLADSVGHHLNQPEYIQKLMPPLIQKWNELKDEDKDLFPLLECLSSVATALQSGFLPYCEPVYQRCVTLVQKTLAQAMMYTQHPEQYEAPDKDFMIVALDLLSGLAEGLGGHVEQLVARSNIMTLLFQCMQDSMPEVRQSSFALLGDLTKACFIHVKPCIAEFMPILGTNLNPEFISVCNNATWAIGEICMQMGAEMQPYVQMVLNNLVEIINRPTPSQKQNKTKKNK

SEQ ID NO: 67912 - protein, 923 aa, Homo sapiens
MEGAKPTLQLVYQAVQALYHDPDPSGKERASFWLGELQRSVHAWEISDQLLQIRQDVESCYFAAQTMKMKIQTSFYELPTDSHASLRDSLLTHIQNLKDLSPVIVTQLALAIADLALQMPSWKGCVQTLVEKYSNDVTSLPFLLEILTVLPEEVHSRSLRIGANRRTEIIEDLAFYSSTVVSLLMTCVEKAGTDEKMLMKVFRCLGSWFNLGVLDSNFMANNKLLALLFEVLQQDKTSSNLHEAASDCVCSALYAIENVETNLPLAMQLFQGVLTLETAYHMAVAREDLDKVLNYCRIFTELCETFLEKIVCTPGQGLGDLRTLELLLICAGHPQYEVVEISFNFWYRLGEHLYKTNDEVIHGIFKAYIQRLLHALARHCQLEPDHEGVPEETDDFGEFRMRVSDLVKDLIFLIGSMECFAQLYSTLKEGNPPWEVTEAVLFIMAAIAKSVDPENNPTLVEVLEGVVRLPETVHTAVRYTSIELVGEMSEVVDRNPQFLDPVLGYLMKGLCEKPLASAAAKAIHNICSVCRDHMAQHFNGLLEIARSLDSFLLSPEAAVGLLKGTALVLARLPLDKITECLSELCSVQVMALKKLLSQEPSNGISSDPTVFLDRLAVIFRHTNPIVENGQTHPCQKVIQEIWPVLSETLNKHRADNRIVERCCRCLRFAVRCVGKGSAALLQPLVTQMVNVYHVHQHSCFLYLGSILVDEYGMEEGCRQGLLDMLQALCIPTFQLLEQQNGLQNHPDTVDDLFRLATRFIQRSPVTLLRSQVVIPILQWAIASTTLDHRDANCSVMRFLRDLIHTGVANDHEEDFELRKELIGQVMNQLGQQLVSQLLHTCCFCLPPYTLPDVAEVLWEIMQVDRPTFCRWLENSLKGLPKETTVGAVTVTHKQLTDFHKQVTSAEECKQVCWALRDFTRLFR

SEQ ID NO: 67913 - protein, 957 aa, Homo sapiens
MEGAKPTLQLVYQAVQALYHDPDPSGKERASFWLGELQRSVHAWEISDQLLQIRQDVESCYFAAQTMKMKIQTSFYELPTDSHASLRDSLLTHIQNLKDLSPVIVTQLALAIADLALQMPSWKGCVQTLVEKYSNDVTSLPFLLEILTVLPEEVHSRSLRIGANRRTEIIEDLAFYSSTVVSLLMTCVEKAGTDEKMLMKVFRCLGSWFNLGVLDSNFMANNKLLALLFEVLQQDKTSSNLHEAASDCVCSALYAIENVETNLPLAMQLFQGVLTLETAYHMAVAREDLDKVLNYCRIFTELCETFLEKIVCTPGQGLGDLRTLELLLICAGHPQYEVVEISFNFWYRLGEHLYKTNDEVIHGIFKAYIQRLLHALARHCQLEPDHEGVPEETDDFGEFRMRVSDLVKDLIFLIGSMECFAQLYSTLKEGNPPWEVTEAVLFIMAAIAKSVDPKKPFSNAVCRHSLLFGQNITSEISNCEYLPPVLRENNPTLVEVLEGVVRLPETVHTAVRYTSIELVGEMSEVVDRNPQFLDPVLGYLMKGLCEKPLASAAAKAIHNICSVCRDHMAQHFNGLLEIARSLDSFLLSPEAAVGLLKGTALVLARLPLDKITECLSELCSVQVMALKKLLSQEPSNGISSDPTVFLDRLAVIFRHTNPIVENGQTHPCQKVIQEIWPVLSETLNKHRADNRIVERCCRCLRFAVRCVGKGSAALLQPLVTQMVNVYHVHQHSCFLYLGSILVDEYGMEEGCRQGLLDMLQALCIPTFQLLEQQNGLQNHPDTVDDLFRLATRFIQRSPVTLLRSQVVIPILQWAIASTTLDHRDANCSVMRFLRDLIHTGVANDHEEDFELRKELIGQVMNQLGQQLVSQLLHTCCFCLPPYTLPDVAEVLWEIMQVDRPTFCRWLENSLKGLPKETTVGAVTVTHKQLTDFHKQVTSAEECKQVCWALRDFTRLFR

SEQ ID NO: 67914 - protein, 957 aa, Homo sapiens; identical to SEQ ID NO: 67913

SEQ ID NO: 67915 - protein, 859 aa, Homo sapiens
MEGAKPTLQLVYQAVQALYHDPDPSGKERASFWLGELQRSVHAWEISDQLLQIRQDVESCYFAAQTMKMKIQTSFYELPTDSHASLRDSLLTHIQNLKDLSPVIVTQLALAIADLALQMPSWKGCVQTLVEKYSNDVTSLPFLLEILTVLPEEVHSRSLRIGANRRTEIIEDLAFYSSTVVSLLMTCVEKAGTDEKMLMKVFRCLGSWFNLGVLDSNFMANNKLLALLFEVLQQDKTSSNLHEAASDCVCSALYAIENVETNLPLAMQLFQGVLTLETAYHMAVAREDLDKVLNYCRIFTELCETFLEKIVCTPGQGLGDLRTLELLLICAGHPQYEVVEISFNFWYRLGEHLYKTNDEVIHGIFKAYIQRLLHALARHCQLEPDHEGVPEETDDFGEFRMRVSDLVKDLIFLIGSMECFAQLYSTLKEGNPPWEVTEAVLFIMAAIAKSVDPENNPTLVEVLEGVVRLPETVHTAVRYTSIELVGEMSEVVDRNPQFLGTALVLARLPLDKITECLSELCSVQVMALKKLLSQEPSNGISSDPTVFLDRLAVIFRHTNPIVENGQTHPCQKVIQEIWPVLSETLNKHRADNRIVERCCRCLRFAVRCVGKGSAALLQPLVTQMVNVYHVHQHSCFLYLGSILVDEYGMEEGCRQGLLDMLQALCIPTFQLLEQQNGLQNHPDTVDDLFRLATRFIQRSPVTLLRSQVVIPILQWAIASTTLDHRDANCSVMRFLRDLIHTGVANDHEEDFELRKELIGQVMNQLGQQLVSQLLHTCCFCLPPYTLPDVAEVLWEIMQVDRPTFCRWLENSLKGLPKETTVGAVTVTHKQLTDFHKQVTSAEECKQVCWALRDFTRLFR

SEQ ID NO: 67916 - protein, 1411 aa, Homo sapiens
MAEARKRRELLPLIYHHLLRAGYVRAAREVKEQSGQKCFLAQPVTLLDIYTHWQQTSELGRKRKAEEDAALQAKKTRVSDPISTSESSEEEEEAEAETAKATPRLASTNSSVLGADLPSSMKEKAKAETEKAGKTGNSMPHPATGKTVANLLSGKSPRKSAEPSANTTLVSETEEEGSVPAFGAAAKPGMVSAGQADSSSEDTSSSSDETDVEVKASEKILQVRAASAPAKGTPGKGATPAPPGKAGAVASQTKAGKPEEDSESSSEESSDSEEETPAAKALLQAKASGKTSQVGAASAPAKESPRKGAAPAPPGKTGPAVAKAQAGKREEDSQSSSEESDSEEEAPAQAKPSGKAPQVRAASAPAKESPRKGAAPAPPRKTGPAAAQVQVGKQEEDSRSSSEESDSDREALAAMNAAQVKPLGKSPQVKPASTMGMGPLGKGAGPVPPGKVGPATPSAQVGKWEEDSESSSEESSDSSDGEVPTAVAPAQEKSLGNILQAKPTSSPAKGPPQKAGPVAVQVKAEKPMDNSESSEESSDSADSEEAPAAMTAAQAKPALKIPQTKACPKKTNTTASAKVAPVRVGTQAPRKAGTATSPAGSSPAVAGGTQRPAEDSSSSEESDSEEEKTGLAVTVGQAKSVGKGLQVKAASVPVKGSLGQGTAPVLPGKTGPTVTQVKAEKQEDSESSEEESDSEEAAASPAQVKTSVKKTQAKANPAAARAPSAKGTISAPGKVVTAAAQAKQRSPSKVKPPVRNPQNSTVLARGPASVPSVGKAVATAAQAQTGPEEDSGSSEEESDSEEEAETLAQVKPSGKTHQIRAALAPAKESPRKGAAPTPPGKTGPSAAQAGKQDDSGSSSEESDSDGEAPAAVTSAQVIKPPLIFVDPNRSPAGPAATPAQAQAASTPRKARASESTARSSSSESEDEDVIPATQCLTPGIRTNVVTMPTAHPRIAPKASMAGASSSKESSRISDGKKQEGPATQVSKKNPASLPLTQAALKVLAQKASEAQPPVARTQPSSGVDSAVGTLPATSPQSTSVQAKGTNKLRKPKLPEVQQATKAPESSDDSEDSSDSSSGSEEDGEGPQGAKSAHTLGPTPSRTETLVEETAAESSEDDVVAPSQSLLSGYMTPGLTPANSQASKATPKLDSSPSVSSTLAAKDDPDGKQEAKPQQAAGMLSPKTGGKEAASGTTPQKSRKPKKGAGNPQASTLALQSNITQCLLGQPWPLNEAQVQASVVKVLTELLEQERKKVVDTTKESSRKGWESRKRKLSGDQPAARTPRSKKKKKLGAGEGGEASVSPEKTSTTSKGKAKRDKASGDVKEKKGKGSLGSQGAKDEPEEELQKGMGTVEGGDQSNPKSKKEKKKSDKRKKDKEKKEKKKKAKKASTKDSESPSQKKKKKKKKTAEQTV

SEQ ID NO: 67917 - protein, 1489 aa, Homo sapiens
MAEARKRRELLPLIYHHLLRAGYVRAAREVKEQSGQKCFLAQPVTLLDIYTHWQQTSELGRKRKAEEDAALQAKKTRVSDPISTSESSEEEEEAEAETAKATPRLASTNSSVLGADLPSSMKEKAKAETEKAGKTGNSMPHPATGKTVANLLSGKSPRKSAEPSANTTLVSETEEEGSVPAFGAAAKPGMVSAGQADSSSEDTSSSSDETDVEGKPSVKPAQVKASSVSTKESPARKAAPAPGKVGDVTPQVKGGALPPAKRAKKPEEESESSEEGSESEEEAPAGTRSQVKASEKILQVRAASAPAKGTPGKGATPAPPGKAGAVASQTKAGKPEEDSESSSEESSDSEEETPAAKALLQAKASGKTSQVGAASAPAKESPRKGAAPAPPGKTGPAVAKAQAGKREEDSQSSSEESDSEEEAPAQAKPSGKAPQVRAASAPAKESPRKGAAPAPPRKTGPAAAQVQVGKQEEDSRSSSEESDSDREALAAMNAAQVKPLGKSPQVKPASTMGMGPLGKGAGPVPPGKVGPATPSAQVGKWEEDSESSSEESSDSSDGEVPTAVAPAQEKSLGNILQAKPTSSPAKGPPQKAGPVAVQVKAEKPMDNSESSEESSDSADSEEAPAAMTAAQAKPALKIPQTKACPKKTNTTASAKVAPVRVGTQAPRKAGTATSPAGSSPAVAGGTQRPAEDSSSSEESDSEEEKTGLAVTVGQAKSVGKGLQVKAASVPVKGSLGQGTAPVLPGKTGPTVTQVKAEKQEDSESSEEESDSEEAAASPAQVKTSVKKTQAKANPAAARAPSAKGTISAPGKVVTAAAQAKQRSPSKVKPPVRNPQNSTVLARGPASVPSVGKAVATAAQAQTGPEEDSGSSEEESDSEEEAETLAQVKPSGKTHQIRAALAPAKESPRKGAAPTPPGKTGPSAAQAGKQDDSGSSSEESDSDGEAPAAVTSAQVIKPPLIFVDPNRSPAGPAATPAQAQAASTPRKARASESTARSSSSESEDEDVIPATQCLTPGIRTNVVTMPTAHPRIAPKASMAGASSSKESSRISDGKKQEGPATQVSKKNPASLPLTQAALKVLAQKASEAQPPVARTQPSSGVDSAVGTLPATSPQSTSVQAKGTNKLRKPKLPEVQQATKAPESSDDSEDSSDSSSGSEEDGEGPQGAKSAHTLVGPTPSRTETLVEETAAESSEDDVVAPSQSLLSGYMTPGLTPANSQASKATPKLDSSPSVSSTLAAKDDPDGKQEAKPQQAAGMLSPKTGGKEAASGTTPQKSRKPKKGAGNPQASTLALQSNITQCLLGQPWPLNEAQVQASVVKVLTELLEQERKKVVDTTKESSRKGWESRKRKLSGDQPAARTPRSKKKKKLGAGEGGEASVSPEKTSTTSKGKAKRDKASGDVKEKKGKGSLGSQGAKDEPEEELQKGMGTVEGGDQSNPKSKKEKKKSDKRKKDKEKKEKKKKAKKASTKDSESPSQKKKKKKKKTAEQTV

SEQ ID NO: 67918 - protein, 958 aa, Homo sapiens
MAEARKRRELLPLIYHHLLRAGYVRAAREVKEQSGQKCFLAQPVTLLDIYTHWQQTSELGRKRKAEEDAALQAKKTRVSDPISTSESSEEEEEAEAETAKATPRLASTNSSVLGADLPSSMKEKAKAETEKAGKTGNSMPHPATGKTVANLLSGKSPRKSAEPSANTTLVSETEEEGSVPAFGAAAKPGMVSAGQADSSSEDTSSSSDETDVEGKPSVKPAQVKASSVSTKESPARKAAPAPGKVGDVTPQVKGGALPPAKRAKKPEEESESSEEGSESEEEAPAGTRSQVKASEKILQVRAASAPAKGTPGKGATPAPPGKAGAVASQTKAGKPEEDSESSSEESSDSEEETPAAKALLQAKASGKTSQVGAASAPAKESPRKGAAPAPPGKTGPAVAKAQAGKREEDSQSSSEESDSEEEAPAQAKPSGKAPQVRAASAPAKESPRKGAAPAPPRKTGPAAAQVQVGKQEEDSRSSSEESDSDREALAAMNAAQVKPLGKSPQVKPASTMGMGPLGKGAGPVPPGKVGPATPSAQVGKWEEDSESSSEESSDSSDGEVPTAVAPAQEKSLGNILQAKPTSSPAKGPPQKAGPVAVQVKAEKPMDNSESSEESSDSADSEEAPAAMTAAQAKPALKIPQTKACPKKTNTTASAKVAPVRVGTQAPRKAGTATSPAGSSPAVAGGTQRPAEDSSSSEESDSEEEKTGLAVTVGQAKSVGKGLQVKAASVPVKGSLGQGTAPVLPGKTGPTVTQVKAEKQEDSESSEEESDSEEAAASPAQVKTSVKKTQAKANPAAARAPSAKGTISAPGKVVTAAAQAKQRSPSKVKPPVRNPQNSTVLARGPASVPSVGKAVATAAQAQTGPEEDSGSSEEESDSEEEAETLAQVKPSGKTHQIRAALAPAKESPRKGAAPTPPGKTGPSAAQAGKQDDSGSSSEESDSDGEAPAAVTSAQDQESS

SEQ ID NO: 67919 - protein, 1414 aa, Homo sapiens
MAEARKRRELLPLIYHHLLRAGYVRAAREVKEQSGQKCFLAQPVTLLDIYTHWQQTSELGRKRKAEEDAALQAKKTRVSDPISTSESSEEEEEAEAETAKATPRLASTNSSVLGADLPSSMKEKAKAETEKAGKTGNSMPHPATGKTVANLLSGKSPRKSAEPSANTTLVSETEEEGSVPAFGAAAKPGMVSAGQADSSSEDTSSSSDETDVEGKPSVKPAQVKASSVSTKESPARKAAPAPGKVGDVTPQVKGGALPPAKRAKKPEEESESSEEGSESEEEAPAGTRSQVKASEKILQVRAASAPAKGTPGKGATPAPPGKAGAVASQTKAGKPEEDSESSSEESSDSEEETPAAKALLQAKASGKTSQVGAASAPAKESPRKGAAPAPPGKTGPAVAKAQAGKREEDSQSSSEESDSEEEAPAQAKPSGKAPQVRAASAPAKESPRKGAAPAPPRKTGPAAAQVQVGKQEEDSRSSSEESDSDREALAAMNAAQVKPLGKSPQVKPASTMGMGPLGKGAGPVPPGKVGPATPSAQVGKWEEDSESSSEESSDSSDGEVPTAVAPAQEKSLGNILQAKPTSSPAKGPPQKAGPVAVQVKAEKPMDNSESSEESSDSADSEEAPAAMTAAQAKPALKIPQTKACPKKTNTTASAKVAPVRVGTQAPRKAGTATSPAGSSPAVAGGTQRPAEDSSSSEESDSEEEKTGLAVTVGQAKSVGKGLQVKAASVPVKGSLGQGTAPVLPGKTGPTVTQVKAEKQEDSESSEEESDSEEAAASPAQVKTSVKKTQAKANPAAARAPSAKGTISAPGKVVTAAAQAKQRSPSKVKPPVRNPQNSTVLARGPASVPSVGKAVATAAQAQTGPEEDSGSSEEESDSEEEAETLAQVKPSGKTHQIRAALAPAKESPRKGAAPTPPGKTGPSAAQAGKQDDSGSSSEESDSDGEAPAAVTSAQVIKPPLIFVDPNRSPAGPAATPAQAQAASTPRKARASESTARSSSSESEDEDVIPATQCLTPGIRTNVVTMPTAHPRIAPKASMAGASSSKESSRISDGKKQEGPATQVDSAVGTLPATSPQSTSVQAKGTNKLRKPKLPEVQQATKAPESSDDSEDSSDSSSGSEEDGEGPQGAKSAHTLGPTPSRTETLVEETAAESSEDDVVAPSQSLLSGYMTPGLTPANSQASKATPKLDSSPSVSSTLAAKDDPDGKQEAKPQQAAGMLSPKTGGKEAASGTTPQKSRKPKKGAGNPQASTLALQSNITQCLLGQPWPLNEAQVQASVVKVLTELLEQERKKVVDTTKESSRKGWESRKRKLSGDQPAARTPRSKKKKKLGAGEGGEASVSPEKTSTTSKGKAKRDKASGDVKEKKGKGSLGSQGAKDEPEEELQKGMGTVEGGDQSNPKSKKEKKKSDKRKKDK

SEQ ID NO: 67920 - protein, 1451 aa, Homo sapiens
MAEARKRRELLPLIYHHLLRAGYVRAAREVKEQSGQKCFLAQPVTLLDIYTHWQQTSELGRKRKAEEDAALQAKKTRVSDPISTSESSEEEEEAEAETAKATPRLASTNSSVLGADLPSSMKEKAKAETEKAGKTGNSMPHPATGKTVANLLSGKSPRKSAEPSANTTLVSETEEEGSVPAFGAAAKPGMVSAGQADSSSEDTSSSSDETDVEGKPSVKPAQVKASSVSTKESPARKAAPAPGKVGDVTPQVKGGALPPAKRAKKPEEESESSEEGSESEEEAPAGTRSQVKASEKILQVRAASAPAKGTPGKGATPAPPGKAGAVASQTKAGKPEEDSESSSEESSDSEEETPAAKALLQAKASGKTSQVGAASAPAKESPRKGAAPAPPGKTGPAVAKAQAGKREEDSQSSSEESDSEEEAPAQAKPSGKAPQVRAASAPAKESPRKGAAPAPPRKTGPAAAQVQVGKQEEDSRSSSEESDSDREALAAMNAAQVKPLGKSPQVKPASTMGMGPLGKGAGPVPPGKVGPATPSAQVGKWEEDSESSSEESSDSSDGEVPTAVAPAQEKSLGNILQAKPTSSPAKGPPQKAGPVAVQVKAEKPMDNSESSEESSDSADSEEAPAAMTAAQAKPALKIPQTKACPKKTNTTASAKVAPVRVGTQAPRKAGTATSPAGSSPAVAGGTQRPAEDSSSSEESDSEEEKTGLAVTVGQAKSVGKGLQVKAASVPVKGSLGQGTAPVLPGKTGPTVTQVKAEKQEDSESSEEESDSEEAAASPAQVKTSVKKTQAKANPAAARAPSAKGTISAPGKVVTAAAQAKQRSPSKVKPPVRNPQNSTVLARGPASVPSVGKAVATAAQAQTGPEEDSGSSEEESDSEEEAETLAQVKPSGKTHQIRAALAPAKESPRKGAAPTPPGKTGPSAAQAGKQDDSGSSSEESDSDGEAPAAVTSAQVIKPPLIFVDPNRSPAGPAATPAQAQAASTPRKARASESTARSSSSESEDEDVIPATQCLTPGIRTNVVTMPTAHPRIAPKASMAGASSSKESSRISDGKKQEGPATQVDSAVGTLPATSPQSTSVQAKGTNKLRKPKLPEVQQATKAPESSDDSEDSSDSSSGSEEDGEGPQGAKSAHTLVGPTPSRTETLVEETAAESSEDDVVAPSQSLLSGYMTPGLTPANSQASKATPKLDSSPSVSSTLAAKDDPDGKQEAKPQQAAGMLSPKTGGKEAASGTTPQKSRKPKKGAGNPQASTLALQSNITQCLLGQPWPLNEAQVQASVVKVLTELLEQERKKVVDTTKESSRKGWESRKRKLSGDQPAARTPRSKKKKKLGAGEGGEASVSPEKTSTTSKGKAKRDKASGDVKEKKGKGSLGSQGAKDEPEEELQKGMGTVEGGDQSNPKSKKEKKKSDKRKKDKEKKEKKKKAKKASTKDSESPSQKKKKKKKKTAEQTV

SEQ ID NO: 67921 - protein, 1412 aa, Homo sapiens
MAEARKRRELLPLIYHHLLRAGYVRAAREVKEQSGQKCFLAQPVTLLDIYTHWQQTSELGRKRKAEEDAALQAKKTRVSDPISTSESSEEEEEAEAETAKATPRLASTNSSVLGADLPSSMKEKAKAETEKAGKTGNSMPHPATGKTVANLLSGKSPRKSAEPSANTTLVSETEEEGSVPAFGAAAKPGMVSAGQADSSSEDTSSSSDETDVEVKASEKILQVRAASAPAKGTPGKGATPAPPGKAGAVASQTKAGKPEEDSESSSEESSDSEEETPAAKALLQAKASGKTSQVGAASAPAKESPRKGAAPAPPGKTGPAVAKAQAGKREEDSQSSSEESDSEEEAPAQAKPSGKAPQVRAASAPAKESPRKGAAPAPPRKTGPAAAQVQVGKQEEDSRSSSEESDSDREALAAMNAAQVKPLGKSPQVKPASTMGMGPLGKGAGPVPPGKVGPATPSAQVGKWEEDSESSSEESSDSSDGEVPTAVAPAQEKSLGNILQAKPTSSPAKGPPQKAGPVAVQVKAEKPMDNSESSEESSDSADSEEAPAAMTAAQAKPALKIPQTKACPKKTNTTASAKVAPVRVGTQAPRKAGTATSPAGSSPAVAGGTQRPAEDSSSSEESDSEEEKTGLAVTVGQAKSVGKGLQVKAASVPVKGSLGQGTAPVLPGKTGPTVTQVKAEKQEDSESSEEESDSEEAAASPAQVKTSVKKTQAKANPAAARAPSAKGTISAPGKVVTAAAQAKQRSPSKVKPPVRNPQNSTVLARGPASVPSVGKAVATAAQAQTGPEEDSGSSEEESDSEEEAETLAQVKPSGKTHQIRAALAPAKESPRKGAAPTPPGKTGPSAAQAGKQDDSGSSSEESDSDGEAPAAVTSAQVIKPPLIFVDPNRSPAGPAATPAQAQAASTPRKARASESTARSSSSESEDEDVIPATQCLTPGIRTNVVTMPTAHPRIAPKASMAGASSSKESSRISDGKKQEGPATQVSKKNPASLPLTQAALKVLAQKASEAQPPVARTQPSSGVDSAVGTLPATSPQSTSVQAKGTNKLRKPKLPEVQQATKAPESSDDSEDSSDSSSGSEEDGEGPQGAKSAHTLVGPTPSRTETLVEETAAESSEDDVVAPSQSLLSGYMTPGLTPANSQASKATPKLDSSPSVSSTLAAKDDPDGKQEAKPQQAAGMLSPKTGGKEAASGTTPQKSRKPKKGAGNPQASTLALQSNITQCLLGQPWPLNEAQVQASVVKVLTELLEQERKKVVDTTKESSRKGWESRKRKLSGDQPAARTPRSKKKKKLGAGEGGEASVSPEKTSTTSKGKAKRDKASGDVKEKKGKGSLGSQGAKDEPEEELQKGMGTVEGGDQSNPKSKKEKKKSDKRKKDKEKKEKKKKAKKASTKDSESPSQKKKKKKKKTAEQTV

SEQ ID NO: 67922 - protein, 1525 aa, Homo sapiens
MAEARKRRELLPLIYHHLLRAGYVRAAREVKEQSGQKCFLAQPVTLLDIYTHWQQTSELGRKRKAEEDAALQAKKTRVSDPISTSESSEEEEEAEAETAKATPRLASTNSSVLGADLPSSMKEKAKAETEKAGKTGNSMPHPATGKTVANLLSGKSPRKSAEPSANTTLVSETEEEGSVPAFGAAAKPGMVSAGQADSSSEDTSSSSDETDVEGKPSVKPAQVKASSVSTKESPARKAAPAPGKVGDVTPQVKGGALPPAKRAKKPEEESESSEEGSESEEEAPAGTRSQVKASEKILQVRAASAPAKGTPGKGATPAPPGKAGAVASQTKAGKPEEDSESSSEESSDSEEETPAAKALLQAKASGKTSQVGAASAPAKESPRKGAAPAPPGKTGPAVAKAQAGKREEDSQSSSEESDSEEEAPAQAKPSGKAPQVRAASAPAKESPRKGAAPAPPRKTGPAAAQVQVGKQEEDSRSSSEESDSDREALAAMNAAQVKPLGKSPQVKPASTMGMGPLGKGAGPVPPGKVGPATPSAQVGKWEEDSESSSEESSDSSDGEVPTAVAPAQEKSLGNILQAKPTSSPAKGPPQKAGPVAVQVKAEKPMDNSESSEESSDSADSEEAPAAMTAAQAKPALKIPQTKACPKKTNTTASAKVAPVRVGTQAPRKAGTATSPAGSSPAVAGGTQRPAEDSSSSEESDSEEEKTGLAVTVGQAKSVGKGLQVKAASVPVKGSLGQGTAPVLPGKTGPTVTQVKAEKQEDSESSEEESDSEEAAASPAQVKTSVKKTQAKANPAAARAPSAKGTISAPGKVVTAAAQAKQRSPSKVKPPVRNPQNSTVLARGPASVPSVGKAVATAAQAQTGPEEDSGSSEEESDSEEEAETLAQVKPSGKTHQIRAALAPAKESPRKGAAPTPPGKTGPSAAQAGKQDDSGSSSEESDSDGEAPAAVTSAQKDSNSKPARSKTLAPAPPERNTEGSSESSEEELPLTQVIKPPLIFVDPNRSPAGPAATPAQAQAASTPRKARASESTARSSSSESEDEDVIPATQCLTPGIRTNVVTMPTAHPRIAPKASMAGASSSKESSRISDGKKQEGPATQVSKKNPASLPLTQAALKVLAQKASEAQPPVARTQPSSGVDSAVGTLPATSPQSTSVQAKGTNKLRKPKLPEVQQATKAPESSDDSEDSSDSSSGSEEDGEGPQGAKSAHTLGPTPSRTETLVEETAAESSEDDVVAPSQSLLSGYMTPGLTPANSQASKATPKLDSSPSVSSTLAAKDDPDGKQEAKPQQAAGMLSPKTGGKEAASGTTPQKSRKPKKGAGNPQASTLALQSNITQCLLGQPWPLNEAQVQASVVKVLTELLEQERKKVVDTTKESSRKGWESRKRKLSGDQPAARTPRSKKKKKLGAGEGGEASVSPEKTSTTSKGKAKRDKASGDVKEKKGKGSLGSQGAKDEPEEELQKGMGTVEGGDQSNPKSKKEKKKSDKRKKDKEKKEKKKKAKKASTKDSESPSQKKKKKKKKTAEQTV

SEQ ID NO: 67923 - protein, 1488 aa, Homo sapiens
MAEARKRRELLPLIYHHLLRAGYVRAAREVKEQSGQKCFLAQPVTLLDIYTHWQQTSELGRKRKAEEDAALQAKKTRVSDPISTSESSEEEEEAEAETAKATPRLASTNSSVLGADLPSSMKEKAKAETEKAGKTGNSMPHPATGKTVANLLSGKSPRKSAEPSANTTLVSETEEEGSVPAFGAAAKPGMVSAGQADSSSEDTSSSSDETDVEGKPSVKPAQVKASSVSTKESPARKAAPAPGKVGDVTPQVKGGALPPAKRAKKPEEESESSEEGSESEEEAPAGTRSQVKASEKILQVRAASAPAKGTPGKGATPAPPGKAGAVASQTKAGKPEEDSESSSEESSDSEEETPAAKALLQAKASGKTSQVGAASAPAKESPRKGAAPAPPGKTGPAVAKAQAGKREEDSQSSSEESDSEEEAPAQAKPSGKAPQVRAASAPAKESPRKGAAPAPPRKTGPAAAQVQVGKQEEDSRSSSEESDSDREALAAMNAAQVKPLGKSPQVKPASTMGMGPLGKGAGPVPPGKVGPATPSAQVGKWEEDSESSSEESSDSSDGEVPTAVAPAQEKSLGNILQAKPTSSPAKGPPQKAGPVAVQVKAEKPMDNSESSEESSDSADSEEAPAAMTAAQAKPALKIPQTKACPKKTNTTASAKVAPVRVGTQAPRKAGTATSPAGSSPAVAGGTQRPAEDSSSSEESDSEEEKTGLAVTVGQAKSVGKGLQVKAASVPVKGSLGQGTAPVLPGKTGPTVTQVKAEKQEDSESSEEESDSEEAAASPAQVKTSVKKTQAKANPAAARAPSAKGTISAPGKVVTAAAQAKQRSPSKVKPPVRNPQNSTVLARGPASVPSVGKAVATAAQAQTGPEEDSGSSEEESDSEEEAETLAQVKPSGKTHQIRAALAPAKESPRKGAAPTPPGKTGPSAAQAGKQDDSGSSSEESDSDGEAPAAVTSAQVIKPPLIFVDPNRSPAGPAATPAQAQAASTPRKARASESTARSSSSESEDEDVIPATQCLTPGIRTNVVTMPTAHPRIAPKASMAGASSSKESSRISDGKKQEGPATQVSKKNPASLPLTQAALKVLAQKASEAQPPVARTQPSSGVDSAVGTLPATSPQSTSVQAKGTNKLRKPKLPEVQQATKAPESSDDSEDSSDSSSGSEEDGEGPQGAKSAHTLGPTPSRTETLVEETAAESSEDDVVAPSQSLLSGYMTPGLTPANSQASKATPKLDSSPSVSSTLAAKDDPDGKQEAKPQQAAGMLSPKTGGKEAASGTTPQKSRKPKKGAGNPQASTLALQSNITQCLLGQPWPLNEAQVQASVVKVLTELLEQERKKVVDTTKESSRKGWESRKRKLSGDQPAARTPRSKKKKKLGAGEGGEASVSPEKTSTTSKGKAKRDKASGDVKEKKGKGSLGSQGAKDEPEEELQKGMGTVEGGDQSNPKSKKEKKKSDKRKKDKEKKEKKKKAKKASTKDSESPSQKKKKKKKKTAEQTV

SEQ ID NO: 67924 - protein, 84 aa, Homo sapiens
MATMENKVICALVLVSMLALGTLAEAQTETCTVAPRERQNCGFPGVTPSQCANKGCCFDDTVRGVPWCFYPNTIDVPPEEECEF

SEQ ID NO: 67925 - protein, 129 aa, Homo sapiens
MGRRDAQLLAALLVLGLCALAGSEKPSPCQCSRLSPHNRTNCGFPGITSDQCFDNGCCFDSSVTGVPWCFHPLPKQESDQCVMEVSDRRNCGYPGISPEECASRKCCFSNFIFEVPWCFFPKSVEDCHY

SEQ ID NO: 67926 - protein, 582 aa, Homo sapiens
MPGRTWELCLLLLLGLGLGSQEALPPPCESEIYCHGELLNQVQMAKLYQDDKQFVDMPLSIAPEQVLQTFTELSRDHNHSIPREQLQAFVHEHFQAKGQELQPWTPADWKDSPQFLQKISDAKLRAWAGQLHQLWKKLGKKMKPEVLSHPERFSLIYSEHPFIVPGGRFVEFYYWDSYWVMEGLLLSEMAETVKGMLQNFLDLVKTYGHVPNGGRVYYLQRSQPPLLTLMMDCYLTHTNDTAFLQENIETLALELDFWTKNRTVSVSLEGKNYLLNRYYVPYGGPRPESYSKDVELADTLPEGDREALWAELKAGAESGWDFSSRWLIGGPNPNSLSGIRTSKLVPVDLNAFLCQAEELMSNFYSRLGNDSQATKYRILRSQRLAALNTVLWDEQTGAWFDYDLEKKKKNREFYPSNLTPLWAGCFSDPGVADKALKYLEDNRILTYQYGIPTSLQKTGQQWDFPNAWAPLQDLVIRGLAKAPLRRAQEVAFQLAQNWIRTNFDVYSQKSAMYEKYDVSNGGQPGGGGEYEVQEGFGWTNGVVLMLLDRYGDRLTSGPKLPFLEPHCLATLLPSLLLSLLPW

SEQ ID NO: 67927 - protein, 551 aa, Homo sapiens
MPGRTWELCLLLLLGLGLGSQEALPPPCESEIYCHGELLNQVQMAKLYQDDKQFVDMPLSIAPEQVLQTFTELSRDHNHSIPREQLQAFVHEHFQAKGQELQPWTPADWKDSPQFLQKISDAKLRAWAGQLHQLWKKLGKKMKPEVLSHPERFSLIYSEHPFIVPGGRFVEFYYCYGHVPNGGRVYYLQRSQPPLLTLMMDCYLTHTNDTAFLQENIETLALELDFWTKNRTVSVSLEGKNYLLNRYYVPYGGPRPESYSKDVELADTLPEGDREALWAELKAGAESGWDFSSRWLIGGPNPNSLSGIRTSKLVPVDLNAFLCQAEELMSNFYSRLGNDSQATKYRILRSQRLAALNTVLWDEQTGAWFDYDLEKKKKNREFYPSNLTPLWAGCFSDPGVADKALKYLEDNRILTYQYGIPTSLQKTGQQWDFPNAWAPLQDLVIRGLAKAPLRRAQEVAFQLAQNWIRTNFDVYSQKSAMYEKYDVSNGGQPGGGGEYEVQEGFGWTNGVVLMLLDRYGDRLTSGPKLPFLEPHCLATLLPSLLLSLLPW

SEQ ID NO: 67928 - protein, 459 aa, Homo sapiens
MPNCVPGQGSCISSGRSWGRRYQRPGPAQGLTKGTEERNVPGAHSVFGAQIRDSYWVMEGLLLSEMAETVKGMLQNFLDLVKTYGHVPNGGRVYYLQRSQPPLLTLMMDCYLTHTNDTAFLQENIETLALELDFWTKNRTVSVSLEGKNYLLNRYYVPYGGPRPESYSKDVELADTLPEGDREALWAELKAGAESGWDFSSRWLIGGPNPNSLSGIRTSKLVPVDLNAFLCQAEELMSNFYSRLGNDSQATKYRILRSQRLAALNTVLWDEQTGAWFDYDLEKKKKNREFYPSNLTPLWAGCFSDPGVADKALKYLEDNRILTYQYGIPTSLQKTGQQWDFPNAWAPLQDLVIRGLAKAPLRRAQEVAFQLAQNWIRTNFDVYSQKSAMYEKYDVSNGGQPGGGGEYEVQEGFGWTNGVVLMLLDRYGDRLTSGPKLPFLEPHCLATLLPSLLLSLLPW

SEQ ID NO: 67929 - protein, 546 aa, Homo sapiens
MPGRTWELCLLLLLGLGLGSQEALPPPCESEIYCHGELLNQVQMAKLYQDDKQFVDMPLSIAPEQVLQTFTELSRDHNHSIPREQLQAFVHEHFQAKGQELQPWTPADWKDSPQFLQKISDAKLRAWAGQLHQLWKKLGKKMKPEVLSHPERFSLIYSEHPFIVPGGRFVEFYYCYGHVPNGGRVYYLQRSQPPLLTLMMDCYLTHTNDTAFLQENIETLALELDFWTKNRTVSVSLEGKNYLLNRYYVPYGGPRPESYSKDVELADTLPEGDREALWAELKAGAESGWDFSSRWLIGGPNPNSLSGIRTSKLVPVDLNAFLCQAEELMSNFYSRLGNDSQATKYRILRSQRLAALNTVLWDEQTGAWFDYDLEKKKKNREFYPSNLTPLWAGCFSDPGVADKALKYLEDNRILTYQYGIPTSLQKTGQQWDFPNAWAPLQDLVIRGLAKAPLRRAQEVAFQLAQNWIRTNFDVYSQKSAMYEKYDVSNGGQPGGGGEYEVQEGFGWTNGVVLMLLDRYGDRLTSGPKLPFLEPHCLGPPFCPASC

SEQ ID NO: 67930 - protein, 577 aa, Homo sapiens
MPGRTWELCLLLLLGLGLGSQEALPPPCESEIYCHGELLNQVQMAKLYQDDKQFVDMPLSIAPEQVLQTFTELSRDHNHSIPREQLQAFVHEHFQAKGQELQPWTPADWKDSPQFLQKISDAKLRAWAGQLHQLWKKLGKKMKPEVLSHPERFSLIYSEHPFIVPGGRFVEFYYWDSYWVMEGLLLSEMAETVKGMLQNFLDLVKTYGHVPNGGRVYYLQRSQPPLLTLMMDCYLTHTNDTAFLQENIETLALELDFWTKNRTVSVSLEGKNYLLNRYYVPYGGPRPESYSKDVELADTLPEGDREALWAELKAGAESGWDFSSRWLIGGPNPNSLSGIRTSKLVPVDLNAFLCQAEELMSNFYSRLGNDSQATKYRILRSQRLAALNTVLWDEQTGAWFDYDLEKKKKNREFYPSNLTPLWAGCFSDPGVADKALKYLEDNRILTYQYGIPTSLQKTGQQWDFPNAWAPLQDLVIRGLAKAPLRRAQEVAFQLAQNWIRTNFDVYSQKSAMYEKYDVSNGGQPGGGGEYEVQEGFGWTNGVVLMLLDRYGDRLTSGPKLPFLEPHCLGPPFCPASC

SEQ ID NO: 67931 - protein, 90 aa, Homo sapiens
MEETTDWIYGFFSLLSDIISSEDEEDDDGDEDTDKGEIDEPPLRKKEIHKDKTEKQEKPERKIQTKDWSANSSTIRTLKLTQLKPIYICT

SEQ ID NO: 67932 - protein, 217 aa, Homo sapiens
MEETTDWIYGFFSLLSDIISSEDEEDDDGDEDTDKGEIDEPPLRKKEIHKDKTEKQEKPERKIQTKVTHKEKEKGKEKVREKEKPEKKATHKEKIEKKEKPETKTLAKEQKKAKTAEKSEEKTKKEVKGGKQEKVKQTAAKVKEVQKTPSKPKEKEDKEKAAVSKHEQKGFPGPGIRNSSYYCQYIKGQINAWNDLRTSLLPIPYLSCGKMCSNFNN

SEQ ID NO: 67933 - protein, 721 aa, Homo sapiens
MTEITAEGNASTTTTVIDSKNGSVPKSPGKVLKRTVTEDIVTTFSSPAAWLLVIALIITWSAVAIVMFDLVDYKNFSASSIAKIGSDPLKLVRDAMEETTDWIYGFFSLLSDIISSEDEEDDDGDEDTDKGEIDEPPLRKKEIHKDKTEKQEKPERKIQTKVTHKEKEKGKEKVREKEKPEKKATHKEKIEKKEKPETKTLAKEQKKAKTAEKSEEKTKKEVKGGKQEKVKQTAAKVKEVQKTPSKPKEKEDKEKAAVSKHEQKDQYAFCRYMIDIFVHGDLKPGQSPAIPPPLPTEQASRPTPASPALEEKEGEKKKAEKKVTSETKKKEKEDIKKKSEKETAIDVEKKEPGKASETKQGTVKIAAQAAAKKDEKKEDSKKTKKPAEVEQPKGKKQEKKEKHVEPAKSPKKEHSVPSDKQVKAKTERAKEEIGAVSIKKAVPGKKEEKTTKTVEQEIRKEKSGKTSSILKDKEPIKGKEEKVPASLKEKEPETKKDEKMSKAGKEVKPKPPQLQGKKEEKPEPQIKKEAKPAISEKVQIHKQDIVKPEKTVSHGKPEEKVLKQVKAVTIEKTAKPKPTKKAEHREREPPSIKTDKPKPTPKGTSEVTESGKKKTEISEKESKEKADMKHLREEKVSTRKESLQLHNVTKEDVEDVPASKKAKEGTEDVSPTKQKSPISFFQCVYLDGYNGYGFQFPFTPADRPGESSGQANSPGQKQQGQ

SEQ ID NO: 67934 - protein, 26 aa, Homo sapiens
  VARIANT 1: note = MOD_RES - Any amino acid
XIHKDKTEKQEKPERKIQTKEVGHSS

SEQ ID NO: 67935 - protein, 151 aa, Homo sapiens
  VARIANT 1: note = MOD_RES - Any amino acid
XTHKEKEKGKEKVREKEKPEKKATHKEKIEKKEKPETKTLAKEQKKAKTAEKSEEKTKKEVKGGKQEKVKQTAAKVKEVQKTPSKPKEKEDKEKAAVSKHEQKGFPGPGIRNSSYYCQYIKGQINAWNDLRTSLLPIPYLSCGKMCSNFNN

SEQ ID NO: 67936 - protein, 731 aa, Homo sapiens
IVEIYPQGNASTTTTVIDSKNGSVPKSPGKVLKRTVTEDIVTTFSSPAAWLLVIALIITWSAVAIVMFDLVDYKNFSASSIAKIGSDPLKLVRDAMEETTDWIYGFFSLLSDIISSEDEEDDDGDEDTDKGEIDEPPLRKKEIHKDKTEKQEKPERKIQTKVTHKEKEKGKEKVREKEKPEKKATHKEKIEKKEKPETKTLAKEQKKAKTAEKSEEKTKKEVKGGKQEKVKQTAAKVKEVQKTPSKPKEKEDKEKAAVSKHEQKDQYAFCRYMIDIFVHGDLKPGQSPAIPPPLPTEQASRPTPASPALEEKEGEKKKAEKKVTSETKKKEKEDIKKKSEKETAIDVEKKVQEPGKASETKQGTVKIAAQAAAKKDEKKEDSKKTKKPAEVEQPKGKKQEKKEKHVEPAKSPKKEHSVPSDKQVKAKTERAKEEIGAVSIKKAVPGKKEEKTTKTVEQEIRKEKSGKTSSILKDKEPIKGKEEKVPASLKEKEPETKKDEKMSKAGKEVKPKPPQLQGKKEEKPEPQIKKEAKPAISEKVQIHKQDIVKPEKTVSHGKPEEKVLKQVKAVTIEKTAKPKPTKKAEHREREPPSIKTDKPKPTPKGTSEVTESGKKKTEISEKESKEKADMKHLREEKVSTRKESLQLHNVTKAEEVDSTLEDVEDVPASKKAKEGTEDVSPTKQKSPISFFQCVYLDGYNGYGFQFPFTPADRPGESSGQANSPGQKQQGQ

SEQ ID NO: 67937 - protein, 729 aa, Homo sapiens
MTEITAEGNASTTTTVIDSKNGSVPKSPGKVLKRTVTEDIVTTFSSPAAWLLVIALIITWSAVAIVMFDLVDYKNFSASSIAKIGSDPLKLVRDAMEETTDWIYGFFSLLSDIISSEDEEDDDGDEDTDKGEIDEPPLRKKEIHKDKTEKQEKPERKIQTKVTHKEKEKGKEKVREKEKPEKKATHKEKIEKKEKPETKTLAKEQKKAKTAEKSEEKTKKEVKGGKQEKVKQTAAKVKEVQKTPSKPKEKEDKEKAAVSKHEQKDQYAFCRYMIDIFVHGDLKPGQSPAIPPPLPTEQASRPTPASPALEEKEGEKKKAEKKVTSETKKKEKEDIKKKSEKETAIDVEKKEPGKASETKQGTVKIAAQAAAKKDEKKEDSKKTKKPAEVEQPKGKKQEKKEKHVEPAKSPKKEHSVPSDKQVKAKTERAKEEIGAVSIKKAVPGKKEEKTTKTVEQEIRKEKSGKTSSILKDKEPIKGKEEKVPASLKEKEPETKKDEKMSKAGKEVKPKPPQLQGKKEEKPEPQIKKEAKPAISEKVQIHKQDIVKPEKTVSHGKPEEKVLKQVKAVTIEKTAKPKPTKKAEHREREPPSIKTDKPKPTPKGTSEVTESGKKKTEISEKESKEKADMKHLREEKVSTRKESLQLHNVTKAEKPARVSKDVEDVPASKKAKEGTEDVSPTKQKSPISFFQCVYLDGYNGYGFQFPFTPADRPGESSGQANSPGQKQQGQ

SEQ ID NO: 67938 - protein, 44 aa, Homo sapiens
  VARIANT 1: note = MOD_RES - Any amino acid
XIHKDKTEKQEKPERKIQTKDWSANSSTIRTLKLTQLKPIYICT

SEQ ID NO: 67939 - protein, 345 aa, Homo sapiens
IVEIYPQGNASTTTTVIDSKNGSVPKSPGKVLKRTVTEDIVTTFSSPAAWLLVIALIITWSAVAIVMFDLVDYKNFSASSIAKIGSDPLKLVRDAMEETTDWIYGFFSLLSDIISSEDEEDDDGDEDTDKGEIDEPPLRKKEIHKDKTEKQEKPERKIQTKVTHKEKEKGKEKVREKEKPEKKATHKEKIEKKEKPETKTLAKEQKKAKTAEKSEEKTKKEVKGGKQEKVKQTAAKVKEVQKTPSKPKEKEDKEKAAVSKHEQKDQYAFCRYMIDIFVHGDLKPGQSPAIPPPLPTEQASRPTPASPALEEKEGEKKKAEKKVTSETKKKEKEDIKKKKKKKKKK

SEQ ID NO: 67940 - protein, 167 aa, Homo sapiens
MTEITAEGNASTTTTVIDSKNGSVPKSPGKVLKRTVTEDIVTTFSSPAAWLLVIALIITWSAVAIVMFDLVDYKNFSASSIAKIGSDPLKLVRDAMEETTDWIYGFFSLLSDIISSEDEEDDDGDEDTDKGEIDEPPLRKKEIHKDKTEKQEKPERKIQTKEVGHSS

SEQ ID NO: 67941 - protein, 328 aa, Homo sapiens
MTEITAEGNASTTTTVIDSKNGSVPKSPGKVLKRTVTEDIVTTFSSPAAWLLVIALIITWSAVAIVMFDLVDYKNFSASSIAKIGSDPLKLVRDAMEETTDWIYGFFSLLSDIISSEDEEDDDGDEDTDKGEIDEPPLRKKEIHKDKTEKQEKPERKIQTKVTHKEKEKGKEKVREKEKPEKKATHKEKIEKKEKPETKTLAKEQKKAKTAEKSEEKTKKEVKGGKQEKVKQTAAKVKEVQKTPSKPKEKEDKEKAAVSKHEQKDQYAFCRYMIDIFVHGDLKPGQSPAIPPPLPTEQASRPTPASPALEGDKASKEKKRKMKRMSEK

SEQ ID NO: 67942 - protein, 297 aa, Homo sapiens
MTEITAEGNASTTTTVIDSKNGSVPKSPGKVLKRTVTEDIVTTFSSPAAWLLVIALIITWSAVAIVMFDLVDYKNFSASSIAKIGSDPLKLVRDAMEETTDWIYGFFSLLSDIISSEDEEDDDGDEDTDKGEIDEPPLRKKEIHKDKTEKQEKPERKIQTKVTHKEKEKGKEKVREKEKPEKKATHKEKIEKKEKPETKTLAKEQKKAKTAEKSEEKTKKEVKGGKQEKVKQTAAKVKEVQKTPSKPKEKEDKEKAAVSKHEQKGQSPAIPPPLPTEQASRPTPASPALEGKYFFFS

SEQ ID NO: 67943 - protein, 1943 aa, Homo sapiens
MSPLLRSICDITEIFNQYVSHDCDGAALTKKDLKNLLEREFGAVLRRPHDPKTVDLILELLDLDSNGRVDFNEFLLFIFKVAQACYYALGQATGLDEEKRARCDGKESLLQDRRQEEDQRRFEPRDRQLEEEPGQRRRQKRQEQERELAEGEEQSEKQERLEQRDRQRRDEELWRQRQEWQEREERRAEEEQLQSCKGHETEEFPDEEQLRRRELLELRRKGREEKQQQRRERQDRVFQEEEEKEWRKRETVLRKEEEKLQEEEPQRQRELQEEEEQLRKLERQELRRERQEEEQQQQRLRREQQLRRKQEEERREQQEERREQQERREQQEERREQQLRREQEERREQQLRREQEEERREQQLRREQEEERREQQLRREQQLRREQQLRREQQLRREQQLRREQQLRREQQLRREQQLRREQQLRREQEEERHEQKHEQERREQRLKREQEERRDWLKREEETERHEQERRKQQLKRDQEEERRERWLKLEEEERREQQERREQQLRREQEERREQRLKRQEEEERLQQRLRSEQQLRREQEERREQLLKREEEKRLEQERREQRLKREQEERRDQLLKREEERRQQRLKREQEERLEQRLKREEVERLEQEERREQRLKREEPEEERRQQLLKSEEQEERRQQQLRREQQERREQRLKREEEEERLEQRLKREHEEERREQELAEEEQEQARERIKSRIPKWQWQLESEADARQSKVYSRPRKQEGQRRRQEQEEKRRRRESELQWQEEERAHRQQQEEEQRRDFTWQWQAEEKSERGRQRLSARPPLREQRERQLRAEERQQREQRFLPEEEEKEQRRRQRREREKELQFLEEEEQLQRRERAQQLQEEEDGLQEDQERRRSQEQRRDQKWRWQLEEERKRRRHTLYAKPALQEQLRKEQQLLQEEEEELQREEREKRRRQEQERQYREEEQLQQEEEQLLREEREKRRRQERERQYRKDKKLQQKEEQLLGEEPEKRRRQEREKKYREEEELQQEEEQLLREEREKRRRQEWERQYRKKDELQQEEEQLLREEREKRRLQERERQYREEEELQQEEEQLLGEERETRRRQELERQYRKEEELQQEEEQLLREEPEKRRRQERERQCREEEELQQEEEQLLREEREKRRRQELERQYREEEEVQQEEEQLLREEPEKRRRQELERQYREEEELQQEEEQLLREEQEKRRQERERQYREEEELQRQKRKQRYRDEDQRSDLKWQWEPEKENAVRDNKVYCKGRENEQFRQLEDSQLRDRQSQQDLQHLLGEQQERDREQERRRWQQRDRHFPEEEQLEREEQKEAKRRDRKSQEEKQLLREEREEKRRRQETDRKFREEEQLLQEREEQPLRRQERDRKFREEELRHQEQGRKFLEEEQRLRRQERERKFLKEEQQLRCQEREQQLRQDRDRKFREEEQQLSRQERDRKFREEEQQVRRQERERKFLEEEQQLRQERHRKFREEEQLLQEREEQQLHRQERDRKFLEEEQQLRRQERDRKFREQELRSQEPERKFLEEEQQLHRQQRQRKFLQEEQQLRRQERGQQRRQDRDRKFREEEQLRQEREEQQLSRQERDRKFRLEEQKVRRQEQERKFMEDEQQLRRQEGQQQLRQERDRKFREDEQLLQEREEQQLHRQERDRKFLEEEPQLRRQEREQQLRHDRDRKFREEEQLLQEGEEQQLRRQERDRKFREEEQQLRRQERERKFLQEEQQLRRQELERKFREEEQLRQETEQEQLRRQERYRKILEEEQLRPEREEQQLRRQERDRKFREEEQLRQEREEQQLRSQESDRKFREEEQLRQEREEQQLRPQQRDGKYRWEEEQLQLEEQEQRLRQERDRQYRAEEQFATQEKSRREEQELWQEEEQKRRQERERKLREEHIRRQQKEEQRHRQVGEIKSQEGKGHGRLLEPGTHQFASVPVRSSPLYEYIQEQRSQYRP

SEQ ID NO: 67944 - protein, 1281 aa, Homo sapiens
MVRKKNPPLRNVASEGEGQILEPIGTESKVSGKNKEFSADQMSENTDQSDAAELNHKEEHSLHVQDPSSSSKKDLKSAVLSEKAGFNYESPSKGGNFPSFPHDEVTDRNMLAFSSPAAGGVCEPLKSPQRAEADDPQDMACTPSGDSLETKEDQKMSPKATEETGQAQSGQANCQGLSPVSVASKNPQVPSDGGVRLNKSKTDLLVNDNPDPAPLSPELQDFKCNICGYGYYGNDPTDLIKHFRKYHLGLHNRTRQDAELDSKILALHNMVQFSHSKDFQKVNRSVFSGVLQDINSSRPVLLNGTYDVQVTSGGTFIGIGRKTPDCQGNTKYFRCKFCNFTYMGNSSTELEQHFLQTHPNKIKASLPSSEVAKPSEKNSNKSIPALQSSDSGDLGKWQDKITVKAGDDTPVGYSVPIKPLDSSRQNGTEATSYYWCKFCSFSCESSSSLKLLEHYGKQHGAVQSGGLNPELNDKLSRGSVINQNDLAKSSEGETMTKTDKSSSGAKKKDFSSKGAEDNMVTSYNCQFCDFRYSKSHGPDVIVVGPLLRHYQQLHNIHKCTIKHCPFCPRGLCSPEKHLGEITYPFACRKSNCSHCALLLLHLSPGAAGSSRVKHQCHQCSFTTPDVDVLLFHYESVHESQASDVKQEANHLQGSDGQQSVKESKEHSCTKCDFITQVEEEISRHYRRAHSCYKCRQCSFTAADTQSLLEHFNTVHCQEQDITTANGEEDGHAISTIKEEPKIDFRVYNLLTPDSKMGEPVSESVVKREKLEEKDGLKEKVWTESSSDDLRNVTWRGADILRGSPSYTQASLGLLTPVSGTQEQTKTLRDSPNVEAAHLARPIYGLAVETKGFLQGAPAGGEKSGALPQQYPASGENKSKDESQSLLRRRRGSGVFCANCLTTKTSLWRKNANGGYVCNACGLYQKLHSTPRPLNIIKQNNGEQIIRRRTRKRLNPEALQAEQLNKQQRGSNEEQVNGSPLERRSEDHLTESHQREIPLPSLSKYEAQGSLTKSHSAQQPVLVSQTLDIHKRMQPLHIQIKSPQESTGDPGNSSSVSEGKGSSERGSPIEKYMRPAKHPNYSPPGSPIEKYQYPLFGLPFVHNDFQSEADWLRFWSKYKLSVPGNPHYLSHVPGLPNPCQNYVPYPTFNLPPHFSAVGSDNDIPLDLAIKHSRPGPTANGASKEKTKAPPNVKNEGPLNVVKTEKVDRSTQDELSTKCVHCGIVFLDEVMYALHMSCHGDSGPFQCSICQHLCTDKYDFTTHIQRGLHRNNAQVEKNGKPKE

SEQ ID NO: 67945 - protein, 1294 aa, Homo sapiens
MPYEVNAGYDFTNMVRKKNPPLRNVASEGEGQILEPIGTESKVSGKNKEFSADQMSENTDQSDAAELNHKEEHSLHVQDPSSSSKKDLKSAVLSEKAGFNYESPSKGGNFPSFPHDEVTDRNMLAFSSPAAGGVCEPLKSPQRAEADDPQDMACTPSGDSLETKEDQKMSPKATEETGQAQSGQANCQGLSPVSVASKNPQVPSDGGVRLNKSKTDLLVNDNPDPAPLSPELQDFKCNICGYGYYGNDPTDLIKHFRKYHLGLHNRTRQDAELDSKILALHNMVQFSHSKDFQKVNRSVFSGVLQDINSSRPVLLNGTYDVQVTSGGTFIGIGRKTPDCQGNTKYFRCKFCNFTYMGNSSTELEQHFLQTHPNKIKASLPSSEVAKPSEKNSNKSIPALQSSDSGDLGKWQDKITVKAGDDTPVGYSVPIKPLDSSRQNGTEATSYYWCKFCSFSCESSSSLKLLEHYGKQHGAVQSGGLNPELNDKLSRGSVINQNDLAKSSEGETMTKTDKSSSGAKKKDFSSKGAEDNMVTSYNCQFCDFRYSKSHGPDVIVVGPLLRHYQQLHNIHKCTIKHCPFCPRGLCSPEKHLGEITYPFACRKSNCSHCALLLLHLSPGAAGSSRVKHQCHQCSFTTPDVDVLLFHYESVHESQASDVKQEANHLQGSDGQQSVKESKEHSCTKCDFITQVEEEISRHYRRAHSCYKCRQCSFTAADTQSLLEHFNTVHCQEQDITTANGEEDGHAISTIKEEPKIDFRVYNLLTPDSKMGEPVSESVVKREKLEEKDGLKEKVWTESSSDDLRNVTWRGADILRGSPSYTQASLGLLTPVSGTQEQTKTLRDSPNVEAAHLARPIYGLAVETKGFLQGAPAGGEKSGALPQQYPASGENKSKDESQSLLRRRRGSGVFCANCLTTKTSLWRKNANGGYVCNACGLYQKLHSTPRPLNIIKQNNGEQIIRRRTRKRLNPEALQAEQLNKQQRGSNEEQVNGSPLERRSEDHLTESHQREIPLPSLSKYEAQGSLTKSHSAQQPVLVSQTLDIHKRMQPLHIQIKSPQESTGDPGNSSSVSEGKGSSERGSPIEKYMRPAKHPNYSPPGSPIEKYQYPLFGLPFVHNDFQSEADWLRFWSKYKLSVPGNPHYLSHVPGLPNPCQNYVPYPTFNLPPHFSAVGSDNDIPLDLAIKHSRPGPTANGASKEKTKAPPNVKNEGPLNVVKTEKVDRSTQDELSTKCVHCGIVFLDEVMYALHMSCHGDSGPFQCSICQHLCTDKYDFTTHIQRGLHRNNAQVEKNGKPKE

SEQ ID NO: 67946 - protein, 1285 aa, Homo sapiens
MQSNMVRKKNPPLRNVASEGEGQILEPIGTESKVSGKNKEFSADQMSENTDQSDAAELNHKEEHSLHVQDPSSSSKKDLKSAVLSEKAGFNYESPSKGGNFPSFPHDEVTDRNMLAFSSPAAGGVCEPLKSPQRAEADDPQDMACTPSGDSLETKEDQKMSPKATEETGQAQSGQANCQGLSPVSVASKNPQVPSDGGVRLNKSKTDLLVNDNPDPAPLSPELQDFKCNICGYGYYGNDPTDLIKHFRKYHLGLHNRTRQDAELDSKILALHNMVQFSHSKDFQKVNRSVFSGVLQDINSSRPVLLNGTYDVQVTSGGTFIGIGRKTPDCQGNTKYFRCKFCNFTYMGNSSTELEQHFLQTHPNKIKASLPSSEVAKPSEKNSNKSIPALQSSDSGDLGKWQDKITVKAGDDTPVGYSVPIKPLDSSRQNGTEATSYYWCKFCSFSCESSSSLKLLEHYGKQHGAVQSGGLNPELNDKLSRGSVINQNDLAKSSEGETMTKTDKSSSGAKKKDFSSKGAEDNMVTSYNCQFCDFRYSKSHGPDVIVVGPLLRHYQQLHNIHKCTIKHCPFCPRGLCSPEKHLGEITYPFACRKSNCSHCALLLLHLSPGAAGSSRVKHQCHQCSFTTPDVDVLLFHYESVHESQASDVKQEANHLQGSDGQQSVKESKEHSCTKCDFITQVEEEISRHYRRAHSCYKCRQCSFTAADTQSLLEHFNTVHCQEQDITTANGEEDGHAISTIKEEPKIDFRVYNLLTPDSKMGEPVSESVVKREKLEEKDGLKEKVWTESSSDDLRNVTWRGADILRGSPSYTQASLGLLTPVSGTQEQTKTLRDSPNVEAAHLARPIYGLAVETKGFLQGAPAGGEKSGALPQQYPASGENKSKDESQSLLRRRRGSGVFCANCLTTKTSLWRKNANGGYVCNACGLYQKLHSTPRPLNIIKQNNGEQIIRRRTRKRLNPEALQAEQLNKQQRGSNEEQVNGSPLERRSEDHLTESHQREIPLPSLSKYEAQGSLTKSHSAQQPVLVSQTLDIHKRMQPLHIQIKSPQESTGDPGNSSSVSEGKGSSERGSPIEKYMRPAKHPNYSPPGSPIEKYQYPLFGLPFVHNDFQSEADWLRFWSKYKLSVPGNPHYLSHVPGLPNPCQNYVPYPTFNLPPHFSAVGSDNDIPLDLAIKHSRPGPTANGASKEKTKAPPNVKNEGPLNVVKTEKVDRSTQDELSTKCVHCGIVFLDEVMYALHMSCHGDSGPFQCSICQHLCTDKYDFTTHIQRGLHRNNAQVEKNGKPKE

SEQ ID NO: 67947 - protein, 234 aa, Homo sapiens
MRKTRLWGLLWMLFVSELRAATKLTEEKYELKEGQTLDVKCDYTLEKFASSQKAWQIIRDGEMPKTLACTERPSKNSHPVQVGRIILEDYHDHGLLRVRMVNLQVEDSGLYQCVIYQPPKEPHMLFDRIRLVVTKGFSGTPGSNENSTQNVYKIPPTTTKALCPLYTSPRTVTQAPPKSTADVSTPDSEINLTNVTDIIRVPVFNIVILLAGGFLSKSLVFSVLFAVTLRSFVP

SEQ ID NO: 67948 - protein, 150 aa, Homo sapiens
MRKTRLWGLLWMLFVSELRAATKLTEEKYELKEGQTLDVKCDYTLEKFASSQKAWQIIRDGEMPKTLACTERPSKNSHPVQVGRIILEDYHDHGLLRVRMVNLQVEDSGLYQCVIYQPPKEPHMLFDRIRLVVTKGFRCSTLSFSWLVDS

SEQ ID NO: 67949 - protein, 225 aa, Homo sapiens
MRKTRLWGLLWMLFVSELRAATKLTEEKYELKEGQTLDVKCDYTLEKFASSQKAWQIIRDGEMPKTLACTERPSKNSHPVQVGRIILEDYHDHGLLRVRMVNLQVEDSGLYQCVIYQPPKEPHMLFDRIRLVVTKGFSGTPGSNENSTQNVYKIPPTTTKALCPLYTSPRTVTQAPPKSTADVSTPDSEINLTNVTDIIRYSFQVPGPLVWTLSPLFPSLCAERM

SEQ ID NO: 67950 - protein, 166 aa, Homo sapiens
MEPLRLLILLFVTELSGAHNTTVFQGVAGQSLQVSCPYDSMKHWGRRKAWCRQLGEKGPCQRVVSTHNLWLLSFLRRWNGSTAITDDTLGGTLTITLRNLQPHDAGLYQCQSLHGSEADTLRKVLVEVLADPLDHRDAGDLWFPGESESFEDAHVEHSISRAERHV

SEQ ID NO: 67951 - protein, 230 aa, Homo sapiens
MEPLRLLILLFVTELSGAHNTTVFQGVAGQSLQVSCPYDSMKHWGRRKAWCRQLGEKGPCQRVVSTHNLWLLSFLRRWNGSTAITDDTLGGTLTITLRNLQPHDAGLYQCQSLHGSEADTLRKVLVEVLADPLDHRDAGDLWFPGESESFEDAHVEHSISRSLLEGEIPFPPTSILLLLACIFLIKILAASALWAAAWHGQKPGTHPPSELDCGHDPGYQLQTLPGLRDT

SEQ ID NO: 67952 - protein, 219 aa, Homo sapiens
MEPLRLLILLFVTELSGAHNTTVFQGVAGQSLQVSCPYDSMKHWGRRKAWCRQLGEKGPCQRVVSTHNLWLLSFLRRWNGSTAITDDTLGGTLTITLRNLQPHDAGLYQCQSLHGSEADTLRKVLVEVLADPLDHRDAGDLWFPGESESFEDAHVEHSISRAERHVKEDDGRKSPGEVPPGTSPACILATWPPGLLVLLWQETTLPEHCFSWTLEAGTG

SEQ ID NO: 67953 - protein, 311 aa, Homo sapiens
MGLTLLLLLLLGLEGQGIVGSLPEVLQAPVGSSILVQCHYRLQDVKAQKVWCRFLPEGCQPLVSSAVDRRAPAGRRTFLTDLGGGLLQVEMVTLQEEDAGEYGCMVDGARGPQILHRVSLNILPPEEEEETHKIGSLAENAFSDPAGSANPLEPSQDEKSIPLIWGAVLLVGLLVAAVVLFAVMAKRKQGNRLGVCGRFLSSRVSGMNPSSVVHHVSDSGPAAELPLDVPHIRLDSPPSFDNTTYTSLPLDSPSGKPSLPAPSSLPPLPPKVLVCSKPVTYATVIFPGGNKGGGTSCGPAQNPPNNQTPSS

SEQ ID NO: 67954 - protein, 199 aa, Homo sapiens
MGLTLLLLLLLGLEGQGIVGSLPEVLQAPVGSSILVQCHYRLQDVKAQKVWCRFLPEGCQPLVSSAVDRRAPAGRRTFLTDLGGGLLQVEMVTLQEEDAGEYGCMVDGARGPQILHRVSLNILPPEEEEETHKIGSLAENAFSDPAGSANPLEPSQDEKSIPLIWGAVLLVGLLVAAVVLFAVMAKRKQESLLSGPPRQ

SEQ ID NO: 67955 - protein, 200 aa, Homo sapiens
MGLTLLLLLLLGLEEEEEETHKIGSLAENAFSDPAGSANPLEPSQDEKSIPLIWGAVLLVGLLVAAVVLFAVMAKRKQGNRLGVCGRFLSSRVSGMNPSSVVHHVSDSGPAAELPLDVPHIRLDSPPSFDNTTYTSLPLDSPSGKPSLPAPSSLPPLPPKVLVCSKPVTYATVIFPGGNKGGGTSCGPAQNPPNNQTPSS

SEQ ID NO: 67956 - protein, 321 aa, Homo sapiens
MAPAFLLLLLLWPQGCVSGPSADSVYTKVRLLEGETLSVQCSYKGYKNRVEGKVWCKIRKKKCEPGFARVWVKGPRYLLQDDAQAKVVNITMVALKLQDSGRYWCMRNTSGILYPLMGFQLDVSPAPQTERNIPFTHLDNILKSGTVTTGQAPTSGPDAPFTTGVMVFTPGLITLPRLLASTRPASKTGYSFTATSTTSQGPRRTMGSQTVTASPSNARDSSAGPESISTKSGDLSTRSPTTGLCLTSRSLLNRLPSMPSIRHQDVYSTVLGVVLTLLVLMLIMVYGFWKKRHMASYSMCSDPSTRDPPGRPEPYVEVYLI

SEQ ID NO: 67957 - protein, 853 aa, Homo sapiens
MCCEKWSRVAEMFLFIEEREDCKILCLCSRAFVEDRKLYNLGLKGYYIRDSGNNSGDQATEEEEGGYSCGTAESHDSKGIGLDESELDSEAELMRSMGLPLQFGRITAHKDFEVSMNTRNKVKIKKKKHQKKYLDEIVQESWRKEYEEDDILASDDPSSIEQYENTRTYELQSKKDTETENPPVENTLSPKLEITEKWEKYWNEYGGGLLWQSWQEKHPGQALSSEPWNFPDTKEEWEQHYSQLYWYYLEQFQYWEAQGWTFDASQSCDTDTYTSKTEADDKNDEKCMKVDLVSFPSSPIMVDNDSSGTSDKDHSEILDGISNIKLNSEEVTQSQLDSCTSHDGHQQLSEVSSKRECPASGQSEPRNGGTNEESNSSGNTNTDPPAEDSQKSSGANTSKDRPHASGTDGDESEEDPPEHKPSKLKRSHELDIDENPASDFDDSGSLLGFKYGSGQKYGGIPNFSHRQVRYLEKNVKLKSKYLDMRRQIKMKNKHIFFTKESEKPFFKKSKILSKVEKFLTWVNKPMDEEASQESSSHDNVHDASTSSDSEEQDMSVKKGDDLLETNNPEPEKCQSVSSAGELETENYERDSLLATVPDEQDCVTQEVPDSRQAETEAEVKKKKNKKKNKKVNGLPPEIAAVPELAKYWAQRYRLFSRFDDGIKLDREGWFSVTPEKIAEHIAGRVSQSFKCDVVVDAFCGVGGNTIQFALTGMRVIAIDIDPVKIALARNNAEVYGIADKIEFICGDFLLLASFLKADVVFLSPPWGGPDYATAETFDIRTMMSPDGFEIFRLSKKITNNIVYFLPRNADIDQVASLAGPGGQVEIEQNFLNNKLKTITAYFGDLIRRPASET

SEQ ID NO: 67958 - protein, 421 aa, Homo sapiens
MWYHRLSHLHSRLQDLLKGGVIYPALPQPNFKSLLPLAVHWHHTASKSLTCAWQQHEDHFELKYANTVMRFDYVWLRDHCRSASCYNSKTHQRSLDTASVDLCIKPKTIRLDETTLFFTWPDGHVTKYDLNWLVKNSYEGQKQKVIQPRILWNAEIYQQAQVPSVDCQSFLETNEGLKKFLQNFLLYGIAFVENVPPTQEHTEKLAERISLIRETIYGRMWYFTSDFSRGDTAYTKLALDRHTDTTYFQEPCGIQVFHCLKHEGTGGRTLLVDGFYAAEQVLQKAPEEFELLSKVPLKHEYIEDVGECHNHMIGIGPVLNIYPWNKELYLIRYNNYDRAVINTVPYDVVHRWYTAHRTLTIELRRPENEFWVKLKPGRVLFIDNWRVLHGRECFTGYRQLCGCYLTRDDVLNTARLLGLQA

SEQ ID NO: 67959 - protein, 376 aa, Homo sapiens
MWYHRLSHLHSRLQDLLKGGVIYPALPQPNFKSLLPLAVHWHHTASKSLTCAWQQHEDHFELKYANTVMRFDYVWLRDHCRSASCYNSKTHQRSLDTASVDLCIKPKTIRLDETTLFFTWPDGHVTKYDLNWLVKNSYEGQKQKVIQPRILWNAEIYQQAQVPSVDCQSFLETNEGLKKFLQNFLLYGIAFVENVPPTQEHTEKLAERISLIRETIYGRMWYFTSDFSRGDTAYTKLALDRHTDTTYFQEPCGIQVFHCLKHEGTGGRTLLVDGFYAAEQVLQKAPEEFELLSKVPLKHEYIEDVGECHNHMIGIGPVLNIYPWNKELYLIRLFKEKQNTVNRQWNSSLQCDIPERILTYRHFVSGTSIEHRGSLI

SEQ ID NO: 67960 - protein, 1962 aa, Homo sapiens
MRELEAKATKDVERNLSRDLVQEEEQLMEEKKKKKDDKKKKEAAQKKATEQKIKVPEQIKPSVSQPQPANSNNGTSTATSTNNNAKRATANNQQPQQQQQQQQPQQQQPQQQPQPQPQQQQPQQQPQALPRYPREVPPRFRHQEHKQLLKRGQHFPVIAANLGSAVKVLNSQSESSALTNQQPQNNGEVQNSKNQSDINHSTSGSHYENSQRGPVSSTSDSSTNCKNAVVSDLSEKEAWPSAPGSDPELASECMDADSASSSESERNITIMASGNTGGEKDGLRNSTGLGSQNKFVVGSSSNNVGHGSSTGPWGFSHGAIISTCQVSVDAPESKSESSNNRMNAWGTVSSSSNGGLNPSTLNSASNHGAWPVLENNGLALKGPVGSGSSGINIQCSTIGQMPNNQSINSKVSGGSTHGTWGSLQETCESEVSGTQKVSFSGQPQNITTEMTGPNNTTNFMTSSLPNSGSVQNNELPSSNTGAWRVSTMNHPQMQAPSGMNGTSLSHLSNGESKSGGSYGTTWGAYGSNYSGDKCSGPNGQANGDTVNATLMQPGVNGPMGTNFQVNTNKGGGVWESGAANSQSTSWGSGNGANSGGSRRGWGTPAQNTGTNLPSVEWNKLPSNQHSNDSANGNGKTFTNGWKSTEEEDQGSATSQTNEQSSVWAKTGGTVESDGSTESTGRLEEKGTGESQSRDRRKIDQHTLLQSIVNRTDLDPRVLSNSGWGQTPIKQNTAWDTETSPRGERKTDNGTEAWGSSATQTFNSGACIDKTSPNGNDTSSVSGWGDPKPALRWGDSKGSNCQGGWEDDSAATGMVKSNQWGNCKEEKAAWNDSQKNKQGWGDGQKSSQGWSVSASDNWGETSRNNHWGEANKKSSSGGSDSDRSVSGWNELGKTSSFTWGNNINPNNSSGWDESSKPTPSQGWGDPPKSNQSLGWGDSSKPVSSPDWNKQQDIVGSWGIPPATGKPPGTGWLGGPIPAPAKEEEPTGWEEPSPESIRRKMEIDDGTSAWGDPSKYNYKNVNMWNKNVPNGNSRSDQQAQVHQLLTPASAISNKEASSGSGWGEPWGEPSTPATTVDNGTSAWGKPIDSGPSWGEPIAAASSTSTWGSSSVGPQALSKSGPKSMQDGWCGDDMPLPGNRPTGWEEEEDVEIGMWNSNSSQELNSSLNWPPYTKKMSSKGLSGKKRRRERGMMKGGNKQEEAWINPFVKQFSNISFSRDSPEENVQSNKMDLSGGMLQDKRMEIDKHSLNIGDYNRTVGKGPGSRPQISKESSMERNPYFDKDGIVADESQNMQFMSSQSMKLPPSNSALPNQALGSIAGLGMQNLNSVRQNGNPSMFGVGNTAAQPRGMQQPPAQPLSSSQPNLRAQVPPPLLSPQVPVSLLKYAPNNGGLNPLFGPQQVAMLNQLSQLNQLSQISQLQRLLAQQQRAQSQRSVPSGNRPQQDQQGRPLSVQQQMMQQSRQLDPNLLVKQQTPPSQQQPLHQPAMKSFLDNVMPHTTPELQKGPSPINAFSNFPIGLNSNLNVNMDMNSIKEPQSRLRKWTTVDSISVNTSLDQNSSKHGAISSGFRLEESPFVPYDFMNSSTSPASPPGSIGDGWPRAKSPNGSSSVNWPPEFRPGEPWKGYPNIDPETDPYVTPGSVINNLSINTVREVDHLRDRNSGSSSSLNTTLPSTSAWSSIRASNYNVPLSSTAQSTSARNSDSKLTWSPGSVTNTSLAHELWKVPLPPKNITAPSRPPPGLTGQKPPLSTWDNSPLRIGGGWGNSDARYTPGSSWGESSSGRITNWLVLKNLTPQIDGSTLRTLCMQHGPLITFHLNLPHGNALVRYSSKEEVVKAQKSLHMCVLGNTTILAEFASEEEISRFFAQSQSLTPSPGWQSLGSSQSRLGSLDCSHSFSSRTDLNHWNGAGLSGTNCGDLHGTSLWGTPHYSTSLWGPPSSSDPRGISSPSPINAFLSVDHLGGGGESM

SEQ ID NO: 67961 - protein, 440 aa, Homo sapiens
MDMNSIKEPQSRLRKWTTVDSISVNTSLDQNSSKHGAISSGFRLEESPFVPYDFMNSSTSPASPPGSIGDGWPRAKSPNGSSSVNWPPEFRPGEPWKGYPNIDPETDPYVTPGSVINNLSINTVREVDHLRDRNSGSSSSLNTTLPSTSAWSSIRASNYNVPLSSTAQSTSARNSDSKLTWSPGSVTNTSLAHELWKVPLPPKNITAPSRPPPGLTGQKPPLSTWDNSPLRIGGGWGNSDARYTPGSSWGESSSGRITNWLVLKNLTPQIDGSTLRTLCMQHGPLITFHLNLPHGNALVRYSSKEEVVKAQKSLHMCVLGNTTILAEFASEEEISRFFAQSQSLTPSPGWQSLGSSQSRLGSLDCSHSFSSRTDLNHWNGAGLSGTNCGDLHGTSLWGTPHYSTSLWGPPSSSDPRGISSPSPINAFLSVDHLGGGGESM

SEQ ID NO: 67962 - protein, 1690 aa, Homo sapiens
MATGSAQGNFTGHTKKTNGNNGTNGALVQSPSNQSALGAGGANSNGSAARVWGVATGSSSGLAHCSVSGGDGKMDTMIGDGRSQNCWGASNSNAGINLNLNPNANPAAWPVLGHEGTVATGNPSSICSPVSAIGQNMGNQNGNPTGTLGAWGNLLPQESTEPQTSTSQNVSFSAQPQNLNTDGPNNTNPMNSSPNPINAMQTNGLPNWGMAVGMGAIIPPHLQGLPGANGSSVSQVSGGSAEGISNSVWGLSPGNPATGNSNSGFSQGNGDTVNSALSAKQNGSSSAVQKEGSGGNAWDSGPPAGPGILAWGRGSGNNGVGNIHSGAWGHPSRSTSNGVNGEWGKPPNQHSNSDINGKGSTGWESPSVTSQNPTVQPGGEHMNSWAKAASSGTTASEGSSDGSGNHNEGSTGREGTGEGRRRDKGIIDQGHIQLPRNDLDPRVLSNTGWGQTPVKQNTAWEFEESPRSERKNDNGTEAWGCAATQASNSGGKNDGSIMNSTNTSSVSGWVNAPPAAVPANTGWGDSNNKAPSGPGVWGDSISSTAVSTAAAAKSGHAWSGAANQEDKSPTWGEPPKPKSQHWGDGQRSNPAWSAGGGDWADSSSVLGHLGDGKKNGSGWDADSNRSGSGWNDTTRSGNSGWGNSTNTKANPGTNWGETLKPGPQQNWASKPQDNNVSNWGGAASVKQTGTGWIGGPVPVKQKDSSEATGWEEPSPPSIRRKMEIDDGTSAWGDPSNYNNKTVNMWDRNNPVIQSSTTTNTTTTTTTTTSNTTHRVETPPPHQAGTQLNRSPLLGPGRKVSSGWGEMPNVHSKTENSWGEPSSPSTLVDNGTAAWGKPPSSGSGWGDHPAEPPVAFGRAGAPVAASALCKPASKSMQEGWGSGGDEMNLSTSQWEDEEGDVWNNAASQESTSSCSSWGNAPKKGLQKGMKTSGKQDEAWIMSRLIKQLTDMGFPREPAEEALKSNNMNLDQAMSALLEKKVDVDKRGLGVTDHNGMAAKPLGCRPPISKESSVDRPTFLDKDGGLVEEPTPSPFLPSPSLKLPLSHSALPSQALGGIASGLGMQNLNSSRQIPSGNLGMFGNSGAAQARTMQQPPQPPVQPLNSSQPSLRAQVPQFLSPQVQAQLLQFAAKNIGLNPALLTSPINPQHMTMLNQLYQLQLAYQRLQIQQQMLQAQRNVSGSMRQQEQQVARTITNLQQQIQQHQRQLAQALLVKQPPPPPPPPHLSLHPSAGKSAMDSFPSHPQTPGLPDLQTKEQQSSPNTFAPYPLAGLNPNMNVNSMDMTGGLSVKDPSQSQSRLPQWTHPNSMDNLPSAASPLEQNPSKHGAIPGGLSIGPPGKSSIDDSYGRYDLIQNSESPASPPVAVPHSWSRAKSDSDKISNGSSINWPPEFHPGVPWKGLQNIDPENDPDVTPGSVPTGPTINTTIQDVNRYLLKSGGKLSDIKSTWSSGPTSHTQASLSHELWKVPRNSTAPTRPPPGLTNPKPSSTWGASPLGWTSSYSSGSAWSTDTSGRTSSWLVLRNLTPQIDGSTLRTLCLQHGPLITFHLNLTQGNAVVRYSSKEEAAKAQKSLHMCVLGNTTILAEFAGEEEVNRFLAQGQALPPTSSWQSSSASSQPRLSAAGSSHGLVRSDAGHWNAPCLGGKGSSELLWGGVPQYSSSLWGPPSADDSRVIGSPTPLTTLLPGDLLSGESL

SEQ ID NO: 67963 - protein, 1726 aa, Homo sapiens
MATGSAQGNFTGHTKKTNGNNGTNGALVQSPSNQSALGAGGANSNGSAARVWGVATGSSSGLAHCSVSGGDGKMDTMIGDGRSQNCWGASNSNAGINLNLNPNANPAAWPVLGHEGTVATGNPSSICSPVSAIGQNMGNQNGNPTGTLGAWGNLLPQESTEPQTSTSQNVSFSAQPQNLNTDGPNNTNPMNSSPNPINAMQTNGLPNWGMAVGMGAIIPPHLQGLPGANGSSVSQVSGGSAEGISNSVWGLSPGNPATGNSNSGFSQGNGDTVNSALSAKQNGSSSAVQKEGSGGNAWDSGPPAGPGILAWGRGSGNNGVGNIHSGAWGHPSRSTSNGVNGEWGKPPNQHSNSDINGKGSTGWESPSVTSQNPTVQPGGEHMNSWAKAASSGTTASEGSSDGSGNHNEGSTGREGTGEGRRRDKGIIDQGHIQLPRNDLDPRVLSNTGWGQTPVKQNTAWEFEESPRSERKNDNGTEAWGCAATQASNSGGKNDGSIMNSTNTSSVSGWVNAPPAAVPANTGWGDSNNKAPSGPGVWGDSISSTAVSTAAAAKSGHAWSGAANQEDKSPTWGEPPKPKSQHWGDGQRSNPAWSAGGGDWADSSSVLGHLGDGKKNGSGWDADSNRSGSGWNDTTRSGNSGWGNSTNTKANPGTNWGETLKPGPQQNWASKPQDNNVSNWGGAASVKQTGTGWIGGPVPVKQKDSSEATGWEEPSPPSIRRKMEIDDGTSAWGDPSNYNNKTVNMWDRNNPVIQSSTTTNTTTTTTTTTSNTTHRVETPPPHQAGTQLNRSPLLGPVSSGWGEMPNVHSKTENSWGEPSSPSTLVDNGTAAWGKPPSSGSGWGDHPAEPPVAFGRAGAPVAASALCKPASKSMQEGWGSGGDEMNLSTSQWEDEEGDVWNNAASQESTSSCSSWGNAPKKGLQKGMKTSGKQDEAWIMSRLIKQLTDMGFPREPAEEALKSNNMNLDQAMSALLEKKVDVDKRGLGVTDHNGMAAKPLGCRPPISKESSVDRPTFLDKDGGLVEEPTPSPFLPSPSLKLPLSHSALPSQALGGIASGLGMQNLNSSRQIPSGNLGMFGNSGAAQARTMQQPPQPPVQPLNSSQPSLRAQVPQFLSPQVQAQLLQFAAKNIGLNPALLTSPINPQHMTMLNQLYQLQLAYQRLQIQQQMLQAQRNVSGSMRQQEQQVARTITNLQQQIQQHQRQLAQALLVKQPPPPPPPPHLSLHPSAGKSAMDSFPSHPQTPGLPDLQTKEQQSSPNTFAPYPLAGLNPNMNVNSMDMTGGLSVKDPSQSQSRLPQWTHPNSMDNLPSAASPLEQNPSKHGAIPGGLSIGPPGKSSIDDSYGRYDLIQNSESPASPPVAVPHSWSRAKSDSDKISNGSSINWPPEFHPGVPWKGLQNIDPENDPDVTPGSVPTGPTINTTIQDVNRYLLKSGGSSPPSSQNATLPSSSAWPLSASGYSSSFSSIASAPSVAGKLSDIKSTWSSGPTSHTQASLSHELWKVPRNSTAPTRPPPGLTNPKPSSTWGASPLGWTSSYSSGSAWSTDTSGRTSSWLVLRNLTPQIDGSTLRTLCLQHGPLITFHLNLTQGNAVVRYSSKEEAAKAQKSLHMCVLGNTTILAEFAGEEEVNRFLAQGQALPPTSSWQSSSASSQPRLSAAGSSHGLVRSDAGHWNAPCLGGKGSSELLWGGVPQYSSSLWGPPSADDSRVIGSPTPLTTLLPGDLLSGESL

SEQ ID NO: 67964 - protein, 1726 aa, Homo sapiens; identical to SEQ ID NO: 67963

SEQ ID NO: 67965 - protein, 1690 aa, Homo sapiens; identical to SEQ ID NO: 67962

SEQ ID NO: 67966 - protein, 1690 aa, Homo sapiens; identical to SEQ ID NO: 67962

SEQ ID NO: 67967 - protein, 1726 aa, Homo sapiens; identical to SEQ ID NO: 67963

SEQ ID NO: 67968 - protein, 652 aa, Homo sapiens
MGGWKGPGQRRGKEGPEARRRAAERGGGGGGGGVPAPRSPAREPRPRSCLLLPPPWGAAMTPDLLNFKKGWMSILDEPGEPPSPSLTTTSTSQWKKHWFVLTDSSLKYYRDSTAEEADELDGEIDLRSCTDVTEYAVQRNYGFQIHTKDAVYTLSAMTSGIRRNWIEALRKTVRPTSAPDVTKLSDSNKENALHSYSTQKGPLKAGEQRAGSEVISRGGPRKADGQRQALDYVELSPLTQASPQRARTPARTPDRLAKQEELERDLAQRSEERRKWFEATDSRTPEVPAGEGPRRGLGAPLTEDQQNRLSEEIEKKWQELEKLPLRENKRVPLTALLNQSRGERRGPPSDGHEALEKEVQALRAQLEAWRLQGEAPQSALRSQEDGHIPPGYISQEACERSLAEMESSHQQVMEELQRHHERELQRLQQEKEWLLAEETAATASAIEAMKKAYQEELSRELSKTRSLQQGPDGLRKQHQSDVEALKRELQVLSEQYSQKCLEIGALMRQAEEREHTLRRCQQEGQELLRHNQELHGRLSEEIDQLRGFIASQGMGNGCGRSNERSSCELEVLLRVKENELQYLKKEVQCLRDELQMMQKDKRFTSGKYQDVYVELSHIKTRSEREIEQLKEHLRLAMAALQEKESMRNSLAE

SEQ ID NO: 67969 - protein, 2365 aa, Homo sapiens
MEEVPGDALCEHFEANILTQNRCQNCFHPEEAHGARYQELRSPSGAEVPYCDLPRCPPAPEDPLSASTSGCQSVVDPGLRPGPKRGPSPSAGLPEEGPTAAPRSRSRELEAVPYLEGLTTSLCGSCNEDPGSDPTSSPDSATPDDTSNSSSVDWDTVERQEEEAPSWDELAVMIPRRPREGPRADSSQRAPSLLTRSPVGGDAAGQKKEDTGGGGRSAGQHWARLRGESGLSLERHRSTLTQASSMTPHSGPRSTTSQASPAQRDTAQAASTREIPRASSPHRITQRDTSRASSTQQEISRASSTQQETSRASSTQEDTPRASSTQEDTPRASSTQWNTPRASSPSRSTQLDNPRTSSTQQDNPQTSFPTCTPQRENPRTPCVQQDDPRASSPNRTTQRENSRTSCAQRDNPKASRTSSPNRATRDNPRTSCAQRDNPRASSPSRATRDNPTTSCAQRDNPRASRTSSPNRATRDNPRTSCAQRDNPRASSPSRATRDNPTTSCAQRDNPRASRTSSPNRATRDNPRTSCAQRDNPRASSPNRAARDNPTTSCAQRDNPRASRTSSPNRATRDNPRTSCAQRDNPRASSPNRATRDNPTTSCAQRDNPRASRTSSPNRATRDNPRTSCAQRDNPRASSPNRTTQQDSPRTSCARRDDPRASSPNRTIQQENPRTSCALRDNPRASSPSRTIQQENPRTSCAQRDDPRASSPNRTTQQENPRTSCARRDNPRASSRNRTIQRDNPRTSCAQRDNPRASSPNRTIQQENLRTSCTRQDNPRTSSPNRATRDNPRTSCAQRDNLRASSPIRATQQDNPRTCIQQNIPRSSSTQQDNPKTSCTKRDNLRPTCTQRDRTQSFSFQRDNPGTSSSQCCTQKENLRPSSPHRSTQWNNPRNSSPHRTNKDIPWASFPLRPTQSDGPRTSSPSRSKQSEVPWASIALRPTQGDRPQTSSPSRPAQHDPPQSSFGPTQYNLPSRATSSSHNPGHQSTSRTSSPVYPAAYGAPLTSPEPSQPPCAVCIGHRDAPRASSPPRYLQHDPFPFFPEPRAPESEPPHHEPPYIPPAVCIGHRDAPRASSPPRHTQFDPFPFLPDTSDAEHQCQSPQHEPLQLPAPVCIGYRDAPRASSPPRQAPEPSLLFQDLPRASTESLVPSMDSLHECPHIPTPVCIGHRDAPSFSSPPRQAPEPSLFFQDPPGTSMESLAPSTDSLHGSPVLIPQVCIGHRDAPRASSPPRHPPSDLAFLAPSPSPGSSGGSRGSAPPGETRHNLEREEYTVLADLPPPRRLAQRQPGPQAQCSSGGRTHSPGRAEVERLFGQERRKSEAAGAFQAQDEGRSQQPSQGQSQLLRRQSSPAPSRQVTMLPAKQAELTRRSQAEPPHPWSPEKRPEGDRQLQGSPLPPRTSARTPERELRTQRPLESGQAGPRQPLGVWQSQEEPPGSQGPHRHLERSWSSQEGGLGPGGWWGCGEPSLGAAKAPEGAWGGTSREYKESWGQPEAWEEKPTHELPRELGKRSPLTSPPENWGGPAESSQSWHSGTPTAVGWGAEGACPYPRGSERRPELDWRDLLGLLRAPGEGVWARVPSLDWEGLLELLQARLPRKDPAGHRDDLARALGPELGPPGTNDVPEQESHSQPEGWAEATPVNGHSPALQSQSPVQLPSPACTSTQWPKIKVTRGPATATLAGLEQTGPLGSRSTAKGPSLPELQFQPEEPEESEPSRGQDPLTDQKQADSADKRPAEGKAGSPLKGRLVTSWRMPGDRPTLFNPFLLSLGVLRWRRPDLLNFKKGWMSILDEPGEPPSPSLTTTSTSQWKKHWFVLTDSSLKYYRDSTAEEADELDGEIDLRSCTDVTEYAVQRNYGFQIHTKDAVYTLSAMTSGIRRNWIEALRKTVRPTSAPDVTKLSDSNKENALHSYSTQKGPLKAGEQRAGSEVISRGGPRKADGQRQALDYVELSPLTQASPQRARTPARTPDRLAKQEELERDLAQRSEERRKWFEATDSRTPEVPAGEGPRRGLGAPLTEDQQNRLSEEIEKKWQELEKLPLRENKRVPLTALLNQSRGERRGPPSDGHEALEKEVQALRAQLEAWRLQGEAPQSALRSQEDGHIPPGYISQEACERSLAEMESSHQQVMEELQRHHERELQRLQQEKEWLLAEETAATASAIEAMKKAYQEELSRELSKTRSLQQGPDGLRKQHQSDVEALKRELQVLSEQYSQKCLEIGALMRQAEEREHTLRRCQQEGQELLRHNQELHGRLSEEIDQLRGFIASQGMGNGCGRSNERSSCELEVLLRVKENELQYLKKEVQCLRDELQMMQKDKRFTSGKYQDVYVELSHIKTRSEREIEQLKEHLRLAMAALQEKESMRNSLAE

SEQ ID NO: 67970 - protein, 431 aa, Homo sapiens
MGGWKGPGQRRGKEGPEARRRAAERGGGGGGGGVPAPRSPAREPRPRSCLLLPPPWGAAMTPDLLNFKKGWMSILDEPGEPPSPSLTTTSTSQWKKHWFVLTDSSLKYYRDSTAEEADELDGEIDLRSCTDVTEYAVQRNYGFQIHTKDAVYTLSAMTSGIRRNWIEALRKTVRPTSAPDVTKLSDSNKENALHSYSTQKGPLKAGEQRAGSEVISRGGPRKADGQRQALDYVELSPLTQASPQRARTPARTPDRLAKQEELERDLAQRSEERRKWFEATDSRTPEVPAGEGPRRGLGAPLTEDQQNRLSEEIEKKWQELEKLPLRENKRVPLTALLNQSRGERRGPPSDGHEALEKEVQALRAQLEAWRLQGEAPQSALRSQEDGHIPPGYISQLVGVITVPVLQTRPLSSERLCDLPKVTPPAGLKGGI

SEQ ID NO: 67971 - protein, 1689 aa, Homo sapiens
MEEVPGDALCEHFEANILTQNRCQNCFHPEEAHGARYQELRSPSGAEVPYCDLPRCPPAPEDPLSASTSGCQSVVDPGLRPGPKRGPSPSAGLPEEGPTAAPRSRSRELEAVPYLEGLTTSLCGSCNEDPGSDPTSSPDSATPDDTSNSSSVDWDTVERQEEEAPSWDELAVMIPRRPREGPRADSSQRAPSLLTRSPVGGDAAGQKKEDTGGGGRSAGQHWARLRGESGLSLERHRSTLTQASSMTPHSGPRSTTSQASPAQRDTAQAASTREIPRASSPHRITQRDTSRASSTQQEISRASSTQQETSRASSTQEDTPRASSTQEDTPRASSTQWNTPRASSPSRSTQLDNPRTSSTQQDNPQTSFPTCTPQRENPRTPCVQQDDPRASSPNRTTQRENSRTSCAQRDNPKASRTSSPNRATRDNPRTSCAQRDNPRASSPSRATRDNPTTSCAQRDNPRASRTSSPNRATRDNPRTSCAQRDNPRASSPSRATRDNPTTSCAQRDNPRASRTSSPNRATRDNPRTSCAQRDNPRASSPNRAARDNPTTSCAQRDNPRASRTSSPNRATRDNPRTSCAQRDNPRASSPNRATRDNPTTSCAQRDNPRASRTSSPNRATRDNPRTSCAQRDNPRASSPNRTTQQDSPRTSCARRDDPRASSPNRTIQQENPRTSCALRDNPRASSPSRTIQQENPRTSCAQRDDPRASSPNRTTQQENPRTSCARRDNPRASSRNRTIQRDNPRTSCAQRDNPRASSPNRTIQQENLRTSCTRQDNPRTSSPNRATRDNPRTSCAQRDNLRASSPIRATQQDNPRTCIQQNIPRSSSTQQDNPKTSCTKRDNLRPTCTQRDRTQSFSFQRDNPGTSSSQCCTQKENLRPSSPHRSTQWNNPRNSSPHRTNKDIPWASFPLRPTQSDGPRTSSPSRSKQSEVPWASIALRPTQGDRPQTSSPSRPAQHDPPQSSFGPTQYNLPSRATSSSHNPGHQSTSRTSSPVYPAAYGAPLTSPEPSQPPCAVCIGHRDAPRASSPPRYLQHDPFPFFPEPRAPESEPPHHEPPYIPPAVCIGHRDAPRASSPPRHTQFDPFPFLPDTSDAEHQCQSPQHEPLQLPAPVCIGYRDAPRASSPPRQAPEPSLLFQDLPRASTESLVPSMDSLHECPHIPTPVCIGHRDAPSFSSPPRQAPEPSLFFQDPPGTSMESLAPSTDSLHGSPVLIPQVCIGHRDAPRASSPPRHPPSDLAFLAPSPSPGSSGGSRGSAPPGETRHNLEREEYTVLADLPPPRRLAQRQPGPQAQCSSGGRTHSPGRAEVERLFGQERRTMLPAKQAELTRRSQAEPPHPWSPEKRPEGDRQLQGSPLPPRTSARTPERELRTQRPLESGQAGPRQPLGVWQSQEEPPGSQGPHRHLERSWSSQEGGLGPGGWWGCGEPSLGAAKAPEGAWGGTSREYKESWGQPEAWEEKPTHELPRELGKRSPLTSPPENWGGPAESSQSWHSGTPTAVGWGAEGACPYPRGSERRPELDWRDLLGLLRAPGEGVWARVPSLDWEGLLELLQARLPRKDPAGHRDDLARALGPELGPPGTNDVPEQESHSQPEGWAEATPVNGHSPALQSQSPVQLPSPACTSTQWPKIKVTRGPATATLAGLEQTGPLGSRSTAKGPSLPELQFQPEEPEESEPSRGQDPLTDQKQADS

SEQ ID NO: 67972 - protein, 256 aa, Homo sapiens
MSILDEPGEPPSPSLTTTSTSQWKKHWFVLTDSSLKYYRDSTAEEADELDGEIDLRSCTDVTEYAVQRNYGFQIHTKDAVYTLSAMTSGIRRNWIEALRKTVRPTSAPDVTKLSDSNKENALHSYSTQKGPLKAGEQRAGSEVISRGGPRKADGQRQALDYVELSPLTQASPQRARTPARTPDRLAKQEELERDLAQRSEERRKWFEATDSRTPEVPAGEGPRRGLGAPLTEDQQNRLSEEIEKKWQELEKLPLRE

SEQ ID NO: 67973 - protein, 83 aa, Homo sapiens
MSILDEPGEPPSPSLTTTSTSQWKKHWFVLTDSSLKYYRDSTAEEADELDGEIDLRSCTDVTEYAVQRNYGFQIHTKDAVYTL

SEQ ID NO: 67974 - protein, 286 aa, Homo sapiens
MAEDGEEAEFHFAALYISGQWPRLRADTDLQRLGSSAMAPSRKFFVGGNWKMNGRKQSLGELIGTLNAAKVPADTEVVCAPPTAYIDFARQKLDPKIAVAAQNCYKVTNGAFTGEISPGMIKDCGATWVVLGHSERRHVFGESDELIGQKVAHALAEGLGVIACIGEKLDEREAGITEKVVFEQTKVIADNVKDWSKVVLAYEPVWAIGTGKTATPQQAQEVHEKLRGWLKSNVSDAVAQSTRIIYGGSVTGATCKELASQPDVDGFLVGGASLKPEFVDIINAKQ

SEQ ID NO: 67975 - protein, 249 aa, Homo sapiens
MAPSRKFFVGGNWKMNGRKQSLGELIGTLNAAKVPADTEVVCAPPTAYIDFARQKLDPKIAVAAQNCYKVTNGAFTGEISPGMIKDCGATWVVLGHSERRHVFGESDELIGQKVAHALAEGLGVIACIGEKLDEREAGITEKVVFEQTKVIADNVKDWSKVVLAYEPVWAIGTGKTATPQQAQEVHEKLRGWLKSNVSDAVAQSTRIIYGGSVTGATCKELASQPDVDGFLVGGASLKPEFVDIINAKQ

SEQ ID NO: 67976 - protein, 167 aa, Homo sapiens
MIKDCGATWVVLGHSERRHVFGESDELIGQKVAHALAEGLGVIACIGEKLDEREAGITEKVVFEQTKVIADNVKDWSKVVLAYEPVWAIGTGKTATPQQAQEVHEKLRGWLKSNVSDAVAQSTRIIYGGSVTGATCKELASQPDVDGFLVGGASLKPEFVDIINAKQ

SEQ ID NO: 67977 - protein, 410 aa, Homo sapiens
MDVMELLEEDLTCPICCSLFDDPRVLPCSHNFCKKCLEGILEGSVRNSLWRPAPFKCPTCRKETSATGINSLQVNYSLKGIVEKYNKIKISPKMPVCKGHLGQPLNIFCLTDMQLICGICATRGEHTKHVFCSIEDAYAQERDAFESLFQSFETWRRGDALSRLDTLETSKRKSLQLLTKDSDKVKEFFEKLQHTLDQKKNEILSDFETMKLAVMQAYDPEINKLNTILQEQRMAFNIAEAFKDVSEPIVFLQQMQEFREKIKVIKETPLPPSNLPASPLMKNFDTSQWEDIKLVDVDKLSLPQDTGTFISKIPWSFYKLFLLILLLGLVIVFGPTMFLEWSLFDDLATWKGCLSNFSSYLTKTADFIEQSVFYWEQVTDGFFIFNERFKNFTLVVLNNVAEFVCKYKLL

SEQ ID NO: 67978 - protein, 410 aa, Homo sapiens; identical to SEQ ID NO: 67977

SEQ ID NO: 67979 - protein, 407 aa, Homo sapiens
MELLEEDLTCPICCSLFDDPRVLPCSHNFCKKCLEGILEGSVRNSLWRPAPFKCPTCRKETSATGINSLQVNYSLKGIVEKYNKIKISPKMPVCKGHLGQPLNIFCLTDMQLICGICATRGEHTKHVFCSIEDAYAQERDAFESLFQSFETWRRGDALSRLDTLETSKRKSLQLLTKDSDKVKEFFEKLQHTLDQKKNEILSDFETMKLAVMQAYDPEINKLNTILQEQRMAFNIAEAFKDVSEPIVFLQQMQEFREKIKVIKETPLPPSNLPASPLMKNFDTSQWEDIKLVDVDKLSLPQDTGTFISKIPWSFYKLFLLILLLGLVIVFGPTMFLEWSLFDDLATWKGCLSNFSSYLTKTADFIEQSVFYWEQVTDGFFIFNERFKNFTLVVLNNVAEFVCKYKLL

SEQ ID NO: 67980 - protein, 266 aa, Homo sapiens
MELLEEDLTCPICCSLFDDPRVLPCSHNFCKKCLEGILEGSVRNSLWRPAPFKCPTCRKETSATGINSLQVNYSLKGIVEKYNKIKISPKMPVCKGHLGQPLNIFCLTDMQLICGICATRGEHTKHVFCSIEDAYAQERDAFESLFQSFETWRRGDALSRLDTLETSKRKSLQLLTKDSDKVKEFFEKLQHTLDQKKNEILSDFETMKLAVMQAYDPEINKLNTILQEQRMAFNIAEAFKDVSEPIVFLQQMQEFREKIKVIKETP

SEQ ID NO: 67981 - protein, 407 aa, Homo sapiens; identical to SEQ ID NO: 67979

SEQ ID NO: 67982 - protein, 129 aa, Homo sapiens
MELLEEDLTCPICCSLFDDPRVLPCSHNFCKKCLEGILEGSVRNSLWRPAPFKCPTCRKETSATGINSLQVNYSLKGIVEKYNKIKISPKMPVCKGHLGQPLNIFCLTDMQLICGICATRGEHTKHVFC

SEQ ID NO: 67983 - protein, 407 aa, Homo sapiens; identical to SEQ ID NO: 67979

SEQ ID NO: 67984 - protein, 222 aa, Homo sapiens
MNDLSNRVWSISQEPDPVQRLQAYTATEQEMQQQMSLGELCHPVPLSFEPVKSFFKGLVEAVESTLQTPLDIRLKESINCQLSDPSSTKPGTLLKTSPSPERSLLLKSCWAAWGPCPCCGSTRSGKCWLVTASPPAATTGRLTCRRRAPAGGWARPTPPFGAAGPRPPPAWAATASPGASSATTLSTGPSTTASAAACGPATTSTGSASSWTTRPASSPSTT

SEQ ID NO: 67985 - protein, 442 aa, Homo sapiens
MAGAATGSRTPGRSELVEGCGWRCPEHGDRVAELFCRRCRRCVCALCPVLGAHRGHPVGLALEAAVHVQKLSQECLKQLAIKKQQHIDNITQIEDATEKLKANAESSKTWLKGKFTELRLLLDEEEALAKKFIDKNTQLTLQVYREQADSCREQLDIMNDLSNRVWSISQEPDPVQRLQAYTATEQEMQQQMSLGELCHPVPLSFEPVKSFFKGLVEAVESTLQTPLDIRLKESINCQLSDPSSTKPGTLLKTSPSPERSLLLKYARTPTLDPDTMHARLRLSADRLTVRCGLLGSLGPVPVLRFDALWQVLARDCFATGRHYWEVDVQEAGAGWWVGAAYASLRRRGASAAARLGCNRQSWCLKRYDLEYWAFHDGQRSRLRPRDDLDRLGVFLDYEAGVLAFYDVTGGMSHLHTFRATFQEPLYPALRLWEGAISIPRLP

SEQ ID NO: 67986 - protein, 442 aa, Homo sapiens; identical to SEQ ID NO: 67985

SEQ ID NO: 67987 - protein, 406 aa, Homo sapiens
MAGAATGSRTPGRSELVEGCGWRCPEHGDRVAELFCRRCRRCVCALCPVLGAHRGHPVGLALEAAVHVQKLSQECLKQLAIKKQQHIDNITQIEDATEKLKANAESSKTWLKGKFTELRLLLDEEEALAKKFIDKNTQLTLQVYREQADSCREQLDIMNDLSNRVWSISQEPDPVQRLQAYTATEQEMQQQMSLGELCHPVPLSFEPVKSFFKGLVEAVESTLQTPLDIRLKESINCQLSDPSSTKPGTLLKTSPSPERSLLLKYARTPTLDPDTMHARLRLSADRLTVRCGLLGSLGPVPVLRFDALWQVLARDCFATGRHYWEVDVQEAGAGWWVGAAYASLRRRGASAAARLGCNRQSWCLKRYDLEYWAFHDGQRSACGPATTSTGSASSWTTRPASSPSTT

SEQ ID NO: 67988 - protein, 253 aa, Homo sapiens
MAGAATGSRTPGRSELVEGCGWRCPEHGDRVAELFCRRCRRCVCALCPVLGAHRGHPVGLALEAAVHVQKLSQECLKQLAIKKQQHIDNITQIEDATEKLKANAESSKTWLKGKFTELRLLLDEEEALAKKFIDKNTQLTLQVYREQADSCREQLDIMNDLSNRVWSISQEPDPVQRLQAYTATEQEMQQQMSLGELCHPVPLSFEPVKSFFKGLVEAVESTLQTPLDIRLSPTNHAYSALKVSSPRLVSNRP

SEQ ID NO: 67989 - protein, 442 aa, Homo sapiens; identical to SEQ ID NO: 67985

SEQ ID NO: 67990 - protein, 223 aa, Homo sapiens
MSAGSDGGGRHFCGGINCQLSDPSSTKPGTLLKTSPSPERSLLLKYARTPTLDPDTMHARLRLSADRLTVRCGLLGSLGPVPVLRFDALWQVLARDCFATGRHYWEVDVQEAGAGWWVGAAYASLRRRGASAAARLGCNRQSWCLKRYDLEYWAFHDGQRSRLRPRDDLDRLGVFLDYEAGVLAFYDVTGGMSHLHTFRATFQEPLYPALRLWEGAISIPRLP

SEQ ID NO: 67991 - protein, 771 aa, Homo sapiens
MHRSGRYGTQQQRAGSKTAGPPCQWSRMASEGTNIPSPVVRQIDKQFLICSICLERYKNPKVLPCLHTFCERCLQNYIPAHSLTLSCPVCRQTSILPEKGVAALQNNFFITNLMDVLQRTPGSNAEESSILETVTAVAAGKPLSCPNHDGNVMEFYCQSCETAMCRECTEGEHAEHPTVPLKDVVEQHKASLQVQLDAVNKRLPEIDSALQFISEIIHQLTNQKASIVDDIHSTFDELQKTLNVRKSVLLMELEVNYGLKHKVLQSQLDTLLQGQESIKSCSNFTAQALNHGTETEVLLVKKQMSEKLNELADQDFPLHPRENDQLDFIVETEGLKKSIHNLGTILTTNAVASETVATGEGLRQTIIGQPMSVTITTKDKDGELCKTGNAYLTAELSTPDGSVADGEILDNKNGTYEFLYTVQKEGDFTLSLRLYDQHIRGSPFKLKVIRSADVSPTTEGVKRRVKSPGSGHVKQKAVKRPASMYSTGKRKENPIEDDLIFRVGTKGRNKGEFTNLQGVAASTNGKILIADSNNQCVQIFSNDGQFKSRFGIRGRSPGQLQRPTGVAVHPSGDIIIADYDNKWVSIFSSDGKFKTKIGSGKLMGPKGVSVDRNGHIIVVDNKACCVFIFQPNGKIVTRFGSRGNGDRQFAGPHFAAVNSNNEIIITDFHNHSVKVFNQEGEFMLKFGSNGEGNGQFNAPTGVAVDSNGNIIVADWGNSRIQVFDGSGSFLSYINTSADPLYGPQGLALTSDGHVVVADSGNHCFKVYRYLQ

SEQ ID NO: 67992 - protein, 744 aa, Homo sapiens
MASEGTNIPSPVVRQIDKQFLICSICLERYKNPKVLPCLHTFCERCLQNYIPAHSLTLSCPVCRQTSILPEKGVAALQNNFFITNLMDVLQRTPGSNAEESSILETVTAVAAGKPLSCPNHDGNVMEFYCQSCETAMCRECTEGEHAEHPTVPLKDVVEQHKASLQVQLDAVNKRLPEIDSALQFISEIIHQLTNQKASIVDDIHSTFDELQKTLNVRKSVLLMELEVNYGLKHKVLQSQLDTLLQGQESIKSCSNFTAQALNHGTETEVLLVKKQMSEKLNELADQDFPLHPRENDQLDFIVETEGLKKSIHNLGTILTTNAVASETVATGEGLRQTIIGQPMSVTITTKDKDGELCKTGNAYLTAELSTPDGSVADGEILDNKNGTYEFLYTVQKEGDFTLSLRLYDQHIRGSPFKLKVIRSADVSPTTEGVKRRVKSPGSGHVKQKAVKRPASMYSTGKRKENPIEDDLIFRVGTKGRNKGEFTNLQGVAASTNGKILIADSNNQCVQIFSNDGQFKSRFGIRGRSPGQLQRPTGVAVHPSGDIIIADYDNKWVSIFSSDGKFKTKIGSGKLMGPKGVSVDRNGHIIVVDNKACCVFIFQPNGKIVTRFGSRGNGDRQFAGPHFAAVNSNNEIIITDFHNHSVKVFNQEGEFMLKFGSNGEGNGQFNAPTGVAVDSNGNIIVADWGNSRIQVFDGSGSFLSYINTSADPLYGPQGLALTSDGHVVVADSGNHCFKVYRYLQ

SEQ ID NO: 67993 - protein, 475 aa, Homo sapiens [sequence omitted]

SEQ ID NO: 67994 - protein, 475 aa, Homo sapiens
MASAARLTMMWEEVTCPICLDPFVEPVSIECGHSFCQECISQVGKGGGSVCPVCRQRFLLKNLRPNRQLANMVNNLKEISQEAREGTQGERCAVHGERLHLFCEKDGKALCWVCAQSRKHRDHAMVPLEEAAQEYQEKLQVALGELRRKQELAEKLEVEIAIKRADWKKTVETQKSRIHAEFVQQKNFLVEEEQRQLQELEKDEREQLRILGEKEAKLAQQSQALQELISELDRRCHSSALELLQEVIVLGPRSESWNLKDLDITSPELRSVCHVPGLKKMLRTCAVHITLDPDTANPWLILSEDRRQVRLGDTQQSIPGNEERFDSYPMVLGAQHFHSGKHYWEVDVTGKEAWDLGVCRDSVRRKGHFLLSSKSGFWTIWLWNKQKYEAGTYPQTPLHLQVPPCQVGIFLDYEAGMVSFYNITDHGSLIYSFSECAFTGPLRPFFSPGFNDGGKNTAPLTLCPLNIGSQGSTDY

SEQ ID NO: 67995 - protein, 498 aa, Homo sapiens
MDFSVKVDIEKEVTCPICLELLTEPLSLDCGHSFCQACITAKIKESVIISRGESSCPVCQTRFQPGNLRPNRHLANIVERVKEVKMSPQEGQKRDVCEHHGKKLQIFCKEDGKVICWVCELSQEHQGHQTFRINEVVKECQEKLQVALQRLIKEDQEAEKLEDDIRQERTAWKNYIQIERQKILKGFNEMRVILDNEEQRELQKLEEGEVNVLDNLAAATDQLVQQRQDASTLISDLQRRLRGSSVEMLQDVIDVMKRSESWTLKKPKSVSKKLKSVFRVPDLSGMLQVLKELTDVQYYWVDVMLNPGSATSNVAISVDQRQVKTVRTCTFKNSNPCDFSAFGVFGCQYFSSGKYYWEVDVSGKIAWILGVHSKISSLNKRKSSGFAFDPSVNYSKVYSRYRPQYGYWVIGLQNTCEYNAFEDSSSSDPKVLTLFMAVPPCRIGVFLDYEAGIVSFFNVTNHGALIYKFSGCRFSRPAYPYFNPWNCLVPMTVCPPSS

SEQ ID NO: 67996 - protein, 227 aa, Homo sapiens
MDFSVKVDIEKEVTCPICLELLTEPLSLDCGHSFCQACITAKIKESVIISRGESSCPVCQTRFQPGNLRPNRHLANIVERVKEVKMSPQEGQKRDVCEHHGKKLQIFCKEDGKVICWVCELSQEHQGHQTFRINEVVKECQEKLQVALQRLIKEDQEAEKLEDDIRQERTAWKNYIQIERQKILKGFNEMRVILDNEEQRELQKLEEGEVNVLDNLAAATDQLVQQR

SEQ ID NO: 67997 - protein, 203 aa, Homo sapiens
MDFSVKVDIEKEVTCPICLELLTEPLSLDCGHSFCQACITAKIKESVIISRGESSCPVCQTRFQPGNLRPNRHLANIVERVKEVKMSPQEGQKRDVCEHHGKKLQIFCKEDGKVICWVCELSQEHQGHQTFRINEVVKECQEKLQVALQRLIKEDQEAEKLEDDIRQERTAWKNYIQIERQKILKGFNEMRVILDNEEQRELQ

SEQ ID NO: 67998 - protein, 420 aa, Homo sapiens
MDFSVKVDIEKEVTCPICLELLTEPLSLDCGHSFCQACITAKIKESVIISRGESSCPVCQTRFQPGNLRPNRHLANIVERVKEVKMSPQEGQKRDVCEHHGKKLQIFCKEDGKVILDNEEQRELQKLEEGEVNVLDNLAAATDQLVQQRQDASTLISDLQRRLRGSSVEMLQDVIDVMKRSESWTLKKPKSVSKKLKSVFRVPDLSGMLQVLKELTDVQYYWVDVMLNPGSATSNVAISVDQRQVKTVRTCTFKNSNPCDFSAFGVFGCQYFSSGKYYWEVDVSGKIAWILGVHSKISSLNKRKSSGFAFDPSVNYSKVYSRYRPQYGYWVIGLQNTCEYNAFEDSSSSDPKVLTLFMAVPPCRIGVFLDYEAGIVSFFNVTNHGALIYKFSGCRFSRPAYPYFNPWNCLVPMTVCPPSS

SEQ ID NO: 67999 - protein, 309 aa, Homo sapiens [sequence omitted]

SEQ ID NO: 68000 - protein, 630 aa, Homo sapiens
MAELCPLAEELSCSICLEPFKEPVTTPCGHNFCGSCLNETWAVQGSPYLCPQCRAVYQARPQLHKNTVLCNVVEQFLQADLAREPPADVWTPPARASAPSPNAQVACDHCLKEAAVKTCLVCMASFCQEHLQPHFDSPAFQDHPLQPPVRDLLRRKCSQHNRLREFFCPEHSECICHICLVEHKTCSPASLSQASADLEATLRHKLTVMYSQINGASRALDDVRNRQQDVRMTANRKVEQLQQEYTEMKALLDASETTSTRKIKEEEKRVNSKFDTIYQILLKKKSEIQTLKEEIEQSLTKRDEFEFLEKASKLRGISTKPVYIPEVELNHKLIKGIHQSTIDLKNELKQCIGRLQEPTPSSGDPGEHDPASTHKSTRPVKKVSKEEKKSKKPPPVPALPSKLPTFGAPEQLVDLKQAGLEAAAKATSSHPNSTSLKAKVLETFLAKSRPELLEYYIKVILDYNTAHNKVALSECYTVASVAEMPQNYRPHPQRFTYCSQVLGLHCYKKGIHYWEVELQKNNFCGVGICYGSMNRQGPESRLGRNSASWCVEWFNTKISAWHNNVEKTLPSTKATRVGVLLNCDHGFVIFFAVADKVHLMYKFRVDFTEALYPAFWVFSAGATLSICSPK

SEQ ID NO: 68001 - protein, 630 aa, Homo sapiens; identical to SEQ ID NO: 68000

SEQ ID NO: 68002 - protein, 358 aa, Homo sapiens
MASGSVAECLQQETTCPVCLQYFAEPMMLDCGHNICCACLARCWGTAETNVSCPQCRETFPQRHMRPNRHLANVTQLVKQLRTERPSGPGGEMGVCEKHREPLKLYCEEDQMPICVVCDRSREHRGHSVLPLEEAVEGFKEQIQNQLDHLKRVKDLKKRRRAQGEQARAELLSLTQMEREKIVWEFEQLYHSLKEHEYRLLARLEELDLAIYNSINGAITQFSCNISHLSSLIAQLEEKQQQPTRELLQDIGDTLSRAERIRIPEPWITPPDLQEKIHIFAQKCLFLTESLKQFTEKMQSDMEKIQELREAQLYSVDVTLDPDTAYPSLILSDNLRQVRYSYLQQDLPDNPERSPSTT

SEQ ID NO: 68003 - protein, 513 aa, Homo sapiens
MASGSVAECLQQETTCPVCLQYFAEPMMLDCGHNICCACLARCWGTAETNVSCPQCRETFPQRHMRPNRHLANVTQLVKQLRTERPSGPGGEMGVCEKHREPLKLYCEEDQMPICVVCDRSREHRGHSVLPLEEAVEGFKEQIQNQLDHLKRVKDLKKRRRAQGEQARAELLSLTQMEREKIVWEFEQLYHSLKEHEYRLLARLEELDLAIYNSINGAITQFSCNISHLSSLIAQLEEKQQQPTRELLQDIGDTLSRAERIRIPEPWITPPDLQEKIHIFAQKCLFLTESLKQFTEKMQSDMEKIQELREAQLYSVDVTLDPDTAYPSLILSDNLRQVRYSYLQQDLPDNPERFNLFPCVLGSPCFIAGRHYWEVEVGDKAKWTIGVCEDSVCRKGGVTSAPQNGFWAVSLWYGKEYWALTSPMTALPLRTPLQRVGIFLDYDAGEVSFYNVTERCHTFTFSHATFCGPVRPYFSLSYSGGKSAAPLIICPMSGIDGFSGHVGNHGHSMETSP

SEQ ID NO: 68004 - protein, 513 aa, Homo sapiens; identical to SEQ ID NO: 68003

SEQ ID NO: 68005 - protein, 358 aa, Homo sapiens; identical to SEQ ID NO: 68002

SEQ ID NO: 68006 - protein, 248 aa, Homo sapiens
  VARIANT 1: note = MOD_RES - Any amino acid
XLKQFTEKMQSDMEKIQESADSLEGGILDLGSVLSHILPVSELREAQLYSVDVTLDPDTAYPSLILSDNLRQVRYSYLQQDLPDNPERFNLFPCVLGSPCFIAGRHYWEVEVGDKAKWTIGVCEDSVCRKGGVTSAPQNGFWAVSLWYGKEYWALTSPMTALPLRTPLQRVGIFLDYDAGEVSFYNVTERCHTFTFSHATFCGPVRPYFSLSYSGGKSAAPLIICPMSGIDGFSGHVGNHGHSMETSP

SEQ ID NO: 68007 - protein, 358 aa, Homo sapiens; identical to SEQ ID NO: 68002

SEQ ID NO: 68008 - protein, 248 aa, Homo sapiens; identical to SEQ ID NO: 68006
  VARIANT 1: note = MOD_RES - Any amino acid

SEQ ID NO: 68009 - protein, 358 aa, Homo sapiens; identical to SEQ ID NO: 68002

SEQ ID NO: 68010 - protein, 248 aa, Homo sapiens; identical to SEQ ID NO: 68006
  VARIANT 1: note = MOD_RES - Any amino acid

SEQ ID NO: 68011 - protein, 249 aa, Homo sapiens
MASGSVAECLQQETTCPVCLQYFAEPMMLDCGHNICCACLARCWGTAETNVSCPQCRETFPQRHMRPNRHLANVTQLVKQLRTERPSGPGGEMGVCEKHREPLKLYCEEDQMPICVVCDRSREHRGHSVLPLEEAVEGFKEQIQNQLDHLKRVKDLKKRRRAQGEQARAELLSLTQMEREKIVWEFEQLYHSLKEHEYRLLARLEELDLAIYNSINGAITQFSCNISHLSSLIAQLEEKQQQPTRELLQ

SEQ ID NO: 68012 - protein, 513 aa, Homo sapiens; identical to SEQ ID NO: 68003

SEQ ID NO: 68013 - protein, 513 aa, Homo sapiens; identical to SEQ ID NO: 68003

SEQ ID NO: 68014 - protein, 249 aa, Homo sapiens; identical to SEQ ID NO: 68011

SEQ ID NO: 68015 - protein, 513 aa, Homo sapiens; identical to SEQ ID NO: 68003

SEQ ID NO: 68016 - protein, 247 aa, Homo sapiens
LKQFTEKMQSDMEKIQESADSLEGGILDLGSVLSHILPVSELREAQLYSVDVTLDPDTAYPSLILSDNLRQVRYSYLQQDLPDNPERFNLFPCVLGSPCFIAGRHYWEVEVGDKAKWTIGVCEDSVCRKGGVTSAPQNGFWAVSLWYGKEYWALTSPMTALPLRTPLQRVGIFLDYDAGEVSFYNVTERCHTFTFSHATFCGPVRPYFSLSYSGGKSAAPLIICPMSGIDGFSGHVGNHGHSMETSP

SEQ ID NO: 68017 - protein, 249 aa, Homo sapiens; identical to SEQ ID NO: 68011

SEQ ID NO: 68018 - protein, 52 aa, Homo sapiens
  VARIANT 1: note = MOD_RES - Any amino acid
XLREAQLYSVDVTLDPDTAYPSLILSDNLRQVRYSYLQQDLPDNPERSPSTT

SEQ ID NO: 68019 - protein, 231 aa, Homo sapiens
  VARIANT 1: note = MOD_RES - Any amino acid
XSADSLEGGILDLGSVLSHILPVSELREAQLYSVDVTLDPDTAYPSLILSDNLRQVRYSYLQQDLPDNPERFNLFPCVLGSPCFIAGRHYWEVEVGDKAKWTIGVCEDSVCRKGGVTSAPQNGFWAVSLWYGKEYWALTSPMTALPLRTPLQRVGIFLDYDAGEVSFYNVTERCHTFTFSHATFCGPVRPYFSLSYSGGKSAAPLIICPMSGIDGFSGHVGNHGHSMETSP

SEQ ID NO: 68020 - protein, 207 aa, Homo sapiens
  VARIANT 1: note = MOD_RES - Any amino acid
XLREAQLYSVDVTLDPDTAYPSLILSDNLRQVRYSYLQQDLPDNPERFNLFPCVLGSPCFIAGRHYWEVEVGDKAKWTIGVCEDSVCRKGGVTSAPQNGFWAVSLWYGKEYWALTSPMTALPLRTPLQRVGIFLDYDAGEVSFYNVTERCHTFTFSHATFCGPVRPYFSLSYSGGKSAAPLIICPMSGIDGFSGHVGNHGHSMETSP

SEQ ID NO: 68021 - protein, 358 aa, Homo sapiens; identical to SEQ ID NO: 68002

SEQ ID NO: 68022 - protein, 248 aa, Homo sapiens; identical to SEQ ID NO: 68006
  VARIANT 1: note = MOD_RES - Any amino acid

SEQ ID NO: 68023 - protein, 249 aa, Homo sapiens; identical to SEQ ID NO: 68011

SEQ ID NO: 68024 - protein, 733 aa, Homo sapiens
MAKREDSPGPEVQPMDKQFLVCSICLDRYQCPKVLPCLHTFCERCLQNYIPAQSLTLSCPVCRQTSILPEQGVSALQNNFFISSLMEAMQQAPDGAHDPEDPHPLSVVAGRPLSCPNHEGKTMEFYCEACETAMCGECRAGEHREQHKAALQRQLEAVRGRLPQLSAAIALVGGISQQLQERKAEALAQISAAFEDLEQALQQRKQALVSDLETICGAKQKVLQSQLDTLRQGQEHIGSSCSFAEQALRLGSAPEVLLVRKHMRERLAALAAQAFPERPHENAQLELVLEVDGLRRSVLNLGALLTTSATAHETVATGEGLRQALVGQPASLTVTTKDKDGRLVRTGSAELRAEITGPDGTRLPVPVVDHKNGTYELVYTARTEGELLLSVLLYGQPVRGSPFRVRALRPGDLPPSPDDVKRRVKSPGGPGSHVRQKAVRRPSSMYSTGGKRKDNPIEDELVFRVGSRGREKGEFTNLQGVSAASSGRIVVADSNNQCIQVFSNEGQFKFRFGVRGRSPGQLQRPTGVAVDTNGDIIVADYDNRWVSIFSPEGKFKTKIGAGRLMGPKGVAVDRNGHIIVVDNKSCCVFTFQPNGKLVGRFGGRGATDRHFAGPHFVAVNNKNEIVVTDFHNHSVKVYSADGEFLFKFGSHGEGNGQFNAPTGVAVDSNGNIIVADWGNSRIQVFDSSGSFLSYINTSAEPLYGPQGLALTSDGHVVVADAGNHCFKAYRYLQ

SEQ ID NO: 68025 - protein, 744 aa, Homo sapiens
MAKREDSPGPEVQPMDKQFLVCSICLDRYQCPKVLPCLHTFCERCLQNYIPAQSLTLSCPVCRQTSILPEQGVSALQNNFFISSLMEAMQQAPDGAHDPEDPHPLSVVAGRPLSCPNHEGKTMEFYCEACETAMCGECRAGEHREHGTVLLRDVVEQHKAALQRQLEAVRGRLPQLSAAIALVGGISQQLQERKAEALAQISAAFEDLEQALQQRKQALVSDLETICGAKQKVLQSQLDTLRQGQEHIGSSCSFAEQALRLGSAPEVLLVRKHMRERLAALAAQAFPERPHENAQLELVLEVDGLRRSVLNLGALLTTSATAHETVATGEGLRQALVGQPASLTVTTKDKDGRLVRTGSAELRAEITGPDGTRLPVPVVDHKNGTYELVYTARTEGELLLSVLLYGQPVRGSPFRVRALRPGDLPPSPDDVKRRVKSPGGPGSHVRQKAVRRPSSMYSTGGKRKDNPIEDELVFRVGSRGREKGEFTNLQGVSAASSGRIVVADSNNQCIQVFSNEGQFKFRFGVRGRSPGQLQRPTGVAVDTNGDIIVADYDNRWVSIFSPEGKFKTKIGAGRLMGPKGVAVDRNGHIIVVDNKSCCVFTFQPNGKLVGRFGGRGATDRHFAGPHFVAVNNKNEIVVTDFHNHSVKVYSADGEFLFKFGSHGEGNGQFNAPTGVAVDSNGNIIVADWGNSRIQVFDSSGSFLSYINTSAEPLYGPQGLALTSDGHVVVADAGNHCFKAYRYLQ

SEQ ID NO: 68026 - protein, 744 aa, Homo sapiens; identical to SEQ ID NO: 68025

SEQ ID NO: 68027 - protein, 744 aa, Homo sapiens; identical to SEQ ID NO: 68025

SEQ ID NO: 68028 - protein, 742 aa, Homo sapiens
MAKREDSPGPEVQPMDKQFLVCSICLDRYQCPKVLPCLHTFCERCLQNYIPAQSLTLSCPVCRQTSILPEQGVSALQNNFFISSLMEAMQQAPDGAHDPEDPHPLSVVAGRPLSCPNHEGKTMEFYCEACETAMCGECRAGEHREHGTVLLRDVVEQHKAALQRQLEAVRGRLPQLSAAIALVGGISQQLQERKAEALAQISAAFEDLEQALQQRKQALVSDLETICGAKQKVLQSQLDTLRQGQEHIGSSCSFAEQALRLGSAPEVLLVRKHMRERLAALAAQAFPERPHENAQLELVLEVDGLRRSVLNLGALLTTSATAHETVATGEGLRQALVGQPASLTVTTKDKDGRLVRTGSAELRAEITGPDGTRLPVPVVDHKNGTYELVYTARTEGELLLSVLLYGQPVRGSPFRVRALRPGDLPPSPDDVKRRVKSPGGPGSHVRQKAVRRPSSMYSTGGKRKDNPIEDELVFRVGSRGREKGEFTNLQGVSAASSGRIVVADSNNQCIQVFSNEGQFKFRFGVRGRSPGQLQRPTGVAVDTNGDIIVADYDNRWVSIFSPEGKFKTKIGAGRLMGPKGVAVDRNGHIIVVDNKSCCVFTFQPNGKLVGRFGGRGATDRHFAGPHFVAVNNKNEIVVTDFHNHSVKVYSADGEFLFKFGSHGEGNGQFNAPTGVAVDSNGNIIDVCRASPYPSYTPPHPCQSAPHPPAWGQNSLPQDRSPSSCLPTTLYTLTETAIPHPPY

SEQ ID NO: 68029 - protein, 625 aa, Homo sapiens
MKTMEFYCEACETAMCGECRAGEHREHGTVLLRDVVEQHKAALQRQLEAVRGRLPQLSAAIALVGGISQQLQERKAEALAQISAAFEDLEQALQQRKQALVSDLETICGAKQKVLQSQLDTLRQGQEHIGSSCSFAEQALRLGSAPEVLLVRKHMRERLAALAAQAFPERPHENAQLELVLEVDGLRRSVLNLGALLTTSATAHETVATGEGLRQALVGQPASLTVTTKDKDGRLVRTGSAELRAEITGPDGTRLPVPVVDHKNGTYELVYTARTEGELLLSVLLYGQPVRGSPFRVRALRPGDLPPSPDDVKRRVKSPGGPGSHVRQKAVRRPSSMYSTGGKRKDNPIEDELVFRVGSRGREKGEFTNLQGVSAASSGRIVVADSNNQCIQVFSNEGQFKFRFGVRGRSPGQLQRPTGVAVDTNGDIIVADYDNRWVSIFSPEGKFKTKIGAGRLMGPKGVAVDRNGHIIVVDNKSCCVFTFQPNGKLVGRFGGRGATDRHFAGPHFVAVNNKNEIVVTDFHNHSVKVYSADGEFLFKFGSHGEGNGQFNAPTGVAVDSNGNIIVADWGNSRIQVFDSSGSFLSYINTSAEPLYGPQGLALTSDGHVVVADAGNHCFKAYRYLQ

SEQ ID NO: 68030 - protein, 666 aa, Homo sapiens
MAKREDSPGPEVQPMDKQFLVCSICLDRYQCPKVLPCLHTFCERCLQNYIPAQSLTLSCPVCRQTSILPEQGVSALQNNFFISSLMEAMQQAPDGAHDPEDPHPLSVVAGRPLSCPNHEGKTMEFYCEACETAMCGECRAGEHREHGTVLLRDVVEQHKAALQRQLEAVRGRLPQLSAAIALVGGISQQLQERKAEALAQISAAFEDLEQALQQRKQALVSDLVDGLRRSVLNLGALLTTSATAHETVATGEGLRQALVGQPASLTVTTKDKDGRLVRTGSAELRAEITGPDGTRLPVPVVDHKNGTYELVYTARTEGELLLSVLLYGQPVRGSPFRVRALRPGDLPPSPDDVKRRVKSPGGPGSHVRQKAVRRPSSMYSTGGKRKDNPIEDELVFRVGSRGREKGEFTNLQGVSAASSGRIVVADSNNQCIQVFSNEGQFKFRFGVRGRSPGQLQRPTGVAVDTNGDIIVADYDNRWVSIFSPEGKFKTKIGAGRLMGPKGVAVDRNGHIIVVDNKSCCVFTFQPNGKLVGRFGGRGATDRHFAGPHFVAVNNKNEIVVTDFHNHSVKVYSADGEFLFKFGSHGEGNGQFNAPTGVAVDSNGNIIVADWGNSRIQVFDSSGSFLSYINTSAEPLYGPQGLALTSDGHVVVADAGNHCFKAYRYLQ

SEQ ID NO: 68031 - protein, 741 aa, Homo sapiens
MAKREDSPGPEVQPMDKQFLVCSICLDRYQCPKVLPCLHTFCERCLQNYIPAQSLTLSCPVCRQTSILPEQGVSALQNNFFISSLMEAMQQAPDGAHDPEDPHPLSVVAGRPLSCPNHEGKTMEFYCEACETAMCGECRAGEHREHGTVLLRDVVEQHKAALQRQLEAVRGRLPQLSAAIALVGGISQQLQERKAEALAQISAAFEDLEQALQQRKQALVSDLETICGAKQKVLQSQLDTLRQGQEHIGSSCSFAEQALRLGSAPEVLLVRKHMRERLAALAAQAFPERPHENAQLELVLEVDGLRRSVLNLGALLTTSATAHETVATGEGLRQALVGQPASLTVTTKDKDGRLVRTGSAELRAEITGPDGTRLPVPVVDHKNGTYELVYTARTEGELLLSVLLYGQPVRGSPFRVRALRPGDLPPSPDDVKRRVKSPGGPGSHVRQKAVRRPSSMYSTGGKRKDNPIEDELVFRVGSRGREKGEFTNLQGVSAASSGRIVVADSNNQCIQVFSNEGQFKFRFGVRGRSPGQLQRPTGVAVDTNGDIIVADYDNRWVSIFSPEGKFKTKIGAGRLMGPKGVAVDRNGHIIVVDNKSCCVFTFQPNGKLVGRFGGRGATDRHFAGPHFVAVNNKNEIVVTDFHNHSVKVYSADGEFLFKFGSHGEGNGQFNAPTGVAVDSNGNIIVCRASPYPSYTPPHPCQSAPHPPAWGQNSLPQDRSPSSCLPTTLYTLTETAIPHPPY

SEQ ID NO: 68032 - protein, 425 aa, Homo sapiens [sequence omitted]

SEQ ID NO: 68033 - protein, 425 aa, Homo sapiens
MASGQFVNKLQEEVICPICLDILQKPVTIDCGHNFCLKCITQIGETSCGFFKCPLCKTSVRKNAIRFNSLLRNLVEKIQALQASEVQSKRKEATCPRHQEMFHYFCEDDGKFLCFVCRESKDHKSHNVSLIEEAAQNYQGQIQEQIQVLQQKEKETVQVKAQGVHRVDVFTDQVEHEKQRILTEFELLHQVLEEEKNFLLSRIYWLGHEGTEAGKHYVASTEPQLNDLKKLVDSLKTKQNMPPRQLLEPAQPHLPRSEEFQFLNPTPVPLELEKKLSEAKSRHDSITGSLKKFKDQLQADRKKDENRFFKSMNKNDMKSWGLLQKNNHKMNKTSEPGSSSAGGRTTSGPPNHHSSAPSHSLFRASSAGKVTFPVCLLASYDEISGQGASSQDTKTFDVALSEELHAALSEWLTAIRAWFCEVPSS

SEQ ID NO: 68034 - protein, 425 aa, Homo sapiens
MASGQFVNKLQEEVICPICLDILQKPVTIDCGHNFCLKCITQIGETSCGFFKCPLCKTSVRKNAIRFNSLLRNLVEKIQALQASEVQSKRKEATCPRHQEMFHYFCEDDGKFLCFVCRESKDHKSHNVSLIEEAAQNYQGQIQEQIQVLQQKEKETVQVKAQGVHRVDVFTDQVEHEKQRILTEFELLHQVLEEEKNFLLSRIYWLGHEGTEAGKHYVASTEPQLNDLKKLVDSLKTKQNMPPRQLLEDIKVVLCRSEEFQFLNPTPVPLELEKKLSEAKSRHDSITGSLKKFKDQLQADRKKDENRFFKSMNKNDMKSWGLLQKNNHKMNKTSEPGSSSAGGRTTSGPPNHHSSAPSHSLFRASSAGKVTFPVCLLASYDEISGQGASSQDTKTFDVALSEELHAALSEWLTAIRAWFCEVPSS

SEQ ID NO: 68035 - protein, 248 aa, Homo sapiens
MASGQFVNKLQEEVICPICLDILQKPVTIDCGHNFCLKCITQIGETSCGFFKCPLCKTSVRKNAIRFNSLLRNLVEKIQALQASEVQSKRKEATCPRHQEMFHYFCEDDGKFLCFVCRESKDHKSHNVSLIEEAAQNYQGQIQEQIQVLQQKEKETVQVKAQGVHRVDVFTDQVEHEKQRILTEFELLHQVLEEEKNFLLSRIYWLGHEGTEAGKHYVASTEPQLNDLKKLVDSLKTKQNMPPRQLLE

SEQ ID NO: 68036 - protein, 425 aa, Homo sapiens [sequence omitted]

SEQ ID NO: 68037 - protein, 425 aa, Homo sapiens; identical to SEQ ID NO: 68034

SEQ ID NO: 68038 - protein, 425 aa, Homo sapiens; identical to SEQ ID NO: 68034

SEQ ID NO: 68039 - protein, 425 aa, Homo sapiens; identical to SEQ ID NO: 68034

SEQ ID NO: 68040 - protein, 425 aa, Homo sapiens
MASGQFVNKLQEEVICPICLDILQKPVTIDCGHNFCLKCITQIGETSCGFFKCPLCKTSVRKNAIRFNSLLRNLVEKIQALQASEVQSKRKEATCPRHQEMFHYFCEDDGKFLCFVCRESKDHKSHNVSLIEEAAQNYQGQIQEQIQVLQQKEKETVQVKAQGVHRVDVFTDQVEHEKQRILTEFELLHQVLEEEKNFLLSRIYWLGHEGTEAGKHYVASTEPQLNDLKKLIDSLKTKQNMPPRQLLEDIKVVLCRSEEFQFLNPTPVPLELEKKLSEAKSRHDSITGSLKKFKDQLQADRKKDENRFFKSMNKNDMKSWGLLQKNNHKMNKTSEPGSSSAGGRTTSGPPNHHSSAPSHSLFRASSAGKVTFPVCLLASYDEISGQGASSQDTKTFDVALSEELHAALSEWLTAIRAWFCKVPSS

SEQ ID NO: 68041 - protein, 425 aa, Homo sapiens; identical to SEQ ID NO: 68034

SEQ ID NO: 68042 - protein, 425 aa, Homo sapiens; identical to SEQ ID NO: 68033

SEQ ID NO: 68043 - protein, 425 aa, Homo sapiens [sequence omitted]

SEQ ID NO: 68044 - protein, 425 aa, Homo sapiens; identical to SEQ ID NO: 68033

SEQ ID NO: 68045 - protein, 425 aa, Homo sapiens
MASGQFVNKLQEEVICPICLDILQKPVTIDCGHNFCLKCITQIGETSCGFFKCPLCKTSVRKNAIRFNSLLRNLVEKIQALQASEVQSKRKEATCPRHQEMFHYFCEDDGKFLCFVCRESKDHKSHNVSLIEEAAQNYQGQIQEQIQVLQQKEKETVQVKAQGVHRVDVFTDQVEHEKQRILTEFELLHQVLEEEKNFLLSRIYWLGHEGTEAGKHYVASTEPQLNDLKKLIDSLKTKQNMPPRQLLEPAQPHLPRSEEFQFLNPTPVPLELEKKLSEAKSRHDSITGSLKKFKDQLQADRKKDENRFFKSMNKNDMKSWGLLQKNNHKMNKTSEPGSSSAGGRTTSGPPNHHSSAPSHSLFRASSAGKVTFPVCLLASYDEISGQGASSQDTKTFDVALSEELHAALSEWLTAIRAWFCKVPSS

SEQ ID NO: 68046 - protein, 425 aa, Homo sapiens
MASGQFVNKLQEEVICPICLDILQKPVTIDCGHNFCLKCITQIGETSCGFFKCPLCKTSVRKNAIRFNSLLRNLVEKIQALQASEVQSKRKEATCPRHQEMFHYFCEDDGKFLCFVCCESKDHKSHNVSLIEEAAQNYQGQIQEQIQVLQQKEKETVQVKAQGVHRVDVFTDQVEHEKQRILTEFELLHQVLEEEKNFLLSRIYWLGHEGTEAGKHYVASTEPQLNDLKKLVDSLKTKQNMPPRQLLEPAQPHLPRSEEFQFLNPTPVPLELEKKLSEAKSRHDSITGSLKKFKDQLQADRKKDENRFFKSMNKNDMKSWGLLQKNNHKMNKTSEPGSSSAGGRTTSGPPNHHSSAPSHSLFRASSAGKVTFPVCLLASYDEISGQGASSQDTKTFDVALSEELHAALSEWLTAIRAWFCEVPSS

SEQ ID NO: 68047 - protein, 425 aa, Homo sapiens; identical to SEQ ID NO: 68034

SEQ ID NO: 68048 - protein, 425 aa, Homo sapiens; identical to SEQ ID NO: 68033

SEQ ID NO: 68049 - protein, 425 aa, Homo sapiens [sequence omitted]

SEQ ID NO: 68050 - protein, 425 aa, Homo sapiens; identical to SEQ ID NO: 68040

SEQ ID NO: 68051 - protein, 425 aa, Homo sapiens
MASGQFVNKLQEEVICPICLDILQKPVTIDCGHNFCLKCITQIGETSCGFFKCPLCKTSVRKNAIRFNSLLRNLVEKIQALQASEVQSKRKEATCPRHQEMFHYFCEDDGKFLCFVCRESKDHKSHNVSLIEEAAQNYQGQIQEQIQVLQQKEKETVQVKAQGVHRVDVFTDQVEHEKQRILTEFELLHQVLEEEKNFLLSRIYWLGHEGTEAGKHYVASTEPQLNDLKKLVDSLKTKQNMPPRQLLEPAQPHLPRSEEFQFLNPTPVPLELEKKLSEAKSRHDSITGSLKKFKDQLQADRKKDENRFFKSMNKNDMKSWGLLQKNNHKMNKTSEPGSSSAGGRTTSGPPNHHSSAPSHSLFRASSAGKVTFPVCLLASYDEISGQGASSQDTKTFDVALSEELHAALSEWLTAIRAWFCKVPSS

SEQ ID NO: 68052 - protein, 425 aa, Homo sapiens; identical to SEQ ID NO: 68034

SEQ ID NO: 68053 - protein, 425 aa, Homo sapiens; identical to SEQ ID NO: 68034

SEQ ID NO: 68054 - protein, 653 aa, Homo sapiens
MAAAAASHLNLDALREVLECPICMESFTEEQLRPKLLHCGHTICRQCLEKLLASSINGVRCPFCSKITRITSLTQLTDNLTVLKIIDTAGLSEAVGLLMCRSCGRRLPRQFCRSCGLVLCEPCREADHQPPGHCTLPVKEAAEERRRDFGEKLTRLRELMGELQRRKAALEGVSKDLQARYKAVLQEYGHEERRVQDELARSRKFFTGSLAEVEKSNSQVVEEQSYLLNIAEVQAVSRCDYFLAKIKQADVALLEETADEEEPELTASLPRELTLQDVELLKVGHVGPLQIGQAVKKPRTVNVEDSWAMEATASAASTSVTFREMDMSPEEVVASPRASPAKQRGPEAASNIQQCLFLKKMGAKGSTPGMFNLPVSLYVTSQGEVLVADRGNYRIQVFTRKGFLKEIRRSPSGIDSFVLSFLGADLPNLTPLSVAMNCQGLIGVTDSYDNSLKVYTLDGHCVACHRSQLSKPWGITALPSGQFVVTDVEGGKLWCFTVDRGSGVVKYSCLCSAVRPKFVTCDAEGTVYFTQGLGLNLENRQNEHHLEGGFSIGSVGPDGQLGRQISHFFSENEDFRCIAGMCVDARGDLIVADSSRKEILHFPKGGGYSVLIREGLTCPVGIALTPKGQLLVLDCWDHCIKIYSYHLRRYSTP

SEQ ID NO: 68055 - protein, 173 aa, Homo sapiens
MAAAAASHLNLDALREVLECPICMESFTEEQLRPKLLHCGHTICRQCLEKLLASSINGVRCPFCSKITRITSLTQLTDNLTVLKIIDTAGLSEAVGLLMCRSCGRRLPRQFCRSCGLVLCEPCREADHQPPGHCTLPVKEAAEERRRDFGEKLTRLRELMGELQRRKAALEGV

SEQ ID NO: 68056 - protein, 653 aa, Homo sapiens; identical to SEQ ID NO: 68054

SEQ ID NO: 68057 - protein, 1127 aa, Homo sapiens
MAENKGGGEAESGGGGSGSAPVTAGAAGPAAQEAEPPLTAVLVEEEEEEGGRAGAEGGAAGPDDGGVAAASSGSAQAASSPAASVGTGVAGGAVSTPAPAPASAPAPGPSAGPPPGPPASLLDTCAVCQQSLQSRREAEPKLLPCLHSFCLRCLPEPERQLSVPIPGGSNGDIQQVGVIRCPVCRQECRQIDLVDNYFVKDTSEAPSSSDEKSEQVCTSCEDNASAVGFCVECGEWLCKTCIEAHQRVKFTKDHLIRKKEDVSESVGASGQRPVFCPVHKQEQLKLFCETCDRLTCRDCQLLEHKEHRYQFLEEAFQNQKGAIENLLAKLLEKKNYVHFAATQVQNRIKEVNETNKRVEQEIKVAIFTLINEINKKGKSLLQQLENVTKERQMKLLQQQNDITGLSRQVKHVMNFTNWAIASGSSTALLYSKRLITFQLRHILKARCDPVPAANGAIRFHCDPTFWAKNVVNLGNLVIESKPAPGYTPNVVVGQVPPGTNHISKTPGQINLAQLRLQHMQQQVYAQKHQQLQQMRMQQPPAPVPTTTTTTQQHPRQAAPQMLQQQPPRLISVQTMQRGNMNCGAFQAHQMRLAQNAARIPGIPRHSGPQYSMMQPHLQRQHSNPGHAGPFPVVSVHNTTINPTSPTTATMANANRGPTSPSVTAIELIPSVTNPENLPSLPDIPPIQLEDAGSSSLDNLLSRYISGSHLPPQPTSTMNPSPGPSALSPGSSGLSNSHTPVRPPSTSSTGSRGSCGSSGRTAEKTSLSFKSDQVKVKQEPGTEDEICSFSGGVKQEKTEDGRRSACMLSSPESSLTPPLSTNLHLESELDALASLENHVKIEPADMNESCKQSGLSSLVNGKSPIRSLMHRSARIGGDGNNKDDDPNEDWCAVCQNGGDLLCCEKCPKVFHLTCHVPTLLSFPSGDWICTFCRDIGKPEVEYDCDNLQHSKKGKTAQGLSPVDQRKCERLLLYLYCHELSIEFQEPVPASIPNYYKIIKKPMDLSTVKKKLQKKHSQHYQIPDDFVADVRLIFKNCERFNEMMKVVQVYADTQEINLKADSEVAQAGKAVALYFEDKLTEIYSDRTFAPLPEFEQEEDDGEVTEDSDEDFIQPRRKRLKSDERPVHIK

SEQ ID NO: 68058 - protein, 1110 aa, Homo sapiens
MAENKGGGEAESGGGGSGSAPVTAGAAGPAAQEAEPPLTAVLVEEEEEEGGRAGAEGGAAGPDDGGVAAASSGSAQAASSPAASVGTGVAGGAVSTPAPAPASAPAPGPSAGPPPGPPASLLDTCAVCQQSLQSRREAEPKLLPCLHSFCLRCLPEPERQLSVPIPGGSNGDIQQVGVIRCPVCRQECRQIDLVDNYFVKDTSEAPSSSDEKSEQVCTSCEDNASAVGFCVECGEWLCKTCIEAHQRVKFTKDHLIRKKEDVSESVGASGQRPVFCPVHKQEQLKLFCETCDRLTCRDCQLLEHKEHRYQFLEEAFQNQKGAIENLLAKLLEKKNYVHFAATQVQNRIKEVNETNKRVEQEIKVAIFTLINEINKKGKSLLQQLENVTKERQMKLLQQQNDITGLSRQVKHVMNFTNWAIASGSSTALLYSKRLITFQLRHILKARCDPVPAANGAIRFHCDPTFWAKNVVNLGNLVIESKPAPGYTPNVVVGQVPPGTNHISKTPGQINLAQLRLQHMQQQVYAQKHQQLQQMRMQQPPAPVPTTTTTTQQHPRQAAPQMLQQQPPRLISVQTMQRGNMNCGAFQAHQMRLAQNAARIPGIPRHSGPQYSMMQPHLQRQHSNPGHAGPFPVVSVHNTTINPTSPTTATMANANRGPTSPSVTAIELIPSVTNPENLPSLPDIPPIQLEDAGSSSLDNLLSRYISGSHLPPQPTSTMNPSPGPSALSPGSSGLSNSHTPVRPPSTSSTGSRGSCGSSGRTAEKTSLSFKSDQVKVKQEPGTEDEICSFSGGVKQEKTEDGRRSACMLSSPESSLTPPLSTNLHLESELDALASLENHVKIEPADMNESCKQSGLSSLVNGKSPIRSLMHRSARIGGDGNNKDDDPNEDWCAVCQNGGDLLCCEKCPKVFHLTCHVPTLLSFPSGDWICTFCRDIGKPEVEYDCDNLQHSKKGKTAQGLSPVDQRKCERLLLYLYCHELSIEFQEPVPASIPNYYKIIKKPMDLSTVKKKLQKKHSQHYQIPDDFVADVRLIFKNCERFNEADSEVAQAGKAVALYFEDKLTEIYSDRTFAPLPEFEQEEDDGEVTEDSDEDFIQPRRKRLKSDERPVHIK

SEQ ID NO: 68059 - protein, 888 aa, Homo sapiens
  VARIANT 1: note = MOD_RES - Any amino acid
XSVGASGQRPVFCPVHKQEQLKLFCETCDRLTCRDCQLLEHKEHRYQFLEEAFQNQKGAIENLLAKLLEKKNYVHFAATQVQNRIKEVNETNKRVEQEIKVAIFTLINEINKKGKSLLQQLENVTKERQMKLLQQQNDITGLSRQVKHVMNFTNWAIASGSSTALLYSKRLITFQLRHILKARCDPVPAANGAIRFHCDPTFWAKNVVNLGNLVIESKPAPGYTPNVVVGQVPPGTNHISKTPGQINLAQLRLQHMQQQVYAQKHQQLQQMRMQQPPAPVPTTTTTTQQHPRQAAPQMLQQQPPRLISVQTMQRGNMNCGAFQAHQMRLAQNAARIPGIPRHSGPQYSMMQPHLQRQHSNPGHAGPFPVVSVHNTTINPTSPTTATMANANRGPTSPSVTAIELIPSVTNPENLPSLPDIPPIQANVVPMMHSWYEFGAREKTQDQNVLEDAGSSSLDNLLSRYISGSHLPPQPTSTMNPSPGPSALSPGSSGLSNSHTPVRPPSTSSTGSRGSCGSSGRTAEKTSLSFKSDQVKVKQEPGTEDEICSFSGGVKQEKTEDGRRSACMLSSPESSLTPPLSTNLHLESELDALASLENHVKIEPADMNESCKQSGLSSLVNGKSPIRSLMHRSARIGGDGNNKDDDPNEDWCAVCQNGGDLLCCEKCPKVFHLTCHVPTLLSFPSGDWICTFCRDIGKPEVEYDCDNLQHSKKGKTAQGLSPVDQRKCERLLLYLYCHELSIEFQEPVPASIPNYYKIIKKPMDLSTVKKKLQKKHSQHYQIPDDFVADVRLIFKNCERFNEMMKVVQVYADTQEINLKADSEVAQAGKAVALYFEDKLTEIYSDRTFAPLPEFEQEEDDGEVTEDSDEDFIQPRRKRLKSDERPVHIK

SEQ ID NO: 68060 - protein, 759 aa, Homo sapiens
MKLLQQQNDITGLSRQVKHVMNFTNWAIASGSSTALLYSKRLITFQLRHILKARCDPVPAANGAIRFHCDPTFWAKNVVNLGNLVIESKPAPGYTPNVVVGQVPPGTNHISKTPGQINLAQLRLQHMQQQVYAQKHQQLQQMRMQQPPAPVPTTTTTTQQHPRQAAPQMLQQQPPRLISVQTMQRGNMNCGAFQAHQMRLAQNAARIPGIPRHSGPQYSMMQPHLQRQHSNPGHAGPFPVVSVHNTTINPTSPTTATMANANRGPTSPSVTAIELIPSVTNPENLPSLPDIPPIQANVVPMMHSWYEFGAREKTQDQNVLEDAGSSSLDNLLSRYISGSHLPPQPTSTMNPSPGPSALSPGSSGLSNSHTPVRPPSTSSTGSRGSCGSSGRTAEKTSLSFKSDQVKVKQEPGTEDEICSFSGGVKQEKTEDGRRSACMLSSPESSLTPPLSTNLHLESELDALASLENHVKIEPADMNESCKQSGLSSLVNGKSPIRSLMHRSARIGGDGNNKDDDPNEDWCAVCQNGGDLLCCEKCPKVFHLTCHVPTLLSFPSGDWICTFCRDIGKPEVEYDCDNLQHSKKGKTAQGLSPVDQRKCERLLLYLYCHELSIEFQEPVPASIPNYYKIIKKPMDLSTVKKKLQKKHSQHYQIPDDFVADVRLIFKNCERFNEMMKVVQVYADTQEINLKADSEVAQAGKAVALYFEDKLTEIYSDRTFAPLPEFEQEEDDGEVTEDSDEDFIQPRRKRLKSDERPVHIK

SEQ ID NO: 68061 - protein, 842 aa, Homo sapiens
MCGSERILQAGNILEIRVGQAGARRVATMTSPVLVDIREEVTCPICLELLTEPLSIDCGHSFCQACITPNGRESVIGQEGERSCPVCQTSYQPGNLRPNRHLANIVRRLREVVLGPGKQLKAVLCADHGEKLQLFCQEDGKVICWLCERSQEHRGHHTFLVEEVAQEYQEKFQESLKKLKNEEQEAEKLTAFIREKKTSWKNQMEPERCRIQTEFNQLRNILDRVEQRELKKLEQEEKKGLRIIEEAENDLVHQTQSLRELISDLERRCQGSTMELLQDVSDVTERSEFWTLRKPEALPTKLRSMFRAPDLKRMLRVCRELTDVQSYWAIQGSLTRRERRASGVRTRRSQGSSAMASKILLNVQEEVTCPICLELLTEPLSLDCGHSLCRACITVSNKEAVTSMGGKSSCPVCGISYSFEHLQANQHLANIVERLKEVKLSPDNGKKRDLCDHHGEKLLLFCKEDRKVICWLCERSQEHRGHHTVLTEEVFKECQEKLQAVLKRLKKEEEEAEKLEADIREEKTSWKYQVQTERQRIQTEFDQLRSILNNEEQRELQRLEEEEKKTLDKFAEAEDELVQQKQLVRELISDVECRSQWSTMELLQDMSGIMKWSEIWRLKKPKMVSKKLKTVFHAPDLSRMLQMFRELTAVRCYWVDVTLNSVNLNLNLVLSEDQRQVISVPIWPFQCYNYGVLGSQYFSSGKHYWEVDVSKKTAWILGVYCRTYSRHMKYVVRRCANRQNLYTKYRPLFGYWVIGLQNKCKYGVFEESLSSDPEVLTLSMAVPPCRVGVFLDYEAGIVSFFNVTSHGSLIYKFSKCCFSQPVYPYFNPWNCPAPMTLCPPSS

SEQ ID NO: 68062 - protein, 488 aa, Homo sapiens
MASKILLNVQEEVTCPICLELLTEPLSLDCGHSLCRACITVSNKEAVTSMGGKSSCPVCGISYSFEHLQANQHLANIVERLKEVKLSPDNGKKRDLCDHHGEKLLLFCKEDRKVICWLCERSQEHRGHHTVLTEEVFKECQEKLQAVLKRLKKEEEEAEKLEADIREEKTSWKYQVQTERQRIQTEFDQLRSILNNEEQRELQRLEEEEKKTLDKFAEAEDELVQQKQLVRELISDVECRSQWSTMELLQDMSGIMKWSEIWRLKKPKMVSKKLKTVFHAPDLSRMLQMFRELTAVRCYWVDVTLNSVNLNLNLVLSEDQRQVISVPIWPFQCYNYGVLGSQYFSSGKHYWEVDVSKKTAWILGVYCRTYSRHMKYVVRRCANRQNLYTKYRPLFGYWVIGLQNKCKYGVFEESLSSDPEVLTLSMAVPPCRVGVFLDYEAGIVSFFNVTSHGSLIYKFSKCCFSQPVYPYFNPWNCPAPMTLCPPSS

SEQ ID NO: 68063 - protein, 488 aa, Homo sapiens; identical to SEQ ID NO: 68062

SEQ ID NO: 68064 - protein, 488 aa, Homo sapiens; identical to SEQ ID NO: 68062

SEQ ID NO: 68065 - protein, 728 aa, Homo sapiens
MSESGEMSEFGYIMELIAKGKVTIKNIERELICPACKELFTHPLILPCQHSICHKCVKELLLTLDDSFNDVGSDNSNQSSPRLRLPSPSMDKIDRINRPGWKRNSLTPRTTVFPCPGCEHDVDLGERGINGLFRNFTLETIVERYRQAARAATAIMCDLCKPPPQESTKSCMDCSASYCNECFKIHHPWGTIKAQHEYVGPTTNFRPKILMCPEHETERINMYCELCRRPVCHLCKLGGNHANHRVTTMSSAYKTLKEKLSKDIDYLIGKESQVKSQISELNLLMKETECNGERAKEEAITHFEKLFEVLEERKSSVLKAIDSSKKLRLDKFQTQMEEYQGLLENNGLVGYAQEVLKETDQSCFVQTAKQLHLRIQKATESLKSFRPAAQTSFEDYVVNTSKQTELLGELSFFSSGIDVPEINEEQSKVYNNALINWHHPEKDKADSYVLEYRKINRDDEMSWNEIEVCGTSKIIQDLENSSTYAFRVRAYKGSICSPCSRELILHTPPAPVFSFLFDEKCGYNNEHLLLNLKRDRVESRAGFNLLLAAERIQVGYYTSLDYIIGDTGITKGKHFWAFRVEPYSYLVKVGVASSDKLQEWLRSPRDAVSPRYEQDSGHDSGSEDACFDSSQPFTLVTIGMQKFFIPKSPTSSNEPENRVLPMPTSIGIFLDCDKGKVDFYDMDQMKCLYERQVDCSHTLYPAFALMGSGGIQLEEPITAKYLEYQEDM

SEQ ID NO: 68066 - protein, 61 aa, Homo sapiens
MSESGEMSEFGYIMELIAKGKASAMGLQQTHEHSRLTSKGGEARCPFEISEVGKQSLPRRT

SEQ ID NO: 68067 - protein, 60 aa, Homo sapiens
MSESGEMSEFGYIMELIAKGKMPDWRRGYRCRQGCGKTTELATATDFSQTGNKSGKHFKT

SEQ ID NO: 68068 - protein, 964 aa, Homo sapiens
MDEQSVESIAEVFRCFICMEKLRDARLCPHCSKLCCFSCIRRWLTEQRAQCPHCRAPLQLRELVNCRWAEEVTQQLDTLQLCSLTKHEENEKDKCENHHEKLSVFCWTCKKCICHQCALWGGMHGGHTFKPLAEIYEQHVTKVNEEVAKLRRRLMELISLVQEVERNVEAVRNAKDERVREIRNAVEMMIARLDTQLKNKLITLMGQKTSLTQETELLESLLQEVEHQLRSCSKSELISKSSEILMMFQQVHRKPMASFVTTPVPPDFTSELVPSYDSATFVLENFSTLRQRADPVYSPPLQVSGLCWRLKVYPDGNGVVRGYYLSVFLELSAGLPETSKYEYRVEMVHQSCNDPTKNIIREFASDFEVGECWGYNRFFRLDLLANEGYLNPQNDTVILRFQVRSPTFFQKSRDQHWYITQLEAAQTSYIQQINNLKERLTIELSRTQKSRDLSPPDNHLSPQNDDALETRAKKSACSDMLLEGGPTTASVREAKEDEEDEEKIQNEDYHHELSDGDLDLDLVYEDEVNQLDGSSSSASSTATSNTEENDIDEETMSGENDVEYNNMELEEGELMEDAAAAGPAGSSHGYVGSSSRISRRTHLCSAATSSLLDIDPLILIHLLDLKDRSSIENLWGLQPRPPASLLQPTASYSRKDKDQRKQQAMWRVPSDLKMLKRLKTQMAEVRCMKTDVKNTLSEIKSSSAASGDMQTSLFSADQAALAACGTENSGRLQDLGMELLAKSSVANCYIRNSTNKKSNSPKPARSSVAGSLSLRRAVDPGENSRSKGDCQTLSEGSPGSSQSGSRHSSPRALIHGSIGDILPKTEDRQCKALDSDAVVVAVFSGLPAVEKRRKMVTLGANAKGGHLEGLQMTDLENNSETGELQPVLPEGASAAPEEGMSSDSDIECDTENEEQEEHTSVGGFHDSFMVMTQPPDEDTHSSFPDGEQIGPEDLSFNTDENSGR

SEQ ID NO: 68069 - protein, 803 aa, Homo sapiens
MHGGHTFKPLAEIYEQHVTKVNEEVAKLRRRLMELISLVQEVERNVEAVRNAKDERVREIRNAVEMMIARLDTQLKNKLITLMGQKTSLTQETELLESLLQEVEHQLRSCSKSELISKSSEILMMFQQVHRKPMASFVTTPVPPDFTSELVPSYDSATFVLENFSTLRQRADPVYSPPLQVSGLCWRLKVYPDGNGVVRGYYLSVFLELSAGLPETSKYEYRVEMVHQSCNDPTKNIIREFASDFEVGECWGYNRFFRLDLLANEGYLNPQNDTVILRFQVRSPTFFQKSRDQHWYITQLEAAQTSYIQQINNLKERLTIELSRTQKSRDLSPPDNHLSPQNDDALETRAKKSACSDMLLEGGPTTASVREAKEDEEDEEKIQNEDYHHELSDGDLDLDLVYEDEVNQLDGSSSSASSTATSNTEENDIDEETMSGENDVEYNNMELEEGELMEDAAAAGPAGSSHGYVGSSSRISRRTHLCSAATSSLLDIDPLILIHLLDLKDRSSIENLWGLQPRPPASLLQPTASYSRKDKDQRKQQAMWRVPSDLKMLKRLKTQMAEVRCMKTDVKNTLSEIKSSSAASGDMQTSLFSADQAALAACGTENSGRLQDLGMELLAKSSVANCYIRNSTNKKSNSPKPARSSVAGSLSLRRAVDPGENSRSKGDCQTLSEGSPGSSQSGSRHSSPRALIHGSIGDILPKTEDRQCKALDSDAVVVAVFSGLPAVEKRRKMVTLGANAKGGHLEGLQMTDLENNSETGELQPVLPEGASAAPEEDTHSSFPDGEQIGPEDLSFNTDENSGR

SEQ ID NO: 68070 - protein, 930 aa, Homo sapiens
MDEQSVERWLTEQRAQCPHCRAPLQLRELVNCRWAEEVTQQLDTLQLCSLTKHEENEKDKCENHHEKLSVFCWTCKKCICHQCALWGGMHGGHTFKPLAEIYEQHVTKVNEEVAKLRRRLMELISLVQEVERNVEAVRNAKDERVREIRNAVEMMIARLDTQLKNKLITLMGQKTSLTQETELLESLLQEVEHQLRSCSKSELISKSSEILMMFQQVHRKPMASFVTTPVPPDFTSELVPSYDSATFVLENFSTLRQRADPVYSPPLQVSGLCWRLKVYPDGNGVVRGYYLSVFLELSAGLPETSKYEYRVEMVHQSCNDPTKNIIREFASDFEVGECWGYNRFFRLDLLANEGYLNPQNDTVILRFQVRSPTFFQKSRDQHWYITQLEAAQTSYIQQINNLKERLTIELSRTQKSRDLSPPDNHLSPQNDDALETRAKKSACSDMLLEGGPTTASVREAKEDEEDEEKIQNEDYHHELSDGDLDLDLVYEDEVNQLDGSSSSASSTATSNTEENDIDEETMSGENDVEYNNMELEEGELMEDAAAAGPAGSSHGYVGSSSRISRRTHLCSAATSSLLDIDPLILIHLLDLKDRSSIENLWGLQPRPPASLLQPTASYSRKDKDQRKQQAMWRVPSDLKMLKRLKTQMAEVRCMKTDVKNTLSEIKSSSAASGDMQTSLFSADQAALAACGTENSGRLQDLGMELLAKSSVANCYIRNSTNKKSNSPKPARSSVAGSLSLRRAVDPGENSRSKGDCQTLSEGSPGSSQSGSRHSSPRALIHGSIGDILPKTEDRQCKALDSDAVVVAVFSGLPAVEKRRKMVTLGANAKGGHLEGLQMTDLENNSETGELQPVLPEGASAAPEEGMSSDSDIECDTENEEQEEHTSVGGFHDSFMVMTQPPDEDTHSSFPDGEQIGPEDLSFNTDENSGR

SEQ ID NO: 68071 - protein, 964 aa, Homo sapiens; identical to SEQ ID NO: 68068

SEQ ID NO: 68072 - protein, 518 aa, Homo sapiens
MAETSLLEAGASAASTAAALENLQVEASCSVCLEYLKEPVIIECGHNFCKACITRWWEDLERDFPCPVCRKTSRYRSLRPNRQLGSMVEIAKQLQAVKRKIRDESLCPQHHEALSLFCYEDQEAVCLICAISHTHRAHTVVPLDDATQEYKEKLQKCLEPLEQKLQEITRCKSSEEKKPGELKRLVESRRQQILREFEELHRRLDEEQQVLLSRLEEEEQDILQRLRENAAHLGDKRRDLAHLAAEVEGKCLQSGFEMLKDVKSTLEKNIPRKFGGSLSTICPRDHKALLGLVKEINRCEKVKTMEVTSVSIELEKNFSNFPRQYFALRKILKQLIADVTLDPETAHPNLVLSEDRKSVKFVETRLRDLPDTPRRFTFYPCVLATEGFTSGRHYWEVEVGDKTHWAVGVCRDSVSRKGELTPLPETGYWRVRLWNGDKYAATTTPFTPLHIKVKPKRVGIFLDYEAGTLSFYNVTDRSHIYTFTDTFTEKLWPLFYPGIRAGRKNAAPLTIRPPTDWE

SEQ ID NO: 68073 - protein, 488 aa, Homo sapiens
MAETSLLEAGASAASTAAALENLQVEASCSVCLEYLKEPVIIECGHNFCKACITRWWEDLERDFPCPVCRKTSRYRSLRPNRQLGSMVEIAKQLQAVKRKIRDESLCPQHHEALSLFCYEDQEAVCLICAISHTHRAHTVVPLDDATQEYKEKLQKCLEPLEQKLQEITRCKSSEEKKPGELKRLVESRRQQILREFEELHRRLDEEQQVLLSRLEEEEQDILQRLRENAAHLGDKRRDLAHLAAEVEGKCLQSGFEMLKDVKSTLEKCEKVKTMEVTSVSIELEKNFSNFPRQYFALRKILKQLIADVTLDPETAHPNLVLSEDRKSVKFVETRLRDLPDTPRRFTFYPCVLATEGFTSGRHYWEVEVGDKTHWAVGVCRDSVSRKGELTPLPETGYWRVRLWNGDKYAATTTPFTPLHIKVKPKRVGIFLDYEAGTLSFYNVTDRSHIYTFTDTFTEKLWPLFYPGIRAGRKNAAPLTIRPPTDWE

SEQ ID NO: 68074 - protein, 488 aa, Homo sapiens; identical to SEQ ID NO: 68073

SEQ ID NO: 68075 - protein, 518 aa, Homo sapiens; identical to SEQ ID NO: 68072

SEQ ID NO: 68076 - protein, 488 aa, Homo sapiens; identical to SEQ ID NO: 68073

SEQ ID NO: 68077 - protein, 518 aa, Homo sapiens; identical to SEQ ID NO: 68072

SEQ ID NO: 68078 - protein, 488 aa, Homo sapiens; identical to SEQ ID NO: 68073

SEQ ID NO: 68079 - protein, 488 aa, Homo sapiens; identical to SEQ ID NO: 68073

SEQ ID NO: 68080 - protein, 488 aa, Homo sapiens; identical to SEQ ID NO: 68073

SEQ ID NO: 68081 - protein, 144 aa, Homo sapiens
MAETSLLEAGASAASTAAALENLQVEASCSVCLEYLKEPVIIECGHNFCKACITRWWEDLERDFPCPVCRKTSRYRSLRPNRQLGSMVEIAKQLQAVKRKIRDESLCPQHHEALSLFCYEDQEAVCLICAISHTHRAHTVVPLD

SEQ ID NO: 68082 - protein, 227 aa, Homo sapiens
  VARIANT 1: note = MOD_RES - Any amino acid
XTSRYRSLRPNRQLGSMVEIAKQLQAVKRKIRDESLCPQHHEALSLFCYEDQEAVCLICAISHTHRAHTVVPLDDATQEYKEKLQKCLEPLEQKLQEITRCKSSEEKKPGELKRLVESRRQQILREFEELHRRLDEEQQVLLSRLEEEEQDILQRLRENAAHLGDKRRDLAHLAAEVEGKCLQSGFEMLKDVKSTLEKCEKVKTMEVTSTTPCTSLHSEINDNVRGR

SEQ ID NO: 68083 - protein, 74 aa, Homo sapiens
MAETSLLEAGASAASTAAALENLQVEASCSVCLEYLKEPVIIECGHNFCKACITRWWEDLERDFPCPVCRKTSR

SEQ ID NO: 68084 - protein, 417 aa, Homo sapiens
MVEIAKQLQAVKRKIRDESLCPQHHEALSLFCYEDQEAVCLICAISHTHRAHTVVPLDDATQEYKEKLQKCLEPLEQKLQEITRCKSSEEKKPGELKRLVESRRQQILREFEELHRRLDEEQQVLLSRLEEEEQDILQRLRENAAHLGDKRRDLAHLAAEVEGKCLQSGFEMLKPVLSAREECEKVKTMEVTSVSIELEKNFSNFPRQYFALRKILKQLIADVTLDPETAHPNLVLSEDRKSVKFVETRLRDLPDTPRRFTFYPCVLATEGFTSGRHYWEVEAAHCVLAQDPENQALARFYCYTERTIAKRLVLRRDPSVKRTLCRGCSSLLVPGLTCTQRQRRCRGQRWTVQTCLTCQRSQRFLNDPGHLLWGDRPEAQLGSQADSKPLQPLPNTAHSISDRLPEEKMQTQGSSNQ

SEQ ID NO: 68085 - protein, 518 aa, Homo sapiens; identical to SEQ ID NO: 68072

SEQ ID NO: 68086 - protein, 488 aa, Homo sapiens; identical to SEQ ID NO: 68073

SEQ ID NO: 68087 - protein, 144 aa, Homo sapiens; identical to SEQ ID NO: 68081

SEQ ID NO: 68088 - protein, 74 aa, Homo sapiens; identical to SEQ ID NO: 68083

SEQ ID NO: 68089 - protein, 48 aa, Homo sapiens
MAETSLLEAGASAASTAAALENLQVEASCSVCLEYLKEPVIIECGHNF

SEQ ID NO: 68090 - protein, 488 aa, Homo sapiens; identical to SEQ ID NO: 68073

SEQ ID NO: 68091 - protein, 227 aa, Homo sapiens; identical to SEQ ID NO: 68082
  VARIANT 1: note = MOD_RES - Any amino acid

SEQ ID NO: 68092 - protein, 48 aa, Homo sapiens; identical to SEQ ID NO: 68089

SEQ ID NO: 68093 - protein, 48 aa, Homo sapiens; identical to SEQ ID NO: 68089

SEQ ID NO: 68094 - protein, 59 aa, Homo sapiens
MAETSLLEAGASAASTAAALENLQVEASCSVCLEYLKEPVIIECGHNFCKACITRWWED

SEQ ID NO: 68095 - protein, 59 aa, Homo sapiens; identical to SEQ ID NO: 68094

SEQ ID NO: 68096 - protein, 144 aa, Homo sapiens; identical to SEQ ID NO: 68081

SEQ ID NO: 68097 - protein, 518 aa, Homo sapiens; identical to SEQ ID NO: 68072

SEQ ID NO: 68098 - protein, 227 aa, Homo sapiens; identical to SEQ ID NO: 68082
  VARIANT 1: note = MOD_RES - Any amino acid

SEQ ID NO: 68099 - protein, 227 aa, Homo sapiens; identical to SEQ ID NO: 68082
  VARIANT 1: note = MOD_RES - Any amino acid

SEQ ID NO: 68100 - protein, 48 aa, Homo sapiens; identical to SEQ ID NO: 68089

SEQ ID NO: 68101 - protein, 518 aa, Homo sapiens; identical to SEQ ID NO: 68072

SEQ ID NO: 68102 - protein, 74 aa, Homo sapiens; identical to SEQ ID NO: 68083

SEQ ID NO: 68103 - protein, 59 aa, Homo sapiens; identical to SEQ ID NO: 68094

SEQ ID NO: 68104 - protein, 48 aa, Homo sapiens; identical to SEQ ID NO: 68089

SEQ ID NO: 68105 - protein, 261 aa, Homo sapiens
MAETSLLEAGASAASTAAALENLQVEASCSVCLEYLKEPVIIECGHNFCKACITRWWEDLERDFPCPVCRKTSRYRSLRPNRQLGSMVEIAKQLQAVKRKIRDESLCPQHHEALSLFCYEDQEAVCLICAISHTHRAHTVVPLDDATQEYKEKLQKCLEPLEQKLQEITRCKSSEEKKPGELKRLVESRRQQILREFEELHRRLDEEQQVLLSRLEEEEQDILQRLRENAAHLGDKRRDLAHLAAEVEGKCLQSGFEMLKV

SEQ ID NO: 68106 - protein, 59 aa, Homo sapiens; identical to SEQ ID NO: 68094

SEQ ID NO: 68107 - protein, 144 aa, Homo sapiens; identical to SEQ ID NO: 68081

SEQ ID NO: 68108 - protein, 488 aa, Homo sapiens; identical to SEQ ID NO: 68073

SEQ ID NO: 68109 - protein, 488 aa, Homo sapiens; identical to SEQ ID NO: 68073

SEQ ID NO: 68110 - protein, 261 aa, Homo sapiens; identical to SEQ ID NO: 68105

SEQ ID NO: 68111 - protein, 488 aa, Homo sapiens; identical to SEQ ID NO: 68073

SEQ ID NO: 68112 - protein, 59 aa, Homo sapiens; identical to SEQ ID NO: 68094

SEQ ID NO: 68113 - protein, 59 aa, Homo sapiens; identical to SEQ ID NO: 68094

SEQ ID NO: 68114 - protein, 227 aa, Homo sapiens; identical to SEQ ID NO: 68082
  VARIANT 1: note = MOD_RES - Any amino acid

SEQ ID NO: 68115 - protein, 488 aa, Homo sapiens; identical to SEQ ID NO: 68073

SEQ ID NO: 68116 - protein, 74 aa, Homo sapiens; identical to SEQ ID NO: 68083

SEQ ID NO: 68117 - protein, 227 aa, Homo sapiens; identical to SEQ ID NO: 68082
  VARIANT 1: note = MOD_RES - Any amino acid

SEQ ID NO: 68118 - protein, 488 aa, Homo sapiens; identical to SEQ ID NO: 68073

SEQ ID NO: 68119 - protein, 488 aa, Homo sapiens; identical to SEQ ID NO: 68073

SEQ ID NO: 68120 - protein, 261 aa, Homo sapiens; identical to SEQ ID NO: 68105

SEQ ID NO: 68121 - protein, 74 aa, Homo sapiens; identical to SEQ ID NO: 68083

SEQ ID NO: 68122 - protein, 59 aa, Homo sapiens; identical to SEQ ID NO: 68094

SEQ ID NO: 68123 - protein, 261 aa, Homo sapiens; identical to SEQ ID NO: 68105

SEQ ID NO: 68124 - protein, 488 aa, Homo sapiens; identical to SEQ ID NO: 68073

SEQ ID NO: 68125 - protein, 518 aa, Homo sapiens; identical to SEQ ID NO: 68072

SEQ ID NO: 68126 - protein, 488 aa, Homo sapiens; identical to SEQ ID NO: 68073

SEQ ID NO: 68127 - protein, 261 aa, Homo sapiens; identical to SEQ ID NO: 68105

SEQ ID NO: 68128 - protein, 74 aa, Homo sapiens; identical to SEQ ID NO: 68083

SEQ ID NO: 68129 - protein, 411 aa, Homo sapiens
MAETSLLEAGASAASTAAALENLQVEASCSVCLEYLKEPVIIECGHNFCKACITRWWEDLERDFPCPVCRKTSRYRSLRPNRQLGSMVEIAKQLQAVKRKIRDESLCPQHHEALSLFCYEDQEAVCLICAISHTHRAHTVVPLDDATQEYKEKLQKCLEPLEQKLQEITRCKSSEEKKPGELKRLVESRRQQILREFEELHRRLDEEQQVLLSRLEEEEQDILQRLRENAAHLGDKRRDLAHLAAEVEGKCLQSGFEMLKPVLSAREECEKVKTMEVTSVSIELEKNFSNFPRQYFALRKILKQLIADVTLDPETAHPNLVLSEDRKSVKFVETRLRDLPDTPRRFTFYPCVLATEGFTSGRHYWEVEVGDKTHWAVGVCRDSVSRKGGCGYGMGTNMQPPPHLLPLCTSR

SEQ ID NO: 68130 - protein, 488 aa, Homo sapiens; identical to SEQ ID NO: 68073

SEQ ID NO: 68131 - protein, 261 aa, Homo sapiens; identical to SEQ ID NO: 68105

SEQ ID NO: 68132 - protein, 48 aa, Homo sapiens; identical to SEQ ID NO: 68089

SEQ ID NO: 68133 - protein, 261 aa, Homo sapiens; identical to SEQ ID NO: 68105

SEQ ID NO: 68134 - protein, 488 aa, Homo sapiens; identical to SEQ ID NO: 68073

SEQ ID NO: 68135 - protein, 74 aa, Homo sapiens; identical to SEQ ID NO: 68083

SEQ ID NO: 68136 - protein, 488 aa, Homo sapiens; identical to SEQ ID NO: 68073

SEQ ID NO: 68137 - protein, 518 aa, Homo sapiens; identical to SEQ ID NO: 68072

SEQ ID NO: 68138 - protein, 488 aa, Homo sapiens; identical to SEQ ID NO: 68073

SEQ ID NO: 68139 - protein, 144 aa, Homo sapiens; identical to SEQ ID NO: 68081

SEQ ID NO: 68140 - protein, 144 aa, Homo sapiens; identical to SEQ ID NO: 68081

SEQ ID NO: 68141 - protein, 227 aa, Homo sapiens; identical to SEQ ID NO: 68082
  VARIANT 1: note = MOD_RES - Any amino acid

SEQ ID NO: 68142 - protein, 48 aa, Homo sapiens; identical to SEQ ID NO: 68089

SEQ ID NO: 68143 - protein, 144 aa, Homo sapiens; identical to SEQ ID NO: 68081

SEQ ID NO: 68144 - protein, 488 aa, Homo sapiens; identical to SEQ ID NO: 68073

SEQ ID NO: 68145 - protein, 488 aa, Homo sapiens
MAETSLLEAGASAASTAAALENLQVEASCSVCLEYLKEPVIIECGHNFCKACITRWWEDLERDFPCPVCRKTSRYRSLRPNRQLGSMVEIAKQLQAVKRKIRDESLCPQHHEALSLFCYEDQEAVCLICAISHTHRAHTVVPLDDATQEYKEKLQKCLEPLEQKLQEITRCKSSEEKKPGELKRLVESRRQQILREFEELHRRLDEEQQVLLSRLEEEEQDILQRLRENAAHLGDKRRDLAHLAAEVEGKCLQSGFEMLKPVLSAREECEKVKTMEVTSVSIELEKNFSNFPRQYFALRKILKQLIADVTLDPETAHPNLVLSEDRKSVKFVETRLRDLPDTPRRFTFYPCVLATEGFTSGRHYWEVEVGDKTHWAVGVCRDSVSRKGELTPLPETGYWRVRLWNGDKYAATTTPFTPLHIKVKPKRVGIFLDYEAGTLSFYNVTDRSHIYTFTDTFTEKLWPLFYPGIRAGRKNAAPLTIRPPTDWE

SEQ ID NO: 68146 - protein, 518 aa, Homo sapiens
MAETSLLEAGASAASTAAALENLQVEASCSVCLEYLKEPVIIECGHNFCKACITRWWEDLERDFPCPVCRKTSRYRSLRPNRQLGSMVEIAKQLQAVKRKIRDESLCPQHHEALSLFCYEDQEAVCLICAISHTHRAHTVVPLDDATQEYKEKLQKCLEPLEQKLQEITRCKSSEEKKPGELKRLVESRRQQILREFEELHRRLDEEQQVLLSRLEEEEQDILQRLRENAAHLGDKRRDLAHLAAEVEGKCLQSGFEMLKPVLSAREKNIPRKFGGSLSTICPRDHKALLGLVKEINRCEKVKTMEVTSVSIELEKNFSNFPRQYFALRKILKQLIADVTLDPETAHPNLVLSEDRKSVKFVETRLRDLPDTPRRFTFYPCVLATEGFTSGRHYWEVEVGDKTHWAVGVCRDSVSRKGELTPLPETGYWRVRLWNGDKYAATTTPFTPLHIKVKPKRVGIFLDYEAGTLSFYNVTDRSHIYTFTDTFTEKLWPLFYPGIRAGRKNAAPLTIRPPTDWE

SEQ ID NO: 68147 - protein, 411 aa, Homo sapiens; identical to SEQ ID NO: 68129

SEQ ID NO: 68148 - protein, 518 aa, Homo sapiens; identical to SEQ ID NO: 68146

SEQ ID NO: 68149 - protein, 488 aa, Homo sapiens; identical to SEQ ID NO: 68145

SEQ ID NO: 68150 - protein, 518 aa, Homo sapiens; identical to SEQ ID NO: 68072

SEQ ID NO: 68151 - protein, 488 aa, Homo sapiens; identical to SEQ ID NO: 68145

SEQ ID NO: 68152 - protein, 488 aa, Homo sapiens; identical to SEQ ID NO: 68145

SEQ ID NO: 68153 - protein, 488 aa, Homo sapiens; identical to SEQ ID NO: 68145

SEQ ID NO: 68154 - protein, 518 aa, Homo sapiens; identical to SEQ ID NO: 68072

SEQ ID NO: 68155 - protein, 411 aa, Homo sapiens; identical to SEQ ID NO: 68129

SEQ ID NO: 68156 - protein, 518 aa, Homo sapiens; identical to SEQ ID NO: 68146

SEQ ID NO: 68157 - protein, 411 aa, Homo sapiens; identical to SEQ ID NO: 68129

SEQ ID NO: 68158 - protein, 411 aa, Homo sapiens; identical to SEQ ID NO: 68129

SEQ ID NO: 68159 - protein, 518 aa, Homo sapiens; identical to SEQ ID NO: 68072

SEQ ID NO: 68160 - protein, 518 aa, Homo sapiens; identical to SEQ ID NO: 68146

SEQ ID NO: 68161 - protein, 518 aa, Homo sapiens; identical to SEQ ID NO: 68146

SEQ ID NO: 68162 - protein, 518 aa, Homo sapiens; identical to SEQ ID NO: 68072

SEQ ID NO: 68163 - protein, 518 aa, Homo sapiens; identical to SEQ ID NO: 68146

SEQ ID NO: 68164 - protein, 417 aa, Homo sapiens
MVEIAKQLQAVKRKIRDESLCPQHHEALSLFCYEDQEAVCLICAISHTHRAHTVVPLDDATQEYKEKLQKCLEPLEQKLQEITRCKSSEEKKPGELKRLVESRRQQILREFEELHRRLDEEQQVLLSRLEEEEQDILQRLRENAAHLGDKRRDLAHLAAEVEGKCLQSGFEMLKPVLSAREECEKVKTMEVTSVSIELEKNFSNFPRQYFALRKILKQLIADVTLDPETAHPNLVLSEDRKSVKFVETRLRDLPDTPRRFTFYPCVLATEGFTSGRHYWEVEAAHCVLAQDPENQALARFYCYTERTIAKRLVLRRDPSVKRTLCRGCSSLLVPGLTCTHRQRRCRGQRWTVQTCLTCQRSQRFLNDPGHLLWGDRPEAQLGSQADSKPLQPLPNTAHSISDRLPEEKMQTQGSSNQ

SEQ ID NO: 68165 - protein, 417 aa, Homo sapiens; identical to SEQ ID NO: 68164

SEQ ID NO: 68166 - protein, 411 aa, Homo sapiens; identical to SEQ ID NO: 68129

SEQ ID NO: 68167 - protein, 417 aa, Homo sapiens; identical to SEQ ID NO: 68164

SEQ ID NO: 68168 - protein, 518 aa, Homo sapiens; identical to SEQ ID NO: 68146

SEQ ID NO: 68169 - protein, 417 aa, Homo sapiens
MVEIAKQLQAVKRKIRDESLCPQHHEALSLFCYEDQEAVCLICAISHTHRAHTVVPLDDATQEYKEKLQKCLEPLEQKLQEITRCKSSEEKKPGELKRLVESRRQQILREFEELHRRLDEEQQVLLSRLEEEEQDILQRLRENAAHLGDKRRDLAHLAAEVEGKCLQSGFEMLKPVLSAREECEKVKTMEVTSVSIELEKNFSNFPRQYFALRKILKQLIADVTLDPETAHPNLVLSEDRKSVKFVETRLRDLPDTPRRFTFYPCVLATEGFTSGRHYWEVEAAHCVLAQDPENQALARFYCYTERTIAKRLVLRRDPSVKRTLCRGCSSLLVPGLTCTQRQRRCRGQRWTVQTCLTCQRSQRFLNDPGHLLWGDRPEAQLGSQADSKPLQPLPNTAHSISDRLPEEKMQTKGSSNQ

SEQ ID NO: 68170 - protein, 411 aa, Homo sapiens; identical to SEQ ID NO: 68129

SEQ ID NO: 68171 - protein, 417 aa, Homo sapiens; identical to SEQ ID NO: 68084

SEQ ID NO: 68172 - protein, 518 aa, Homo sapiens; identical to SEQ ID NO: 68072

SEQ ID NO: 68173 - protein, 518 aa, Homo sapiens; identical to SEQ ID NO: 68072

SEQ ID NO: 68174 - protein, 488 aa, Homo sapiens; identical to SEQ ID NO: 68145

SEQ ID NO: 68175 - protein, 488 aa, Homo sapiens; identical to SEQ ID NO: 68145

SEQ ID NO: 68176 - protein, 417 aa, Homo sapiens; identical to SEQ ID NO: 68084

SEQ ID NO: 68177 - protein, 630 aa, Homo sapiens
MAAVAMTPNPVQTLQEEAVCAICLDYFTDPVSIGCGHNFCRVCVTQLWGGEDEEDRDELDREEEEEDGEEEEVEAVGAGAGWDTPMRDEDYEGDMEEEVEEEEEGVFWTSGMSRSSWDNMDYVWEEEDEEEDLDYYLGDMEEEDLRGEDEEDEEEVLEEVEEEDLDPVTPLPPPPAPRRCFTCPQCRKSFPRRSFRPNLQLANMVQVIRQMHPTPGRGSRVTDQGICPKHQEALKLFCEVDEEAICVVCRESRSHKQHSVVPLEEVVQEYKAKLQGHVEPLRKHLEAVQKMKAKEERRVTELKSQMKSELAAVASEFGRLTRFLAEEQAGLERRLREMHEAQLGRAGAAASRLAEQAAQLSRLLAEAQERSQQGGLRLLQDIKETFNRCEEVQLQPPEVWSPDPCQPHSHDFLTDAIVRKMSRMFCQAARVDLTLDPDTAHPALMLSPDRRGVRLAERRQEVADHPKRFSADCCVLGAQGFRSGRHYWEVEVGGRRGWAVGAARESTHHKEKVGPGGSSVGSGDASSSRHHHRRRRLHLPQQPLLQREVWCVGTNGKRYQAQSSTEQTLLSPSEKPRRFGVYLDYEAGRLGFYNAETLAHVHTFSAAFLGERVFPFFRVLSKGTRIKLCP

SEQ ID NO: 68178 - protein, 518 aa, Homo sapiens
MAAVAMTPNPVQTLQEEAVCAICLDYFTDPVSIGCGHNFCRVCVTQLWGGEDEEDRDELDREEEEEDGEEEEVEAVGAGAGWDTPMRDEDYEGDMEEEVEEEEEGVFWTSGMSRSSWDNMDYVWEEEDEEEDLDYYLGDMEEEDLRGEDEEDEEEVLEEVEEEDLDPVTPLPPPPAPRRCFTCPQCRKSFPRRSFRPNLQLANMVQVIRQMHPTPGRGSRVTDQGICPKHQEALKLFCEVDEEAICVVCRESRSHKQHSVVPLEEVVQEYKAKLQGHVEPLRKHLEAVQKMKAKEERRVTELKSQMKSELAAVASEFGRLTRFLAEEQAGLERRLREMHEAQLGRAGAAASRLAEQAAQLSRLLAEAQERSQQGGLRLLQDIKETFNRCEEVQLQPPEVWSPDPCQPHSHDFLTDAIVRKMSRMFCQAARVDLTLDPDTAHPALMLSPDRRGVRLAERRQEVADHPKRFSADCCVLGAQGFRSGRHYWEEPKEPSWPPAQPSLTYYVCPTDRPEFSFT

SEQ ID NO: 68179 - protein, 150 aa, Homo sapiens
LQEEAVCAICLDYFTDPVSIGCGHNFCRVCVTQLWGRRGGGSGGYPVTPLPPPPAPRRCFTCPQCRKSFPRRSFRPNLQLANMVQVIRQMHPTPGRGSRVTDQGICPKHQEALKLFCEVDEEAICVVCRESRSHKQHSVVPLEEVVQEYK

SEQ ID NO: 68180 - protein, 315 aa, Homo sapiens
MKAKEERRVTELKSQMKSELAAVASEFGRLTRFLAEEQAGLERRLREMHEAQLGRAGAAASRLAEQAAQLSRLLAEAQERSQQGGLRLLQQDIKETFNRYAIVRKMSRMFCQAARVDLTLDPDTAHPALMLSPDRRGVRLAERRQEVADHPKRFSADCCVLGAQGFRSGRHYWEVEVGGRRGWAVGAARESTHHKEKVGPGGSSVGSGDASSSRHHHRRRRLHLPQQPLLQREVWCVGTNGKRYQAQSSTEQTLLSPSEKPRRFGVYLDYEAGRLGFYNAETLAHVHTFSAAFLGERVFPFFRVLSKGTRIKLCP

SEQ ID NO: 68181 - protein, 344 aa, Homo sapiens
MASGVGAAFEELPHDGTCDECEPDEAPGAEEVCRECGFCYCRRHAEAHRQKFLSHHLAEYVHGSQAWTPPADGEGAGKEEAEVKVEQEREIESEAGEESESEEESESEEESETEEESEDESDEESEEDSEEEMEDEQESEAEEDNQEEGESEAEGETEAESEFDPEIEMEAERVAKRKCPDHGLDLSTYCQEDRQLICVLCPVIGAHQGHQLSTLDEAFEELRSKDSGGLKAAMIELVERLKFKSSDPKVTRDQMKMFIQQEFKKVQKVIADEEQKALHLVDIQEAMATAHVTEILADIQSHMDRLMTQMAQAKEQLDTSNESAEPKAEGDEEGPSGASEEEDT

SEQ ID NO: 68182 - protein, 580 aa, Homo sapiens
MSENRKPLLGFVSKLTSGTALGNSGKTHCPLCLGLFKAPRLLPCLHTVCTTCLEQLEPFSVVDIRGGDSDTSSEGSIFQELKPRSLQSQIGILCPVCDAQVDLPMGGVKALTIDHLAVNDVMLESLRGEGQGLVCDLCNDREVEKRCQTCKANLCHFCCQAHRRQKKTTYHTMVDLKDLKGYSRIGKPILCPVHPAEELRLFCEFCDRPVCQDCVVGEHREHPCDFTSNVIHKHGDSVWELLKGTQPHVEALEEALAQIHIINSALQKRVEAVAADVRTFSEGYIKAIEEHRDKLLKQLEDIRAQKENSLQLQKAQLEQLLADMRTGVEFTEHLLTSGSDLEILITKRVVVERLRKLNKVQYSTRPGVNDKIRFCPQEKAGQCRGYEIYGTINTKEVDPAKCVLQGEDLHRAREKQTASFTLLCKDAAGEIMGRGGDNVQVAVVPKDKKDSPVRTMVQDNKDGTYYISYTPKEPGVYTVWVCIKEQHVQGSPFTVMVRRKHRPHSGVFHCCTFCSSGGQKTARCACGGTMPGGYLGCGHGHKGHPGHPHWSCCGKFNEKSECTWTGGQSAPRSLLRTVAL

SEQ ID NO: 68183 - protein, 523 aa, Homo sapiens
MLSGVTLEGGGARSGEGRRSRTELKPRSLQSQIGILCPVCDAQVDLPMGGVKALTIDHLAVNDVMLESLRGEGQGLVCDLCNDREVEKRCQTCKANLCHFCCQAHRRQKKTTYHTMVDLKDLKGYSRIGKPILCPVHPAEELRLFCEFCDRPVCQDCVVGEHREHPCDFTSNVIHKHGDSVWELLKGTQPHVEALEEALAQIHIINSALQKRVEAVAADVRTFSEGYIKAIEEHRDKLLKQLEDIRAQKENSLQLQKAQLEQLLADMRTGVEFTEHLLTSGSDLEILITKRVVVERLRKLNKVQYSTRPGVNDKIRFCPQEKAGQCRGYEIYGTINTKEVDPAKCVLQGEDLHRAREKQTASFTLLCKDAAGEIMGRGGDNVQVAVVPKDKKDSPVRTMVQDNKDGTYYISYTPKEPGVYTVWVCIKEQHVQGSPFTVMVRRKHRPHSGVFHCCTFCSSGGQKTARCACGGTMPGGYLGCGHGHKGHPGHPHWSCCGKFNEKSECTWTGGQSAPRSLLRTVAL

SEQ ID NO: 68184 - protein, 562 aa, Homo sapiens
MSENRKPLLGFVSKLTSGTALGNSGKTHCPLCLGLFKAPRLLPCLHTVCTTCLEQLEPFSVVDIRGGDSDTSSEGSIFQELKPRSLQSQIGILCPVCDAQVDLPMGGVKALTIDHLAVNDVMLESLRGEGQGLVCDLCNDREVEKRCQTCKANLCHFCCQAHRRQKKTTYHTMVDLKDLKGYSRIGKPILCPVHPAEELRLFCEFCDRPVCQDCVVGEHREHPCDFTSNVIHKHGDSVWELLKGTQPHVEALEEALAQIHIINSALQKRVEAVAADVRTFSEGYIKAIEEHRDKLLKQLEDIRAQKENSLQLQKAQLEQLLADMRTGVEFTEHLLTSGSDLEILITKRVVVERLRKLNKVQYSTRPGVNDKIRFCPQEKAGQCRGYEIYDLHRAREKQTASFTLLCKDAAGEIMGRGGDNVQVAVVPKDKKDSPVRTMVQDNKDGTYYISYTPKEPGVYTVWVCIKEQHVQGSPFTVMVRRKHRPHSGVFHCCTFCSSGGQKTARCACGGTMPGGYLGCGHGHKGHPGHPHWSCCGKFNEKSECTWTGGQSAPRSLLRTVAL

SEQ ID NO: 68185 - protein, 638 aa, Homo sapiens
MDGSGPFSCPICLEPLREPVTLPCGHNFCLACLGALWPHRGASGAGGPGGAARCPLCQEPFPDGLQLRKNHTLSELLQLRQGSGPGSGPGPAPALAPEPSAPSALPSVPEPSAPCAPEPWPAGEEPVRCDACPEGAALPAALSCLSCLASFCPAHLGPHERSPALRGHRLVPPLRRLEESLCPRHLRPLERYCRAERVCLCEACAAQEHRGHELVPLEQERALQEAEQSKVLSAVEDRMDELGAGIAQSRRTVALIKSAAVAERERVSRLFADAAAALQGFQTQVLGFIEEGEAAMLGRSQGDLRRQEEQRSRLSRARQNLSQVPEADSVSFLQELLALRLALEDGCGPGPGPPRELSFTKSSQAVRAVRDMLAVACVNQWEQLRGPGGNEDGPQKLDSEADAEPQDLESTNLLESEAPRDYFLKFAYIVDLDSDTADKFLQLFGTKGVKRVLCPINYPLSPTRFTHCEQVLGEGALDRGTYYWEVEIIEGWVSMGVMAEDFSPQEPYDRGRLGRNAHSCCLQWNGRSFSVWFHGLEAPLPHPFSPTVGVCLEYADRALAFYAVRDGKMSLLRRLKASRPRRGGIPASPIDPFQSRLDSHFAGLFTHRLKPAFFLESVDAHLQIGPLKKSCISVLKRR

SEQ ID NO: 68186 - protein, 493 aa, Homo sapiens
MASGILVNVKEEVTCPICLELLTQPLSLDCGHSFCQACLTANHKKSMLDKGESSCPVCRISYQPENIRPNRHVANIVEKLREVKLSPEGQKVDHCARHGEKLLLFCQEDGKVICWLCERSQEHRGHHTFLTEEVAREYQVKLQAALEMLRQKQQEAEELEADIREEKASWKTQIQYDKTNVLADFEQLRDILDWEESNELQNLEKEEEDILKSLTNSETEMVQQTQSLRELISDLEHRLQGSVMELLQKVSGKILRTENVTLKKPETFPKNQRRVFRAPDLKGMLEVFRELTDVRRYWVDVTVAPNNISCAVISEDKRQVSSPKPQIIYGARGTRYQTFVNFNYCTGILGSQSITSGKHYWEVDVSKKTAWILGVCAGFQPDAMCNIEKNENYQPKYGYWVIGLEEGVKCSAFQDSSFHTPSVPFIVPLSVIICPDRVGVFLDYEACTVSFFNITNHGFLIYKFSHCSFSQPVFPYLNPRKCGVPMTLCSPSS

SEQ ID NO: 68187 - protein, 326 aa, Homo sapiens
MASGILVNVKEEVTCPICLELLTQPLSLDCGHSFCQACLTANHKKSMLDKGESSCPVCRISYQPENIRPNRHVANIVEKLREVKLSPEGQKVDHCARHGEKLLLFCQEDGKVICWLCERSQEHRGHHTFLTEEVAREYQVKLQAALEMLRQKQQEAEELEADIREEKASWKTQIQYDKTNVLADFEQLRDILDWEESNELQNLEKEEEDILKSLTNSETEMVQQTQSLRELISDLEHRLQGSVMELLQGVDGVIKRTENVTLKKPETFPKNQRRVFRAPDLKGMLEVFRELTDVRRYWGWSAMARSRFTATSTSQIQAILLPQPPK

SEQ ID NO: 68188 - protein, 493 aa, Homo sapiens
MASGILVNVKEEVTCPICLELLTQPLSLDCGHSFCQACLTANHKKSMLDKGESSCPVCRISYQPENIRPNRHVANIVEKLREVKLSPEGQKVDHCARHGEKLLLFCQEDGKVICWLCERSQEHRGHHTFLTEEVAREYQVKLQAALEMLRQKQQEAEELEADIREEKASWKTQIQYDKTNVLADFEQLRDILDWEESNELQNLEKEEEDILKSLTNSETEMVQQTQSLRELISDLEHRLQGSVMELLQGVDGVIKRTENVTLKKPETFPKNQRRVFRAPDLKGMLEVFRELTDVRRYWVDVTVAPNNISCAVISEDKRQVSSPKPQIIYGARGTRYQTFVNFNYCTGILGSQSITSGKHYWEVDVSKKTAWILGVCAGFQPDAMCNIEKNENYQPKYGYWVIGLEEGVKCSAFQDSSFHTPSVPFIVPLSVIICPDRVGVFLDYEACTVSFFNITNHGFLIYKFSHCSFSQPVFPYLNPRKCGVPMTLCSPSS

SEQ ID NO: 68189 - protein, 347 aa, Homo sapiens
MASGILVNVKEEVTCPICLELLTQPLSLDCGHSFCQACLTANHKKSMLDKGESSCPVCRISYQPENIRPNRHVANIVEKLREVKLSPEGQKVDHCARHGEKLLLFCQEDGKVICWLCERSQEHRGHHTFLTEEVAREYQVKLQAALEMLRQKQQEAEELEADIREEKASWKTQIQYDKTNVLADFEQLRDILDWEESNELQNLEKEEEDILKSLTNSETEMVQQTQSLRELISDLEHRLQGSVMELLQGVDGVIKRTENVTLKKPETFPKNQRRVFRAPDLKGMLEVFRELTDVRRYWGKEKSHYHKPPCGLSLLLSLSFRILCSLLGSCFKIYDSPSKTHITYPSL

SEQ ID NO: 68190 - protein, 327 aa, Homo sapiens
MASGILVNVKEEVTCPICLELLTQPLSLDCGHSFCQACLTANHKKSMLDKGESSCPVCRISYQPENIRPNRHVANIVEKLREVKLSPEGQKVDHCARHGEKLLLFCQEDGKVICWLCERSQEHRGHHTFLTEEVAREYQVKLQAALEMLRQKQQEAEELEADIREEKASWKTQIQYDKTNVLADFEQLRDILDWEESNELQNLEKEEEDILKSLTNSETEMVQQTQSLRELISDLEHRLQGSVMELLQAGVQCLILRTENVTLKKPETFPKNQRRVFRAPDLKGMLEVFRELTDVRRYWGWSAMARSRFTATSTSQIQAILLPQPPK

SEQ ID NO: 68191 - protein, 326 aa, Homo sapiens; identical to SEQ ID NO: 68187

SEQ ID NO: 68192 - protein, 209 aa, Homo sapiens
MASGILVNVKEEVTCPICLELLTQPLSLDCGHSFCQACLTANHKKSMLDKGESSCPVCRISYQPENIRPNRHVANIVEKLREVKLSPEGQKVDHCARHGEKLLLFCQEDGKVICWLCERSQEHRGHHTFLTEEVAREYQVKLQAALEMLRQKQQEAEELEADIREEKASWKTQIQYDKTNVLADFEQLRDILDWEESNELQNLEKEEED

SEQ ID NO: 68193 - protein, 72 aa, Homo sapiens
MASGILVNVKEEVTCPICLELLTQPLSLDCGHSFCQACLTANHKKSMLDKGESSCPVCRISYQPENIRPNRH

SEQ ID NO: 68194 - protein, 271 aa, Homo sapiens
MASGILVNVKEEVTCPICLELLTQPLSLDCGHSFCQACLTANHKKSMLDKGESSCPVCRISYQPENIRPNRHVANIVEKLREVKLSPEGQKVDHCARHGEKLLLFCQEDGKVICWLCERSQEHRGHHTFLTEEVAREYQVKLQAALEMLRQKQQEAEELEADIREEKASWKTQIQYDKTNVLADFEQLRDILDWEESNELQNLEKEEEDILKSLTNSETEMVQQTQSLRELISDLEHRLQGSVMELLQDGERDLEEARNFSKKSKESVSSS

SEQ ID NO: 68195 - protein, 487 aa, Homo sapiens
MAWQVSLLELEDWLQCPICLEVFKEPLMLQCGHSYCKGCLVSLSCHLDAELRCPVCRQAVDGSSSLPNVSLARVIEALRLPGDPEPKVCVHHRNPLSLFCEKDQELICGLCGLLGSHQHHPVTPVSTVYSRMKEELAALISELKQEQKKVDELIAKLVNNRTRIVNESDVFSWVIRREFQELHHLVDEEKARCLEGIGGHTRGLVASLDMQLEQAQGTRERLAQAECVLEQFGNEDHHKFIRKFHSMASRAEMPQARPLEGAFSPISFKPGLHQADIKLTVWKRLFRKVLPAPEPLKLDPATAHPLLELSKGNTVVQCGLLAQRRASQPERFDYSTCVLASRGFSCGRHYWEVVVGSKSDWRLGVIKGTASRKGKLNRSPEHGVWLIGLKEGRVYEAFACPRVPLPVAGHPHRIGLYLHYEQGELTFFDADRPDDLRPLYTFQADFQGKLYPILDTCWHERGSNSLPMVLPPPSGPGPLSPEQPTKL

SEQ ID NO: 68196 - protein, 487 aa, Homo sapiens; identical to SEQ ID NO: 68195

SEQ ID NO: 68197 - protein, 488 aa, Homo sapiens
MTSPVLVDIREEVTCPICLELLTEPLSIDCGHSFCQACITPNGRESVIGQEGERSCPVCQTSYQPGNLRPNRHLANIVRRLREVVLGPGKQLKAVLCADHGEKLQLFCQEDGKVICWLCERSQEHRGHHTFLVEEVAQEYQEKFQESLKKLKNEEQEAEKLTAFIREKKTSWKNQMEPERCRIQTEFNQLRNILDRVEQRELKKLEQEEKKGLRIIEEAENDLVHQTQSLRELISDLERRCQGSTMELLQDVSDVTERSEFWTLRKPEALPTKLRSMFRAPDLKRMLRVCRELTDVQSYWVDVTLNPHTANLNLVLAKNRRQVRFVGAKVSGPSCLEKHYDCSVLGSQHFSSGKHYWEVDVAKKTAWILGVCSNSLGPTFSFNHFAQNHSAYSRYQPQSGYWVIGLQHNHEYRAYEDSSPSLLLSMTVPPRRVGVFLDYEAGTVSFYNVTNHGFPIYTFSKYYFPTTLCPYFNPCNCVIPMTLRRPSS

SEQ ID NO: 68198 - protein, 516 aa, Homo sapiens
MCGSERILQAGNILEIRVGQAGARRVATMTSPVLVDIREEVTCPICLELLTEPLSIDCGHSFCQACITPNGRESVIGQEGERSCPVCQTSYQPGNLRPNRHLANIVRRLREVVLGPGKQLKAVLCADHGEKLQLFCQEDGKVICWLCERSQEHRGHHTFLVEEVAQEYQEKFQESLKKLKNEEQEAEKLTAFIREKKTSWKNQMEPERCRIQTEFNQLRNILDRVEQRELKKLEQEEKKGLRIIEEAENDLVHQTQSLRELISDLERRCQGSTMELLQDVSDVTERSEFWTLRKPEALPTKLRSMFRAPDLKRMLRVCRELTDVQSYWVDVTLNPHTANLNLVLAKNRRQVRFVGAKVSGPSCLEKHYDCSVLGSQHFSSGKHYWEVDVAKKTAWILGVCSNSLGPTFSFNHFAQNHSAYSRYQPQSGYWVIGLQHNHEYRAYEDSSPSLLLSMTVPPRRVGVFLDYEAGTVSFYNVTNHGFPIYTFSKYYFPTTLCPYFNPCNCVIPMTLRRPSS

SEQ ID NO: 68199 - protein, 462 aa, Homo sapiens
MTSPVLVDIREEVTCPICLELLTEPLSIDCGHSFCQACITPNGRESVIGQEGERSCPVCQTSYQPGNLRPNRHLANIVRRLREEDGKVICWLCERSQEHRGHHTFLVEEVAQEYQEKFQESLKKLKNEEQEAEKLTAFIREKKTSWKNQMEPERCRIQTEFNQLRNILDRVEQRELKKLEQEEKKGLRIIEEAENDLVHQTQSLRELISDLERRCQGSTMELLQDVSDVTERSEFWTLRKPEALPTKLRSMFRAPDLKRMLRVCRELTDVQSYWVDVTLNPHTANLNLVLAKNRRQVRFVGAKVSGPSCLEKHYDCSVLGSQHFSSGKHYWEVDVAKKTAWILGVCSNSLGPTFSFNHFAQNHSAYSRYQPQSGYWVIGLQHNHEYRAYEDSSPSLLLSMTVPPRRVGVFLDYEAGTVSFYNVTNHGFPIYTFSKYYFPTTLCPYFNPCNCVIPMTLRRPSS

SEQ ID NO: 68200 - protein, 395 aa, Homo sapiens
MCGSERPWRKTAALLSGGWEGHLLACERSQEHRGHHTFLVEEVAQEYQEKFQESLKKLKNEEQEAEKLTAFIREKKTSWKNQMEPERCRIQTEFNQLRNILDRVEQRELKKLEQEEKKGLRIIEEAENDLVHQTQSLRELISDLERRCQGSTMELLQDVSDVTERSEFWTLRKPEALPTKLRSMFRAPDLKRMLRVCRELTDVQSYWVDVTLNPHTANLNLVLAKNRRQVRFVGAKVSGPSCLEKHYDCSVLGSQHFSSGKHYWEVDVAKKTAWILGVCSNSLGPTFSFNHFAQNHSAYSRYQPQSGYWVIGLQHNHEYRAYEDSSPSLLLSMTVPPRRVGVFLDYEAGTVSFYNVTNHGFPIYTFSKYYFPTTLCPYFNPCNCVIPMTLRRPSS

SEQ ID NO: 68201 - protein, 313 aa, Homo sapiens
MEPERCRIQTEFNQLRNILDRVEQRELKKLEQEEKKGLRIIEEAENDLVHQTQSLRELISDLERRCQGSTMELLQDVSDVTERSEFWTLRKPEALPTKLRSMFRAPDLKRMLRVCRELTDVQSYWVDVTLNPHTANLNLVLAKNRRQVRFVGAKVSGPSCLEKHYDCSVLGSQHFSSGKHYWEVDVAKKTAWILGVCSNSLGPTFSFNHFAQNHSAYSRYQPQSGYWVIGLQHNHEYRAYEDSSPSLLLSMTVPPRRVGVFLDYEAGTVSFYNVTNHGFPIYTFSKYYFPTTLCPYFNPCNCVIPMTLRRPSS

SEQ ID NO: 68202 - protein, 313 aa, Homo sapiens; identical to SEQ ID NO: 68201

SEQ ID NO: 68203 - protein, 313 aa, Homo sapiens; identical to SEQ ID NO: 68201

SEQ ID NO: 68204 - protein, 313 aa, Homo sapiens; identical to SEQ ID NO: 68201

SEQ ID NO: 68205 - protein, 1216 aa, Homo sapiens
MARNCSECKEKRAAHILCTYCNRWLCSSCTEEHRHSPVPGGPFFPRAQKGSPGVNGGPGDFTLYCPLHTQEVLKLFCETCDMLTCHSCLVVEHKEHRCRHVEEVLQNQRMLLEGVTTQVAHKKSSLQTSAKQIEDRIFEVKHQHRKVENQIKMAKMVLMNELNKQANGLIEELEGITNERKRKLEQQLQSIMVLNRQFEHVQNFINWAVCSKTSVPFLFSKELIVFQMQRLLETSCNTDPGSPWSIRFTWEPNFWTKQLASLGCITTEGGQMSRADAPAYGGLQGSSPFYQSHQSPVAQQEALSHPSHKFQSPAVCSSSVCCSHCSPVSPSLKGQVPPPSIHPAHSFRQPPEMVPQQLGSLQCSALLPREKELACSPHPPKLLQPWLETQPPVEQESTSQRLGQQLTSQPVCIVPPQDVQQGAHAQPTLQTPSIQVQFGHHQKLKLSHFQQQPQQQLPPPPPPLPHPPPPLPPPPQQPHPPLPPSQHLASSQHESPPGPACSQNMDIMHHKFELEEMQKDLELLLQAQQPSLQLSQTKSPQHLQQTIVGQINYIVRQPAPVQSQSQEETLQATDEPPASQGSKPALPLDKNTAAALPQASGEETPLSVPPVDSTIQHSSPNVVRKHSTSLSIMGFSNTLEMELSSTRLERPLEPQIQSVSNLTAGAPQAVPSLLSAPPKMVSSLTSVQNQAMPSLTTSHLQTVPSLVHSTFQSMPNLISDSPQAMASLASDHPQAGPSLMSGHTQAVPSLATCPLQSIPPVSDMQPETGSSSSSGRTSGSLCPRDGADPSLENALCKVKLEEPINLSVKKPPLAPVVSTSTALQQYQNPKECENFEQGALELDAKENQSIRAFNSEHKIPYVRLERLKICAASSGEMPVFKLKPQKNDQDGSFLLIIECGTESSSMSIKVSQDRLSEATQAPGLEGRKVTVTSLAGQRPPEVEGTSPEEHRLIPRTPGAKKGPPAPIENEDFCAVCLNGGELLCCDRCPKVFHLSCHVPALLSFPGGEWVCTLCRSLTQPEMEYDCENACYNQPGMRASPGLSMYDQKKCEKLVLSLCCNNLSLPFHEPVSPLARHYYQIIKRPMDLSIIRRKLQKKDPAHYTTPEEVVSDVRLMFWNCAKFNYPDSEVAEAGRCLEVFFEGWLKEIYPEKRFAQPRQEDSDSEEVSSESGCSTPQGFPWPPYMQEGIQPKRRRRHMENERAKRMSFRLANSISQV

SEQ ID NO: 68206 - protein, 485 aa, Homo sapiens
MDPTALVEAIVEEVACPICMTFLREPMSIDCGHSFCHSCLSGLWEIPGESQNWGYTCPLCRAPVQPRNLRPNWQLANVVEKVRLLRLHPGMGLKGDLCERHGEKLKMFCKEDVLIMCEACSQSPEHEAHSVVPMEDVAWEYKWELHEALEHLKKEQEEAWKLEVGERKRTATWKIQVETRKQSIVWEFEKYQRLLEKKQPPHRQLGAEVAAALASLQREAAETMQKLELNHSELIQQSQVLWRMIAELKERSQRPVRWMLQDIQEVLNRSKSWSLQQPEPISLELKTDCRVLGLREILKTYAADVRLDPDTAYSRLIVSEDRKRVHYGDTNQKLPDNPERFYRYNIVLGSQCISSGRHYWEVEVGDRSEWGLGVCKQNVDRKEVVYLSPHYGFWVIRLRKGNEYRAGTDEYPILSLPVPPRRVGIFVDYEAHDISFYNVTDCGSHIFTFPRYPFPGRLLPYFSPCYSIGTNNTAPLAICSLDGED

SEQ ID NO: 68207 - protein, 206 aa, Homo sapiens
MQKLELKTDCRVLGLREILKTYAADVRLDPDTAYSRLIVSEDRKRVHYGDTNQKLPDNPERFYRYNIVLGSQCISSGRHYWEVEVGDRSEWGLGVCKQNVDRKEVVYLSPHYGFWVIRLRKGNEYRAGTDEYPILSLPVPPRRVGIFVDYEAHDISFYNVTDCGSHIFTFPRYPFPGRLLPYFSPCYSIGTNNTAPLAICSLDGED

SEQ ID NO: 68208 - protein, 511 aa, Homo sapiens
MAAVGPRTGPGTGAEALALAAELQGEATCSICLELFREPVSVECGHSFCRACIGRCWERPGAGSVGAATRAPPFPLPCPQCREPARPSQLRPNRQLAAVATLLRRFSLPAAAPGEHGSQAAAARAAAARCGQHGEPFKLYCQDDGRAICVVCDRAREHREHAVLPLDEAVQEAKELLESRLRVLKKELEDCEVFRSTEKKESKELLKQMAAEQEKVGAEFQALRAFLVEQEGRLLGRLEELSREVAQKQNENLAQLGVEITQLSKLSSQIQETAQKPDLDFLQEFKSTLSRCSNVPGPKPTTVSSEMKNKVWNVSLKTFVLKGMLKKFKEDLRGELEKEEKVELTLDPDTANPRLILSLDLKGVRLGERAQDLPNHPCRFDTNTRVLASCGFSSGRHHWEVEVGSKDGWAFGVARESVRRKGLTPFTPEEGVWALQLNGGQYWAVTSPERSPLSCGHLSRVRVALDLEVGAVSFYAVEDMRHLYTFRVNFQERVFPLFSVCSTGTYLRIWP

SEQ ID NO: 68209 - protein, 221 aa, Homo sapiens
MAAVGPRTGPGTGAEALALAAELQGEATCSICLELFREPVSVECGHSFCRACIGRCWERPGAGSVGAATRAPPFPLPCPQCREPARPSQLRPNRQLAAVATLLRRFSLPAAAPGEHGSQAAAARAAAARCGQHGEPFKLYCQDDGRAICVVCDRAREHREHAVLPLDEAVQEAKELLESRLRVLKKELEDCEVFRSTEKKESKELLVSQAPAGPPWDITEA

SEQ ID NO: 68210 - protein, 303 aa, Homo sapiens
MAAEQEKVGAEFQALRAFLVEQEGRLLGRLEELSREVAQKQNENLAQLGVEITQLSKLSSQIQETAQKPDLDFLQEFKSTLSRCSNVPGPKPTTVSSEMKNKVWNVSLKTFVLKGMLKKFKEDLRGELEKEEKVELTLDPDTANPRLILSLDLKGVRLGERAQDLPNHPCRFDTNTRVLASCGFSSGRHHWEVEVGSKDGWAFGVARESVRRKGLTPFTPEEGVWALQLNGGQYWAVTSPERSPLSCGHLSRVRVALDLEVGAVSFYAVEDMRHLYTFRVNFQERVFPLFSVCSTGTYLRIWP

SEQ ID NO: 68211 - protein, 303 aa, Homo sapiens; identical to SEQ ID NO: 68210

SEQ ID NO: 68212 - protein, 329 aa, Homo sapiens
MTQATGQMLCLHVQVPLQLLLLGQKQMAAEQEKVGAEFQALRAFLVEQEGRLLGRLEELSREVAQKQNENLAQLGVEITQLSKLSSQIQETAQKPDLDFLQEFKSTLSRCSNVPGPKPTTVSSEMKNKVWNVSLKTFVLKGMLKKFKEDLRGELEKEEKVELTLDPDTANPRLILSLDLKGVRLGERAQDLPNHPCRFDTNTRVLASCGFSSGRHHWEVEVGSKDGWAFGVARESVRRKGLTPFTPEEGVWALQLNGGQYWAVTSPERSPLSCGHLSRVRVALDLEVGAVSFYAVEDMRHLYTFRVNFQERVFPLFSVCSTGTYLRIWP

SEQ ID NO: 68213 - protein, 303 aa, Homo sapiens; identical to SEQ ID NO: 68210

SEQ ID NO: 68214 - protein, 477 aa, Homo sapiens
MSAAPGLLHQELSCPLCLQLFDAPVTAECGHSFCRACLGRVAGEPAADGTVLCPCCQAPTRPQALSTNLQLARLVEGLAQVPQGHCEEHLDPLSIYCEQDRALVCGVCASLGSHRGHRLLPAAEAHARLKTQLPQQKLQLQEACMRKEKSVAVLEHQLVEVEETVRQFRGAVGEQLGKMRVFLAALEGSLDREAERVRGEAGVALRRELGSLNSYLEQLRQMEKVLEEVADKPQTEFLMKYCLVTSRLQKILAESPPPARLDIQLPIISDDFKFQVWRKMFRALMPALEELTFDPSSAHPSLVVSSSGRRVECSEQKAPPAGEDPRQFDKAVAVVAHQQLSEGEHYWEVDVGDKPRWALGVIAAEAPRRGRLHAVPSQGLWLLGLREGKILEAHVEAKEPRALRSPERRPTRIGLYLSFGDGVLSFYDASDADALVPLFAFHERLPRPVYPFFDVCWHDKGKNAQPLLLVGPEGAEA

SEQ ID NO: 68215 - protein, 250 aa, Homo sapiens
MAWQVSLLELEDRLQCPICLEVFKESLMLQCGHSYCKGCLVSLSYHLDTKVRCPMCWQVVDGSSSLPNVSLAWVIEALRLPGDPEPKVCVHHRNPLSLFCEKDQELICGLCGLLGSHQHHPVTPVSTVCSRMKEELAALFSELKQEQKKVDELIAKLVKNRTRIVNESDVFSWVIRREFQELRHPVDEEKARCLEGIGGHTRGLVASLDMQLEQAQGTRERLAQAECVLEQFGNEDHHEFIWKFHSMASR

SEQ ID NO: 68216 - protein, 282 aa, Homo sapiens
MAWQVSLLELEDRLQCPICLEVFKESLMLQCGHSYCKGCLVSLSYHLDTKVRCPMCWQVVDGSSSLPNVSLAWVIEALRLPGDPEPKVCVHHRNPLSLFCEKDQELICGLCGLLGSHQHHPVTPVSTVCSRMKEELAALFSELKQEQKKVDELIAKLVKNRTRIVNESDVFSWVIRREFQELRHPVDEEKARCLEGIGGHTRGLVASLDMQLEQAQGTRERLAQAECVLEQFGNEDHHEFIWKFHSMASRLTKTEELEKKWRNGLAASHSLPQQVRPQRRTP

SEQ ID NO: 68217 - protein, 250 aa, Homo sapiens; identical to SEQ ID NO: 68215

SEQ ID NO: 68218 - protein, 249 aa, Homo sapiens
MAWQVSLLELEDRLQCPICLEVFKESLMLQCGHSYCKGCLVSLSYHLDTKVRCPMCWQVVDGSSSLPNVSLAWVIEALRLPGDPEPKVCVHHRNPLSLFCEKDQELICGLCGLLGSHQHHPVTPVSTVCSRMKEELAALFSELKQEQKKVDELIAKLVKNRTRIVNESDVFSWVIRREFQELRHPVDEEKARCLEGIGGHTRGLVASLDMQLEQAQGTRERLAQAECVLEQFGNEDHHEFIWFHSMASR

SEQ ID NO: 68219 - protein, 250 aa, Homo sapiens
MAWQVSLLELEDWLQCPICLEVFKESLMLQCGHSYCKGCLVSLSYHLDTKVRCPMCWQVVDGSSSLPNVSLAWVIEALRLPGDPEPKVCVHHRNPLSLFCEKDQELICGLCGLLGSHQHHPVTPVSTVCSRMKEELAALFSELKQEQKKVDELIAKLVKNRTRIVNESDVFSWVIRREFQELRHPVDEEKARCLEGIGGHTRGLVASLDMQLEQAQGTRERLAQAECVLEQFGNEDHHEFIWKFHSMASR

SEQ ID NO: 68220 - protein, 249 aa, Homo sapiens
MAWQVSLLELEDWLQCPICLEVFKESLMLQCGHSYCKGCLVSLSYHLDTKVRCPMCWQVVDGSSSLPNVSLAWVIEALRLPGDPEPKVCVHHRNPLSLFCEKDQELICGLCGLLGSHQHHPVTPVSTVCSRMKEELAALFSELKQEQKKVDELIAKLVKNRTRIVNESDVFSWVIRREFQELRHPVDEEKARCLEGIGGHTRGLVASLDMQLEQAQGTRERLAQAECVLEQFGNEDHHEFIWFHSMASR

SEQ ID NO: 68221 - protein, 551 aa, Homo sapiens
MAENWKNCFEEELICPICLHVFVEPVQLPCKHNFCRGCIGEAWAKDSGLVRCPECNQAYNQKPGLEKNLKLTNIVEKFNALHVEKPPAALHCVFCRRGPPLPAQKVCLRCEAPCCQSHVQTHLQQPSTARGHLLVEADDVRAWSCPQHNAYRLYHCEAEQVAVCQYCCYYSGAHQGHSVCDVEIRRNEIRKMLMKQQDRLEEREQDIEDQLYKLESDKRLVEEKVNQLKEEVRLQYEKLHQLLDEDLRQTVEVLDKAQAKFCSENAAQALHLGERMQEAKKLLGSLQLLFDKTEDVSFMKNTKSVKILMDRTQTCTSSSLSPTKIGHLNSKLFLNEVAKKEKQLRKMLEGPFSTPVPFLQSVPLYPCGVSSSGAEKRKHSTAFPEASFLETSSGPVGGQYGAAGTASGEGQSGQPLGPCSSTQHLVALPGGAQPVHSSPVFPPSQYPNGSAAQQPMLPQYGGRKILVCSVDNCYCSSVANHGGHQPYPRSGHFPWTVPSQEYSHPLPPTPSVPQSLPSLAVRDWLDASQQPGHQDFYRVYGQPSTKHYVTS

SEQ ID NO: 68222 - protein, 550 aa, Homo sapiens
MAENWKNCFEEELICPICLHVFVEPVQLPCKHNFCRGCIGEAWAKDSGLVRCPECNQAYNQKPGLEKNLKLTNIVEKFNALHVEKPPAALHCVFCRRGPPLPAQKVCLRCEAPCCQSHVQTHLQQPSTARGHLLVEADDVRAWSCPQHNAYRLYHCEAEQVAVCQYCCYYSGAHQGHSVCDVEIRRNEIRMLMKQQDRLEEREQDIEDQLYKLESDKRLVEEKVNQLKEEVRLQYEKLHQLLDEDLRQTVEVLDKAQAKFCSENAAQALHLGERMQEAKKLLGSLQLLFDKTEDVSFMKNTKSVKILMDRTQTCTSSSLSPTKIGHLNSKLFLNEVAKKEKQLRKMLEGPFSTPVPFLQSVPLYPCGVSSSGAEKRKHSTAFPEASFLETSSGPVGGQYGAAGTASGEGQSGQPLGPCSSTQHLVALPGGAQPVHSSPVFPPSQYPNGSAAQQPMLPQYGGRKILVCSVDNCYCSSVANHGGHQPYPRSGHFPWTVPSQEYSHPLPPTPSVPQSLPSLAVRDWLDASQQPGHQDFYRVYGQPSTKHYVTS

SEQ ID NO: 68223 - protein, 710 aa, Homo sapiens
MEEMEEELKCPVCGSFYREPIILPCSHNLCQACARNILVQTPESESPQSHRAAGSGVSDYDYLDLDKMSLYSEADSGYGSYGGFASAPTTPCQKSPNGVRVFPPAMPPPATHLSPALAPVPRNSCITCPQCHRSLILDDRGLRGFPKNRVLEGVIDRYQQSKAAALKCQLCEKAPKEATVMCEQCDVFYCDPCRLRCHPPRGPLAKHRLVPPAQGRVSRRLSPRKVSTCTDHELENHSMYCVQCKMPVCYQCLEEGKHSSHEVKALGAMWKLHKSQLSQALNGLSDRAKEAKEFLVQLRNMVQQIQENSVEFEACLVAQCDALIDALNRRKAQLLARVNKEHEHKLKVVRDQISHCTVKLRQTTGLMEYCLEVIKENDPSGFLQISDALIRRVHLTEDQWGKGTLTPRMTTDFDLSLDNSPLLQSIHQLDFVQVKASSPVPATPILQLEECCTHNNSATLSWKQPPLSTVPADGYILELDDGNGGQFREVYVGKETMCTVDGLHFNSTYNARVKAFNKTGVSPYSKTLVLQTSEVAWFAFDPGSAHSDIILSNDNLTVTCSSYDDRVVLGKTGFSKGIHYWELTVDRYDNHPDPAFGVARMDVMKDVMLGKDDKAWAMYVDNNRSWFMHNNSHTNRTEGGITKGATIGVLLDLNRKNLTFFINDEQQGPIAFDNVEGLFFPAVSLNRNVQVTLHTGLPVPDFYSSRASIA

SEQ ID NO: 68224 - protein, 802 aa, Homo sapiens
MEEMEEELKCPVCGSFYREPIILPCSHNLCQACARNILVQTPESESPQSHRAAGSGVSDYDYLDLDKMSLYSEADSGYGSYGGFASAPTTPCQKSPNGVRVFPPAMPPPATHLSPALAPVPRNSCITCPQCHRSLILDDRGLRGFPKNRVLEGVIDRYQQSKAAALKCQLCEKAPKEATVMCEQCDVFYCDPCRLRCHPPRGPLAKHRLVPPAQGRVSRRLSPRKVSTCTDHELENHSMYCVQCKMPVCYQCLEEGKHSSHEVKALGAMWKLHKSQLSQALNGLSDRAKEAKEFLVQLRNMVQQIQENSVEFEACLVAQCDALIDALNRRKAQLLARVNKEHEHKLKVVRDQISHCTVKLRQTTGLMEYCLEVIKENDPSGFLQISDALIRRVHLTEDQWGKGTLTPRMTTDFDLSLDNSPLLQSIHQLDFVQVKVPATPILQLEECCTHNNSATLSWKQPPLSTVPADGYILELDDGNGGQFREVYVGKETMCTVDGLHFNSTYNARVKAFNKTGVSPYSKTLVLQTSEDTDSEEQTLPFPVPSERLPLRRMSPFSSTLNLQPSFPGRSYFDFRSSPHQLSLHSSLQSLNAPGCNFETQSAPYSQLVDIKKLLAVAWFAFDPGSAHSDIILSNDNLTVTCSSYDDRVVLGKTGFSKGIHYWELTVDRYDNHPDPAFGVARMDVMKDVMLGKDDKAWAMYVDNNRSWFMHNNSHTNRTEGGITKGATIGVLLDLNRKNLTFFINDEQQGPIAFDNVEGLFFPAVSLNRNVQVSTLPLRLNSCCWLPVQRLPRAVQSNRREGS

SEQ ID NO: 68225 - protein, 550 aa, Homo sapiens
MEEMEEELKCPVCGSFYREPIILPCSHNLCQACARNILVQTPESESPQSHRAAGSGVSDYDYLDLDKMSLYSEADSGYGSYGGFASAPTTPCQKSPNGVRVFPPAMPPPATHLSPALAPVPRNSCITCPQCHRSLILDDRGLRGFPKNRVLEGVIDRYQQSKAAALKCQLCEKAPKEATVMCEQCDVFYCDPCRLRCHPPRGPLAKHRLVPPAQGRVSRRLSPRKVSTCTDHELENHSMYCVQCKMPVCYQCLEEGKHSSHEVKALGAMWKLHKSQLSQALNGLSDRAKEAKEFLVQLRNMVQQIQENSVEFEACLVAQCDALIDALNRRKAQLLARVNKEHEHKLKVVRDQISHCTVKLRQTTGLMEYCLEVIKENDPSGFLQISDALIRRVHLTEDQWGKGTLTPRMTTDFDLSLDNSPLLQSIHQLDFVQVKASSPVPATPILQLEECCTHNNSATLSWKQPPLSTVPADGYILELDDGNGGQFREVYVGKETMCTVDGLHFNSTYNARVKAFNKTGVSPYSKTLVLQTSEGKALQQYPSERELRGI

SEQ ID NO: 68226 - protein, 1249 aa, Homo sapiens
MATAATEEPFPFHGLLPKKETGAASFLCRYPEYDGRGVLIAVLDTGVDPGAPGMQVTTDGKPKIVDIIDTTGSGDVNTATEVEPKDGEIVGLSGRVLKIPASWTNPSGKYHIGIKNGYDFYPKALKERIQKERKEKIWDPVHRVALAEACRKQEEFDVANNGSSQANKLIKEELQSQVELLNSFEKKYSDPGPVYDCLVWHDGEVWRACIDSNEDGDLSKSTVLRNYKEAQEYGSFGTAEMLNYSVNIYDDGNLLSIVTSGGAHGTHVASIAAGHFPEEPERNGVAPGAQILSIKIGDTRLSTMETGTGLIRAMIEVINHKCDLVNYSYGEATHWPNSGRICEVINEAVWKHNIIYVSSAGNNGPCLSTVGCPGGTTSSVIGVGAYVSPDMMVAEYSLREKLPANQYTWSSRGPSADGALGVSISAPGGAIASVPNWTLRGTQLMNGTSMSSPNACGGIALILSGLKANNIDYTVHSVRRALENTAVKADNIEVFAQGHGIIQVDKAYDYLVQNTSFANKLGFTVTVGNNRGIYLRDPVQVAAPSDHGVGIEPVFPENTENSEKISLQLHLALTSNSSWVQCPSHLELMNQCRHINIRVDPRGLREGLHYTEVCGYDIASPNAGPLFRVPITAVIAAKVNESSHYDLAFTDVHFKPGQIRRHFIEVPEGATWAEVTVCSCSSEVSAKFVLHAVQLVKQRAYRSHEFYKFCSLPEKGTLTEAFPVLGGKAIEFCIARWWASLSDVNIDYTISFHGIVCTAPQLNIHASEGINRFDVQSSLKYEDLAPCITLKNWVQTLRPVSAKTKPLGSRDVLPNNRQLYEMVLTYNFHQPKSGEVTPSCPLLCELLYESEFDSQLWIIFDQNKRQMGSGDAYPHQYSLKLEKGDYTIRLQIRHEQISDLERLKDLPFIVSHRLSNTLSLDIHENHSFALLGKKKSSNLTLPPKYNQPFFVTSLPDDKIPKGAGPGCYLAGSLTLSKTELGKKADVIPVHYYLIPPPTKTKNGSKDKEKDSEKEKDLKEEFTEALRDLKIQWMTKLDSSDIYNELKETYPNYLPLYVARLHQLDAEKERMKRLNEIVDAANAVISHIDQTALAVYIAMKTDPRPDAATIKNDMDKQKSTLVDALCRKGCALADHLLHTQAQDGAISTDAEGKEEEGESPLDSLAETFWETTKWTDLFDNKVLTFAYKHALVNKMYGRGLKFATKLVEEKPTKENWKNCIQLMKLLGWTHCASFTENWLPIMYPPDYCVF

SEQ ID NO: 68227 - protein, 596 aa, Homo sapiens
MLPSQAQGLLWWVFPLFPASSLSYPPVSYRADGLARNTFLKACSESSSSSNISTMLVTHDYTAVKEDEINVYQGEVVQILASNQQNMFLVFRAATDQCPAAEGWIPGFVLGHTSAVIVENPDGTLKKSTSWHTALRLRKKSEKKDKDGKREGKLENGYRKSREGLSNKVSVKLLNPNYIYDVPPEFVIPLSEVTCETGETVVLRCRVCGRPKASITWKGPEHNTLNNDGHYSISYSDLGEATLKIVGVTTEDDGIYTCIAVNDMGSASSSASLRVLGPGMDGIMVTWKDNFDSFYSEVAELGRGRFSVVKKCDQKGTKRAVATKFVNKKLMKRDQVTHELGILQSLQHPLLVGLLDTFETPTSYILVLEMADQGRLLDCVVRWGSLTEGKIRAHLGEVLEAVRYLHNCRIAHLDLKPENILVDESLAKPTIKLADFGDAVQLNTTYYIHQLLGNPEFAAPEIILGNPVSLTSDTWSVGVLTYVLLSGVSPFLDDSVEETCLNICRLDFSFPDDYFKGVSQKAKEFVCFLLQEDPAKRPSAALALQEQWLQAGNGRSTGVLDTSRLTSFIERRKHQNDVRPIRSIKNFLQSRLLPRV

SEQ ID NO: 68228 - protein, 3097 aa, Homo sapiens
MSGSSGGAAAPAASSGPAAAASAAGSGCGGGAGEGAEEAAKDLADIAAFFRSGFRKNDEMKAMDVLPILKEKVAYLSGGRDKRGGPILTFPARSNHDRIRQEDLRRLISYLACIPSEEVCKRGFTVIVDMRGSKWDSIKPLLKILQESFPCCIHVALIIKPDNFWQKQRTNFGSSKFEFETNMVSLEGLTKVVDPSQLTPEFDGCLEYNHEEWIEIRVAFEDYISNATHMLSRLEELQDILAKKELPQDLEGARNMIEEHSQLKKKVIKAPIEDLDLEGQKLLQRIQSSESFPKKNSGSGNADLQNLLPKVSTMLDRLHSTRQHLHQMWHVRKLKLDQCFQLRLFEQDAEKMFDWITHNKGLFLNSYTEIGTSHPHAMELQTQHNHFAMNCMNVYVNINRIMSVANRLVESGHYASQQIRQIASQLEQEWKAFAAALDERSTLLDMSSIFHQKAEKYMSNVDSWCKACGEVDLPSELQDLEDAIHHHQGIYEHITLAYSEVSQDGKSLLDKLQRPLTPGSSDSLTASANYSKAVHHVLDVIHEVLHHQRQLENIWQHRKVRLHQRLQLCVFQQDVQQVLDWIENHGEAFLSKHTGVGKSLHRARALQKRHEDFEEVAQNTYTNADKLLEAAEQLAQTGECDPEEIYQAAHQLEDRIQDFVRRVEQRKILLDMSVSFHTHVKELWTWLEELQKELLDDVYAESVEAVQDLIKRFGQQQQTTLQVTVNVIKEGEDLIQQLRDSAISSNKTPHNSSINHIETVLQQLDEAQSQMEELFQERKIKLELFLQLRIFERDAIDIISDLESWNDELSQQMNDFDTEDLTIAEQRLQHHADKALTMNNLTFDVIHQGQDLLQYVNEVQASGVELLCDRDVDMATRVQDLLEFLHEKQQELDLAAEQHRKHLEQCVQLRHLQAEVKQVLGWIRNGESMLNAGLITASSLQEAEQLQREHEQFQHAIEKTHQSALQVQQKAEAMLQANHYDMDMIRDCAEKVASHWQQLMLKMEDRLKLVNASVAFYKTSEQVCSVLESLEQEYKREEDWCGGADKLGPNSETDHVTPMISKHLEQKEAFLKACTLARRNADVFLKYLHRNSVNMPGMVTHIKAPEQQVKNILNELFQRENRVLHYWTMRKRRLDQCQQYVVFERSAKQALEWIHDNGEFYLSTHTSTGSSIQHTQELLKEHEEFQITAKQTKERVKLLIQLADGFCEKGHAHAAEIKKCVTAVDKRYRDFSLRMEKYRTSLEKALGISSDSNKSSKSLQLDIIPASIPGSEVKLRDAAHELNEEKRKSARRKEFIMAELIQTEKAYVRDLRECMDTYLWEMTSGVEEIPPGIVNKELIIFGNMQEIYEFHNNIFLKELEKYEQLPEDVGHCFVTWADKFQMYVTYCKNKPDSTQLILEHAGSYFDEIQQRHGLANSISSYLIKPVQRITKYQLLLKELLTCCEEGKGEIKDGLEVMLSVPKRANDAMHLSMLEGFDENIESQGELILQESFQVWDPKTLIRKGRERHLFLFEMSLVFSKEVKDSSGRSKYLYKSKLFTSELGVTEHVEGDPCKFALWVGRTPTSDNKIVLKASSIENKQDWIKHIREVIQERTIHLKGALKEPIHIPKTAPATRQKGRRDGEDLDSQGDGSSQPDTISIASRTSQNTLDSDKLSGGCELTVVIHDFTACNSNELTIRRGQTVEVLERPHDKPDWCLVRTTDRSPAAEGLVPCGSLCIAHSRSSMEMEGIFNHKDSLSVSSNDASPPASVASLQPHMIGAQSSPGPKRPGNTLRKWLTSPVRRLSSGKADGHVKKLAHKHKKSREVRKSADAGSQKDSDDSAATPQDETVEERGRNEGLSSGTLSKSSSSGMQSCGEEEGEEGADAVPLPPPMAIQQHSLLQPDSQDDKASSRLLVRPTSSETPSAAELVSAIEELVKSKMALEDRPSSLLVDQGDSSSPSFNPSDNSLLSSSSPIDEMEERKSSSLKRRHYVLQELVETERDYVRDLGYVVEGYMALMKEDGVPDDMKGKDKIVFGNIHQIYDWHRDFFLGELEKCLEDPEKLGSLFVKHERRLHMYIAYCQNKPKSEHIVSEYIDTFFEDLKQRLGHRLQLTDLLIKPVQRIMKYQLLLKDFLKYSKKASLDTSELERAVEVMCIVPRRCNDMMNVGRLQGFDGKIVAQGKLLLQDTFLVTDQDAGLLPRCRERRIFLFEQIVIFSEPLDKKKGFSMPGFLFKNSIKVSCLCLEENVENDPCKFALTSRTGDVVETFILHSSSPSVRQTWIHEINQILENQRNFLNALTSPIEYQRNHSGGGGGGGSGGSGGGGGSGGGGAPSGGSGHSGGPSSCGGAPSTSRSRPSRIPQPVRHHPPVLVSSAASSQAEADKMSGTSTPGPSLPPPGAAPEAGPSAPSRRPPGADAEGSEREAEPIPKMKVLESPRKGAANASGSSPDAPAKDARASLGTLPLGKPRAGAASPLNSPLSSAVPSLGKEPFPPSSPLQKGGSFWSSIPASPASRPGSFTFPGDSDSLQRQTPRHAAPGKDTDRMSTCSSASEQSVQSTQSNGSESSSSSNISTMLVTHDYTAVKEDEINVYQGEVVQILASNQQNMFLVFRAATDQCPAAEGWIPGFVLGHTSAVIVENPDGTLKKSTSWHTALRLRKKSEKKDKDGKREGKLENGYRKSREGLSNKVSVKLLNPNYIYDVPPEFVIPLSEVTCETGETVVLRCRVCGRPKASITWKGPEHNTLNNDGHYSISYSDLGEATLKIVGVTTEDDGIYTCIAVNDMGSASSSASLRVLGPGMDGIMVTWKDNFDSFYSEVAELGRGRFSVVKKCDQKGTKRAVATKFVNKKLMKRDQVTHELGILQSLQHPLLVGLLDTFETPTSYILVLEMADQGRLLDCVVRWGSLTEGKIRAHLGEVLEAVRYLHNCRIAHLDLKPENILVDESLAKPTIKLADFGDAVQLNTTYYIHQLLGNPEFAAPEIILGNPVSLTSDTWSVGVLTYVLLSGVSPFLDDSVEETCLNICRLDFSFPDDYFKGVSQKAKEFVCFLLQEDPAKRPSAALALQEQWLQAGNGRSTGVLDTSRLTSFIERRKHQNDVRPIRSIKNFLQSRLLPRV

SEQ ID NO: 68229 - protein, 2500 aa, Homo sapiens
MLDRLHSTRQHLHQMWHVRKLKLDQCFQLRLFEQDAEKMFDWITHNKGLFLNSYTEIGTSHPHAMELQTQHNHFAMNCMNVYVNINRIMSVANRLVESGHYASQQIRQIASQLEQEWKAFAAALDERSTLLDMSSIFHQKAEKYMSNVDSWCKACGEVDLPSELQDLEDAIHHHQGIYEHITLAYSEVSQDGKSLLDKLQRPLTPGSSDSLTASANYSKAVHHVLDVIHEVLHHQRQLENIWQHRKVRLHQRLQLCVFQQDVQQVLDWIENHGEAFLSKHTGVGKSLHRARALQKRHEDFEEVAQNTYTNADKLLEAAEQLAQTGECDPEEIYQAAHQLEDRIQDFVRRVEQRKILLDMSVSFHTHVKELWTWLEELQKELLDDVYAESVEAVQDLIKRFGQQQQTTLQVTVNVIKEGEDLIQQLRDSAISSNKTPHNSSINHIETVLQQLDEAQSQMEELFQERKIKLELFLQLRIFERDAIDIISDLESWNDELSQQMNDFDTEDLTIAEQRLQHHADKALTMNNLTFDVIHQGQDLLQYVNEVQASGVELLCDRDVDMATRVQDLLEFLHEKQQELDLAAEQHRKHLEQCVQLRHLQAEVKQVLGWIRNGESMLNAGLITASSLQEAEQLQREHEQFQHAIEKTHQSALQVQQKAEAMLQANHYDMDMIRDCAEKVASHWQQLMLKMEDRLKLVNASVAFYKTSEQVCSVLESLEQEYKREEDWCGGADKLGPNSETDHVTPMISKHLEQKEAFLKACTLARRNADVFLKYLHRNSVNMPGMVTHIKAPEQQVKNILNELFQRENRVLHYWTMRKRRLDQCQQYVVFERSAKQALEWIHDNGEFYLSTHTSTGSSIQHTQELLKEHEEFQITAKQTKERVKLLIQLADGFCEKGHAHAAEIKKCVTAVDKRYRDFSLRMEKYRTSLEKALGISSDSNKSSKSLQLDIIPASIPGSEVKLRDAAHELNEEKRKSARRKEFIMAELIQTEKAYVRDLRECMDTYLWEMTSGVEEIPPGIVNKELIIFGNMQEIYEFHNNIFLKELEKYEQLPEDVGHCFVTWADKFQMYVTYCKNKPDSTQLILEHAGSYFDEIQQRHGLANSISSYLIKPVQRITKYQLLLKELLTCCEEGKGEIKDGLEVMLSVPKRANDAMHLSMLEGFDENIESQGELILQESFQVWDPKTLIRKGRERHLFLFEMSLVFSKEVKDSSGRSKYLYKSKLFTSELGVTEHVEGDPCKFALWVGRTPTSDNKIVLKASSIENKQDWIKHIREVIQERTIHLKGALKEPIHIPKTAPATRQKGRRDGEDLDSQGDGSSQPDTISIASRTSQNTLDSDKLSGGCELTVVIHDFTACNSNELTIRRGQTVEVLERPHDKPDWCLVRTTDRSPAAEGLVPCGSLCIAHSRSSMEMEGIFNHKDSLSVSSNDASPPASVASLQPHMIGAQSSPGPKRPGNTLRKWLTSPVRRLSSGKADGHVKKLAHKHKKSREVRKSADAGSQKDSDDSAATPQDETVEERGRNEGLSSGTLSKSSSSGMQSCGEEEGEEGADAVPLPPPMAIQQHSLLQPDSQDDKASSRLLVRPTSSETPSAAELVSAIEELVKSKMALEDRPSSLLVDQGDSSSPSFNPSDNSLLSSSSPIDEMEERKSSSLKRRHYVLQELVETERDYVRDLGYVVEGYMALMKEDGVPDDMKGKDKIVFGNIHQIYDWHRDFFLGELEKCLEDPEKLGSLFVKHERRLHMYIAYCQNKPKSEHIVSEYIDTFFEDLKQRLGHRLQLTDLLIKPVQRIMKYQLLLKDFLKYSKKASLDTSELERAVEVMCIVPRRCNDMMNVGRLQGFDGKIVAQGKLLLQDTFLVTDQDAGLLPRCRERRIFLFEQIVIFSEPLDKKKGFSMPGFLFKNSIKVSCLCLEENVENDPCKFALTSRTGDVVETFILHSSSPSVRQTWIHEINQILENQRNFLNALTSPIEYQRNHSGGGGGGGSGGSGGGGGSGGGGAPSGGSGHSGGPSSCGGAPSTSRSRPSRIPQPVRHHPPVLVSSAASSQAEADKMSGTSTPGPSLPPPGAAPEAGPSAPSRRPPGADAEGSEREAEPIPKMKVLESPRKGAANASGSSPDAPAKDARASLGTLPLGKPRAGAASPLNSPLSSAVPSLGKEPFPPSSPLQKGGSFWSSIPASPASRPGSFTFPGDSDSLQRQTPRHAAPGKDTDRMSTCSSASEQSVQSTQSNGSESSSSSNISTMLVTHDYTAVKEDEINVYQGEVVQILASNQQNMFLVFRAATDQCPAAEGWIPGFVLGHTSAVIVENPDGTLKKSTSWHTALRLRKKSEKKDKDGKREGKLENGYRKSREGLSNKVSVKLLNPNYIYDVPPEFVIPLSEVTCETGETVVLRCRVCGRPKASITWKGPEHNTLNNDGHYSISYSDLGEATLKIVGVTTEDDGIYTCIAVNDMGSASSSASLRVLGPGMDGIMVTWKDNFDSFYSEVAELGRANWNNWSPY

SEQ ID NO: 68230 - protein, 2921 aa, Homo sapiens
MSGSSGGAAAPAASSGPAAAASAAGSGCGGGAGEGAEEAAKDLADIAAFFRSGFRKNDEMKAMDVLPILKEKVAYLSGGRDKRGGPILTFPARSNHDRIRQEDLRRLISYLACIPSEEVCKRGFTVIVDMRGSKWDSIKPLLKILQESFPCCIHVALIIKPDNFWQKQRTNFGSSKFEFETNMVSLEGLTKVVDPSQLTPEFDGCLEYNHEEWIEIRVAFEDYISNATHMLSRLEELQDILAKKELPQDLEGARNMIEEHSQLKKKVIKAPIEDLDLEGQKLLQRIQSSESFPKKNSGSGNADLQNLLPKVSTMLDRLHSTRQHLHQMWHVRKLKLDQCFQLRLFEQDAEKMFDWITHNKGLFLNSYTEIGTSHPHAMELQTQHNHFAMNCMNVYVNINRIMSVANRLVESGHYASQQIRQIASQLEQEWKAFAAALDERSTLLDMSSIFHQKAEKYMSNVDSWCKACGEVDLPSELQDLEDAIHHHQGIYEHITLAYSEVSQDGKSLLDKLQRPLTPGSSDSLTASANYSKAVHHVLDVIHEVLHHQRQLENIWQHRKVRLHQRLQLCVFQQDVQQVLDWIENHGEAFLSKHTGVGKSLHRARALQKRHEDFEEVAQNTYTNADKLLEAAEQLAQTGECDPEEIYQAAHQLEDRIQDFVRRVEQRKILLDMSVSFHTHVKELWTWLEELQKELLDDVYAESVEAVQDLIKRFGQQQQTTLQVTVNVIKEGEDLIQQLRDSAISSNKTPHNSSINHIETVLQQLDEAQSQMEELFQERKIKLELFLQLRIFERDAIDIISDLESWNDELSQQMNDFDTEDLTIAEQRLQHHADKALTMNNLTFDVIHQGQDLLQYVNEVQASGVELLCDRDVDMATRVQDLLEFLHEKQQELDLAAEQHRKHLEQCVQLRHLQAEVKQVLGWIRNGESMLNAGLITASSLQEAEQLQREHEQFQHAIEKTHQSALQVQQKAEAMLQANHYDMDMIRDCAEKVASHWQQLMLKMEDRLKLVNASVAFYKTSEQVCSVLESLEQEYKREEDWCGGADKLGPNSETDHVTPMISKHLEQKEAFLKACTLARRNADVFLKYLHRNSVNMPGMVTHIKAPEQQVKNILNELFQRENRVLHYWTMRKRRLDQCQQYVVFERSAKQALEWIHDNGEFYLSTHTSTGSSIQHTQELLKEHEEFQITAKQTKERVKLLIQLADGFCEKGHAHAAEIKKCVTAVDKRYRDFSLRMEKYRTSLEKALGISSDSNKSSKSLQLDIIPASIPGSEVKLRDAAHELNEEKRKSARRKEFIMAELIQTEKAYVRDLRECMDTYLWEMTSGVEEIPPGIVNKELIIFGNMQEIYEFHNNIFLKELEKYEQLPEDVGHCFVTWADKFQMYVTYCKNKPDSTQLILEHAGSYFDEIQQRHGLANSISSYLIKPVQRITKYQLLLKELLTCCEEGKGEIKDGLEVMLSVPKRANDAMHLSMLEGFDENIESQGELILQESFQVWDPKTLIRKGRERHLFLFEMSLVFSKEVKDSSGRSKYLYKSKLFTSELGVTEHVEGDPCKFALWVGRTPTSDNKIVLKASSIENKQDWIKHIREVIQERTIHLKGALKEPIHIPKTAPATRQKGRRDGEDLDSQGDGSSQPDTISIASRTSQNTLDSDKLSGGCELTVVIHDFTACNSNELTIRRGQTVEVLERPHDKPDWCLVRTTDRSPAAEGLVPCGSLCIAHSRSSMEMEGIFNHKDSLSVSSNDASPPASVASLQPHMIGAQSSPGPKRPGNTLRKWLTSPVRRLSSGKADGHVKKLAHKHKKSREVRKSADAGSQKDSDDSAATPQDETVEERGRNEGLSSGTLSKSSSSGMQSCGEEEGEEGADAVPLPPPMAIQQHSLLQPDSQDDKASSRLLVRPTSSETPSAAELVSAIEELVKSKMALEDRPSSLLVDQGDSSSPSFNPSDNSLLSSSSPIDEMEERKSSSLKRRHYVLQELVETERDYVRDLGYVVEGYMALMKEDGVPDDMKGKDKIVFGNIHQIYDWHRDFFLGELEKCLEDPEKLGSLFVKHERRLHMYIAYCQNKPKSEHIVSEYIDTFFEDLKQRLGHRLQLTDLLIKPVQRIMKYQLLLKDFLKYSKKASLDTSELERAVEVMCIVPRRCNDMMNVGRLQGFDGKIVAQGKLLLQDTFLVTDQDAGLLPRCRERRIFLFEQIVIFSEPLDKKKGFSMPGFLFKNSIKVSCLCLEENVENDPCKFALTSRTGDVVETFILHSSSPSVRQTWIHEINQILENQRNFLNALTSPIEYQRNHSGGGGGGGSGGSGGGGGSGGGGAPSGGSGHSGGPSSCGGAPSTSRSRPSRIPQPVRHHPPVLVSSAASSQAEADKMSESESSSSSNISTMLVTHDYTAVKEDEINVYQGEVVQILASNQQNMFLVFRAATDQCPAAEGWIPGFVLGHTSAVIVENPDGTLKKSTSWHTALRLRKKSEKKDKDGKREGKLENGYRKSREGLSNKVSVKLLNPNYIYDVPPEFVIPLSEVTCETGETVVLRCRVCGRPKASITWKGPEHNTLNNDGHYSISYSDLGEATLKIVGVTTEDDGIYTCIAVNDMGSASSSASLRVLGPGMDGIMVTWKDNFDSFYSEVAELGRGRFSVVKKCDQKGTKRAVATKFVNKKLMKRDQVTHELGILQSLQHPLLVGLLDTFETPTSYILVLEMADQGRLLDCVVRWGSLTEGKIRAHLGEVLEAVRYLHNCRIAHLDLKPENILVDESLAKPTIKLADFGDAVQLNTTYYIHQLLGNPEFAAPEIILGNPVSLTSDTWSVGVLTYVLLSGVSPFLDDSVEETCLNICRLDFSFPDDYFKGVSQKAKEFVCFLLQEDPAKRPSAALALQEQWLQAGNGRSTGVLDTSRLTSFIERRKHQNDVRPIRSIKNFLQSRLLPRV

SEQ ID NO: 68231 - protein, 255 aa, Homo sapiens
MALEDRPSSLLVDQGDSSSPSFNPSDNSLLSSSSPIDEMEERKSSSLKRRHYVLQELVETERDYVRDLGYVVEGYMALMKEDGVPDDMKGKDKIVFGNIHQIYDWHRDFFLGELEKCLEDPEKLGSLFVKHERRLHMYIAYCQNKPKSEHIVSEYIDTFFEDLKQRLGHRLQLTDLLIKPVQRIMKYQLLLKDFLKYSKKASLDTSELERAVEVMCIVPRRCNDMMNVGRLQGFDGRVVALCHRFKETFREICWF

SEQ ID NO: 68232 - protein, 400 aa, Homo sapiens
MNGQLDLSGKLIIKAQLGEDIRRIPIHNEDITYDELVLMMQRVFRGKLLSNDEVTIKYKDEDGDLITIFDSSDLSFAIQCSRILKLTLFVNGQPRPLESSQVKYLRRELIELRNKVNRLLDSLEPPGEPGPSTNIPENDTVDGREEKSASDSSGKQSTQVMAASMSAFDPLKNQDEINKNVMSAFGLTDDQVSGPPSAPAEDRSGTPDSIASSSSAAHPPGVQPQQPPYTGAQTQAGQIEGQMYQQYQQQAGYGAQQPQAPPQQPQQYGIQYSASYSQQTGPQQPQQFQGYGQQPTSQAPAPAFSGQPQQLPAQPPQQYQASNYPAQTYTAQTSQPTNYTVAPASQPGMAPSQPGAYQPRPGFTSLPGSTMTPPPSGPNPYARNRPPFGQGYTQPGPGYR

SEQ ID NO: 68233 - protein, 366 aa, Homo sapiens
MNGQLDLSGKLIIKAQLGEDIRRIPIHNEDITYDELVLMMQRVFRGKLLSNDEVTIKYKDEDGDLITIFDSSDLSFAIQCSRILKLTLFVNGQPRPLESSQVKYLRRELIELRNKVNRLLDSLEPPGEPGPSTNIPENDTVDGREEKSASDSSGKQSTQVMAASMSAFDPLKNQDEINKNVMSAFGLTDDQVSGPPSAPAEDRSGTPDSIASSSSAAHPPGVQPQQPPYTGAQTQAGQMYQQYSNRPAMVHSSRRLHLSSLNSMVFSIQQAIVSRLDLNNLSSSRDMASNQLPRHQLLPFLVSLNNCLLSRHSSTRRAIILHKLTLPKLLSLLIILWLLPLNLEWLQANLGPINQDQVLLHFLEVP

SEQ ID NO: 68234 - protein, 157 aa, Homo sapiens
MNGQLDLSGKLIIKAQLGEDIRRIPIHNEDITYDELVLMMQRVFRGKLLSNDEVTIKYKDEDGDLITIFDSSDLSFAIQCSRILKLTLFVNGQPRPLESSQVKYLRRELIELRNKVNRLLDSLEPPGEPGPSTNIPENDTVDGREEKSASDSSGKQS

SEQ ID NO: 68235 - protein, 128 aa, Homo sapiens
MNGQLDLSGKLIIKAQLGEDIRRIPIHNEDITYDELVLMMQRVFRGKLLSNDEVTIKYKDEDGDLITIFDSSDLSFAIQCSRILKLTLFVNGQPRPLESSQVKYLRRELIELRNKVNRLLDSLEPPGE

SEQ ID NO: 68236 - protein, 181 aa, Homo sapiens
MNGQLDLSGKLIIKAQLGEDIRRIPIHNEDITYDELVLMMQRVFRGKLLSNDEVTIKYKDEDGDLITIFDSSDLSFAIQCSRILKLTLFVNGQPRPLESSQVKYLRRELIELRNKVNRLLDSLEPPGEPGPSTNIPENDTVDGREEKSASDSSGKQSTQVMAASMSAFDPLKNQDEINKNV

SEQ ID NO: 68237 - protein, 400 aa, Homo sapiens; identical to SEQ ID NO: 68232

SEQ ID NO: 68238 - protein, 396 aa, Homo sapiens
MNGQLDLSGKLIIKAQLGEDIRRIPIHNEDITYDELVLMMQRVFRGKLLSNDEVTIKYKDEDGDLITIFDSSDLSFAIQCSRILKLTLFVNGQPRPLESSQVKYLRRELIELRNKVNRLLDSLEPPGEPGPSTNIPENDTVDGREEKSASDSSGKQSTQVMAASMSAFDPLKNQDEINKNVMSAFGLTDDQVSGPPSAPAEDRSGTPDSIASSSSAAHPPGVQPQQPPYTGAQTQAGQMYQQYQQQAGYGAQQPQAPPQQPQQYGIQYSASYSQQTGPQQPQQFQGYGQQPTSQAPAPAFSGQPQQLPAQPPQQYQASNYPAQTYTAQTSQPTNYTVAPASQPGMAPSQPGAYQPRPGFTSLPGSTMTPPPSGPNPYARNRPPFGQGYTQPGPGYR

SEQ ID NO: 68239 - protein, 630 aa, Homo sapiens
MQGSSLWLSLTFRSARVLSRARFFEWQSPGLPNTAAMENGTGPYGEERPREVQETTVTEGAAKIAFPSANEVFYNPVQEFNRDLTCAVITEFARIQLGAKGIQIKVPGEKDTQKVVVDLSEQEEEKVELKESENLASGDQPRTAAVGEICEEGLHVLEGLAASGLRSIRFALEVPGLRSVVANDASTRAVDLIRRNVQLNDVAHLVQPSQADARMLMYQHQRVSERFDVIDLDPYGSPATFLDAAVQAVSEGGLLCVTCTDMAVLAGNSGETCYSKYGAMALKSRACHEMALRIVLHSLDLRANCYQRFVVPLLSISADFYVRVFVRVFTGQAKVKASARAKFSAACGPPVTPECEHCGQRHQLGGPMWAEPIHDLDFVGRVLEAVSANPGRFHTSERIRGVLSVITEELPDVPLYYTLDQLSSTIHCNTPSLLQLRSALLHADFRVSLSHACKNAVKTDAPASALWDIMRCWEKECPVKRERLSETSPAFRILSVEPRLQANFTIREDANPSSRQRGLKRFQANPEANWGPRPRARPGGKAADEAMEERRRLLQNKRKEPPEDVAQRAARLKTFPCKRFKEGTCQRGDQCCYSHSPPTPRVSADAAPDCPETSNQTPPGPGAAAGPGID

SEQ ID NO: 68240 - protein, 659 aa, Homo sapiens
MQGSSLWLSLTFRSARVLSRARFFEWQSPGLPNTAAMENGTGPYGEERPREVQETTVTEGAAKIAFPSANEVFYNPVQEFNRDLTCAVITEFARIQLGAKGIQIKVPGEKDTQKVVVDLSEQEEEKVELKESENLASGDQPRTAAVGEICEEGLHVLEGLAASGLRSIRFALEVPGLRSVVANDASTRAVDLIRRNVQLNDVAHLVQPSQADARMLMYQHQRVSERFDVIDLDPYGSPATFLDAAVQAVSEGGLLCVTCTDMAVLAGNSGETCYSKYGAMALKSRACHEMALRIVLHSLDLRANCYQRFVVPLLSISADFYVRVFVRVFTGQAKVKASASKQALVFQCVGCGAFHLQRLGKASGVPSGRAKFSAACGPPVTPECEHCGQRHQLGGPMWAEPIHDLDFVGRVLEAVSANPGRFHTSERIRGVLSVITEELPDVPLYYTLDQLSSTIHCNTPSLLQLRSALLHADFRVSLSHACKNAVKTDAPASALWDIMRCWEKECPVKRERLSETSPAFRILSVEPRLQANFTIREDANPSSRQRGLKRFQANPEANWGPRPRARPGGKAADEAMEERRRLLQNKRKEPPEDVAQRAARLKTFPCKRFKEGTCQRGDQCCYSHSPPTPRVSADAAPDCPETSNQTPPGPGAAAGPGID

SEQ ID NO: 68241 - protein, 659 aa, Homo sapiens; identical to SEQ ID NO: 68240

SEQ ID NO: 68242 - protein, 625 aa, Homo sapiens
MSENLDNEGPKPMESCGQESSSALSCPTVSVPPAAPAALEEVEKEGAGAATGPGPQPGLYSYIRDDLFTSEIFKLELQNVPRHASFSDVRRFLGRFGLQPHKTKLFGQPPCAFVTFRSAAERDKALRVLHGALWKGRPLSVRLARPKADPMARRRRQEGESEPPVTRVADVVTPLWTVPYAEQLERKQLECEQVLQKLAKEIGSTNRALLPWLLEQRHKHNKACCPLEGVRPSPQQTEYRNKCEFLVGVGVDGEDNTVGCRLGKYKGGTCAVAAPFDTVHIPEATKQVVKAFQEFIRSTPYSAYDPETYTGHWKQLTVRTSRRHQAMAIAYFHPQKLSPEELAELKTSLAQHFTAGPGRASGVTCLYFVEEGQRKTPSQEGLPLEHVAGDRCIHEDLLGLTFRISPHAFFQVNTPAAEVLYTVIQDWAQLDAGSMVLDVCCGTGTIGLALARKVKRVIGVELCPEAVEDARVNAQDNELSNVEFHCGRAEDLVPTLVSRLASQHLVAILDPPRAGLHSKVILAIRRAKNLRRLLYVSCNPRAAMGNFVDLCRAPSNRVKGIPFRPVKAVAVDLFPQTPHCEMLILFERVEHPNGTGVLGPHSPPAQPTPGPPDNTLQETGTFPSS

SEQ ID NO: 68243 - protein, 625 aa, Homo sapiens; identical to SEQ ID NO: 68242

SEQ ID NO: 68244 - protein, 562 aa, Homo sapiens
MSENLDNEGPKPMESCGQESSSALSCPTVSVPPAAPAALEEVEKEGAGAATGPGPQPGLYSYIRDDLFTSEIFKLELQNVPRHASFSDVRRFLGRFGLQPHKTKLFGQPPCAFVTFRSAAERDKALRVLHGALWKGRPLSVRLARPKADPMARRRRQEGESEPPVTRVADVVTPLWTVPYAEQLERKQLECEQVLQKLAKEIGSTNRALLPWLLEQRHKHNKACCPLEGVRPSPQQTEYRNKCEFLVGVGVDGEDNTVGCRLGKYKGGTCAVAAPFDTVHIPEATKQVVKAFQEFIRSTPYSAYDPETYTGHWKQLTVRTSRRHQAMAIAYFHPQKLSPEELAELKTSLAQHFTAGPGRASGVTCLYFVEEGQRKTPSQEGLPLEHVAGDRCIHEDLLGLTFRISPHAFFQVNTPAAEVLYTVIQDWAQLDAGSMVLDVCCGTGTIGLALARKVKRVIGVELCPEAVEDARVNAQDNELSNVEFHCGRAEDLVPTLVSRLASQHLVAILDPPRAGLHSKVILAIRRAKNLRRLLYVSCNPRAAMGNFVDAPLFPPQPLQSPI

SEQ ID NO: 68245 - protein, 509 aa, Homo sapiens
MVLWILWRPFGFSGRFLKLESHSITESKSLIPVAWTSLTQMLLEAPGIFLLGQRKRFSTMPETETHERETELFSPPSDVRGMTKLDRTAFKKTVNIPVLKVRKEIVSKLMRSLKRAALQRPGIRRVIEDPEDKESRLIMLDPYKIFTHDSFEKAELSVLEQLNVSPQISKYNLELTYEHFKSEEILRAVLPEGQDVTSGFSRIGHIAHLNLRDHQLSFKHLIGQVMIDKNPGITSAVNKINNIDNMYRNFQMEVLSGEQNMMTKVRENNYTYEFDFSKVYWNPRLSTEHSRITELLKPGDVLFDVFAGVGPFAIPVAKKNCTVFANDLNPESHKWLLYNCKLNKVDQKVKVFNLDGKDFLQGPVKEELMQLLGLSKERKPSVHVVMNLPAKAIEFLSAFKWLLDGQPCSSEFLPIVHCYSFSKDANPAEDVRQRAGAVLGISLEACSSVHLVRNVAPNKEMLCITFQIPASVLYKNQTRNPENHEDPPLKRQRTAEAFSDEKTQIVSNT

SEQ ID NO: 68246 - protein, 421 aa, Homo sapiens
MQALRHVVCALSGGVDSAVAALLLRRRGYQVTGVFMKNWDSLDEHGVCTADKDCEDAYRVCQILDIPFHQVSYVKEYWNDVFSDFLNEYEKGRTPNPDIVCNKHIKFSCFFHYAVDNLGADAIATGHYARTSLEDEEVFEQKHVKKPEGLFRNRFEVRNAVKLLQAADSFKDQTFFLSQVSQDALRRTIFPLGGLTKEFVKKIAAENRLHHVLQKKESMGMCFIGKRNFEHFLLQYLQPRPGHFISIEDNKVLGTHKGWFLYTLGQRANIGGLREPWYVVEKDSVKGDVFVAPRTDHPALYRDLLRTSRVHWIAEEPPAALVRDKMMECHFRFRHQMALVPCVLTLNQDGTVWVTAVQAVRALATGQFAVFYKGDECLGSGKILRLGPSAYTLQKGQRRAGMATESPSDSPEDGPGLSPLL

SEQ ID NO: 68247 - protein, 99 aa, Homo sapiens
MQALRHVVCALSGGVDSAVAALLLRRRGYQVTGVFMKNWDSLDEHGVCTADKDCEDAYRVCQILDIPFHQVSYVKEYWNDVFRGRCHCHRSLCKNFPGR

SEQ ID NO: 68248 - protein, 131 aa, Homo sapiens
MKNWDSLDEHGVCTADKDCEDAYRVCQILDIPFHQVSYVKEYWNDVFSDFLNEYEKGRTPNPDIVCNKHIKFSCFFHYAVDNLGADAIATGHYARTSLEDEEVFEQKHVKKPEGLFRNRFEVRNARFPRMP

SEQ ID NO: 68249 - protein, 99 aa, Homo sapiens; identical to SEQ ID NO: 68247

SEQ ID NO: 68250 - protein, 99 aa, Homo sapiens; identical to SEQ ID NO: 68247

SEQ ID NO: 68251 - protein, 99 aa, Homo sapiens; identical to SEQ ID NO: 68247

SEQ ID NO: 68252 - protein, 166 aa, Homo sapiens
MQALRHVVCALSGGVDSAVAALLLRRRGYQVTGVFMKNWDSLDEHGVCTADKDCEDAYRVCQILDIPFHQVSYVKEYWNDVFSDFLNEYEKGRTPNPDIVCNKHIKFSCFFHYAVDNLGADAIATGHYARTSLEDEEVFEQKHVKKPEGLFRNRFEVRNARFPRMP

SEQ ID NO: 68253 - protein, 345 aa, Homo sapiens
MEPLRVLELYSGVGGMHHALRESCIPAQVVAAIDVNTVANEVYKYNFPHTQLLAKTIEGITLEEFDRLSFDMILMSPPCQPFTRDLLIQTIENCGFQYQEFLLSPTSLGIPNSRLRYFLIAKLQSEPLPFQAPGQVLMEFPKIESVHPQKYAMDVENKIQEKNVEPNISFDGSIQCSGKDAILFKLETAEEIHRKNQQDSDLSVKMLKDFLEDDTDVNQYLLPPKSLLRYALLLDIVQPTCRRSVCFTKGYGSYIEGTGSVLQTAEDVQVENIYKSLTNLSQEEQITKLLILKLRYFTPKEIANLLGFPPEFGFPEKITVKQRYRLLGNSLNVHVVAKLIKILYE

SEQ ID NO: 68254 - protein, 71 aa, Homo sapiens
MEPLRVLELYSGVGGMHHALRESCIPAQVVAAIDVNTVANEVYKYNFPHTQLLAKTIEITKITKVYSFGKC

SEQ ID NO: 68255 - protein, 117 aa, Homo sapiens
MEPLRVLELYSGVGGMHHALRESCIPAQVVAAIDVNTVANEVYKYNFPHTQLLAKTIERPLDTNNRKLWLSVPRVSIISNLSWHSKFKATIFSYCKASVRAITLSSPWSGTDGVPQN

SEQ ID NO: 68256 - protein, 391 aa, Homo sapiens
MEPLRVLELYSGVGGMHHALRESCIPAQVVAAIDVNTVANEVYKYNFPHTQLLAKTIEGITLEEFDRLSFDMILMSPPCQPFTRIGRQGDMTDSRTNSFLHILDILPRLQKLPKYILLENVKGFEVSSTRDLLIQTIENCGFQYQEFLLSPTSLGIPNSRLRYFLIAKLQSEPLPFQAPGQVLMEFPKIESVHPQKYAMDVENKIQEKNVEPNISFDGSIQCSGKDAILFKLETAEEIHRKNQQDSDLSVKMLKDFLEDDTDVNQYLLPPKSLLRYALLLDIVQPTCRRSVCFTKGYGSYIEGTGSVLQTAEDVQVENIYKSLTNLSQEEQITKLLILKLRYFTPKEIANLLGFPPEFGFPEKITVKQRYRLLGNSLNVHVVAKLIKILYE

SEQ ID NO: 68257 - protein, 367 aa, Homo sapiens
MEPLRVLELYSGVGGMHHALRESCIPAQVVAAIDVNTVANEVYKYNFPHTQLLAKTIEGITLEEFDRLSFDMILMSPPCQPFTRLQKLPKYILLENVKGFEVSSTRDLLIQTIENCGFQYQEFLLSPTSLGIPNSRLRYFLIAKLQSEPLPFQAPGQVLMEFPKIESVHPQKYAMDVENKIQEKNVEPNISFDGSIQCSGKDAILFKLETAEEIHRKNQQDSDLSVKMLKDFLEDDTDVNQYLLPPKSLLRYALLLDIVQPTCRRSVCFTKGYGSYIEGTGSVLQTAEDVQVENIYKSLTNLSQEEQITKLLILKLRYFTPKEIANLLGFPPEFGFPEKITVKQRYRLLGNSLNVHVVAKLIKILYE

SEQ ID NO: 68258 - protein, 310 aa, Homo sapiens
MSTLSLMKYTSIIFLTHSYLPRRLKIGRQGDMTDSRTNSFLHILDILPRDLLIQTIENCGFQYQEFLLSPTSLGIPNSRLRYFLIAKLQSEPLPFQAPGQVLMEFPKIESVHPQKYAMDVENKIQEKNVEPNISFDGSIQCSGKDAILFKLETAEEIHRKNQQDSDLSVKMLKDFLEDDTDVNQYLLPPKSLLRYALLLDIVQPTCRRSVCFTKGYGSYIEGTGSVLQTAEDVQVENIYKSLTNLSQEEQITKLLILKLRYFTPKEIANLLGFPPEFGFPEKITVKQRYRLLGNSLNVHVVAKLIKILYE

SEQ ID NO: 68259 - protein, 434 aa, Homo sapiens
MLRCLYHWHRPVLNRRWSRLCLPKQYLFTMKLQSPEFQSLFTEGLKSLTELFVKENHELRIAGGAVRDLLNGVKPQDIDFATTATPTQMKEMFQSAGIRMINNRGEKHGTITARLHEENFEITTLRIDVTTDGRHAEVEFTTDWQKDAERRDLTINSMFLGFDGTLFDYFNGYEDLKNKKVRFVGHAKQRIQEDYLRILRYFRFYGRIVDKPGDHDPETLEAIAENAKGLAGISGERIWVELKKILVGNHVNHLIHLIYDLDVAPYIGLPANASLEEFDKVSKNVDGFSPKPVTLLASLFKVQDDVTKLDLRLKIAKEEKNLGLFIVKNRKDLIKATDSSDPLKPYQDFIIDSREPDATTRVCELLKYQGEHCLLKEMQQWSIPPFPVSGHDIRKVGISSGKEIGALLQQLREQWKKSGYQMEKDELLSYIKKT

SEQ ID NO: 68260 - protein, 414 aa, Homo sapiens
MLRCLYHWHRPVLNRRWSRLCLPKQYLFTMKLQSPEFQSLFTEGLKSLTELFVKENHELRIAGGAVRDLLNGVKPQDIDFATTATPTQMKEMFQSAGIRMINNRGEKHGTITARLHEENFEITTLRIDVTTDGRHAEVEFTTDWQKDAERRDLTINSMFLGFDGTLFDYFNGYEDLKNKKVRFVGHAKQRIQEDYLRILRYFRFYGRIVDKPGDHDPETLEAIAENAKGLAGISGERIWVELKKILVGLPANASLEEFDKVSKNVDGFSPKPVTLLASLFKVQDDVTKLDLRLKIAKEEKNLGLFIVKNRKDLIKATDSSDPLKPYQDFIIDSREPDATTRVCELLKYQGEHCLLKEMQQWSIPPFPVSGHDIRKVGISSGKEIGALLQQLREQWKKSGYQMEKDELLSYIKKT

SEQ ID NO: 68261 - protein, 57 aa, Homo sapiens
MLRCLYHWHRPVLNRRWSRLCLPKQYLFTMKLQSPEFQSLFTEGLKSLTGINAFHEN

SEQ ID NO: 68262 - protein, 57 aa, Homo sapiens; identical to SEQ ID NO: 68261

SEQ ID NO: 68263 - protein, 62 aa, Homo sapiens
MLRCLYHWHRPVLNRRWSRLCLPKQYLFTMKLQSPEFQSLFTEGLKSLTELFVKENHELRIA

SEQ ID NO: 68264 - protein, 57 aa, Homo sapiens; identical to SEQ ID NO: 68261

SEQ ID NO: 68265 - protein, 434 aa, Homo sapiens; identical to SEQ ID NO: 68259

SEQ ID NO: 68266 - protein, 253 aa, Homo sapiens
MNFSGGGRQEAAGSRGRRAPRPREQDRDVQLSKALSYALRHGALKLGLPMGADGFVPLGTLLQLPQFRGFSAEDVQRVVDTNRKQRFALQLGDPSTGLLIRANQGHSLQVPKLELMPLETPQALPPMLVHGTFWKHWPSILLKGLSCQGRTHIHLAPGLPGDPGIISGMRSHCEIAVFIDGPLALADGIPFFRSANGVILTPGNTDGFLLPKYFKEALQLRPTRKPLSLAGDEETECQSSPKHSSRERRRIQQ

SEQ ID NO: 68267 - protein, 255 aa, Homo sapiens
MNFSGGGRQEAAGSRGRRAPRPREQDRDVQLSKALSYALRHGALKLGLPMGADGFVPLGTLLQLPQFRGFSAEDVQRVVDTNRKQRFALQLGDPSTGLLIRANQGHSLQVGVPKLELMPLETPQALPPMLVHGTFWKHWPSILLKGLSCQGRTHIHLAPGLPGDPGIISGMRSHCEIAVFIDGPLALADGIPFFRSANGVILTPGNTDGFLLPKYFKEALQLRPTRKPLSLAGDEETECQSSPKHSSRERRRIQQ

SEQ ID NO: 68268 - protein, 204 aa, Homo sapiens
MGADGFVPLGTLLQLPQFRGFSAEDVQRVVDTNRKQRFALQLGDPSTGLLIRANQGHSLQVPKLELMPLETPQALPPMLVHGTFWKHWPSILLKGLSCQGRTHIHLAPGLPGDPGIISGMRSHCEIAVFIDGPLALADGIPFFRSANGVILTPGNTDGFLLPKYFKEALQLRPTRKPLSLAGDEETECQSSPKHSSRERRRIQQ

SEQ ID NO: 68269 - protein, 216 aa, Homo sapiens
MNFSGGGRQEAAGSRGRRAPRPREQDRDVQLSKALSYALRHGALKLGLPMGADGFVPLGTLLQLPQFRGFSAEDVQRVVDTNRKQRFALQLGDPSTGLLIRANQGHSLQVPKLELMPLETPQALPPMLVHGTFWKHWPSILLKGLSCQGRTHIHLAPGLPGDPGIISGMRSHCEIAVFIDGPLALAGKPLSLAGDEETECQSSPKHSSRERRRIQQ

SEQ ID NO: 68270 - protein, 167 aa, Homo sapiens
MGADGFVPLGTLLQLPQFRGFSAEDVQRVVDTNRKQRFALQLGDPSTGLLIRANQGHSLQVPKLELMPLETPQALPPMLVHGTFWKHWPSILLKGLSCQGRTHIHLAPGLPGDPGIISGMRSHCEIAVFIDGPLALAGKPLSLAGDEETECQSSPKHSSRERRRIQQ

SEQ ID NO: 68271 - protein, 171 aa, Homo sapiens
MEERGDSEPTPGCSGLGPGGVRGFGDGGGAPSWAPEDAWMGTHPKYLEMMELDIGDATQVYVAFLVYLDLMESKSWHEVNCVGLPELQLICLVGTEIEGEGLQTVVPTPITASLSHNRIREILKASRKLQGDPDLPMSFTLAIVESDSTIVYYKLTDGFMLPDPQNISLRR

SEQ ID NO: 68272 - protein, 129 aa, Homo sapiens
MEERGDSEPTPGCSGLGPGGVRGFGDGGGAPSWAPEDAWMGTHPKYLEMMELDIGDATQVYVAFLVYLDLMESKSWHEVNCVGLPELQLICLVGTEIEGEGLQTVVPTPITASLSHNRIFLLEDDIHVS

SEQ ID NO: 68273 - protein, 465 aa, Homo sapiens
MAEAVFHAPKRKRRVYETYESPLPIPFGQDHGPLKEFKIFRAEMINNNVIVRNAEDIEQLYGKGYFGKGILSRSRPSFTISDPKLVAKWKDMKTNMPIITSKRYQHSVEWAAELMRRQGQDESTVRRILKDYTKPLEHPPVKRNEEAQVHDKLNSGMVSNMEGTAGGERPSVVNGDSGKSGGVGDPREPLGCLQEGSGCHPTTESFEKSVREDASPLPHVCCCKQDALILQRGLHHEDGSQHIGLLHPGDRGPDHEYVLVEEAECAMSEREAAPNEELVQRNRLICRRNPYRIFEYLQLSLEEAFFLVYALGCLSIYYEKEPLTIVKLWKAFTVVQPTFRTTYMAYHYFRSKGWVPKVGLKYGTDLLLYRKGPPFYHASYSVIIELVDDHFEGSLRRPLSWKSLAALSRVSVNVSKELMLCYLIKPSTMTDKEMESPECMKRIKVQEVILSRWVSSRERSDQDDL

SEQ ID NO: 68274 - protein, 439 aa, Homo sapiens
MAEAVFHAPKRKRRVYETYESPLPIPFGQDHGPLKEFKIFRAEMINNNVIVRNAEDIEQLYGKGYFGKGILSRSRPSFTISDPKLVAKWKDMKTNMPIITSKRYQHSVEWAAELMRRQGQDESTVRRILKDYTKPLEHPPVKRNEEAQVHDKLNSGMVSNMEGTAGGERPSVVNGDSGKSGGVGDPREPLGCLQEGSGCHPTTESFEKSVREDASPLPHVCCCKQDALILQRGLHHEDGSQHIGLLHPGDRGPDHEYVLVEEAECAMSEREAAPNEEAFFLVYALGCLSIYYEKEPLTIVKLWKAFTVVQPTFRTTYMAYHYFRSKGWVPKVGLKYGTDLLLYRKGPPFYHASYSVIIELVDDHFEGSLRRPLSWKSLAALSRVSVNVSKELMLCYLIKPSTMTDKEMESPECMKRIKVQEVILSRWVSSRERSDQDDL

SEQ ID NO: 68275 - protein, 448 aa, Homo sapiens
MAEAVFHAPKRKRRVYETYESPLPIPFGQDHGPLKEFKIFRAEMINNNVIVRNAEDIEQLYGKGYFGKGILSRSRPSFTISDPKLVAKWKDMKTNMPIITSKRYQHSVEWAAELMRRQGQDESTVRRILKDYTKPLEHPPVKRNEEAQVHDKLNSGMVSNMEGTAGGERPSVVNGDSGKSGGVGDPREPLGCLQEGSGCHPTTESFEKSVREDASPLPHVCCCKQDALILQRGLHHEDGSQHIGLLHPGDRGPDHEYVLVEEAECAMSEREAAPNEELVQRNRLICRRNPYRIFEYLQLSLEEEPLTIVKLWKAFTVVQPTFRTTYMAYHYFRSKGWVPKVGLKYGTDLLLYRKGPPFYHASYSVIIELVDDHFEGSLRRPLSWKSLAALSRVSVNVSKELMLCYLIKPSTMTDKEMESPECMKRIKVQEVILSRWVSSRERSDQDDL

SEQ ID NO: 68276 - protein, 465 aa, Homo sapiens; identical to SEQ ID NO: 68273

SEQ ID NO: 68277 - protein, 439 aa, Homo sapiens; identical to SEQ ID NO: 68274

SEQ ID NO: 68278 - protein, 402 aa, Homo sapiens
MAEAVFHAPKRKRRVYETYESPLPIPFGQDHGPLKEFKIFRAEMINNNVIVRNAEDIEQLYGKGYFGKGILSRSRPSFTISDPKLVAKWKDMKTNMPIITSKRYQHSVEWAAELMRRQGQDESTVRRILKDYTKPLEHPPVKRNEEAQVHDKLNSGMVSNMEGTAGGERPSVVNGDSGKSGGVGDPREPLGCLQEGSGCHPTTESFEKSVREDASPLPHVCCCKQDALILQRGLHHEDGSQHIGLLHPGDRGPDHEYVLVEEAECAMSEREAAPNEEAFFLVYALGCLSIYYEKEPLTIVKLWKAFTVVQPTFRTTYMAYHYFRSKGWVPKVGLKYGTDLLLYRKGPPFYHASYSVIIELVDDHFEGSLRRPLSWKSLAALSRVSVNVSKVTQHQLCHWSVT

SEQ ID NO: 68279 - protein, 378 aa, Homo sapiens
MAEAVFHAPKRKRRVYETYESPLPIPFGQDHGPLKEFKIFRAEMINNNVIVRNAEDIEQLYGKGYFGKGILSRSRPSFTISDPKLVAKWKDMKTNMPIITSKRYQHSVEWAAELMRRQGQDESTVRRILKDYTKPLEHPPVKRNEEAQVHDKLNSGMVSNMEGTAGGERPSVVNGDSGKSGGVGDPREPLGCLQEGSGCHPTTESFEKSVREDASPLPHVCCCKQDALILQRGLHHEDGSQHIGLLHPGDRGPDHEYVLVEEAECAMSEREAAPNEELVQRNRLICRRNPYRIFEYLQLSLEEAFFLVYALGCLSIYYEKEPLTIVKLWKAFTVVQPTFRTTYMAYHYFRSKGWVPKVGLKYGTDLLLYRKGPPFYHA

SEQ ID NO: 68280 - protein, 438 aa, Homo sapiens
MAEAVFHAPKRKRRVYETYESPLPIPFGQDHGPLKEFKIFRAEMINNNVIVRNAEDIEQLYGKDMKTNMPIITSKRYQHSVEWAAELMRRQGQDESTVRRILKDYTKPLEHPPVKRNEEAQVHDKLNSGMVSNMEGTAGGERPSVVNGDSGKSGGVGDPREPLGCLQEGSGCHPTTESFEKSVREDASPLPHVCCCKQDALILQRGLHHEDGSQHIGLLHPGDRGPDHEYVLVEEAECAMSEREAAPNEELVQRNRLICRRNPYRIFEYLQLSLEEAFFLVYALGCLSIYYEKEPLTIVKLWKAFTVVQPTFRTTYMAYHYFRSKGWVPKVGLKYGTDLLLYRKGPPFYHASYSVIIELVDDHFEGSLRRPLSWKSLAALSRVSVNVSKELMLCYLIKPSTMTDKEMESPECMKRIKVQEVILSRWVSSRERSDQDDL

SEQ ID NO: 68281 - protein, 406 aa, Homo sapiens
MAEAVFHAPKRKRRVYETYESPLPIPFGQDHGPLKEFKIFRAEMINNNVIVRNAEDIEQLYGKGYFGKGILSRSRPSFTISDPKLVAKWKDMKTNMPIITSKRYQHSVEWAAELMRRQGQDESTVRRILKDYTKPLEHPPVKRNEEAQVHDKLNSGMVSNMEGTAGGERPSVRGLHHEDGSQHIGLLHPGDRGPDHEYVLVEEAECAMSEREAAPNEELVQRNRLICRRNPYRIFEYLQLSLEEAFFLVYALGCLSIYYEKEPLTIVKLWKAFTVVQPTFRTTYMAYHYFRSKGWVPKVGLKYGTDLLLYRKGPPFYHASYSVIIELVDDHFEGSLRRPLSWKSLAALSRVSVNVSKELMLCYLIKPSTMTDKEMESPECMKRIKVQEVILSRWVSSRERSDQDDL

SEQ ID NO: 68282 - protein, 310 aa, Homo sapiens
MLVVEVANGRSLVWGAEAVQALRERLGVGGRTVGALPRGPRQNSRLGLPLLLMPEEARLLAEIGAVTLVSAPRPDSRHHSLALTSFKRQQEESFQEQSALAAEARETRRQELLEKITEGQAAKKQKLEQASGASSSQEAGSSQAAKEDETSDGQASGEQEEAGPSSSQAGPSNGVAPLPRSALLVQLATARPRPVKARPLDWRVQSKDWPHAGRPAHELRYSIYRDLWERGFFLSAAGKFGGDFLVYPGDPLRFHAHYIAQCWAPEDTIPLQDLVAAGRLGTSVRKTLLLCSPQPDGKVVYTSLQWASLQ

SEQ ID NO: 68283 - protein, 310 aa, Homo sapiens; identical to SEQ ID NO: 68282

SEQ ID NO: 68284 - protein, 310 aa, Homo sapiens; identical to SEQ ID NO: 68282

SEQ ID NO: 68285 - protein, 312 aa, Homo sapiens
MLVVEVANGRSLVWGAEAVQALRERLGVGGRTVGALPRGPRQNSRLGLPLLLMPEEARLLAEIGAVTLVSAPRPDSRHHSLALTSFKRQQEESFQEQSALAAEARETRRQELLEKITEGQAAKKQKLEQASGASSSQEAGSSQAAKEDETSDGQASGEQEEAGPSSSQAGPSNGVAPLPRSALLVQLATARPRPVKARPLDWRVQSKDWPHAGRPAHELRYSIYRDLWERGFFLSAAGKFGGDFLVYPGDPLRFHAHYIAQCWAPEDTIPLQDLVAAGRLGTSVRKTLLLCSPQPDGFKSQEVSINLVYKCS

SEQ ID NO: 68286 - protein, 242 aa, Homo sapiens
MLVVEVANGRSLVWGAEAVQALRERLGVGGRTVGALPRGPRQNSRLGLPLLLMPEEARLLAEIGAVTLVSAPRPDSRHHSLALTSFKRQQEESFQEQSALAAEARETRRQELLEKITEGQAAKKQKLEQASGASSSQEAGSSQAAKEDETSDGQASGEQEEAGPSSSQAGPSNGVAPLPRSALLVQLATARPRPVKARPLDWRVQSKDWPHAGRPAHELRYSIYRDLWERGFFLSAAGKFGG

SEQ ID NO: 68287 - protein, 526 aa, Homo sapiens
MEPEPEPAAVEVPAGRVLSARELFAARSRSQKLPQRSHGPKDFLPDGSAAQAERLRRCREELWQLLAEQRVERLGSLVAAEWRPEEGFVELKSPAGKFWQTMGFSEQGRQRLHPEEALYLLECGSIHLFHQDLPLSIQEAYQLLLTDHTVTFLQYQVFSHLKRLGYVVRRFQPSSVLSPYERQLNLDASVQHLEDGDGKRKRSSSSPRSINKKAKALDNSLQPKSLAASSPPPCSQPSQCPEEKPQESSPMKGPGGPFQLLGSLGPSPGPAREGVGCSWESGRAENGVTGAGKRRWNFEQISFPNMASDSRHTLLRAPAPELLPANVAGRETDAESWCQKLNQRKEKLSRREREHHAEAAQFQEDVNADPEVQRCSSWREYKELLQRRQVQRSQRRAPHLWGQPVTPLLSPGQASSPAVVLQHISVLQTTHLPDGGARLLEKSGGLEIIFDVYQADAVATFRKNNPGKPYARMCISGFDEPVPDLCSLKRLSYQSGDVPLIFALVDHGDISFYSFRDFTLPQDVGH

SEQ ID NO: 68288 - protein, 197 aa, Homo sapiens
MGFSEQGRQRLHPEEALYLLECGSIHLFHQDLPLSIQEAYQLLLTDHTVTFLQYQVFSHLKRLGYVVRRFQPSSVLSPYERQLNLDASVQHLEDGDGKRKRSSSSPRSINKKAKALDNSLQPKSLAASSPPSGTSRCPRMWGTDLTALQRMELAPGDRDCLFSGTISAASCTQTLTCSFRGQSGPWPWVSDTHRVKL

SEQ ID NO: 68289 - protein, 177 aa, Homo sapiens
MEPEPEPAAVEVPAGRVLSARELFAARSRSQKLPQRSHGPKDFLPDGSAAQAERLRRCREELWQLLAEQRVERLGSLVAAEWRPEEGFVELKSPAGKFWQTMGFSEQGRQRLHPEEALYLLECGSIHLFHQDLPLSIQEAYQLLLTDHTVTFLQYQPPEEVGLCGSTIPTKLCPVPV

SEQ ID NO: 68290 - protein, 1431 aa, Homo sapiens
MDRRNDYGYRVPLFQGPLPPPGSLGLPFPPDIQTETTEEDSVLLMHTLLAATKDSLAMDPPVVNRPKKSKTKKAPIKTITKAAPAAPPVPAANEIATNKPKITWQALNLPVITQISQALPTTEVTNTQASSVTAQPKKANKMKRVTAKAAQGSQSPTGHEGGTIQLKSPLQVLKLPVISQNIHAPIANESASSQALITSIKPKKASKAKKAANKAIASATEVSLAATATHTATTQGQITNETASIHTTAASIRTKKASKARKTIAKVINTDTEHIEALNVTDAATRQIEASVVAIRPKKSKGKKAASRGPNSVSEISEAPLATQIVTNQALAATLRVKRGSRARKAATKARATESQTPNADQGAQAKIASAQTNVSALETQVAAAVQALADDYLAQLSLEPTTRTRGKRNRKSKHLNGDERSGSNYRRIPWGRRPAPPRDVAILQERANKLVKYLLVKDQTKIPIKRSDMLRDVIQEYDEYFPEIIERASYTLEKMFRVNLKEIDKQSSLYILISTQESSAGILGTTKDTPKLGLLMVILSVIFMNGNKASEAVIWEVLRKLGLRPGVRHSLFGEVRKLITDEFVKQKYLEYKRVPNSRPPEYEFFWGLRSYHETSKMKVLKFACRVQKKDPKDWAVQYREAVEMEVQAAAVAVAEAEARAEARAQMGIGEEAVAGPWNWDDMDIDCLTREELGDDAQAWSRFSFEIEARAQENADASTNVNFSRGASTRAGFSDGASISFNGAPSSSGGFSGGPGITFGVAPSTSASFSNTASISFGGTLSTSSSFSSAASISFGCAHSTSTSFSSEASISFGGMPCTSASFSGGVSSSFSGPLSTSATFSGGASSGFGGTLSTTAGFSGVLSTSTSFGSAPTTSTVFSSALSTSTGFGGILSTSVCFGGSPSSSGSFGGTLSTSICFGGSPCTSTGFGGTLSTSVSFGGSSSTSANFGGTLSTSICFDGSPSTGAGFGGALNTSASFGSVLNTSTGFGGAMSTSADFGGTLSTSVCFGGSPGTSVSFGSALNTNAGYGGAVSTNTDFGGTLSTSVCFGGSPSTSAGFGGALNTNASFGCAVSTSASFSGAVSTSACFSGAPITNPGFGGAFSTSAGFGGALSTAADFGGTPSNSIGFGAAPSTSVSFGGAHGTSLCFGGAPSTSLCFGSASNTNLCFGGPPSTSACFSGATSPSFCDGPSTSTGFSFGNGLSTNAGFGGGLNTSAGFGGGLGTSAGFSGGLSTSSGFDGGLGTSAGFGGGPGTSTGFGGGLGTSAGFSGGLGTSAGFGGGLVTSDGFGGGLGTNASFGSTLGTSAGFSGGLSTSDGFGSRPNASFDRGLSTIIGFGSGSNTSTGFTGEPSTSTGFSSGPSSIVGFSGGPSTGVGFCSGPSTSGFSGGPSTGAGFGGGPNTGAGFGGGPSTSAGFGSGAASLGACGFSYG

SEQ ID NO: 68291 - protein, 706 aa, Homo sapiens
MDRRNDYGYRVPLFQGPLPPPGSLGLPFPPDIQTETTEEDSVLLMHTLLAATKDSLAMDPPVVNRPKKSKTKKAPIKTITKAAPAAPPVPAANEIATNKPKITWQALNLPVITQISQALPTTEVTNTQASSVTAQPKKANKMKRVTAKAAQGSQSPTGHEGGTIQLKSPLQVLKLPVISQNIHAPIANESASSQALITSIKPKKASKAKKAANKAIASATEVSLAATATHTATTQGQITNETASIHTTAASIRTKKASKARKTIAKVINTDTEHIEALNVTDAATRQIEASVVAIRPKKSKGKKAASRGPNSVSEISEAPLATQIVTNQALAATLRVKRGSRARKAATKARATESQTPNADQGAQAKIASAQTNVSALETQVAAAVQALADDYLAQLSLEPTTRTRGKRNRKSKHLNGDERSGSNYRRIPWGRRPAPPRDVAILQERANKLVKYLLVKDQTKIPIKRSDMLRDVIQEYDEYFPEIIERASYTLEKMFRVNLKEIDKQSSLYILISTQESSAGILGTTKDTPKLGLLMVILSVIFMNGNKASEAVIWEVLRKLGLRPGVRHSLFGEVRKLITDEFVKQKYLEYKRVPNSRPPEYEFFWGLRSYHETSKMKVLKFACRVQKKDPKDWAVQYREAVEMEVQAAAVAVAEAEARAEIYSPCLQIPLINCSSPSHGAKVHPWNLCPHSSQGSYGQSAEGVM

SEQ ID NO: 68292 - protein, 357 aa, Homo sapiens
MDRRNDYGYRVPLFQSKHLNGDERSGSNYRRIPWGRRPAPPRDVAILQERANKLVKYLLVKDQTKIPIKRSDMLRDVIQEYDEYFPEIIERASYTLEKMFRVNLKEIDKQSSLYILISTQESSAGILGTTKDTPKLGLLMVILSVIFMNGNKASEAVIWEVLRKLGLRPGVRHSLFGEVRKLITDEFVKQKYLEYKRVPNSRPPEYEFFWGLRSYHETSKMKVLKFACRVQKKDPKDWAVQYREAVEMEVQLQLWLWLRLKPGLSGSNTSTGFTGEPSTSTGFSSGPSSIVGFSGGPSTGVGFCSGPSTSGFSGGPSTGAGFGGGPNTGAGFGGGPSTSAGFGSGAASLGACGFSYG

SEQ ID NO: 68293 - protein, 706 aa, Homo sapiens; identical to SEQ ID NO: 68291

SEQ ID NO: 68294 - protein, 1034 aa, Homo sapiens
MDRRNDYGYRVPLFQSKHLNGDERSGSNYRRIPWGRRPAPPRDVAILQERANKLVKYLLVKDQTKIPIKRSDMLRDVIQEYDEYFPEIIERASYTLEKMFRVNLKEIDKQSSLYILISTQESSAGILGTTKDTPKLGLLMVILSVIFMNGNKASEAVIWEVLRKLGLRPGVRHSLFGEVRKLITDEFVKQKYLEYKRVPNSRPPEYEFFWGLRSYHETSKMKVLKFACRVQKKDPKDWAVQYREAVEMEVQAAAVAVAEAEARAEARAQMGIGEEAVAGPWNWDDMDIDCLTREELGDDAQAWSRFSFEIEARAQENADASTNVNFSRGASTRAGFSDGASISFNGAPSSSGGFSGGPGITFGVAPSTSASFSNTASISFGGTLSTSSSFSSAASISFGCAHSTSTSFSSEASISFGGMPCTSASFSGGVSSSFSGPLSTSATFSGGASSGFGGTLSTTAGFSGVLSTSTSFGSAPTTSTVFSSALSTSTGFGGILSTSVCFGGSPSSSGSFGGTLSTSICFGGSPCTSTGFGGTLSTSVSFGGSSSTSANFGGTLSTSICFDGSPSTGAGFGGALNTSASFGSVLNTSTGFGGAMSTSADFGGTLSTSVCFGGSPGTSVSFGSALNTNAGYGGAVSTNTDFGGTLSTSVCFGGSPSTSAGFGGALNTNASFGCAVSTSASFSGAVSTSACFSGAPITNPGFGGAFSTSAGFGGALSTAADFGGTPSNSIGFGAAPSTSVSFGGAHGTSLCFGGAPSTSLCFGSASNTNLCFGGPPSTSACFSGATSPSFCDGPSTSTGFSFGNGLSTNAGFGGGLNTSAGFGGGLGTSAGFSGGLSTSSGFDGGLGTSAGFGGGPGTSTGFGGGLGTSAGFSGGLGTSAGFGGGLVTSDGFGGGLGTNASFGSTLGTSAGFSGGLSTSDGFGSRPNASFDRGLSTIIGFGSGSNTSTGFTGEPSTSTGFSSGPSSIVGFSGGPSTGVGFCSGPSTSGFSGGPSTGAGFGGGPNTGAGFGGGPSTSAGFGSGAASLGACGFSYG

SEQ ID NO: 68295 - protein, 230 aa, Homo sapiens
MHTLLAATKDSLAMDPPVVNRPKKSKTKKAPIKTITKAAPAAPPVPAANEIATNKPKITWQALNLPVITQISQALPTTEVTNTQASSVTAQPKKANKMKRVTAKAAQGSQSPTGHEGGTIQLKSPLQVLKLPVISQNIHAPIANESASSQALITSIKPKKASKAKKAANKAIASATEVSLAATATHTATTQGQITNETASIHTTAASIRTKKASKARKTIAKVINTDTEH

SEQ ID NO: 68296 - protein, 169 aa, Homo sapiens
MDRRNDYGYRVPLFQGPLPPPGSLGLPFPPDIQTETTEEDSVLLMHTLLAATKDSLAMDPPVVNRPKKSKTKKAPIKTITKAAPAAPPVPAANEIATNKPKITWQALNLPVITQISQALPTTEVTNTQASSVTAQPKKANKMKRVTAKAAQGSQSPTGHEGGTIQLKSP

SEQ ID NO: 68297 - protein, 962 aa, Homo sapiens
MLRDVIQEYDEYFPEIIERASYTLEKMFRVNLKEIDKQSSLYILISTQESSAGILGTTKDTPKLGLLMVILSVIFMNGNKASEAVIWEVLRKLGLRPGVRHSLFGEVRKLITDEFVKQKYLEYKRVPNSRPPEYEFFWGLRSYHETSKMKVLKFACRVQKKDPKDWAVQYREAVEMEVQAAAVAVAEAEARAEARAQMGIGEEAVAGPWNWDDMDIDCLTREELGDDAQAWSRFSFEIEARAQENADASTNVNFSRGASTRAGFSDGASISFNGAPSSSGGFSGGPGITFGVAPSTSASFSNTASISFGGTLSTSSSFSSAASISFGCAHSTSTSFSSEASISFGGMPCTSASFSGGVSSSFSGPLSTSATFSGGASSGFGGTLSTTAGFSGVLSTSTSFGSAPTTSTVFSSALSTSTGFGGILSTSVCFGGSPSSSGSFGGTLSTSICFGGSPCTSTGFGGTLSTSVSFGGSSSTSANFGGTLSTSICFDGSPSTGAGFGGALNTSASFGSVLNTSTGFGGAMSTSADFGGTLSTSVCFGGSPGTSVSFGSALNTNAGYGGAVSTNTDFGGTLSTSVCFGGSPSTSAGFGGALNTNASFGCAVSTSASFSGAVSTSACFSGAPITNPGFGGAFSTSAGFGGALSTAADFGGTPSNSIGFGAAPSTSVSFGGAHGTSLCFGGAPSTSLCFGSASNTNLCFGGPPSTSACFSGATSPSFCDGPSTSTGFSFGNGLSTNAGFGGGLNTSAGFGGGLGTSAGFSGGLSTSSGFDGGLGTSAGFGGGPGTSTGFGGGLGTSAGFSGGLGTSAGFGGGLVTSDGFGGGLGTNASFGSTLGTSAGFSGGLSTSDGFGSRPNASFDRGLSTIIGFGSGSNTSTGFTGEPSTSTGFSSGPSSIVGFSGGPSTGVGFCSGPSTSGFSGGPSTGAGFGGGPNTGAGFGGGPSTSAGFGSGAASLGACGFSYG

SEQ ID NO: 68298 - protein, 121 aa, Homo sapiens
MHTLLAATKDSLAMDPPVVNRPKKSKTKKAPIKTITKAAPAAPPVPAANEIATNKPKITWQALNLPVITQISQALPTTEVTNTQASSVTAQPKKANKMKRVTAKAAQGSQSPTGHEGGTIQ

SEQ ID NO: 68299 - protein, 192 aa, Homo sapiens
MHTLLAATKDSLAMDPPVVNRPKKSKTKKAPIKTITKAAPAAPPVPAANEIATNKPKITWQALNLPVITQISQALPTTEVTNTQASSVTAQPKKANKMKRVTAKAAQGSQSPTGHEGGTIQLKSPLQVLKLPVISQNIHAPIANESASSQALITSIKPKKASKAKKAANKAIASATEVSLAATATHTATTQG

SEQ ID NO: 68300 - protein, 176 aa, Homo sapiens
MDRRNDYGYRVPLFQGPLPPPGSLGLPFPPDIQTETTEEDSVLLMHTLLAATKDSLAMDPPVVNRPKKSKTKKAPIKTITKAAPAAPPVPAANEIATNKPKITWQALNLPVITQISQALPTTEVTNTQASSVTAQPKKANKMKRVTAKAAQGSQSPTGHEGGTIQLKSPLQVLKLP

SEQ ID NO: 68301 - protein, 168 aa, Homo sapiens
MDRRNDYGYRVPLFQGPLPPPGSLGLPFPPDIQTETTEEDSVLLMHTLLAATKDSLAMDPPVVNRPKKSKTKKAPIKTITKAAPAAPPVPAANEIATNKPKITWQALNLPVITQISQALPTTEVTNTQASSVTAQPKKANKMKRVTAKAAQGSQSPTGHEGGTIQLKS

SEQ ID NO: 68302 - protein, 681 aa, Homo sapiens
MDRRNDYGYRVPLFQGPLPPPGSLGLPFPPDIQTETTEEDSVLLMHTLLAATKDSLAMDPPVVNRPKKSKTKKAPIKTITKAAPAAPPVPAANEIATNKPKITWQALNLPVITQISQALPTTEVTNTQASSVTAQPKKANKMKRVTAKAAQGSQSPTGHEGGTIQLKSPLQVLKLPVISQNIHAPIANESASSQALITSIKPKKASKAKKAANKAIASATEVSLAATATHTATTQGQITNETASIHTTAASIRTKKASKARKTIAKVINTDTEHIEALNVTDAATRQIEASVVAIRPKKSKGKKAASRGPNSVSEISEAPLATQIVTNQALAATLRVKRGSRARKAATKARATESQTPNADQGAQAKIASAQTNVSALETQVAAAVQALADDYLAQLSLEPTTRTRGKRNRKSKHLNGDERSGSNYRRIPWGRRPAPPRDVAILQERANKLVKYLLVKDQTKIPIKRSDMLRDVIQEYDEYFPEIIERASYTLEKMFRVNLKEIDKQSSLYILISTQESSAGILGTTKDTPKLGLLMVILSVIFMNGNKASEAVIWEVLRKLGLRPGVRHSLFGEVRKLITDEFVKQKYLEYKRVPNSRPPEYEFFWGLRSYHETSKMKVLKFACRVQKKDPKDWAVQYREAVEMEVQAAAVAVAEAEARAEWFQHQHWLYWRTQHQHGLQ

SEQ ID NO: 68303 - protein, 123 aa, Homo sapiens
MHTLLAATKDSLAMDPPVVNRPKKSKTKKAPIKTITKAAPAAPPVPAANEIATNKPKITWQALNLPVITQISQALPTTEVTNTQASSVTAQPKKANKMKRVTAKAAQGSQSPTGHEGGTIQLK

SEQ ID NO: 68304 - protein, 71 aa, Homo sapiens
MHTLLAATKDSLAMDPPVVNRPKKSKTKKAPIKTITKAAPAAPPVPAANEIATNKPKITWQALNLPVITQI

SEQ ID NO: 68305 - protein, 64 aa, Homo sapiens
MHTLLAATKDSLAMDPPVVNRPKKSKTKKAPIKTITKAAPAAPPVPAANEIATNKPKITWQALN

SEQ ID NO: 68306 - protein, 309 aa, Homo sapiens
MDRRNDYGYRVPLFQSKHLNGDERSGSNYRRIPWGRRPAPPRDVAILQERANKLVKYLLVKDQTKIPIKRSDMLRDVIQEYDEYFPEIIERASYTLEKMFRVNLKEIDKQSSLYILISTQESSAGILGTTKDTPKLGLLMVILSVIFMNGNKASEAVIWEVLRKLGLRPGVRHSLFGEVRKLITDEFVKQKYLEYKRVPNSRPPEYEFFWGLRSYHETSKMKVLKFACRVQKKDPKDWAVQYREAVEMEVQAAAVAVAEAEARAEIYSPCLQIPLINCSSPSHGAKVHPWNLCPHSSQGSYGQSAEGVM

SEQ ID NO: 68307 - protein, 420 aa, Homo sapiens
MPGGCSRGPAAGDGRLRLARLALVLLGWVSSSSPTSSASSFSSSAPFLASAVSAQPPLPDQCPALCECSEAARTVKCVNRNLTEVPTDLPAYVRNLFLTGNQLAVLPAGAFARRPPLAELAALNLSGSRLDEVRAGAFEHLPSLRQLDLSHNPLADLSPFAFSGSNASVSAPSPLVELILNHIVPPEDERQNRSFEGMVVAALLAGRALQGLRRLELASNHFLYLPRDVLAQLPSLRHLDLSNNSLVSLTYVSFRNLTHLESLHLEDNALKVLHNGTLAELQGLPHIRVFLDNNPWVCDCHMADMVTWLKETEVVQGKDRLTCAYPEKMRNRVLLELNSADLDCDPILPPSLQTSYVFLGIVLALIGAIFLLVLYLNRKGIKKWMHNIRDACRDHMEGYHYRYEINADPRLTNLSSNSDV

SEQ ID NO: 68308 - protein, 420 aa, Homo sapiens; identical to SEQ ID NO: 68307

SEQ ID NO: 68309 - protein, 420 aa, Homo sapiens; identical to SEQ ID NO: 68307

SEQ ID NO: 68310 - protein, 351 aa, Homo sapiens
MALPFQKELEKYKNIDEDELLGKLSEEELKQLENVLDDLDPESAMLPAGFRQKDQTQKAATGPFDREHLLMYLEKEALEQKDREDFVPFTGEKKGRVFIPKEKPIETRKEEKVTLDPELEEALASASDTELYDLAAVLGVHNLLNNPKFDEETANNKGGKGPVRNVVKGEKVKPVFEEPPNPTNVEISLQQMKANDPSLQEVNLNNIKNIPIPTLREFAKALETNTHVKKFSLAATRSNDPVAIAFADMLKVNKTLTSLNIESNFITGTGILALVEALKENDTLTEIKIDNQRQQLGTAVEMEIAQMLEENSRILKFGYQFTKQGPRTRVAAAITKNNDLVRKKRVEADRR

SEQ ID NO: 68311 - protein, 315 aa, Homo sapiens
MALPFQKELEKYKNIDEDELLGKLSEEELKQLENVLDDLDPESAMLPAGFRQKDQTQKAATGPFDREHLLMYLEKEALEQKDREDFVPFTGEKKGRVFIPKEKPIETRKEEKVTLDPELEEALASASDTELYDLAAVLGVHNLLNNPKFDEETANNKGGKGPVRNVVKGEKVKPVFEEPPNPTNVEISLQQMKANDPSLQEVNLNNIKAFADMLKVNKTLTSLNIESNFITGTGILALVEALKENDTLTEIKIDNQRQQLGTAVEMEIAQMLEENSRILKFGYQFTKQGPRTRVAAAITKNNDLVRKKRVEADRR

SEQ ID NO: 68312 - protein, 352 aa, Homo sapiens
MALPFRKDLEKYKDLDEDELLGNLSETELKQLETVLDDLDPENALLPAGFRQKNQTSKSTTGPFDREHLLSYLEKEALEHKDREDYVPYTGEKKGKIFIPKQKPVQTFTEEKVSLDPELEEALTSASDTELCDLAAILGMHNLITNTKFCNIMGSSNGVDQEHFSNVVKGEKILPVFDEPPNPTNVEESLKRTKENDAHLVEVNLNNIKNIPIPTLKDFAKALETNTHVKCFSLAATRSNDPVATAFAEMLKVNKTLKSLNVESNFITGVGILALIDALRDNETLAELKIDNQRQQLGTAVELEMAKMLEENTNILKFGYQFTQQGPRTRAANAITKNNDLVRKRRVEGDHQ

SEQ ID NO: 68313 - protein, 352 aa, Homo sapiens; identical to SEQ ID NO: 68312

SEQ ID NO: 68314 - protein, 33 aa, Homo sapiens
MALPFRKDLEKYKDLDEDELLGNLSETELKQLE

SEQ ID NO: 68315 - protein, 345 aa, Homo sapiens
MSSYQKELEKYRDIDEDEILRTLSPEELEQLDCELQEMDPENMLLPAGLRQRDQTKKSPTGPLDREALLQYLEQQALEVKERDDLVPFTGEKKGKPYIQPKREIPAEEQITLEPELEEALAHATDAEMCDIAAILDMYTLMSNKQYYDALCSGEICNTEGISSVVQPDKYKPVPDEPPNPTNIEEILKRVRSNDKELEEVNLNNIQDIPIPMLSELCEAMKANTYVRSFSLVATRSGDPIANAVADMLRENRSLQSLNIESNFISSTGLMAVLKAVRENATLTELRVDNQRQWPGDAVEMEMATVLEQCPSIVRFGYHFTQQGPRARAAQAMTRNNELRRQQKKR

SEQ ID NO: 68316 - protein, 276 aa, Homo sapiens
MSSYQKELEKYRDIDEDEILRTLSPEELEQLDCELQEMDPENMLLPAGLRQRDQTKKSPTGPLDREALLQYLEQQALEVKERDDLVPFTGEKKGVVQPDKYKPVPDEPPNPTNIEEILKRVRSNDKELEEVNLNNIQDIPIPMLSELCEAMKANTYVRSFSLVATRSGDPIANAVADMLRENRSLQSLNIESNFISSTGLMAVLKAVRENATLTELRVDNQRQWPGDAVEMEMATVLEQCPSIVRFGYHFTQQGPRARAAQAMTRNNELRRQQKKR

SEQ ID NO: 68317 - protein, 142 aa, Homo sapiens
MSSYQKELEKYRDIDEDEILRTLSPEELEQLDCELQEMDPENMLLPAGLRQRDQTKKSPTGPLDREALLQYLEQQALEVKERDDLVPFTGEKKGKPYIQPKREIPAEEQITLEPELEEALAHATDAEMCDIAAILDMYTLMS

SEQ ID NO: 68318 - protein, 284 aa, Homo sapiens
MDAIKKKMQMLKLDKENALDRAEQAEADKKAAEDRSKQLEEDIAAKEKLLRVSEDERDRVLEELHKAEDSLLAAEEAAAKAEADVASLNRRIQLVEEELDRAQERLATALQKLEEAEKAADESERGMKVIESRAQKDEEKMEIQEIQLKEAKHIAEDADRKYEEVARKLVIIESDLERAEERAELSEGKCAELEEELKTVTNNLKSLEAQAEKYSQKEDRYEEEIKVLSDKLKEAETRAEFAERSVTKLEKSIDDLEEKVAHAKEENLSMHQMLDQTLLELNNM

SEQ ID NO: 68319 - protein, 284 aa, Homo sapiens
MDAIKKKMQMLKLDKENALDRAEQAEADKKAAEDRSKQLEDELVSLQKKLKGTEDELDKYSEALKDAQEKLELAEKKATDAEADVASLNRRIQLVEEELDRAQERLATALQKLEEAEKAADESERGMKVIESRAQKDEEKMEIQEIQLKEAKHIAEDADRKYEEVARKLVIIESDLERAEERAELSEGQVRQLEEQLRIMDQTLKALMAAEDKYSQKEDRYEEEIKVLSDKLKEAETRAEFAERSVTKLEKSIDDLEDELYAQKLKYKAISEELDHALNDMTSM

SEQ ID NO: 68320 - protein, 245 aa, Homo sapiens
MAGSSSLEAVRRKIRSLQEQADAAEERAGTLQRELDHERKLRETAEADVASLNRRIQLVEEELDRAQERLATALQKLEEAEKAADESERGMKVIESRAQKDEEKMEIQEIQLKEAKHIAEDADRKYEEVARKLVIIESDLERAEERAELSEGKCAELEEELKTVTNNLKSLEAQAEKYSQKEDRYEEEIKVLSDKLKEAETRAEFAERSVTKLEKSIDDLEDQLYQQLEQNRRLTNELKLALNED

SEQ ID NO: 68321 - protein, 326 aa, Homo sapiens
MDAIKKKMQMLKLDKENALDRAEQAEADKKAAEDRSKQLEEDIAAKEKLLRVSEDERDRVLEELHKAEDSLLAAEEAAAKLEDELVSLQKKLKGTEDELDKYSEALKDAQEKLELAEKKATDAEADVASLNRRIQLVEEELDRAQERLATALQKLEEAEKAADESERGMKVIESRAQKDEEKMEIQEIQLKEAKHIAEDADRKYEEVARKLVIIESDLERAEERAELSEGKCAELEEELKTVTNNLKSLEAQAEKYSQKEDRYEEEIKVLSDKLKEAETRAEFAERSVTKLEKSIDDLEEKVAHAKEENLSMHQMLDQTLLELNNM

SEQ ID NO: 68322 - protein, 284 aa, Homo sapiens
MDAIKKKMQMLKLDKENALDRAEQAEADKKAAEDRSKQLEDELVSLQKKLKGTEDELDKYSEALKDAQEKLELAEKKATDAEADVASLNRRIQLVEEELDRAQERLATALQKLEEAEKAADESERGMKVIESRAQKDEEKMEIQEIQLKEAKHIAEDADRKYEEVARKLVIIESDLERAEERAELSEGQVRQLEEQLRIMDQTLKALMAAEDKYSQKEDRYEEEIKVLSDKLKEAETRAEFAERSVTKLEKSIDDLEEKVAHAKEENLSMHQMLDQTLLELNNM

SEQ ID NO: 68323 - protein, 284 aa, Homo sapiens
MDAIKKKMQMLKLDKENALDRAEQAEADKKAAEDRSKQLEDELVSLQKKLKGTEDELDKYSEALKDAQEKLELAEKKATDAEADVASLNRRIQLVEEELDRAQERLATALQKLEEAEKAADESERGMKVIESRAQKDEEKMEIQEIQLKEAKHIAEDADRKYEEVARKLVIIESDLERAEERAELSEGKCAELEEELKTVTNNLKSLEAQAEKYSQKEDRYEEEIKVLSDKLKEAETRAEFAERSVTKLEKSIDDLEDELYAQKLKYKAISEELDHALNDMTSI

SEQ ID NO: 68324 - protein, 284 aa, Homo sapiens
MDAIKKKMQMLKLDKENALDRAEQAEADKKAAEDRSKQLEEDIAAKEKLLRVSEDERDRVLEELHKAEDSLLAAEEAAAKAEADVASLNRRIQLVEEELDRAQERLATALQKLEEAEKAADESERGMKVIESRAQKDEEKMEIQEIQLKEAKHIAEDADRKYEEVARKLVIIESDLERAEERAELSEGQVRQLEEQLRIMDQTLKALMAAEDKYSQKEDRYEEEIKVLSDKLKEAETRAEFAERSVTKLEKSIDDLEEKVAHAKEENLSMHQMLDQTLLELNNM

SEQ ID NO: 68325 - protein, 284 aa, Homo sapiens
MDAIKKKMQMLKLDKENALDRAEQAEADKKAAEDRSKQLEDELVSLQKKLKGTEDELDKYSEALKDAQEKLELAEKKATDAEADVASLNRRIQLVEEELDRAQERLATALQKLEEAEKAADESERGMKVIESRAQKDEEKMEIQEIQLKEAKHIAEDADRKYEEVARKLVIIESDLERAEERAELSEGKCAELEEELKTVTNNLKSLEAQAEKYSQKEDRYEEEIKVLSDKLKEAETRAEFAERSVTKLEKSIDDLEEKVAHAKEENLSMHQMLDQTLLELNNM

SEQ ID NO: 68326 - protein, 265 aa, Homo sapiens
  VARIANT 1: note = MOD_RES - Any amino acid
XRAEQAEADKKAAEDRSKQLEDELVSLQKKLKGTEDELDKYSEALKDAQEKLELAEKKATDAEADVASLNRRIQLVEEELDRAQERLATALQKLEEAEKAADESERGMKVIESRAQKDEEKMEIQEIQLKEAKHIAEDADRKYEEVARKLVIIESDLERAEERAELSEGKCAELEEELKTVTNNLKSLEAQAEKYSQKEDRYEEEIKVLSDKLKEAETRAEFAERSVTKLEKSIDDLEDELYAQKLKYKAISEELDHALNDMTSM

SEQ ID NO: 68327 - protein, 284 aa, Homo sapiens
MDAIKKKMQMLKLDKENAIDRAEQAEADKKQAEDRCKQLEEEQQALQKKLKGTEDEVEKYSESVKEAQEKLEQAEKKATDAEADVASLNRRIQLVEEELDRAQERLATALQKLEEAEKAADESERGMKVIENRAMKDEEKMELQEMQLKEAKHIAEDSDRKYEEVARKLVILEGELERSEERAEVAESKCGDLEEELKIVTNNLKSLEAQADKYSTKEDKYEEEIKLLEEKLKEAETRAEFAERSVAKLEKTIDDLEETLASAKEENVEIHQTLDQTLLELNNL

SEQ ID NO: 68328 - protein, 284 aa, Homo sapiens
MDAIKKKMQMLKLDKENAIDRAEQAEADKKQAEDRCKQLEEEQQALQKKLKGTEDEVEKYSESVKEAQEKLEQAEKKATDAEADVASLNRRIQLVEEELDRAQERLATALQKLEEAEKAADESERGMKVIENRAMKDEEKMELQEMQLKEAKHIAEDSDRKYEEVARKLVILEGELERSEERAEVAESKCGDLEEELKIVTNNLKSLEAQADKYSTKEDKYEEEIKLLEEKLKEAETRAEFAERSVAKLEKTIDDLEDEVYAQKMKYKAISEELDNALNDITSL

SEQ ID NO: 68329 - protein, 284 aa, Homo sapiens
MDAIKKKMQMLKLDKENAIDRAEQAEADKKQAEDRCKQLEEEQQALQKKLKGTEDEVEKYSESVKEAQEKLEQAEKKATDAEADVASLNRRIQLVEEELDRAQERLATALQKLEEAEKAADESERGMKVIENRAMKDEEKMELQEMQLKEAKHIAEDSDRKYEEVARKLVILEGELERSEERAEVAESRARQLEEELRTMDQALKSLMASEEEYSTKEDKYEEEIKLLEEKLKEAETRAEFAERSVAKLEKTIDDLEETLASAKEENVEIHQTLDQTLLELNNL

SEQ ID NO: 68330 - protein, 322 aa, Homo sapiens
MDAIKKKMQMLKLDKENAIDRAEQAEADKKQAEDRCKQLEEEQQALQKKLKGTEDEVEKYSESVKEAQEKLEQAEKKATDAEADVASLNRRIQLVEEELDRAQERLATALQKLEEAEKAADESERGMKVIENRAMKDEEKMELQEMQLKEAKHIAEDSDRKYEEVARKLVILEGELERSEERAEVAESKCGDLEEELKIVTNNLKSLEAQADKYSTKEDKYEEEIKLLEEKLKEAETRAEFAERSVAKLEKTIDDLEESTSIATTEHWFTPDTLALTDTPSPCTEPTHKTPWPTLKPLCTGTPWLSLSDSPLHVGTCGPIKP

SEQ ID NO: 68331 - protein, 285 aa, Homo sapiens
MMEAIKKKMQMLKLDKENALDRAEQAEAEQKQAEERSKQLEDELAAMQKKLKGTEDELDKYSEALKDAQEKLELAEKKAADAEAEVASLNRRIQLVEEELDRAQERLATALQKLEEAEKAADESERGMKVIENRALKDEEKMELQEIQLKEAKHIAEEADRKYEEVARKLVIIEGDLERTEERAELAESRCREMDEQIRLMDQNLKCLSAAEEKYSQKEDKYEEEIKILTDKLKEAETRAEFAERSVAKLEKTIDDLEDKLKCTKEEHLCTQRMLDQTLLDLNEM

SEQ ID NO: 68332 - protein, 247 aa, Homo sapiens
MAGITTIEAVKRKIQVLQQQADDAEERAERLQREVEGERRAREQAEAEVASLNRRIQLVEEELDRAQERLATALQKLEEAEKAADESERGMKVIENRALKDEEKMELQEIQLKEAKHIAEEADRKYEEVARKLVIIEGDLERTEERAELAESKCSELEEELKNVTNNLKSLEAQAEKYSQKEDKYEEEIKILTDKLKEAETRAEFAERSVAKLEKTIDDLEERLYSQLERNRLLSNELKLTLHDLCD

SEQ ID NO: 68333 - protein, 248 aa, Homo sapiens
MAGITTIEAVKRKIQVLQQQADDAEERAERLQREVEGERRAREQAEAEVASLNRRIQLVEEELDRAQERLATALQKLEEAEKAADESERGMKVIENRALKDEEKMELQEIQLKEAKHIAEEADRKYEEVARKLVIIEGDLERTEERAELAESRCREMDEQIRLMDQNLKCLSAAEEKYSQKEDKYEEEIKILTDKLKEAETRAEFAERSVAKLEKTIDDLEDELYAQKLKYKAISEELDHALNDMTSI

SEQ ID NO: 68334 - protein, 248 aa, Homo sapiens
MAGITTIEAVKRKIQVLQQQADDAEERAERLQREVEGERRAREQAEAEVASLNRRIQLVEEELDRAQERLATALQKLEEAEKAADESERGMKVIENRALKDEEKMELQEIQLKEAKHIAEEADRKYEEVARKLVIIEGDLERTEERAELAESKCSELEEELKNVTNNLKSLEAQAEKYSQKEDKYEEEIKILTDKLKEAETRAEFAERSVAKLEKTIDDLEDKLKCTKEEHLCTQRMLDQTLLDLNEM

SEQ ID NO: 68335 - protein, 224 aa, Homo sapiens
MAGITTIEAVKRKIQVLQQQADDAEERAERLQREVEGERRAREQRLATALQKLEEAEKAADESERGMKVIENRALKDEEKMELQEIQLKEAKHIAEEADRKYEEVARKLVIIEGDLERTEERAELAESRCREMDEQIRLMDQNLKCLSAAEEKYSQKEDKYEEEIKILTDKLKEAETRAEFAERSVAKLEKTIDDLEDKLKCTKEEHLCTQRMLDQTLLDLNEM

SEQ ID NO: 68336 - protein, 285 aa, Homo sapiens
MMEAIKKKMQMLKLDKENALDRAEQAEAEQKQAEERSKQLEDELAAMQKKLKGTEDELDKYSEALKDAQEKLELAEKKAADAEAEVASLNRRIQLVEEELDRAQERLATALQKLEEAEKAADESERGMKVIENRALKDEEKMELQEIQLKEAKHIAEEADRKYEEVARKLVIIEGDLERTEERAELAESKCSELEEELKNVTNNLKSLEAQAEKYSQKEDKYEEEIKILTDKLKEAETRAEFAERSVAKLEKTIDDLEDELYAQKLKYKAISEELDHALNDMTSI

SEQ ID NO: 68337 - protein, 247 aa, Homo sapiens
MAGITTIEAVKRKIQVLQQQADDAEERAERLQREVEGERRAREQAEAEVASLNRRIQLVEEELDRAQERLATALQKLEEAEKAADESERGMKVIENRALKDEEKMELQEIQLKEAKHIAEEADRKYEEVARKLVIIEGDLERTEERAELAESRCREMDEQIRLMDQNLKCLSAAEEKYSQKEDKYEEEIKILTDKLKEAETRAEFAERSVAKLEKTIDDLEERLYSQLERNRLLSNELKLTLHDLCD

SEQ ID NO: 68338 - protein, 248 aa, Homo sapiens
MAGITTIEAVKRKIQVLQQQADDAEERAERLQREVEGERRAREQAEAEVASLNRRIQLVEEELDRAQERLATALQKLEEAEKAADESERGMKVIENRALKDEEKMELQEIQLKEAKHIAEEADRKYEEVARKLVIIEGDLERTEERAELAESRCREMDEQIRLMDQNLKCLSAAEEKYSQKEDKYEEEIKILTDKLKEAETRAEFAERSVAKLEKTIDDLEDKLKCTKEEHLCTQRMLDQTLLDLNEM

SEQ ID NO: 68339 - protein, 75 aa, Homo sapiens
MMEAIKKKMQMLKLDKENALDRAEQAEAEQKQAEERSKQLEDELAAMQKKLKGTEDELDKYSEALKDAQEKLELA

SEQ ID NO: 68340 - protein, 248 aa, Homo sapiens
MAGLNSLEAVKRKIQALQQQADEAEDRAQGLQRELDGERERREKAEGDVAALNRRIQLVEEELDRAQERLATALQKLEEAEKAADESERGMKVIENRAMKDEEKMEIQEMQLKEAKHIAEEADRKYEEVARKLVILEGELERAEERAEVSELKCGDLEEELKNVTNNLKSLEAASEKYSEKEDKYEEEIKLLSDKLKEAETRAEFAERTVAKLEKTIDDLEEKLAQAKEENVGLHQTLDQTLNELNCI

SEQ ID NO: 68341 - protein, 284 aa, Homo sapiens
MEAIKKKMQMLKLDKENAIDRAEQAEADKKAAEDKCKQVEEELTHLQKKLKGTEDELDKYSEDLKDAQEKLELTEKKASDAEGDVAALNRRIQLVEEELDRAQERLATALQKLEEAEKAADESERGMKVIENRAMKDEEKMEIQEMQLKEAKHIAEEADRKYEEVARKLVILEGELERAEERAEVSELKCGDLEEELKNVTNNLKSLEAASEKYSEKEDKYEEEIKLLSDKLKEAETRAEFAERTVAKLEKTIDDLEEKLAQAKEENVGLHQTLDQTLNELNCI

SEQ ID NO: 68342 - protein, 284 aa, Homo sapiens; identical to SEQ ID NO: 68341

SEQ ID NO: 68343 - protein, 161 aa, Homo sapiens
MDDIYKAAVEQLTEEQKNEFKAAFDIFVLGAEDGCISTKELGKVMRMLGQNPTPEELQEMIDEVDEDGSGTVDFDEFLVMMVRCMKDDSKGKSEEELSDLFRMFDKNADGYIDLDELKIMLQATGETITEDDIEELMKDGDKNNDGRIDYDEFLEFMKGVE

SEQ ID NO: 68344 - protein, 160 aa, Homo sapiens
MTDQQAEARSYLSEEMIAEFKAAFDMFDADGGGDISVKELGTVMRMLGQTPTKEELDAIIEEVDEDGSGTIDFEEFLVMMVRQMKEDAKGKSEEELAECFRIFDRNADGYIDPEELAEIFRASGEHVTDEEIESLMKDGDKNNDGRIDFDEFLKMMEGVQ

SEQ ID NO: 68345 - protein, 145 aa, Homo sapiens
MIAEFKAAFDMFDADGGGDISVKELGTVMRMLGQTPTKEELDAIIEEVDEDGSGTIDFEEFLVMMVRQMKEDAKGKSEEELAECFRIFDRNADGYIDPEELAEIFRASGEHVTDEEIESLMKDGDKNNDGRIDFDEFLKMMEGVQ

SEQ ID NO: 68346 - protein, 187 aa, Homo sapiens
MPEVERKPKITASRKLLLKSLMLAKAKECWEQEHEEREAEKVRYLAERIPTLQTRGLSLSALQDLCRELHAKVEVVDEERYDIEAKCLHNTREIKDLKLKVMDLRGKFKRPPLRRVRVSADAMLRALLGSKHKVSMDLRANLKSVKKEDTEKERPVEVGDWRKNVEAMSGMEGRKKMFDAAKSPTSQ

SEQ ID NO: 68347 - protein, 187 aa, Homo sapiens [sequence omitted]

SEQ ID NO: 68348 - protein, 187 aa, Homo sapiens; identical to SEQ ID NO: 68346

SEQ ID NO: 68349 - protein, 187 aa, Homo sapiens; identical to SEQ ID NO: 68346

SEQ ID NO: 68350 - protein, 187 aa, Homo sapiens [sequence omitted]

SEQ ID NO: 68351 - protein, 137 aa, Homo sapiens
MPEVERKPKITASRKLLLKSLMLAKAKECWEQEHEEREAEKVRYLAERIPTLQTRGLSLSALQDLCRELHAKVEVVDEERYDIEAKCLHNTREIKDLKLKVMDLRGKFKRPPLRRVRVSADAMLRALLGSKHKVSMD

SEQ ID NO: 68352 - protein, 182 aa, Homo sapiens
MSQCKKRNRAITARRQHLKSVMLQIAATELEKEESRREAEKQNYLAEHCPPLHIPGSMSEVQELCKQLHAKIDAAEEEKYDMEVRVQKTSKELEDMNQKLFDLRGKFKRPPLRRVRMSADAMLKALLGSKHKVCMDLRANLKQVKKEDTEKERDLRDVGDWRKNIEEKSGMEGRKKMFESES

SEQ ID NO: 68353 - protein, 182 aa, Homo sapiens
MGDEEKRNRAITARRQHLKSVMLQIAATELEKEESRREAEKQNYLAEHCPPLHIPGSMSEVQELCKQLHAKIDAAEEEKYDMEVRVQKTSKELEDMNQKLFDLRGKFKRPPLRRVRMSADAMLKALLGSKHKVCMDLRANLKQVKKEDTEKERDLRDVGDWRKNIEEKSGMEGRKKMFESES

SEQ ID NO: 68354 - protein, 182 aa, Homo sapiens; identical to SEQ ID NO: 68353

SEQ ID NO: 68355 - protein, 182 aa, Homo sapiens; identical to SEQ ID NO: 68353

SEQ ID NO: 68356 - protein, 210 aa, Homo sapiens
MADGSSDAAREPRPAPAPIRRRSSNYRAYATEPHAKKKSKISASRKLQLKTLLLQIAKQELEREAEERRGEKGRALSTRCQPLELAGLGFAELQDLCRQLHARVDKVDEERYDIEAKVTKNITEIADLTQKIFDLRGKFKRPTLRRVRISADAMMQALLGARAKESLDLRAHLKQVKKEDTEKENREVGDWRKNIDALSGMEGRKKKFES

SEQ ID NO: 68357 - protein, 278 aa, Homo sapiens
MSDTEEQEYEEEQPEEEAAEEEEEAPEEPEPVAEPEEERPKPSRPVVPPLIPPKIPEGERVDFDDIHRKRMEKDLLELQTLIDVHFEQRKKEEEELVALKERIERRRSERAEQQRFRTEKERERQAKLAEEKMRKEEEEAKKRAEDDAKKKKVLSNMGAHFGGYLVKAEQKRGKRQTGREMKVRILSERKKPLDIDYMGEEQLRARSAWLPPSQPSCPAREKAQELSDWIHQLESEKFDLMAKLKQQKYEINVLYNRISHAQKFRKGAGKGRVGGRWK

SEQ ID NO: 68358 - protein, 278 aa, Homo sapiens; identical to SEQ ID NO: 68357

SEQ ID NO: 68359 - protein, 251 aa, Homo sapiens
MSDTEEQEYEEEQPEEEAAEEEEEEEERPKPSRPVVPPLIPPKIPEGERVDFDDIHRKRMEKDLLELQTLIDVHFEQRKKEEEELVALKERIERRRSERAEQQRFRTEKERERQAKLAEEKMRKEEEEAKKRAEDDAKKKKVLSNMGAHFGGYLVKAEQKRGKRQTGREMKVRILSERKKPLDIDYMGEEQLREKAQELSDWIHQLESEKFDLMAKLKQQKYEINVLYNRISHAQKFRKGAGKGRVGGRWK

SEQ ID NO: 68360 - protein, 173 aa, Homo sapiens
SKAQPQDSQHLRHSLGRTRMSDTEEQEYEEEQPEEEAAEEEEEGEVPDSAEEERPKPSRPVVPPLIPPKIPEGERVDFDDIHRKRMEKDLLELQTLIDVHFEQRKKEEEELVALKERIERRRSERAEQQRFRTEKERERQAKLAEEKMRKEEEEAKKRAEDDAKKKKKKKKKK

SEQ ID NO: 68361 - protein, 251 aa, Homo sapiens
MSDTEEQEYEEEQPEEEAAEEEEEAPEEPEPVRPVVPPLIPPKIPEGERVDFDDIHRKRMEKDLLELQTLIDVHFEQRKKEEEELVALKERIERRRSERAEQQRFRTEKERERQAKLAEEKMRKEEEEAKKRAEDDAKKKKVLSNMGAHFGGYLVKAEQKRGKRQTGREMKVRILSERKKPLDIDYMGEEQLREKAQELSDWIHQLESEKFDLMAKLKQQKYEINVLYNRISHAQKFRKGAGKGRVGGRWK

SEQ ID NO: 68362 - protein, 192 aa, Homo sapiens
MEKDLLELQTLIDVHFEQRKKEEEELVALKERIERRRSERAEQQRFRTEKERERQAKLAEEKMRKEEEEAKKRAEDDAKKKKVLSNMGAHFGGYLVKAEQKRGKRQTGREMKVRILSERKKPLDIDYMGEEQLREKAQELSDWIHQLESEKFDLMAKLKQQKYEINVLYNRISHAQKFRKGAGKGRVGGRWK

SEQ ID NO: 68363 - protein, 293 aa, Homo sapiens
MSDIEEVVEEYEEEHPEEEEDWREDEDEQEEAAEEDAEAEAETEETRAEEDEEEEEAKEAEDGPMEESKPKPRSFMPNLVPPKIPDGERVDFDDIHRKRMEKDLNELQALIEAHFENRKKEEEELVSLKDRIERRRAERAEQQRIRNEREKERQNRLAEERARREEEENRRKAEDEARKKKALSNMMHFGGYIQKQAQTERKSGKRQTEREKKKKILAERRKVLAIDHLNEDQLREKAKELWQSIYNLEAEKFDLQEKFKQQKYEINVLRNRINDNQKVSKTRGKAKVTGRWK

SEQ ID NO: 68364 - protein, 199 aa, Homo sapiens
MSDIEEVVEEYEEEMAAPQHQEEAAEEDAEAEAETEETRAEDEEEEEAKEAEDGPMEESKPKPRSFMPNLVPPKIPDGERVDFDDIHRKRMEKDLNELQALIEAHFENRKKEEEELVSLKDRIERRRAERAEQQRIRNEREKERQNRLAEERARREEEENRRKAEDEARKKKALSNMMHFGGYIQKHPPDRAEKWEEAD

SEQ ID NO: 68365 - protein, 283 aa, Homo sapiens
MSDIEEVVEEYEEEAKLEQEEAAEEDAEAEAETEETRAEEDEEEEEAKEAEDGPMEESKPKPRSFMPNLVPPKIPDGERVDFDDIHRKRMEKDLNELQALIEAHFENRKKEEEELVSLKDRIERRRAERAEQQRIRNEREKERQNRLAEERARREEEENRRKAEDEARKKKALSNMMHFGGYIQKQAQTERKSGKRQTEREKKKKILAERRKVLAIDHLNEDQLREKAKELWQSIYNLEAEKFDLQEKFKQQKYEINVLRNRINDNQKVSKTRGKAKVTGRWK

SEQ ID NO: 68366 - protein, 285 aa, Homo sapiens
MSDIEEVVEEYEEEEQEEAAVEEQEEAAEEDAEAEAETEETRAEEDEEEEEAKEAEDGPMEESKPKPRSFMPNLVPPKIPDGERVDFDDIHRKRMEKDLNELQALIEAHFENRKKEEEELVSLKDRIERRRAERAEQQRIRNEREKERQNRLAEERARREEEENRRKAEDEARKKKALSNMMHFGGYIQKTERKSGKRQTEREKKKKILAERRKVLAIDHLNEDQLREKAKELWQSIYNLEAEKFDLQEKFKQQKYEINVLRNRINDNQKVSKTRGKAKVTGRWK

SEQ ID NO: 68367 - protein, 288 aa, Homo sapiens
MSDIEEVVEEYEEEEQEEAAVEEQEEAAEEDAEAEAETEETRAEEDEEEEEAKEAEDGPMEESKPKPRSFMPNLVPPKIPDGERVDFDDIHRKRMEKDLNELQALIEAHFENRKKEEEELVSLKDRIERRRAERAEQQRIRNEREKERQNRLAEERARREEEENRRKAEDEARKKKALSNMMHFGGYIQKQAQTERKSGKRQTEREKKKKILAERRKVLAIDHLNEDQLREKAKELWQSIYNLEAEKFDLQEKFKQQKYEINVLRNRINDNQKVSKTRGKAKVTGRWK

SEQ ID NO: 68368 - protein, 288 aa, Homo sapiens; identical to SEQ ID NO: 68367

SEQ ID NO: 68369 - protein, 226 aa, Homo sapiens
MEESKPKPRSFMPNLVPPKIPDGERVDFDDIHRKRMEKDLNELQALIEAHFENRKKEEEELVSLKDRIERRRAERAEQQRIRNEREKERQNRLAEERARREEEENRRKAEDEARKKKALSNMMHFGGYIQKTERKSGKRQTEREKKKKILAERRKVLAIDHLNEDQLREKAKELWQSIYNLEAEKFDLQEKFKQQKYEINVLRNRINDNQKVSKTRGKAKVTGRWK

SEQ ID NO: 68370 - protein, 285 aa, Homo sapiens; identical to SEQ ID NO: 68366

SEQ ID NO: 68371 - protein, 291 aa, Homo sapiens [sequence omitted]

SEQ ID NO: 68372 - protein, 297 aa, Homo sapiens
MSDIEEVVEEYEEEYLEHAEAAVEEEEDWREDEDEQEEAAEEDAEAEAETEETRAEEDEEEEEAKEAEDGPMEESKPKPRSFMPNLVPPKIPDGERVDFDDIHRKRMEKDLNELQALIEAHFENRKKEEEELVSLKDRIERRRAERAEQQRIRNEREKERQNRLAEERARREEEENRRKAEDEARKKKALSNMMHFGGYIQKTERKSGKRQTEREKKKKILAERRKVLAIDHLNEDQLREKAKELWQSIYNLEAEKFDLQEKFKQQKYEINVLRNRINDNQKVSKTRGKAKVTGRWK

SEQ ID NO: 68373 - protein, 288 aa, Homo sapiens; identical to SEQ ID NO: 68367

SEQ ID NO: 68374 - protein, 256 aa, Homo sapiens
MSDEEVEQVEEQYEEEEEAQEEAAEVHEEVHEPEEKPRPKLTAPKIPEGEKVDFDDIQKKRQNKDLMELQALIDSHFEARKKEEEELVALKERIEKRRAERAEQQRIRAEKERERQNRLAEEKARREEEDAKRRAEDDLKKKKALSSMGANYSSYLAKADQKRGKKQTAREMKKKILAERRKPLNIDHLGEDKLRDKAKELWETLHQLEIDKFEFGEKLKRQKYDITTLRSRIDQAQKHSKKAGTPAKGKVGGRWK

SEQ ID NO: 68375 - protein, 258 aa, Homo sapiens
MSDEEVEQVEEQYEEEEEAQEEEEVQEDTAEEDAEEEKPRPKLTAPKIPEGEKVDFDDIQKKRQNKDLMELQALIDSHFEARKKEEEELVALKERIEKRRAERAEQQRIRAEKERERQNRLAEEKARREEEDAKRRAEDDLKKKKALSSMGANYSSYLAKADQKRGKKQTAREMKKKILAERRKPLNIDHLGEDKLRDKAKELWETLHQLEIDKFEFGEKLKRQKYDITTLRSRIDQAQKHSKKAGTPAKGKVGGRWK

SEQ ID NO: 68376 - protein, 245 aa, Homo sapiens
MSDEEVEQVEEQYEEEEEAQEEEEKPRPKLTAPKIPEGEKVDFDDIQKKRQNKDLMELQALIDSHFEARKKEEEELVALKERIEKRRAERAEQQRIRAEKERERQNRLAEEKARREEEDAKRRAEDDLKKKKALSSMGANYSSYLAKADQKRGKKQTAREMKKKILAERRKPLNIDHLGEDKLRDKAKELWETLHQLEIDKFEFGEKLKRQKYDITTLRSRIDQAQKHSKKAGTPAKGKVGGRWK

SEQ ID NO: 68377 - protein, 252 aa, Homo sapiens
MSDEEVEQVEEQYEEEEEAQEEAAEVHEEEEKPRPKLTAPKIPEGEKVDFDDIQKKRQNKDLMELQALIDSHFEARKKEEEELVALKERIEKRRAERAEQQRIRAEKERERQNRLAEEKARREEEDAKRRAEDDLKKKKALSSMGANYSSYLAKADQKRGKKQTAREMKKKILAERRKPLNIDHLGEDKLRDKAKELWETLHQLEIDKFEFGEKLKRQKYDIMNVRARVQMLAKFSKKAGTPAKGKVGGRWK

SEQ ID NO: 68378 - protein, 260 aa, Homo sapiens
MSDEEVEQVEEQYEEEEEAQEEAAEVHEEDTAEEDAEEEKPRPKLTAPKIPEGEKVDFDDIQKKRQNKDLMELQALIDSHFEARKKEEEELVALKERIEKRRAERAEQQRIRAEKERERQNRLAEEKARREEEDAKRRAEDDLKKKKALSSMGANYSSYLAKADQKRGKKQTAREMKKKILAERRKPLNIDHLGEDKLRDKAKELWETLHQLEIDKFEFGEKLKRQKYDITTLRSRIDQAQKHSKKAGTPAKGKVGGRWK

SEQ ID NO: 68379 - protein, 250 aa, Homo sapiens
MSDEEVEQVEEQYEEEEEAQEEEEVQEEEKPRPKLTAPKIPEGEKVDFDDIQKKRQNKDLMELQALIDSHFEARKKEEEELVALKERIEKRRAERAEQQRIRAEKERERQNRLAEEKARREEEDAKRRAEDDLKKKKALSSMGANYSSYLAKADQKRGKKQTAREMKKKILAERRKPLNIDHLGEDKLRDKAKELWETLHQLEIDKFEFGEKLKRQKYDITTLRSRIDQAQKHSKKAGTPAKGKVGGRWK

SEQ ID NO: 68380 - protein, 261 aa, Homo sapiens
MSDEEVEQVEEQYEEEEEAQEEAAEVHEEGMRTQDFFHEEKPRPKLTAPKIPEGEKVDFDDIQKKRQNKDLMELQALIDSHFEARKKEEEELVALKERIEKRRAERAEQQRIRAEKERERQNRLAEEKARREEEDAKRRAEDDLKKKKALSSMGANYSSYLAKADQKRGKKQTAREMKKKILAERRKPLNIDHLGEDKLRDKAKELWETLHQLEIDKFEFGEKLKRQKYDITTLRSRIDQAQKHSKKAGTPAKGKVGGRWK

SEQ ID NO: 68381 - protein, 261 aa, Homo sapiens
MSDEEVEQVEEQYEEEEEAQEEAAEVHEEVHEPEEVQEEEKPRPKLTAPKIPEGEKVDFDDIQKKRQNKDLMELQALIDSHFEARKKEEEELVALKERIEKRRAERAEQQRIRAEKERERQNRLAEEKARREEEDAKRRAEDDLKKKKALSSMGANYSSYLAKADQKRGKKQTAREMKKKILAERRKPLNIDHLGEDKLRDKAKELWETLHQLEIDKFEFGEKLKRQKYDITTLRSRIDQAQKHSKKAGTPAKGKVGGRWK

SEQ ID NO: 68382 - protein, 250 aa, Homo sapiens
MSDEEVEQVEEQYEEEEEAQEEEEVQEEEKPRPKLTAPKIPEGEKVDFDDIQKKRQNKDLMELQALIDSHFEARKKEEEELVALKERIEKRRAERAEQQRIRAEKERERQNRLAEEKARREEEDAKRRAEDDLKKKKALSSMGANYSSYLAKADQKRGKKQTAREMKKKILAERRKPLNIDHLGEDKLRDKAKELWETLHQLEIDKFEFGEKLKRQKYDIMNVRARVQMLAKFSKKAGTPAKGKVGGRWK

SEQ ID NO: 68383 - protein, 269 aa, Homo sapiens
MSDEEVEQVEEQYEEEEEAQEEAAEVHEEVHEPEEVQEDTAEEDAEEEKPRPKLTAPKIPEGEKVDFDDIQKKRQNKDLMELQALIDSHFEARKKEEEELVALKERIEKRRAERAEQQRIRAEKERERQNRLAEEKARREEEDAKRRAEDDLKKKKALSSMGANYSSYLAKADQKRGKKQTAREMKKKILAERRKPLNIDHLGEDKLRDKAKELWETLHQLEIDKFEFGEKLKRQKYDITTLRSRIDQAQKHSKKAGTPAKGKVGGRWK

SEQ ID NO: 68384 - protein, 270 aa, Homo sapiens
MSDEEVEQVEEQYEEEEEAQEEAAEVHEEAHPGEESVREDTAEEDAEEEKPRPKLTAPKIPEGEKVDFDDIQKKRQNKDLMELQALIDSHFEARKKEEEELVALKERIEKRRAERAEQQRIRAEKERERQNRLAEEKARREEEDAKRRAEDDLKKKKALSSMGANYSSYLAKADQKRGKKQTAREMKKKILAERRKPLNIDHLGEDKLRDKAKELWETLHQLEIDKFEFGEKLKRQKYDITTLRSRIDQAQKHSKKAGTPAKGKVGGRWK

SEQ ID NO: 68385 - protein, 144 aa, Homo sapiens
MSDEEVEQVEEQYEEEEEAQEEAAEVHEEERRAEDDLKKKKALSSMGANYSSYLAKADQKRGKKQTAREMKKKILAERRKPLNIDHLGEDKLRDKAKELWEPPQSCQGLPDSPGGGEAIPGRPPRLCPCCLHPLGPVNKAAEPP

SEQ ID NO: 68386 - protein, 538 aa, Homo sapiens
MEESVNQMQPLNEKQIANSQDGYVWQVTDMNRLHRFLCFGSEGGTYYIKEQKLGLENAEALIRLIEDGRGCEVIQEIKSFSQEGRTTKQEPMLFALAICSQCSDISTKQAAFKAVSEVCRIPTHLFTFIQFKKDLKESMKCGMWGRALRKAIADWYNEKGGMALALAVTKYKQRNGWSHKDLLRLSHLKPSSEGLAIVTKYITKGWKEVHELYKEKALSVETEKLLKYLEAVEKVKRTRDELEVIHLIEEHRLVREHLLTNHLKSKEVWKALLQEMPLTALLRNLGKMTANSVLEPGNSEVSLVCEKLCNEKLLKKARIHPFHILIALETYKTGHGLRGKLKWRPDEEILKALDAAFYKTFKTVEPTGKRFLLAVDVSASMNQRVLGSILNASTVAAAMCMVVTRTEKDSYVVAFSDEMVPCPVTTDMTLQQVLMAMSQIPAGGTDCSLPMIWAQKTNTPADVFIVFTDNETFAGGVHPAIALREYRKKMDIPAKLIVCGMTSNGFTIADPDDRGMLDMCGFDTGALDVIRNFTLDMI

SEQ ID NO: 68387 - protein, 518 aa, Homo sapiens
MEESVNQMQPLNEKQIANSQDGYVWQVTDMNRLHRFLCFGSEGGTYYIKEQKLGLENAEALIRLIEDGRGCEVIQEIKSFSQEGRTTKQEPMLFALAICSQCSDISTKQAAFKAVSEVCRIPTHLFTFIQFKKDLKESMKCGMWGRALRKAIADWYNEKGGMALALAVTKYKQRNGWSHKDLLRLSHLKPSSEGLAIVTKYITKGWKEVHELYKEKALSVETEKLLKYLEAVEKVKRTRDELEVIHLIEEHRLVREHLLTNHLKSKEVWKALLQEMPLTALLRNLGKMTANSVLEPGNSEVSLVCEKLCNEKLLKKARIHPFHILIALETYKTGHGLRGKLKWRPDEEILKALDAAFYKTFKTVEPTGKRFLLAVDVSASMNQRVLGSILNASTVAAAMCMVVTRTEKDSYVVAFSDEMVPCPVTTDMTLQQVLMAMSQIPAGGTDCSLPMIWAQKTNTPADVFIVFTDNETFAGGVHPAIALREYRKKMDIPAKLIVCGMTSNGFTIADPDDRDTVK

SEQ ID NO: 68388 - protein, 525 aa, Homo sapiens
MEESVNQMQPLNEKQIANSQDGYVWQVTDMNRLHRFLCFGSEGGTYYIKEQKLGLENAEALIRLIEDGRGCEVIQEIKSFSQEGRTTKQEPMLFALAICSQCSDISTKQAAFKAVSEVCRIPTHLFTFIQFKKDLKESMKCGMWGRALRKAIADWYNEKGGMALALAVTKYKQRNGWSHKDLLRLSHLKPSSEGLAIVTKYITKGWKEVHELYKEKALSVETEKLLKYLEAVEKVKRTRDELEVIHLIEEHRLVREHLLTNHLKSKEVWKALLQEMPLTALLRNLGKMTANSVLEPGNSEVSLVCEKLCNEKLLKKARIHPFHILIALETYKTGHGLRGKLKWRPDEEILKALDAAFYKTFKTVEPTGKRFLLAVDVSASMNQRVLGSILNASTVAAAMCMVVTRTEKDSYVVAFSDEMVPCPVTTDMTLQQVLMAMSQIPAGGTDCSLPMIWAQKTNTPADVFIVFTDNETFAGGVHPAIALREYRKKMDIPAKLIVCGMTSNGFTIADPDDRALQNTLLNKSF

SEQ ID NO: 68389 - protein, 534 aa, Homo sapiens
MEESVNQMQPLNEKQIANSQDGYVWQVTDMNRLHRFLCFGSEGGTYYIKEQKLGLENAEALIRLIEDGRGCEVIQEIKSFSQEGRTTKQEPMLFALAICSQCSDISTKQAAFKAVSEVCRIPTHLFTFIQFKKDLKESMKCGMWGRALRKAIADWYNEKGGMALALAVTKYKQRNGWSHKDLLRLSHLKPSSEGLAIVTKYITKGWKEVHELYKEKALSVETEKLLKYLEAVEKVKRTRDELEVIHLIEEHRLVREHLLTNHLKSKEVWKALLQEMPLTALLRNLGKMTANSVLEPGNSEVSLVCEKLCNEKLLKKARIHPFHILIALETYKTGHGLRGKLKWRPDEEILKALDAAFYKTFKTVEPTGKRFLLAVDVSASMNQRVLGSILNASTVAAAMCMVVTRTEKDSYVVAFSDEMVPCPVTTDMTLQQVLMAMSQIPAGGTDCSLPMIWAQKTNTPADVFIVFTDNETFAGGVHPAIALREYRKKMDIPAKLIVCGMTSNGFTIADPDDRGMLDMCGFDTGALDPCKIPY

SEQ ID NO: 68390 - protein, 538 aa, Homo sapiens; identical to SEQ ID NO: 68386

SEQ ID NO: 68391 - protein, 538 aa, Homo sapiens; identical to SEQ ID NO: 68386

SEQ ID NO: 68392 - protein, 263 aa, Homo sapiens
MPLTALLRNLGKMTANSVLEPGNSEVSLVCEKLCNEKLLKKARIHPFHILIALETYKTGHGLRGKLKWRPDEEILKALDAAFYKTFKTVEPTGKRFLLAVDVSASMNQRVLGSILNASTVAAAMCMVVTRTEKDSYVVAFSDEMVPCPVTTDMTLQQVLMAMSQIPAGGTDCSLPMIWAQKTNTPADVFIVFTDNETFAGGVHPAIALREYRKKMDIPAKLIVCGMTSNGFTIADPDDRGMLDMCGFDTGALDVIRNFTLDMI

SEQ ID NO: 68393 - protein, 41 aa, Homo sapiens
MEESVNQMQPLNEKQIANSQDGYVWQVTDMNRLHRFLCFGS

SEQ ID NO: 68394 - protein, 349 aa, Homo sapiens
MAASEAAVVSSPSLKTDTSPVLETAGTVAAMAATPSARAAAAVVAAAARTGSEARVSKAALATKLLSLSGVFAVHKPKGPTSAELLNRLKEKLLAEAGMPSPEWTKRKKQTLKIGHGGTLDSAARGVLVVGIGSGTKMLTSMLSGSKRYTAIGELGKATDTLDSTGRVTEEKPYDKITQEDIEGILQKFTGNIMQVPPLYSALKKDGQRLSTLMKRGEVVEAKPARPVTVYSISLQKFQPPFFTLDVECGGGFYIRSLVSDIGKELSSCANVLELTRTKQGPFTLEEHALPEDKWTIDDIAQSLEHCSSLFPAELALKKSKPESNEQVLSCEYITLNEPKREDDVIKTC

SEQ ID NO: 68395 - protein, 331 aa, Homo sapiens
MGSAGLSRLHGLFAVYKPPGLKWKHLRDTVELQLLKGLNARKPPAPKQRVRFLLGPMEGSEEKELTLTATSVPSFINHPLVCGPAFAHLKVGVGHRLDAQASGVLVLGVGHGCRLLTDMYNAHLTKDYTVRGLLGKATDDFREDGRLVEKTTYDHVTREKLDRILAVIQGSHQKALVMYSNLDLKTQEAYEMAVRGLIRPMNKSPMLITGIRCLYFAPPEFLLEVQCMHETQKELRKLVHEIGLELKTTAVCTQVRRTRDGFFTLDSALLRTQWDLTNIQDAIRAATPQVAAELEKSLSPGLDTKQLPSPGWSWDSQGPSSTLGLERGAGQ

SEQ ID NO: 68396 - protein, 275 aa, Homo sapiens
MEGSEEKELTLTATSVPSFINHPLVCGPAFAHLKVGVGHRLDAQASGVLVLGVGHGCRLLTDMYNAHLTKDYTVRGLLGKATDDFREDGRLVEKTTYDHVTREKLDRILAVIQGSHQKALVMYSNLDLKTQEAYEMAVRGLIRPMNKSPMLITGIRCLYFAPPEFLLEVQCMHETQKELRKLVHEIGLELKTTAVCTQVRRTRDGFFTLDSALLRTQWDLTNIQDAIRAATPQVAAELEKSLSPGLDTKQLPSPGWSWDSQGPSSTLGLERGAGQ

SEQ ID NO: 68397 - protein, 566 aa, Homo sapiens
MRRQWGSAMRAAEQAGCMVSASRAGQPEAGPWSCSGVILSRSPGLVLCHGGIFVPFLRAGSEVLTAAGAVFLPGDSCRDDLRLHVQWAPTAAGPGGGAERGRPGLCTPQCASLEPGPPAPSRGRPLQPRLPAELLLLLSCPAFWAHFARLFGDEAAEQWRFSSAARDDEVSEDEEADQLRALGWFALLGVRLGQEEVEEERGPAMAVSPLGAVPKGAPLLVCGSPFGAFCPDIFLNTLSCGVLSNVAGPLLLTDARCLPGTEGGGVFTARPAGALVALVVAPLCWKAGEWVGFTLLCAAAPLFRAARDALHRLPHSTAALAALLPPEVGVPWGLPLRDSGPLWAAAAVLVECGTVWGSGVAVAPRLVVTCRHVSPREAARVLVRSTTPKSVAIWGRVVFATQETCPYDIAVVSLEEDLDDVPIPVPAEHFHEGEAVSVVGFGVFGQSCGPSVTSGILSAVVQVNGTPVMLQTTCAVHSGSSGGPLFSNHSGNLLGIITSNTRDNNTGATYPHLNFSIPITVLQPALQQYSQTQDLGGLRELDRAAEPVRVVWRLQRPLAEAPRSKL

SEQ ID NO: 68398 - protein, 398 aa, Homo sapiens
MRRQWGSAMRAAEQAGCMVSASRAGQPEAGPWSCSGVILSRSPGLVLCHGGIFVPFLRAGSEVLTAAGAVFLPGDSCRDDLRLHVQWAPTAAGPGGGAERGRPGLCTPQCASLEPGPPAPSRGRPLQPRLPAELLLLLSCPAFWAHFARLFGDEAAEQWRFSSAARDDEVSEDEEADQLRALGWFALLGVRLGQEEVEEERGPAMAVSPLGAVPKGAPLLVCGSPFGAFCPDIFLNTLSCGVLSNVAGPLLLTDARCLPGTEGGGVFTARPAGALVALVVAPLCWKAGEWVGFTLLCAAAPLFRAARDALHRLPHSTAALAALLPPEVGVPWGLPLRDSGPLWAAAAVLVECGTVWGSGVAVAPRLVVTCRHVSPREAARVLVRSTTPKHNHQQHPGQ

SEQ ID NO: 68399 - protein, 275 aa, Homo sapiens
MLNLLLLALPVLASRAYAAPAPGQALQRVGIVGGQEAPRSKWPWQVSLRVHGPYWMHFCGGSLIHPQWVLTAAHCVGPDVKDLAALRVQLREQHLYYQDQLLPVSRIIVHPQFYTAQIGADIALLELEEPVNVSSHVHTVTLPPASETFPPGMPCWVTGWGDVDNDERLPPPFPLKQVKVPIMENHICDAKYHLGAYTGDDVRIVRDDMLCAGNTRRDSCQGDSGGPLVCKVNGTWLQAGVVSWGEGCAQPNRPGIYTRVTYYLDWIHHYVPKKP

SEQ ID NO: 68400 - protein, 282 aa, Homo sapiens
MLLLAPQMLNLLLLALPVLASRAYAAPAPGQALQRVGIVGGQEAPRSKWPWQVSLRVHGPYWMHFCGGSLIHPQWVLTAAHCVGPDVKDLAALRVQLREQHLYYQDQLLPVSRIIVHPQFYTAQIGADIALLELEEPVNVSSHVHTVTLPPASETFPPGMPCWVTGWGDVDNDERLPPPFPLKQVKVPIMENHICDAKYHLGAYTGDDVRIVRDDMLCAGNTRRDSCQGDSGGPLVCKVNGTWLQAGVVSWGEGCAQPNRPGIYTRVTYYLDWIHHYVPKKP

SEQ ID NO: 68401 - protein, 242 aa, Homo sapiens
MLLLAPQMLSLLLLALPVLASPAYVAPAPGQALQQTGIVGGQEAPRSKWPWQVSLRVRGPYWMHFCGGSLIHPQWVLTAAHCVEPDIKDLAALRVQLREQHLYYQDQLLPVSRIIVHPQFYIIQTGADIALLELEEPVNISSHIHTVTLPPASETFPPGMPCWVTGWGDVDNNVHLPPPYPLKEVEVPVVENHLCNAEYHTGLHTGHSFQIVRDDMLCAGSENHDSCQGDSGGPLVCKVNGT

SEQ ID NO: 68402 - protein, 235 aa, Homo sapiens
MLSLLLLALPVLASPAYVAPAPGQALQQTGIVGGQEAPRSKWPWQVSLRVRGPYWMHFCGGSLIHPQWVLTAAHCVEPDIKDLAALRVQLREQHLYYQDQLLPVSRIIVHPQFYIIQTGADIALLELEEPVNISSHIHTVTLPPASETFPPGMPCWVTGWGDVDNNVHLPPPYPLKEVEVPVVENHLCNAEYHTGLHTGHSFQIVRDDMLCAGSENHDSCQGDSGGPLVCKVNGT

SEQ ID NO: 68403 - protein, 321 aa, Homo sapiens
MALGACGLLLLLAVPGVSLRTLQPGCGRPQVSDAGGRIVGGHAAPAGAWPWQASLRLRRVHVCGGSLLSPQWVLTAAHCFSGSLNSSDYQVHLGELEITLSPHFSTVRQIILHSSPSGQPGTSGDIALVELSVPVTLSSRILPVCLPEASDDFCPGIRCWVTGWGYTREGEPLPPPYSLREVKVSVVDTETCRRDYPGPGGSILQPDMLCARGPGDACQDDSGGPLVCQVNGAWVQAGTVSWGEGCGRPNRPGVYTRVPAYVNWIRRHITASGGSESGYPRLPLLAGFFLPGLFLLLVSCVLLAKCLLHPSADGTPFPAPD

SEQ ID NO: 68404 - protein, 406 aa, Homo sapiens
MSGCPFLGNNFGYTFKKLPVEGSEEDKSQTGVNRASKGGLIYGNYLHLEKVLNAQELQSETKGNKIHDEHLFIITHQAYELWFKQILWELDSVREIFQNGHVRDERNMLKVVSRMHRVSVILKLLVQQFSILETMTALDFNDFREYLSPASGFQSLQFRLLENKIGVLQNMRVPYNRRHYRDNFKGEENELLLKSEQEKTLLELVEAWLERTPGLEPHGFNFWGKLEKNITRGLEEEFIRIQAKEESEEKEEQVAEFQKQKEVLLSLFDEKRHEHLLSKGERRLSYRALQGALMIYFYREEPRFQVPFQLLTSLMDIDSLMTKWRYNHVCMVHRMLGSKAGTGGSSGYHYLRSTVSDRYKVFVDLFNLSTYLIPRHWIPKMNPTIHKFLYTAEYCDSSYFSSDESD

SEQ ID NO: 68405 - protein, 444 aa, Homo sapiens
MIEDNKENKDHSLERGRASLIFSLKNEVGGLIKALKIFQEKHVNLLHIESRKSKRRNSEFEIFVDCDINREQLNDIFHLLKSHTNVLSVNLPDNFTLKEDGMETVPWFPKKISDLDHCANRVLMYGSELDADHPGFKDNVYRKRRKYFADLAMNYKHGDPIPKVEFTEEEIKTWGTVFQELNKLYPTHACREYLKNLPLLSKYCGYREDNIPQLEDVSNFLKERTGFSIRPVAGYLSPRDFLSGLAFRVFHCTQYVRHSSDPFYTPEPDTCHELLGHVPLLAEPSFAQFSQEIGLASLGASEEAVQKLATCYFFTVEFGLCKQDGQLRVFGAGLLSSISELKHALSGHAKVKPFDPKITCKQECLITTFQDVYFVSESFEDAKEKMREFTKTIKRPFGVKYNPYTRSIQILKDTKSITSAMNELQHDLDVVSDALAKVSRKPSI

SEQ ID NO: 68406 - protein, 466 aa, Homo sapiens
MIEDNKENKDHSLERGRASLIFSLKNEVGGLIKALKIFQEKHVNLLHIESRKSKRRNSEFEIFVDCDINREQLNDIFHLLKSHTNVLSVNLPDNFTLKEDGMETVPWFPKKISDLDHCANRVLMYGSELDADHPGFKDNVYRKRRKYFADLAMNYKHGDPIPKVEFTEEEIKTWGTVFQELNKLYPTHACREYLKNLPLLSKYCGYREDNIPQLEDVSNFLKERTGFSIRPVAGYLSPRDFLSGLAFRVFHCTQYVRHSSDPFYTPEPDTCHELLGHVPLLAEPSFAQFSQEIGLASLGASEEAVQKLATCYFFTVEFGLCKQDGQLRVFGAGLLSSISELKHALSGHAKVKPFDPKITCKQECLITTFQDVYFVSESFEDAKEKMREFTKTIKRPFGVKYNPYTRSIQILKDTKSITSAMNELQHDLDVVSDALAKSLNEDVLQVSVFALLLFLPSLHGECHPDT

SEQ ID NO: 68407 - protein, 250 aa, Homo sapiens
MQPAMMMFSSKYWARRGFSLDSAVPEEHQLLGSSTLNKPNSGKNDDKGNKGSSKREAATESGKTAVVFSLKNEVGGLVKALRLFQEKRVNMVHIESRKSRRRSSEVEIFVDCECGKTEFNELIQLLKFQTTIVTLNPPENIWTEEEELEDVPWFPRKISELDKCSHRVLMYGSELDADHPGFKDNVYRQRRKYFVDVAMGYKYGPRLLAAIGDWEFQLFSVSSSLSSSSLCMLSVHILMDVRSIVVAVDI

SEQ ID NO: 68408 - protein, 490 aa, Homo sapiens
MQPAMMMFSSKYWARRGFSLDSAVPEEHQLLGSSTLNKPNSGKNDDKGNKGSSKREAATESGKTAVVFSLKNEVGGLVKALRLFQEKRVNMVHIESRKSRRRSSEVEIFVDCECGKTEFNELIQLLKFQTTIVTLNPPENIWTEEEELEDVPWFPRKISELDKCSHRVLMYGSELDADHPGFKDNVYRQRRKYFVDVAMGYKYGQPIPRVEYTEEETKTWGVVFRELSKLYPTHACREYLKNFPLLTKYCGYREDNVPQLEDVSMFLKERSGFTVRPVAGYLSPRDFLAGLAYRVFHCTQYIRHGSDPLYTPEPDTCHELLGHVPLLADPKFAQFSQEIGLASLGASDEDVQKLATCYFFTIEFGLCKQEGQLRAYGAGLLSSIGELKHALSDKACVKAFDPKTTCLQECLITTFQEAYFVSESFEEAKEKMRDFAKSITRPFSVYFNPYTQSIEILKDTRSIENVVQDLRSDLNTVCDALNKMNQYLGI

SEQ ID NO: 68409 - protein, 174 aa, Homo sapiens
MSSAAADHWAWLLVLSFVFGCNVLRILLPSFSSFMSRVLQKDAEQESQMRAEIQDMKQELSTVNMMDEFARYARLERKINKMTDKLKTHVKARTAQLAKIKWVISVAFYVLQAALMISLIWKYYSVPVAVVPSKWITPLDRLVAFPTRVAGGVGITCWILVCNKVVAIVLHPFS

SEQ ID NO: 68410 - protein, 140 aa, Homo sapiens
MSRVLQKDAEQESQMRAEIQDMKQELSTVNMMDEFARYARLERKINKMTDKLKTHVKARTAQLAKIKWVISVAFYVLQAALMISLIWKYYSVPVAVVPSKWITPLDRLVAFPTRVAGGVGITCWILVCNKVVAIVLHPFS

SEQ ID NO: 68411 - protein, 140 aa, Homo sapiens; identical to SEQ ID NO: 68410

SEQ ID NO: 68412 - protein, 172 aa, Homo sapiens
MSSAAADHWAWLLVLSFVFGCNVLRILLPSFSSFMSRVLQKDAEQESQMRAEIQDMKQELSTVNMMDEFARYARLERKINKMTDKLKTHVKARTAQLAKIKWVISVAFYVLQAALMISLIWKYYSVPVAVVPSKWITPLDRLVAFPTRVAVFSSSIWTSKCFSSPDKSILEK

SEQ ID NO: 68413 - protein, 360 aa, Homo sapiens
MALHSMRKARERWSFIRALHKGSAAAPALQKDSKKRVFSGIQPTGILHLGNYLGAIESWVRLQDEYDSVLYSIVDLHSITVPQDPAVLRQSILDMTAVLLACGINPEKSILFQQSQVSEHTQLSWILSCMVRLPRLQHLHQWKAKTTKQKHDGTVGLLTYPVLQAADILLYKSTHVPVGEDQVQHMELVQDLAQGFNKKYGEFFPVPESILTSMKKVKSLRDPSAKMSKSDPDKLATVRITDSPEEIVQKFRKAVTDFTSEVTYDPAGRAGVSNIVAVHAAVTGLSVEEVVRRSAGMNTARYKLAVADAVIEKFAPIKREIEKLKLDKDHLEKVLQIGSAKAKELAYTVCQEVKKLVGFL

SEQ ID NO: 68414 - protein, 220 aa, Homo sapiens
MALHSMRKARERWSFIRALHKGSAAAPALQKDSKKRVFSGIQPTGILHLGNYLGAIESWVRLQDEYDSVLYSIVDLHSITVPQDPAVLRQSILDMTAVLLACGINPEKSILFQQSQVSEHTQLSWILSCMVRLPRLQHLHQWKAKTTKQKHDGTVGLLTYPVLQAADILLYKSTHVPVGEDQVQHMELVQDLAQGFNKKYGEFFPVPESILSMCVLVFLT

SEQ ID NO: 68415 - protein, 266 aa, Homo sapiens
MTAVLLACGINPEKSILFQQSQVSEHTQLSWILSCMVRLPRLQHLHQWKAKTTKQKHDGTVGLLTYPVLQAADILLYKSTHVPVGEDQVQHMELVQDLAQGFNKKYGEFFPVPESILTSMKKVKSLRDPSAKMSKSDPDKLATVRITDSPEEIVQKFRKAVTDFTSEVTYDPAGRAGVSNIVAVHAAVTGLSVEEVVRRSAGMNTARYKLAVADAVIEKFAPIKREIEKLKLDKDHLEKVLQIGSAKAKELAYTVCQEVKKLVGFL

SEQ ID NO: 68416 - protein, 430 aa, Homo sapiens
MLVSLKMSYKAAAGEDYKADCPPGNPAPTSNHGPDATEAEEDFVDPWTVQTSSAKGIDYDKLIVRFGSSKIDKELINRIERATGQRPHHFLRRGIFFSHRDMNQVLDAYENKKPFYLYTGRGPSSEAMHVGHLIPFIFTKWLQDVFNVPLVIQMTDDEKYLWKDLTLDQAYSYAVENAKDIIACGFDINKTFIFSDLDYMGMSSGFYKNVVKIQKHVTFNQVKGIFGFTDSDCIGKISFPAIQAAPSFSNSFPQIFRDRTDIQCLIPCAIDQDPYFRMTRDVAPRIGYPKPALLHSTFFPALQGAQTKMSASDPNSSIFLTDTAKQIKTKVNKHAFSGGRDTIEEHRQFGGNCDVDVSFMYLTFFLEDDDKLEQIRKDYTSGAMLTGELKKALIEVLQPLIAEHQARRKEVTDEIVKEFMTPRKLSFDFQ

SEQ ID NO: 68417 - protein, 471 aa, Homo sapiens
MPNSEPASLLELFNSIATQGELVRSLKAGNASKDEIDSAVKMLVSLKMSYKAAAGEDYKADCPPGNPAPTSNHGPDATEAEEDFVDPWTVQTSSAKGIDYDKLIVRFGSSKIDKELINRIERATGQRPHHFLRRGIFFSHRDMNQVLDAYENKKPFYLYTGRGPSSEAMHVGHLIPFIFTKWLQDVFNVPLVIQMTDDEKYLWKDLTLDQAYSYAVENAKDIIACGFDINKTFIFSDLDYMGMSSGFYKNVVKIQKHVTFNQVKGIFGFTDSDCIGKISFPAIQAAPSFSNSFPQIFRDRTDIQCLIPCAIDQDPYFRMTRDVAPRIGYPKPALLHSTFFPALQGAQTKMSASDPNSSIFLTDTAKQIKTKVNKHAFSGGRDTIEEHRQFGGNCDVDVSFMYLTFFLEDDDKLEQIRKDYTSGAMLTGELKKALIEVLQPLIAEHQARRKEVTDEIVKEFMTPRKLSFDFQ

SEQ ID NO: 68418 - protein, 430 aa, Homo sapiens; identical to SEQ ID NO: 68416

SEQ ID NO: 68419 - protein, 471 aa, Homo sapiens; identical to SEQ ID NO: 68417

SEQ ID NO: 68420 - protein, 227 aa, Homo sapiens
MLVSLKMSYKAAAGEDYKADCPPGNPAPTSNHGPDATEAEEDFVDPWTVQTSSAKGIDYDKLIVRFGSSKIDKELINRIERATGQRPHHFLRRGIFFSHRDMNQVLDAYENKKPFYLYTGRGPSSEAMHVGHLIPFIFTKWLQDVFNVPLVIQMTDDEKYLWKDLTLDQAYSYAVENAKDIIACGFDINKTFIFSDLDYMGMSSGFYKNVVKIQKHVTFNQVKGIFG

SEQ ID NO: 68421 - protein, 107 aa, Homo sapiens
MPNSEPASLLELFNSIATQGELVRSLKAGNASKDEIDSAVKMLVSLKMSYKAAAGEDYKADCPPGNPAPTSNHGPDATEAEEDFVDPWTVQTSSAKGIDYDKLIVRF

SEQ ID NO: 68422 - protein, 150 aa, Homo sapiens
MPNSEPASLLELFNSIATQGELVRSLKAGNASKDEIDSAVKMLVSLKMSYKAAAGEDYKADCPPGNPAPTSNHGPDATEAEEDFVDPWTVQTSSAKGIDYDKLIVRFGSSKIDKELINRIERATGQRPHHFLRRGIFFSHRDMNQVLDAY

SEQ ID NO: 68423 - protein, 97 aa, Homo sapiens
MPNSEPASLLELFNSIATQGELVRSLKAGNASKDEIDSAVKMLVSLKMSYKAAAGEDYKADCPPGNPAPTSNHGPDATEAEEDFVDPWTVQTSSAKG

SEQ ID NO: 68424 - protein, 26 aa, Homo sapiens
MPNSEPASLLELFNSIATQGELVRSL

SEQ ID NO: 68425 - protein, 105 aa, Homo sapiens
MPNSEPASLLELFNSIATQGELVRSLKAGNASKDEIDSAVKMLVSLKMSYKAAAGEDYKADCPPGNPAPTSNHGPDATEAEEDFVDPWTVQTSSAKGIDYDKLIV

SEQ ID NO: 68426 - protein, 33 aa, Homo sapiens
MPNSEPASLLELFNSIATQGELVRSLKAGNASK

SEQ ID NO: 68427 - protein, 68 aa, Homo sapiens
MPNSEPASLLELFNSIATQGELVRSLKAGNASKDEIDSAVKMLVSLKMSYKAAAGEDYKADCPPGNPA

SEQ ID NO: 68428 - protein, 124 aa, Homo sapiens
MPNSEPASLLELFNSIATQGELVRSLKAGNASKDEIDSAVKMLVSLKMSYKAAAGEDYKADCPPGNPAPTSNHGPDATEAEEDFVDPWTVQTSSAKGIDYDKLIVRFGSSKIDKELINRIERAT

SEQ ID NO: 68429 - protein, 86 aa, Homo sapiens
MPNSEPASLLELFNSIATQGELVRSLKAGNASKDEIDSAVKMLVSLKMSYKAAAGEDYKADCPPGNPAPTSNHGPDATEAEEDFVD

SEQ ID NO: 68430 - protein, 55 aa, Homo sapiens
MPNSEPASLLELFNSIATQGELVRSLKAGNASKDEIDSAVKMLVSLKMSYKAAAG

SEQ ID NO: 68431 - protein, 63 aa, Homo sapiens
MPNSEPASLLELFNSIATQGELVRSLKAGNASKDEIDSAVKMLVSLKMSYKAAAGEDYKADCP

SEQ ID NO: 68432 - protein, 70 aa, Homo sapiens
MPNSEPASLLELFNSIATQGELVRSLKAGNASKDEIDSAVKMLVSLKMSYKAAAGEDYKADCPPGNPAPT

SEQ ID NO: 68433 - protein, 58 aa, Homo sapiens
MPNSEPASLLELFNSIATQGELVRSLKAGNASKDEIDSAVKMLVSLKMSYKAAAGEDY

SEQ ID NO: 68434 - protein, 140 aa, Homo sapiens
MLVSLKMSYKAAAGEDYKADCPPGNPAPTSNHGPDATEAEEDFVDPWTVQTSSAKGIDYDKLIVRFGSSKIDKELINRIERATGQRPHHFLRRGIFFSHRDMNQVLDAYENKKPFYLYTGRGPSSEAMHVGHLIPFIFTK

SEQ ID NO: 68435 - protein, 153 aa, Homo sapiens
MLVSLKMSYKAAAGEDYKADCPPGNPAPTSNHGPDATEAEEDFVDPWTVQTSSAKGIDYDKLIVRFGSSKIDKELINRIERATGQRPHHFLRRGIFFSHRDMNQVLDAYENKKPFYLYTGRGPSSEAMHVGHLIPFIFTKWLQDVFNVPLVIQ

SEQ ID NO: 68436 - protein, 224 aa, Homo sapiens
MLVSLKMSYKAAAGEDYKADCPPGNPAPTSNHGPDATEAEEDFVDPWTVQTSSAKGIDYDKLIVRFGSSKIDKELINRIERATGQRPHHFLRRGIFFSHRDMNQVLDAYENKKPFYLYTGRGPSSEAMHVGHLIPFIFTKWLQDVFNVPLVIQMTDDEKYLWKDLTLDQAYSYAVENAKDIIACGFDINKTFIFSDLDYMGMSSGFYKNVVKIQKHVTFNQVKG

SEQ ID NO: 68437 - protein, 430 aa, Homo sapiens; identical to SEQ ID NO: 68416

SEQ ID NO: 68438 - protein, 114 aa, Homo sapiens
MPNSEPASLLELFNSIATQGELVRSLKAGNASKDEIDSAVKMLVSLKMSYKAAAGEDYKADCPPGNPAPTSNHGPDATEAEEDFVDPWTVQTSSAKGIDYDKLIVRFGSSKIDK

SEQ ID NO: 68439 - protein, 58 aa, Homo sapiens; identical to SEQ ID NO: 68433

SEQ ID NO: 68440 - protein, 152 aa, Homo sapiens
MPNSEPASLLELFNSIATQGELVRSLKAGNASKDEIDSAVKMLVSLKMSYKAAAGEDYKADCPPGNPAPTSNHGPDATEAEEDFVDPWTVQTSSAKGIDYDKLIVRFGSSKIDKELINRIERATGQRPHHFLRRGIFFSHRDMNQVLDAYEN

SEQ ID NO: 68441 - protein, 471 aa, Homo sapiens; identical to SEQ ID NO: 68417

SEQ ID NO: 68442 - protein, 154 aa, Homo sapiens
MLVSLKMSYKAAAGEDYKADCPPGNPAPTSNHGPDATEAEEDFVDPWTVQTSSAKGIDYDKLIVRFGSSKIDKELINRIERATGQRPHHFLRRGIFFSHRDMNQVLDAYENKKPFYLYTGRGPSSEAMHVGHLIPFIFTKWLQDVFNVPLVIQM

SEQ ID NO: 68443 - protein, 212 aa, Homo sapiens
MPNSEPASLLELFNSIATQGELVRSLKAGNASKDEIDSAVKMLVSLKMSYKAAAGEDYKADCPPGNPAPTSNHGPDATEAEEDFVDPWTVQTSSAKGIDYDKLIVRFGSSKIDKELINRIERATGQRPHHFLRRGIFFSHRDMNQVLDAYENKKPFYLYTGRGPSSEAMHVGHLIPFIFTKWLQDVFNVPLVIQMTDDEKYLWKDLTLDQAY

SEQ ID NO: 68444 - protein, 346 aa, Homo sapiens
MSLLRSLRVFLVARTGSYPAGSLLRQSPQPRHTFYAGPRLSASASSKELLMKLRRKTGYSFVNCKKALETCGGDLKQAEIWLHKEAQKEGWSKAAKLQGRKTKEGLIGLLQEGNTTVLVEVNCETDFVSRNLKFQLLVQQVALGTMMHCQTLKDQPSAYSKVQWLTPVNLALWEAEAGGSLEGFLNSSELSGLPAGPDREGSLKDQLALAIGKLGENMILKRAAWVKVPSGFYVGSYVHGAMQSPSLHKLVLGKYGALVICETSEQKTNLEDVGRRLGQHVVGMAPLSVGSLDDEPGGEAETKMLSQPYLLDPSITLGQYVQPQGVSVVDFVRFECGEGEEAAETE

SEQ ID NO: 68445 - protein, 285 aa, Homo sapiens
MVYCTTTWAIWNCQLLLGYKPLQNVTGLNTVGSCNTVAEIWLHKEAQKEGWSKAAKLQGRKTKEGLIGLLQEGNTTVLVEVNCETDFVSRNLKFQLLVQQVALGTMMHCQTLKDQPSAYSKGFLNSSELSGLPAGPDREGSLKDQLALAIGKLGENMILKRAAWVKVPSGFYVGSYVHGAMQSPSLHKLVLGKYGALVICETSEQKTNLEDVGRRLGQHVVGMAPLSVGSLDDEPGGEAETKMLSQPYLLDPSITLGQYVQPQGVSVVDFVRFECGEGEEAAETE

SEQ ID NO: 68446 - protein, 325 aa, Homo sapiens
MSLLRSLRVFLVARTGSYPAGSLLRQSPQPRHTFYAGPRLSASASSKELLMKLRRKTGYSFVNCKKALETCGGDLKQAEIWLHKEAQKEGWSKAAKLQGRKTKEGLIGLLQEGNTTVLVEVNCETDFVSRNLKFQLLVQQVALGTMMHCQTLKDQPSAYSKGFLNSSELSGLPAGPDREGSLKDQLALAIGKLGENMILKRAAWVKVPSGFYVGSYVHGAMQSPSLHKLVLGKYGALVICETSEQKTNLEDVGRRLGQHVVGMAPLSVGSLDDEPGGEAETKMLSQPYLLDPSITLGQYVQPQGVSVVDFVRFECGEGEEAAETE

SEQ ID NO: 68447 - protein, 167 aa, Homo sapiens
MSLLRSLRVFLVARTGSYPAGSLLRQSPQPRHTFYAGPRLSASASSKELLMKLRRKTGYSFVNCKKALETCGGDLKQAEIWLHKEAQKEGWSKAAKLQGRKTKEGLIGLLQEGNTTVLVEVNCETDFVSRNLKFQLLVQQVALGTMMHCQTLKDQPSAYSKENWEKT

SEQ ID NO: 68448 - protein, 215 aa, Homo sapiens
MSLLRSLRVFLVARTGSYPAGSLLRQSPQPRHTFYAGPRLSASASSKELLMKLRRKTGYSFVNCKKALETCGGDLKQAEIWLHKEAQKEGWSKAAKLQGRKTKEGLIGLLQEGNTTVLVEVNCETDFVSRNLKFQLLVQQVALGTMMHCQTLKDQPSAYSKGFLNSSELSGLPAGPDREGSLKDQLALAIGLPFQIGAVSELQLPESNFLQNTSS

SEQ ID NO: 68449 - protein, 144 aa, Homo sapiens
MKSQWCRPVAMDLGVYQLRHFSISFLSSLLGTENASVRLDNSSSGASVVAIDNKIEQAMDLVKSHLMYAVREEVEVLKEQIKELIEKNSQLEQENNLLKTLASPEQLAQFQAQLQTGSPPATTQPQGTTQPPAQPASQGSGPTA

SEQ ID NO: 68450 - protein, 1073 aa, Homo sapiens
MHQPPESTAAAAAAADISARKMAHPAMFPRRGSGSGSASALNAAGTGVGSNATSSEDFPPPSLLQPPPPAASSTSGPQPPPPQSLNLLSQAQLQAQPLAPGGTQMKKKSGFQITSVTPAQISASISSNNSIAEDTESYDDLDESHTEDLSSSEILDVSLSRATDLGEPERSSSEETLNNFQEAETPGAVSPNQPHLPQPHLPHLPQQNVVINGNAHPHHLHHHHQIHHGHHLQHGHHHPSHVAVASASITGGPPSSPVSRKLSTTGSSDSITPVAPTSAVSSSGSPASVMTNMRAPSTTGGIGINSVTGTSTVNNVNITAVGSFNPNVTSSMLGNVNISTSNIPSAAGVSVGPGVTSGVNVNILSGMGNGTISSSAAVSSVPNAAAGMTGGSVSSQQQQPTVNTSRFRVVKLDSSSEPFKKGRWTCTEFYEKENAVPATEGVLINKVVETVKQNPIEVTSERESTSGSSVSSSVSTLSHYTESVGSGEMGAPTVVVQQQQQQQQQQQQQPALQGVTLQQMDFGSTGPQSIPAVSIPQSISQSQISQVQLQSQELSYQQKQGLQPVPLQATMSAATGIQPSPVNVVGVTSALGQQPSISSLAQPQLPYSQAAPPVQTPLPGAPPPQQLQYGQQQPMVSTQMAPGHVKSVTQNPASEYVQQQPILQTAMSSGQPSSAGVGAGTTVIPVAQPQGIQLPVQPTAVPAQPAGASVQPVGQAPAAVSAVPTGSQIANIGQQANIPTAVQQPSTQVPPSVIQQGAPPSSQVVPPAQTGIIHQGVQTSAPSLPQQLVIASQSSLLTVPPQPQGVEPVAQGIVSQQLPAVSSLPSASSISVTSQVSSTGPSGMPSAPTNLVPPQNIAQTPATQNGNLVQSVSQPPLIATNTNLPLAQQIPLSSTQFSAQSLAQAIGSQIEDARRAAEPSLVGLPQTISGDSGGMSAVSDGSSSSLAASASLFPLKVLPLTTPLVDGEDESSSGASVVAIDNKIEQAMDLVKSHLMYAVREEVEVLKEQIKELIEKNSQLEQENNLLKTLASPEQLAQFQAQLQTGSPPATTQPQGTTQPPAQPASQGSGPTA

SEQ ID NO: 68451 - protein, 41 aa, Homo sapiens
MKSQWCRPVAMDLGVYQLRHFSISFLSSLLGTENASVRLDN

SEQ ID NO: 68452 - protein, 142 aa, Homo sapiens
MHQPPESTAAAAAAADISARKMAHPAMFPRRGSGSGSASALNAAGTGVGSNATSSEDFPPPSLLQPPPPAASSTSGPQPPPPQSLNLLSQAQLQAQPLAPGGTQMKKKSGFQITSVTPAQISASISSNNSIAEDTESYDDLD

SEQ ID NO: 68453 - protein, 570 aa, Homo sapiens
MHQPPESTAAAAAAADISARKMAHPAMFPRRGSGSGSASALNAAGTGVGSNATSSEDFPPPSLLQPPPPAASSTSGPQPPPPQSLNLLSQAQLQAQPLAPGGTQMKKKSGFQITSVTPAQISASISSNNSIAEDTESYDDLDESHTEDLSSSEILDVSLSRATDLGEPERSSSEETLNNFQEAETPGAVSPNQPHLPQPHLPHLPQQNVVINGNAHPHHLHHHHQIHHGHHLQHGHHHPSHVAVASASITGGPPSSPVSRKLSTTGSSDSITPVAPTSAVSSSGSPASVMTNMRAPSTTGGIGINSVTGTSTVNNVNITAVGSFNPNVTSSMLGNVNISTSNIPSAAGVSVGPGVTSGVNVNILSGMGNGTISSSAAVSSVPNAAAGMTGGSVSSQQQQPTVNTSRFRVVKLDSSSEPFKKGRWTCTEFYEKENAVPATEGVLINKVVETVKQNPIEVTSERESTSGSSVSSSVSTLSHYTESVGSGEMGAPTVVVQQQQQQQQQQQQQPALQGVTLQQMDFGSTGPQSIPAVSIPQSISQSQISQVQLQSQELSYLTMKVVLLIVYLCM

SEQ ID NO: 68454 - protein, 200 aa, Homo sapiens
MAQSKLDCRSPVGLDCCNCCLDLAHRSGLQRGSSGENNNPGSPTVSNFRQLQEKLVFENLNTDKLNSIMRQDSLEPVLRDPCYLINEGICNRNIDQTMLSILLFFHSASGASVVAIDNKIEQAMDLVKNHLMYAVREEVEILKEQIRELVEKNSQLERENTLLKTLASPEQLEKFQSCLSPEEPAPESPQVPEAPGGSAV

SEQ ID NO: 68455 - protein, 110 aa, Homo sapiens
MAFQPPYSSSLFRKRDNASGASVVAIDNKIEQAMDLVKNHLMYAVREEVEILKEQIRELVEKNSQLERENTLLKTLASPEQLEKFQSCLSPEEPAPESPQVPEAPGGSAV

SEQ ID NO: 68456 - protein, 200 aa, Homo sapiens; identical to SEQ ID NO: 68454

SEQ ID NO: 68457 - protein, 200 aa, Homo sapiens; identical to SEQ ID NO: 68454

SEQ ID NO: 68458 - protein, 77 aa, Homo sapiens
MDLVKNHLMYAVREEVEILKEQIRELVEKNSQLERENTLLKTLASPEQLEKFQSCLSPEEPAPESPQVPEAPGGSAV

SEQ ID NO: 68459 - protein, 134 aa, Homo sapiens
MNTEMYQTPMEVAVYQLHNFSISFFSSLLGGDVVSVKLDNSASGASVVAIDNKIEQAMDLVKNHLMYAVREEVEILKEQIRELVEKNSQLERENTLLKTLASPEQLEKFQSCLSPEEPAPESPQVPEAPGGSAV

SEQ ID NO: 68460 - protein, 179 aa, Homo sapiens
MAQSKLDCRSPVGLDCCNCCLDLAHRSGLQRGSSGENNNPGSPTVSNFRQDSLEPVLRDPCYLINEGICNRNIDQTMLSILLFFHSASGASVVAIDNKIEQAMDLVKNHLMYAVREEVEILKEQIRELVEKNSQLERENTLLKTLASPEQLEKFQSCLSPEEPAPESPQVPEAPGGSAV

SEQ ID NO: 68461 - protein, 123 aa, Homo sapiens
MAQSKLDCRSPVGLDCCNCCLDLAHRSGLQRGSSGENNNPGSPTVSNFRQLQEKLVFENLNTDKLNSIMRQDSLEPVLRDPCYLINEGICNRNIDQTMLSILLFFHSASGASVVAIDNKIEQA

SEQ ID NO: 68462 - protein, 25 aa, Homo sapiens
MDLVKNHLMYAVREEVEILKEQIRE

SEQ ID NO: 68463 - protein, 116 aa, Homo sapiens
MAQSKLDCRSPVGLDCCNCCLDLAHRSGLQRGSSGENNNPGSPTVSNFRQLQEKLVFENLNTDKLNSIMRQDSLEPVLRDPCYLINEGICNRNIDQTMLSILLFFHSASGASVVAI

SEQ ID NO: 68464 - protein, 58 aa, Homo sapiens
MAQSKLDCRSPVGLDCCNCCLDLAHRSGLQRGSSGENNNPGSPTVSNFRQLQEKLVFE

SEQ ID NO: 68465 - protein, 84 aa, Homo sapiens
MAQSKLDCRSPVGLDCCNCCLDLAHRSGLQRGSSGENNNPGSPTVSNFRQLQEKLVFENLNTDKLNSIMRQDSLEPVLRDPCYL

SEQ ID NO: 68466 - protein, 200 aa, Homo sapiens; identical to SEQ ID NO: 68454

SEQ ID NO: 68467 - protein, 100 aa, Homo sapiens
MAQSKLDCRSPVGLDCCNCCLDLAHRSGLQRGSSGENNNPGSPTVSNFRQLQEKLVFENLNTDKLNSIMRQDSLEPVLRDPCYLINEGICNRNIDQTMLS

SEQ ID NO: 68468 - protein, 119 aa, Homo sapiens
MAQSKLDCRSPVGLDCCNCCLDLAHRSGLQRGSSGENNNPGSPTVSNFRQLQEKLVFENLNTDKLNSIMRQDSLEPVLRDPCYLINEGICNRNIDQTMLSILLFFHSASGASVVAIDNK

SEQ ID NO: 68469 - protein, 132 aa, Homo sapiens
MRQDSLEPVLRDPCYLINEGICNRNIDQTMLSILLFFHSASGASVVAIDNKIEQAMDLVKNHLMYAVREEVEILKEQIRELVEKNSQLERENTLLKTLASPEQLEKFQSCLSPEEPAPESPQVPEAPGGSAV

SEQ ID NO: 68470 - protein, 124 aa, Homo sapiens
MAQSKLDCRSPVGLDCCNCCLDLAHRSGLQRGSSGENNNPGSPTVSNFRQLQEKLVFENLNTDKLNSIMRQDSLEPVLRDPCYLINEGICNRNIDQTMLSILLFFHSASGASVVAIDNKIEQAM

SEQ ID NO: 68471 - protein, 395 aa, Homo sapiens
MSGGKKKSSFQITSVTTDYEGPGSPGASDPPTPQPPTGPPPRLPNGEPSPDPGGKGTPRNGSPPPGAPSSRFRVVKLPHGLGEPYRRGRWTCVDVYERDLEPHSFGGLLEGIRGASGGAGGRSLDSRLELASLGLGAPTPPSGLSQGPTSWLRPPPTSPGPQARSFTGGLGQLVVPSKAKAEKPPLSASSPQQRPPEPETGESAGTSRAATPLPSLRVEAEAGGSGARTPPLSRRKAVDMRLRMELGAPEEMGQVPPLDSRPSSPALYFTHDASLVHKSPDPFGAVAAQKFSLAHSMLAISGHLDSDDDSGSGSLVGIDNKIEQAMDLVKSHLMFAVREEVEVLKEQIRELAERNAALEQENGLLRALASPEQLAQLPSSGVPRLGPPAPNGPSV

SEQ ID NO: 68472 - protein, 437 aa, Homo sapiens
MSGLDGVKRTTPLQTHSIIISDQVPSDQDAHQYLRLRDQSEATQVMAEPGEGGSETVALPPPPPSEEGGVPQDAAGRGGTPQIRVVGGRGHVAIKAGQEEGQPPAEGLAAASVVMAADRSLKKGVQGGEKALEICGAQRSASELTAGAEAEAEEVKTGKCATVSAAVAERESAEVVKEGLAEKEVMEEQMEVEEQPPEGEEIEVAEEDRLEEEAREEEGPWPLHEALRMDPLEAIQLELDTVNAQADRAFQQLEHKFGRMRRHYLERRNYIIQNIPGFWMTAFRNHPQLSAMIRGQDAEMLRYITNLEVKELRHPRTGCKFKFFFRRNPYFRNKLIVKEYEVRSSGRVVSLSTPIIWRRGHEPQSFIRRNQDLICSFFTWFSDHSLPESDKIAEIIKEDLWPNPLQYYLLREGVRRARRRPLREPVEIPRPFGFQSG

SEQ ID NO: 68473 - protein, 173 aa, Homo sapiens [sequence omitted]

SEQ ID NO: 68474 - protein, 693 aa, Homo sapiens
MDRPDEGPPAKTRRLSSSESPQRDPPPPPPPPPLLRLPLPPPQQRPRLQEETEAAQVLADMRGVGLGPALPPPPPYVILEEGGIRAYFTLGAECPGWDSTIESGYGEAPPPTESLEALPTPEASGGSLEIDFQVVQSSSFGGEGALETCSAVGWAPQRLVDPKSKEEAIIIVEDEDEDERESMRSSRRRRRRRRRKQRKVKRESRERNAERMESILQALEDIQLDLEAVNIKAGKAFLRLKRKFIQMRRPFLERRDLIIQHIPGFWVKAFLNHPRISILINRRDEDIFRYLTNLQVQDLRHISMGYKMKLYFQTNPYFTNMVIVKEFQRNRSGRLVSHSTPIRWHRGQEPQARRHGNQDASHSFFSWFSNHSLPEADRIAEIIKNDLWVNPLRYYLRERGSRIKRKKQEMKKRKTRGRCEVVIMEDAPDYYAVEDIFSEISDIDETIHDIKISDFMETTDYFETTDNEITDINENICDSENPDHNEVPNNETTDNNESADDHETTDNNESADDNNENPEDNNKNTDDNEENPNNNENTYGNNFFKGGFWGSHGNNQDSSDSDNEADEASDDEDNDGNEGDNEGSDDDGNEGDNEGSDDDDRDIEYYEKVIEDFDKDQADYEDVIEIISDESVEEEGIEEGIQQDEDIYEEGNYEEEGSEDVWEEGEDSDDSDLEDVLQVPNGWANPGKRGKTG

SEQ ID NO: 68475 - protein, 353 aa, Homo sapiens
MPWPLLLLLAVSGAQTTRPCFPGCQCEVETFGLFDSFSLTRVDCSGLGPHIMPVPIPLDTAHLDLSSNRLEMVNESVLAGPGYTTLAGLDLSHNLLTSISPTAFSRLRYLESLDLSHNGLTALPAESFTSSPLSDVNLSHNQLREVSVSAFTTHSQGRALHVDLSHNLIHRLVPHPTRAGLPAPTIQSLNLAWNRLHAVPNLRDLPLRYLSLDGNPLAVIGPGAFAGLGGLTHLSLASLQRLPELAPSGFRELPGLQVLDLSGNPKLNWAGAEVFSGLSSLQELDLSGTNLVPLPEALLLHLPALQSVSVGQDVRCRRLVREGTYPRRPGSSPKVALHCVDTRDSAARGPTIL

SEQ ID NO: 68476 - protein, 321 aa, Homo sapiens
MPWPLLLLLAVSGAQTTRPCFPGCQCEVETFGLFDSFSLTRVDCSGLGPHIMPVPIPLDTAHLDLSSNRLEMVNESVLAGPGYTTLAGLDLSHNLLTSSPLSDVNLSHNQLREVSVSAFTTHSQGRALHVDLSHNLIHRLVPHPTRAGLPAPTIQSLNLAWNRLHAVPNLRDLPLRYLSLDGNPLAVIGPGAFAGLGGLTHLSLASLQRLPELAPSGFRELPGLQVLDLSGNPKLNWAGAEVFSGLSSLQELDLSGTNLVPLPEALLLHLPALQSVSVGQDVRCRRLVREGTYPRRPGSSPKVALHCVDTRDSAARGPTIL

SEQ ID NO: 68477 - protein, 105 aa, Homo sapiens
MPWPLLLLLAVSGAQTTRPCFPGCQCEVETFGLFDSFSLTRVDCSGLGPHIMPVPIPLDTAHLDLSSNRLEMVNESVLAGPGYTTLAGLDLSHNLLTSISPTAFS

SEQ ID NO: 68478 - protein, 353 aa, Homo sapiens; identical to SEQ ID NO: 68475

SEQ ID NO: 68479 - protein, 150 aa, Homo sapiens
MPWPLLLLLAVSGAQTTRPCFPGCQCEVETFGLFDSFSLTRVDCSGLGPHIMPVPIPLDTAHLDLSSNRLEMVNESVLAGPGYTTLAGLDLSHNLLTSISPTAFSRLRYLESLDLSHNGLTALPAESFTSSPLSDVNLSHNQLREVSVSA

SEQ ID NO: 68480 - protein, 857 aa, Homo sapiens
MESEDLSGRELTIDSIMNKVRDIKNKFKNEDLTDELSLNKISADTTDNSGTVNQIMMMANNPEDWLSLLLKLEKNSVPLSDALLNKLIGRYSQAIEALPPDKYGQNESFARIQVRFAELKAIQEPDDARDYFQMARANCKKFAFVHISFAQFELSQGNVKKSKQLLQKAVERGAVPLEMLEIALRNLNLQKKQLLSEEEKKNLSASTVLTAQESFSGSLGHLQNRNNSCDSRGQTTKARFLYGENMPPQDAEIGYRNSLRQTNKTKQSCPFGRVPVNLLNSPDCDVKTDDSVVPCFMKRQTSRSECRDLVVPGSKPSGNDSCELRNLKSVQNSHFKEPLVSDEKSSELIITDSITLKNKTESSLLAKLEETKEYQEPEVPESNQKQWQSKRKSECINQNPAASSNHWQIPELARKVNTEQKHTTFEQPVFSVSKQSPPISTSKWFDPKSICKTPSSNTLDDYMSCFRTPVVKNDFPPACQLSTPYGQPACFQQQQHQILATPLQNLQVLASSSANECISVKGRIYSILKQIGSGGSSKVFQVLNEKKQIYAIKYVNLEEADNQTLDSYRNEIAYLNKLQQHSDKIIRLYDYEITDQYIYMVMECGNIDLNSWLKKKKSIDPWERKSYWKNMLEAVHTIHQHGIVHSDLKPANFLIVDGMLKLIDFGIANQMQPDTTSVVKDSQVGTVNYMPPEAIKDMSSSRENGKSKSKISPKSDVWSLGCILYYMTYGKTPFQQIINQISKLHAIIDPNHEIEFPDIPEKDLQDVLKCCLKRDPKQRISIPELLAHPYVQIQTHPVNQMAKGTTEEMKYVLGQLVGLNSPNSILKAAKTLYEHYSGGESHNSSSSKTFEKKRGKK

SEQ ID NO: 68481 - protein, 139 aa, Homo sapiens
MESEDLSGRELTIDSIMNKVRDIKNKFKNEDLTDELSLNKISADTTDNSGTVNQIMMMANNPEDWLSLLLKLEKNSVPLSDALLNKLIGRYSQAIEALPPDKYGQNESFARIQVRFAELKAIQEPDDARDYFQMARANC

SEQ ID NO: 68482 - protein, 176 aa, Homo sapiens
MESEDLSGRELTIDSIMNKVRDIKNKFKNEDLTDELSLNKISADTTDNSGTVNQIMMMANNPEDWLSLLLKLEKNSVPLSDALLNKLIGRYSQAIEALPPDKYGQNESFARIQVRFAELKAIQEPDDARDYFQMARANCKKFAFVHISFAQFELSQGNVKKSKQLLQKAVERGAVP

SEQ ID NO: 68483 - protein, 150 aa, Homo sapiens
MESEDLSGRELTIDSIMNKVRDIKNKFKNEDLTDELSLNKISADTTDNSGTVNQIMMMANNPEDWLSLLLKLEKNSVPLSDALLNKLIGRYSQAIEALPPDKYGQNESFARIQVRFAELKAIQEPDDARDYFQMARANCKKFAFVHISFA

SEQ ID NO: 68484 - protein, 856 aa, Homo sapiens
MESEDLSGRELTIDSIMNKVRDIKNKFKNEDLTDELSLNKISADTTDNSGTVNQIMMMANNPEDWLSLLLKLEKNSVPLSDALLNKLIGRYSQAIEALPPDKYGQNESFARIQVRFAELKAIQEPDDARDYFQMARANCKKFAFVHISFAQFELSQGNVKKSKQLLQKAVERGAVPLEMLEIALRNLNLQKKQLLSEEEKKNLSASTVLTAQESFSGSLGHLQNRNNSCDSRGQTTKARFLYGENMPPQDAEIGYRNSLRQTNKTKQSCPFGRVPVNLLNSPDCDVKTDDSVVPCFMKRQTSRSECRDLVVPGSKPSGNDSCELRNLKSVQNSHFKEPLVSDEKSSELIITDSITLKNKTESSLLAKLEETKEYQEPEVPESNQKQWQSKRKSECINQNPAASSNHWQIPELARKVNTEKHTTFEQPVFSVSKQSPPISTSKWFDPKSICKTPSSNTLDDYMSCFRTPVVKNDFPPACQLSTPYGQPACFQQQQHQILATPLQNLQVLASSSANECISVKGRIYSILKQIGSGGSSKVFQVLNEKKQIYAIKYVNLEEADNQTLDSYRNEIAYLNKLQQHSDKIIRLYDYEITDQYIYMVMECGNIDLNSWLKKKKSIDPWERKSYWKNMLEAVHTIHQHGIVHSDLKPANFLIVDGMLKLIDFGIANQMQPDTTSVVKDSQVGTVNYMPPEAIKDMSSSRENGKSKSKISPKSDVWSLGCILYYMTYGKTPFQQIINQISKLHAIIDPNHEIEFPDIPEKDLQDVLKCCLKRDPKQRISIPELLAHPYVQIQTHPVNQMAKGTTEEMKYVLGQLVGLNSPNSILKAAKTLYEHYSGGESHNSSSSKTFEKKRGKK

SEQ ID NO: 68485 - protein, 455 aa, Homo sapiens
MTTMAAATLLRATPHFSGLAAGRTFLLQGLLRLLKAPALPLLCRGLAVEAKKTYVRDKPHVNVGTIGHVDHGKTTLTAAITKILAEGGGAKFKKYEEIDNAPEERARGITINAAHVEYSTAARHYAHTDCPGHADYVKNMITGTAPLDGCILVVAANDGPMPQTREHLLLARQIGVEHVVVYVNKADAVQDSEMVELVELEIRELLTEFGYKGEETPVIVGSALCALEGRDPELGLKSVQKLLDAVDTYIPVPARDLEKPFLLPVEAVYSVPGRGTVVTGTLERGILKKGDECELLGHSKNIRTVVTGIEMFHKSLERAEAGDNLGALVRGLKREDLRRGLVMVKPGSIKPHQKVEAQVYILSKEEGGRHKPFVSHFMPVMFSLTWDMACRIILPPEKELAMPGEDLKFNLILRQPMILEKGQRFTLRDGNRTIGTGLVTNTLAMTEEEKNIKWG

SEQ ID NO: 68486 - protein, 542 aa, Homo sapiens
MPLRDETLREVWASDSGHEEESLSPEAPRRPKQRPAPAQRLRKKRTEAPESPCPTGSKPRKPGAGRTGRPREEPSPDPAQARAPQTVYARFLRDPEAKKRDPRETFLVARAPDAEDEEEEEEEDEEDEEEEAEEKKEKILLPPKKPLREKSSADLKERRAKAQGPRGDLGSPDPPPKPLRVRNKEAPAGEGTKMRKTKKKGSGEADKDPSGSPASARKSPAAMFLVGEGSPDKKALKKKGTPKGARKEEEEEEEAATVIKKSNQKGKAKGKGKKKAKEERAPSPPVEVDEPREFVLRPAPQGRTVRCRLTRDKKGMDRGMYPSYFLHLDTEKKVFLLAGRKRKRSKTANYLISIDPTNLSRGGENFIGKLRSNLLGNRFTVFDNGQNPQRGYSTNVASLRQELAAVIYETNVLGFRGPRRMTVIIPGMSAENERVPIRPRNASDGLLVRWQNKTLESLIELHNKPPVWNDDSGSYTLNFQGRVTQASVKNFQIVHADDPDYIVLQFGRVAEDAFTLDYRYPLCALQAFAIALSSFDGKLACE

SEQ ID NO: 68487 - protein, 489 aa, Homo sapiens
MPLRDETLREVWASDSGHEEESLSPEAPRRPKQRPAPAQRLRKKRTEAPESPCPTGSKPRKPGEEEEEEEDEEDEEEEAEEKKEKILLPPKKPLREKSSADLKERRAKAQGPRGDLGSPDPPPKPLRVRNKEAPAGEGTKMRKTKKKGSGEADKDPSGSPASARKSPAAMFLVGEGSPDKKALKKKGTPKGARKEEEEEEEAATVIKKSNQKGKAKGKGKKKAKEERAPSPPVEVDEPREFVLRPAPQGRTVRCRLTRDKKGMDRGMYPSYFLHLDTEKKVFLLAGRKRKRSKTANYLISIDPTNLSRGGENFIGKLRSNLLGNRFTVFDNGQNPQRGYSTNVASLRQELAAVIYETNVLGFRGPRRMTVIIPGMSAENERVPIRPRNASDGLLVRWQNKTLESLIELHNKPPVWNDDSGSYTLNFQGRVTQASVKNFQIVHADDPDYIVLQFGRVAEDAFTLDYRYPLCALQAFAIALSSFDGKLACE

SEQ ID NO: 68488 - protein, 186 aa, Homo sapiens
MPLRDETLREVWASDSGHEEESLSPEAPRRPKQRPAPAQRLRKKRTEAPESPCPTGSKPRKPGEEEEEEEDEEDEEEEAEEKKEKILLPPKKPLREKSSADLKERRAKAQGPRGDLGSPDPPPKPLRVRNKEAPAGEGTKMRKTKKKGSGEADKDPSGSPASARKSPAAMFLVGEGSPDKKALKKK

SEQ ID NO: 68489 - protein, 520 aa, Homo sapiens
MSQDNDTLMRDILGHELAAMRLQKLEQQRRLFEKKQRQKRQELLMVQANPDASPWLWRSCLREERLLGDRGLGNPFLRKKVSEAHLPSGIHSALGTVSCGGDGRGERGLPTPRTEAVFRNLGLQSPFLSWLPDNSDAELEEVSVENGSVSPPPFKQSPRIRRKGWQAHQRPGTRAEGESDSQDMGDAHKSPNMGPNPGMDGDCVYENLAFQKEEDLEKKREASESTGTNSSAAHNEELSKALKGEGGTDSDHMRHEASLAIRSPCPGLEEDMEAYVLRPALPGTMMQCYLTRDKHGVDKGLFPLYYLYLETSDSLQRFLLAGRKRRRSKTSNYLISLDPTHLSRDGDNFVGKVRSNVFSTKFTIFDNGVNPDREHLTRNTARIRQELGAVCYEPNVLGYLGPRKMTVILPGTNSQNQRINVQPLNEQESLLSRYQRGDKQGLLLLHNKTPSWDKENGVYTLNFHGRVTRASVKNFQIVDPKHQEHLVLQFGRVGPDTFTMDFCFPFSPLQAFSICLSSFN

SEQ ID NO: 68490 - protein, 442 aa, Homo sapiens
MEASRCRLSPSGDSVFHEEMMKMRQAKLDYQRLLLEKRQRKKRLEPFMVQPNPEARLRRAKPRASDEQTPLVNCHTPHSNVILHGIDGPAAVLKPDEVHAPSVSSSVVEEDAENTVDTASKPGLQERLQKHDISESVNFDEETDGISQSACLERPNSASSQNSTDTGTSGSATAAQPADNLLGDIDDLEDFVYSPAPQGVTVRCRIIRDKRGMDRGLFPTYYMYLEKEENQKIFLLAARKRKKSKTANYLISIDPVDLSREGESYVGKLRSNLMGTKFTVYDRGICPMKGRGLVGAAHTRQELAAISYETNVLGFKGPRKMSVIIPGMTLNHKQIPYQPQNNHDSLLSRWQNRTMENLVELHNKAPVWNSDTQSYVLNFRGRVTQASVKNFQIVHKNDPDYIVMQFGRVADDVFTLDYNYPLCAVQAFGIGLSSFDSKLACE

SEQ ID NO: 68491 - protein, 442 aa, Homo sapiens; identical to SEQ ID NO: 68490

SEQ ID NO: 68492 - protein, 170 aa, Homo sapiens
MMKMRQAKLDYQRLLLEKRQRKKRLEPFMVQPNPEARLRRAKPRASDEQTPLVNCHTPHSNVILHGIDGPAAVLKPDEVHAPSVSSSVVEEDAENTVDTASKPGLQERLQKHDISESVNFDEETDGISQSACLERPNSASSQNSTFSSFCQKTEDTGYRHFRFCYCRPTS

SEQ ID NO: 68493 - protein, 266 aa, Homo sapiens
MLKTPWILLPSQDFRSVSKSMDTGTSGSATAAQPADNLLGDIDDLEDFVYSPAPQGVTVRCRIIRDKRGMDRGLFPTYYMYLEKEENQKIFLLAARKRKKSKTANYLISIDPVDLSREGESYVGKLRSNLMGTKFTVYDRGICPMKGRGLVGAAHTRQELAAISYNHDSLLSRWQNRTMENLVELHNKAPVWNSDTQSYVLNFRGRVTQASVKNFQIVHKNDPDYIVMQFGRVADDVFTLDYNYPLCAVQAFGIGLSSFDSKLACE

SEQ ID NO: 68494 - protein, 501 aa, Homo sapiens
MEASRCRLSPSGDSVFHEEMMKMRQAKLDYQRLLLEKRQRKKRLEPFMVQPNPEARLRRAKPRASDEQTPLVNCHTPHSNVILHGIDGPAAVLKPDEVHAPSVSSSVVEEDAENTVDTASKPGLQERLQKHDISESVNFDEETDGISQSACLERPNSASSQNSTDTGTSGSATAAQPADNLLGDIDDLEDFVYSPAPQGVTVRCRIIRDKRGMDRGLFPTYYMYLEKEENQKIFLLAARKRKKSKTANYLISIDPVDLSREGESYVGKLRSNLMGTKFTVYDRGICPMKGRGLVGAAHTRQELAAISYETNVLGFKGPRKMSVIIPGMTLNHKQIPYQPQNNHDSLLSRWQNRTMENLVELHNKAPVWNSDTQSYVLNFRGRVTQASVKNFQIVHKNDPDYIVMQFGRVADDVFTLDYNYPLCAVQAFGIGLSSFDKCIQTLRMQELCELHRQHHSAASLVHRTVCQRWVGHPWRLLPQTSLLWTDLSPPPVVPAPHQISM

SEQ ID NO: 68495 - protein, 422 aa, Homo sapiens
MALSDEPAAGGPEEEAEDETLAFGAALEAFGESAETRALLGRLREVHGGGAEREVALERFREWMMNLLLDIVQDQTSPASLVHLAFKFLYIITKVRGYKTFLRLFPHEVADVEPVLDLVTIQNPKDHEAWETRYMLLLWLSVTCLIPFDFSRLDGNLLTQPGQARMSIMDRILQIAESYLIVSDKARDAAAVLVSRFITRPDVKQSKMAEFLDWSLCNLARSSFQTMQGVITMDGTLQALAQIFKHGKREDCLPYAATVLRCLDGCRLPESNQTLLRKLGVKLVQRLGLTFLKPKVAAWRYQRGCRSLAANLQLLTQGQSEQKPLILTEDDDEDDDVPEGVERVIEQLLVGLKDKDTVVRWSAAKGIGRMAGRLPRALADDVVGSVLDCFSFQETDKAWHGGCLALAELGRRGLLLPSRLVD

SEQ ID NO: 68496 - protein, 998 aa, Homo sapiens
MDGTLQALAQIFKHGKREDCLPYAATVLRCLDGCRLPESNQTLLRKLGVKLVQRLGLTFLKPKVAAWRYQRGCRSLAANLQLLTQGQSEQKPLILTEDDDEDDDVPEGVERVIEQLLVGLKDKDTVVRWSAAKGIGRMAGRLPRALADDVVGSVLDCFSFQETDKAWHGGCLALAELGRRGLLLPSRLVDVVAVILKALTYDEKRGACSVGTNVRDAACYVCWAFARAYEPQELKPFVTAISSALVIAAVFDRDINCRRAASAAFQENVGRQGTFPHGIDILTTADYFAVGNRSNCFLVISVFIAGFPEYTQPMIDHLVTMKISHWDGVIRELAARALHNLAQQAPEFSATQVFPRLLSMTLSPDLHMRHGSILACAEVAYALYKLAAQENRPVTDHLDEQAVQGLKQIHQQLYDRQLYRGLGGQLMRQAVCVLIEKLSLSKMPFRGDTVIDGWQWLINDTLRHLHLISSHSRQQMKDAAVSALAALCSEYYMKEPGEADPAIQEELITQYLAELRNPEEMTRCGFSLALGALPGFLLKGRLQQVLTGLRAVTHTSPEDVSFAESRRDGLKAIARICQTVGVKAGAPDEAVCGENVSQIYCALLGCMDDYTTDSRGDVGTWVRKAAMTSLMDLTLLLARSQPELIEAHTCERIMCCVAQQASEKIDRFRAHAASVFLTLLHFDSPPIPHVPHRGELEKLFPRSDVASVNWSAPSQAFPRITQLLGLPTYRYHVLLGLVVSLGGLTESTIRHSTQSLFEYMKGIQSDPQALGSFSGTLLQIFEDNLLNERVSVPLLKTLDHVLTHGCFDIFTTEEDHPFAVKLLALCKKEIKNSKDIQKLLSGIAVDFPSATLVCVGTVQMYAHTHLRLGAPGPHCAHGSALPRFCEMVQFPGDVRRQALLQLCLLLCHRFPLIRKTTASQVYETLLTYSDVVGADVLDEVVTVLSDTAWDAELAVVREQRNRLCDLLGVPPSWCPTWCLLKPVLEPIPHPCLVRMSCS

SEQ ID NO: 68497 - protein, 1192 aa, Homo sapiens
MALSDEPAAGGPEEEAEDETLAFGAALEAFGESAETRALLGRLREVHGGGAEREVALERFRVIMDKYQEQPHLLDPHLEWMMNLLLDIVQDQTSPASLVHLAFKFLYIITKVRGYKTFLRLFPHEVADVEPVLDLVTIQNPKDHEAWETRYMLLLWLSVTCLIPFDFSRLDGNLLTQPGQARMSIMDRILQIAESYLIVSDKARDAAAVLVSRFITRPDVKQSKMAEFLDWSLCNLARSSFQTMQGVITMDGTLQALAQIFKHGKREDCLPYAATVLRCLDGCRLPESNQTLLRKLGVKLVQRLGLTFLKPKVAAWRYQRGCRSLAANLQLLTQGQSEQKPLILTEDDDEDDDVPEGVERVIEQLLVGLKDKDTVVRWSAAKGIGRMAGRLPRALADDVVGSVLDCFSFQETDKAWHGGCLALAELGRRGLLLPSRLVDVVAVILKALTYDEKRGACSVGTNVRDAACYVCWAFARAYEPQELKPFVTAISSALVIAAVFDRDINCRRAASAAFQENVGRQGTFPHGIDILTTADYFAVGNRSNCFLVISVFIAGFPEYTQPMIDHLVTMKISHWDGVIRELAARALHNLAQQAPEFSATQVFPRLLSMTLSPDLHMRHGSILACAEVAYALYKLAAQENRPVTDHLDEQAVQGLKQIHQQLYDRQLYRGLGGQLMRQAVCVLIEKLSLSKMPFRGDTVIDGWQWLINDTLRHLHLISSHSRQQMKDAAVSALAALCSEYYMKEPGEADPAIQEELITQYLAELRNPEEMTRCGFSLALGALPGFLLKGRLQQVLTGLRAVTHTSPEDVSFAESRRDGLKAIARICQTVGVKAGAPDEAVCGENVSQIYCALLGCMDDYTTDSRGDVGTWVRKAAMTSLMDLTLLLARSQPELIEAHTCERIMCCVAQQASEKIDRFRAHAASVFLTLLHFDSPPIPHVPHRGELEKLFPRSDVASVNWSAPSQAFPRITQLLGLPTYRYHVLLGLVVSLGGLTESTIRHSTQSLFEYMKGIQSDPQALGSFSGTLLQIFEDNLLNERVSVPLLKTLDHVLTHGCFDIFTTEEDHPFAVKLLALCKKEIKNSKDIQKLLSGIAVFCEMVQFPGDVRRQALLQLCLLLCHRFPLIRKTTASQVYETLLTYSDVVGADVLDEVVTVLSDTAWDAELAVVREQRNRLCDLLGVPRPQLVPQPGAC

SEQ ID NO: 68498 - protein, 311 aa, Homo sapiens
MAGRLPRALADDVVGSVLDCFSFQETDKAWHGGCLALAELGRRGLLLPSRLVDVVAVILKALTYDEKRGACSVGTNVRDAACYVCWAFARAYEPQELKPFVTAISSALVIAAVFDRDINCRRAASAAFQENVGRQGTFPHGIDILTTADYFAVGNRSNCFLVISVFIAGFPEYTQPMIDHLVTMKISHWDGVIRELAARALHNLAQQAPEFSATQVFPRLLSMTLSPDLHMRHGSILACAEVAYALYKLAAQENRPVTDHLDEQAVQGLKQIHQQPCICSWGLMSPESKAEFCVCVCRISLGRQCVHLSGL

SEQ ID NO: 68499 - protein, 750 aa, Homo sapiens
MALSDEPAAGGPEEEAEDETLAFGAALEAFGESAETRALLGRLREVHGGGAEREVALERFRVIMDKYQEQPHLLDPHLEWMMNLLLDIVQDQTSPASLVHLAFKFLYIITKVRGYKTFLRLFPHEVADVEPVLDLVTIQNPKDHEAWETRYMLLLWLSVTCLIPFDFSRLDGNLLTQPGQARMSIMDRILQIAESYLIVSDKARDAAAVLVSRFITRPDVKQSKMAEFLDWSLCNLARSSFQTMQGVITMDGTLQALAQIFKHGKREDCLPYAATVLRCLDGCRLPESNQTLLRKLGVKLVQRLGLTFLKPKVAAWRYQRGCRSLAANLQLLTQGQSEQKPLILTEDDDEDDDVPEGVERVIEQLLVGLKDKDTVVRWSAAKGIGRMAGRLPRALADDVVGSVLDCFSFQETDKAWHGGCLALAELGRRGLLLPSRLVDVVAVILKALTYDEKRGACSVGTNVRDAACYVCWAFARAYEPQELKPFVTAISSALVIAAVFDRDINCRRAASAAFQENVGRQGTFPHGIDILTTADYFAVGNRSNCFLVISVFIAGFPEYTQPMIDHLVTMKISHWDGVIRELAARALHNLAQQAPEFSATQVFPRLLSMTLSPDLHMRHGSILACAEVAYALYKLAAQENRPVTDHLDEQAVQGLKQIHQQLYDRQLYRGLGGQLMRQAVCVLIEKLSLSKMPFRGDTVIDGWQWLINDSLWLLVGLGRPSRLPSERPAPAGSHRFKSSYPHFPRGRKFC

SEQ ID NO: 68500 - protein, 184 aa, Homo sapiens
MKGIQSDPQALGSFSGTLLQIFEDNLLNERVSVPLLKTLDHVLTHGCFDIFTTEEDHPFAVKLLALCKKEIKNSKDIQKLLSGIAVFCEMVQFPGDVRRQALLQLCLLLCHRFPLIRKTTASQVYETLLTYSDVVGADVLDEVVTVLSDTAWDAELAVVREQRNRLCDLLGVPRPQLVPQPGAC

SEQ ID NO: 68501 - protein, 527 aa, Homo sapiens
MSDTLTADVIGRRVEVNGEHATVRFAGVVPPVAGPWLGVEWDNPERGKHDGSHEGTVYFKCRHPTGGSFIRPNKVNFGTDFLTAIKNRYVLEDGPEEDRKEQIVTIGNKPVETIGFDSIMKQQSQLSKLQEVSLRNCAVSCAGEKGGVAEACPNIRKVDLSKNLLSSWDEVIHIADQLRHLEVLNVSENKLKFPSGSVLTGTLSVLKVLVLNQTGITWAEVLRCVAGCPGLEELYLESNNIFISERPTDVLQTVKLLDLSSNQLIDENQLYLIAHLPRLEQLILSDTGISSLHFPDAGIGCKTSMFPSLKYLVVNDNQISQWSFFNELEKLPSLRALSCLRNPLTKEDKEAETARLLIIASIGQLKTLNKCEILPEERRRAELDYRKAFGNEWKQAGGHKDPEKNRLSEEFLTAHPRYQFLCLKYGAPEDWELKTQQPLMLKNQLLTLKIKYPHQLDQKVLEKQLPGSMTIQKVKGLLSRLLKVPVSDLLLSYESPKKPGREIELENDLKSLQFYSVENGDCLLVRW

SEQ ID NO: 68502 - protein, 527 aa, Homo sapiens; identical to SEQ ID NO: 68501

SEQ ID NO: 68503 - protein, 578 aa, Homo sapiens
MSDTLTADVIGRRVEVNGEHATVRFAGVVPPVAGPWLGVEWDNPERGKHDGSHEGTVYFKCRHPTGGSFIRPNKVNFGTDFLTAIKNRYVLEDGPEEDRKEQIVTIGNKPVETIGFDSIMKQQSQLSKLQEVSLRNCAVSCAGEKGGVAEACPNIRKVDLSKNLLSSWDEVIHIADQLRHLEVLNVSENKLKFPSGSVLTGTLSVLKVLVLNQTGITWAEAHAQCGGSRHGLDMQKDASKFVDLCVLQKCSTSNCIISAKDHTSMRMNVAKVLRCVAGCPGLEELYLESNNIFISERPTDVLQTVKLLDLSSNQLIDENQLYLIAHLPRLEQLILSDTGISSLHFPDAGIGCKTSMFPSLKYLVVNDNQISQWSFFNELEKLPSLRALSCLRNPLTKEDKEAETARLLIIASIGQLKTLNKCEILPEERRRAELDYRKAFGNEWKQAGGHKDPEKNRLSEEFLTAHPRYQFLCLKYGAPEDWELKTQQPLMLKNQLLTLKIKYPHQLDQKVLEKQLPGSMTIQKVKGLLSRLLKVPVSDLLLSYESPKKPGREIELENDLKSLQFYSVENGDCLLVRW

SEQ ID NO: 68504 - protein, 666 aa, Homo sapiens
MIHELLLALSGYPGSIFTWNKRSGLQVSQDFPFLHPSETSVLNRLCRLGTDYIRFTEFIEQYTGHVQQQDHHPSQQGQGGLHGIYLRAFCTGLDSVLQPYRQALLDLEQEFLGDPHLSISHVNYFLDQFQLLFPSVMVVVEQIKSQKIHGCQILETVYKHSCGGLPPVRSALEKILAVCHGVMYKQLSAWMLHGLLLDQHEEFFIKQGPSSGNVSAQPEEDEEDLGIGGLTGKQLRELQDLRLIEEENMLAPSLKQFSLRVEILPSYIPVRVAEKILFVGESVQMFENQNVNLTRKGSILKNQEDTFAAELHRLKQQPLFSLVDFEQVVDRIRSTVAEHLWKLMVEESDLLGQLKIIKDFYLLGRGELFQAFIDTAQHMLKTPPTAVTEHDVNVAFQQSAHKVLLDDDNLLPLLHLTIEYHGKEHKDATQAREGPSRETSPREAPASGWAALGLSYKVQWPLHILFTPAVLEKYNVVFKYLLSVRRVQAELQHCWALQMQRKHLKSNQTDAIKWRLRNHMAFLVDNLQYYLQVDVLESQFSQLLHQINSTRDFESIRLAHDHFLSNLLAQSFILLKPVFHCLNEILDLCHSFCSLVSQNLGPLDERGAAQLSILVKGFSRQSSLLFKILSSVRNHQINSDLAQLLLRLDYNKYYTQAGGTLGSFGM

SEQ ID NO: 68505 - protein, 219 aa, Homo sapiens
MADKAKPAKAANRTPPKSPGDPSKDRAAKRLSLESEGAGEGAAASPELSALEEAFRRFAVHGDARATGREMHGKNWSKLCKDCQVIDGRNVTVTDVDIVFSKIKGKSCRTITFEQFQEALEELAKKRFKDKSSEEAVREVHRLIEGKAPIISGVTKAISSPTVSRLTDTTKFTGSHKERFDPSGKGKGKAGRVDLVDESGYVSGYKHAGTYDQKVQGGK

SEQ ID NO: 68506 - protein, 377 aa, Homo sapiens
MYTFVVRDENSSVYAEVSRLLLATGHWKRLRRDNPRFNLMLGERNRLPFGRLGHEPGLVQLVNYYRGADKLCRKASLVKLIKTSPELAESCTWFPESYVIYPTNLKTPVAPAQNGIQPPISNSRTDEREFFLASYNRKKEDGEGNVWIAKSSAGAKGEGILISSEASELLDFIDNQGQVHVIQKYLEHPLLLEPGHRKFDIRSWVLVDHQYNIYLYREGVLRTASEPYHVDNFQDKTCHLTNHCIQKEYSKNYGKYEEGNEMFFKEFNQYLTSALNITLESSILLQIKHIIRNCLLSVEPAISTKHLPYQSFQLFGFDFMVDEELKVWLIEVNGAPACAQKLYAELCQGIVDIAISSVFPPPDVEQPQTQPAAFIKL

SEQ ID NO: 68507 - protein, 423 aa, Homo sapiens
MAGKVKWVTDIEKSVLINNFEKRGWVQVTENEDWNFYWMSVQTIRNVFSVEAGYRLSDDQIVNHFPNHYELTRKDLMVKNIKRYRKELEKEGSPLAEKDENGKYLYLDFVPVTYMLPADYNLFVEEFRKSPSSTWIMKPCGKAQGKGIFLINKLSQIKKWSRDSKTSSFVSQSNKEAYVISLYINNPLLIGGRKFDLRLYVLVSTYRPLRCYMYKLGFCRFCTVKYTPSTSELDNMFVHLTNVAIQKHGEDYNHIHGGKWTVSNLRLYLESTRGKEVTSKLFDEIHWIIVQSLKAVAPVMNNDKHCFECYGYDIIIDDKLKPWLIEVNASPSLTSSTANDRILKYNLINDTLNIAVPNGEIPDCKWNKSPPKEVLGNYEILYDEELAQGDGADRELRSRQGQSLGPRAGRSRDSGRAVLTTWK

SEQ ID NO: 68508 - protein, 394 aa, Homo sapiens
MAGKVKWVTDIEKSVLINNFEKRGWVQVTENEDWNFYWMSVQTIRNVFSVEAGYRLSDDQIVNHFPNHYELTRKDLMVKNIKRYRKELEKEGSPLAEKDENGKYLYLDFVPVTYMLPADYNLFVEEFRKSPSSTWIMKPCGKAQGKGIFLINKLSQIKKWSRDSKTSSFVSQSNKEAYVISLYINNPLLIGGRKFDLRLYVLVSTYRPLRCYMYKLGFCRFCTVKYTPSTSELDNMFVHLTNVAIQKHGEDYNHIHGGKWTVSNLRLYLESTRGKEVTSKLFDEIHWIIVQSLKAVAVNASPSLTSSTANDRILKYNLINDTLNIAVPNGEIPDCKWNKSPPKEVLGNYEILYDEELAQGDGADRELRSRQGQSLGPRAGRSRDSGRAVLTTWK

SEQ ID NO: 68509 - protein, 59 aa, Homo sapiens
MAGKVKWVTDIEKSVLINNFEKRGWVQVTENEDWNFYWLLDLPEFRYRSCLNEFPDFRV

SEQ ID NO: 68510 - protein, 355 aa, Homo sapiens
MPHQPTILLNTVSASASPCLHPGAQNIPSPTGLPRCRSGSHTIGPFSSFQSAAHIYSQKLSRPSSAKAAGSCYLNKHHSGIAKTQKEGEDASLYSKRYNQSMVTAELQRLAEKQAARQYSPSSHINLLTQQVTNLNLATGIINRSSASAPPTLRPIISPSGPTWSTQSDPQAPENHSSSPGSRSLQTGGFAWEGEVENNVYSQATGVVPQHKYHPTAGSYQLQFALQQLEQQKLQSRQLLDQSRARHQAIFGSQTLPNSNLWTMNNGAGCRISSATASGQKPTTLPQKVVPPPSSCASLVPKPPPNHEQVLRRATSQKASKGSSAEGQLNGLQSSLNPAAFVPITSSTVNSHTAL

SEQ ID NO: 68511 - protein, 1281 aa, Homo sapiens
MPIVMARDLEETASSSEDEEVISQEDHPCIMWTGGCRRIPVLVFHADAILTKDNNIRVIGERYHLSYKIVRTDSRLVRSILTAHGFHEVHPSSTDYNLMWTGSHLKPFLLRTLSEAQKVNHFPRSYELTRKDRLYKNIIRMQHTHGFKAFHILPQTFLLPAEYAEFCNSYSKDRGPWIVKPVASSRGRGVYLINNPNQISLEENILVSRYINNPLLIDDFKFDVRLYVLVTSYDPLVIYLYEEGLARFATVRYDQGAKNIRNQFMHLTNYSVNKKSGDYVSCDDPEVEDYGNKWSMSAMLRYLKQEGRDTTALMAHVEDLIIKTIISAELAIATACKTFVPHRSSCFELYGFDVLIDSTLKPWLLEVNLSPSLACDAPLDLKIKASMISDMFTVVGFVCQDPAQRASTRPIYPTFESSRRNPFQKPQRCRPLSASDAEMKNLVGSAREKGPGKLGGSVLGLSMEEIKVLRRVKEENDRRGGFIRIFPTSETWEIYGSYLEHKTSMNYMLATRLFQDRMTADGAPELKIESLNSKAKLHAALYERKLLSLEVRKRRRRSSRLRAMRPKYPVITQPAEMNVKTETESEEEEEVALDNEDEEQEASQEESAGFLRENQAKYTPSLTALVENTPKENSMKVREWNNKGGHCCKLETQELEPKFNLMQILQDNGNLSKMQARIAFSAYLQHVQIRLMKDSGGQTFSASWAAKEDEQMELVVRFLKRASNNLQHSLRMVLPSRRLALLERRRILAHQLGDFIIVYNKETEQMAEKKSKKKVEEEEEDGVNMENFQEFIRQASEAELEEVLTFYTQKNKSASVFLGTHSKISKNNNNYSDSGAKGDHPETIMEEVKIKPPKQQQTTEIHSDKLSRFTTSAEKEAKLVYSNSSSGPTATLQKIPNTHLSSVTTSDLSPGPCHHSSLSQIPSAIPSMPHQPTILLNTVSASASPCLHPGAQNIPSPTGLPRCRSGSHTIGPFSSFQSAAHIYSQKLSRPSSAKAGSCYLNKHHSGIAKTQKEGEDASLYSKRYNQSMVTAELQRLAEKQAARQYSPSSHINLLTQQVTNLNLATGIINRSSASAPPTLRPIISPSGPTWSTQSDPQAPENHSSSPGSRSLQTGGFAWEGEVENNVYSQATGVVPQHKYHPTAGSYQLQFALQQLEQQKLQSRQLLDQSRARHQAIFGSQTLPNSNLWTMNNGAGCRISSATASGQKPTTLPQKVVPPPSSCASLVPKPPPNHEQVLRRATSQKASKGSSAEGQLNGLQSSLNPAAFVPITSSTDPAHTKI

SEQ ID NO: 68512 - protein, 817 aa, Homo sapiens
MKEIKVLRRVKEENDRRGGFIRIFPTSETWEIYGSYLEHKTSMNYMLATRLFQDRGNPRRSLLTGRTRMTADGAPELKIESLNSKAKLHAALYERKLLSLEVRKRRRRSSRLRAMRPKYPVITQPAEMNVKTETESEEEEEVALDNEDEEQEASQEESAGFLRENQAKYTPSLTALVENTPKENSMKVREWNNKGGHCCKLETQELEPKFNLMQILQDNGNLSKMQARIAFSAYLQHVQIRLMKDSGGQTFSASWAAKEDEQMELVVRFLKRASNNLQHSLRMVLPSRRLALLERRRILAHQLGDFIIVYNKETEQMAEKKSKKKVEEEEEDGVNMENFQEFIRQASEAELEEVLTFYTQKNKSASVFLGTHSKISKNNNNYSDSGAKGDHPETIMEEVKIKPPKQQQTTEIHSDKLSRFTTSAEKEAKLVYSNSSSGPTATLQKIPNTHLSSVTTSDLSPGPCHHSSLSQIPSAIPSMPHQPTILLNTVSASASPCLHPGAQNIPSPTGLPRCRSGSHTIGPFSSFQSAAHIYSQKLSRPSSAKAGSCYLNKHHSGIAKTQKEGEDASLYSKRYNQSMVTAELQRLAEKQAARQYSPSSHINLLTQQVTNLNLATGIINRSSASAPPTLRPIISPSGPTWSTQSDPQAPENHSSSPGSRSLQTGGFAWEGEVENNVYSQATGVVPQHKYHPTAGSYQLQFALQQLEQQKLQSRQLLDQSRARHQAIFGSQTLPNSNLWTMNNGAGCRISSATASGQKPTTLPQKVVPPPSSCASLVPKPPPNHEQVLRRATSQKASNTRFRSSFQNYLWYFFQAVS

SEQ ID NO: 68513 - protein, 778 aa, Homo sapiens
MAHVEDLIIKTIISAELAIATACKTFVPHRSSCFELYGFDVLIDSTLKPWLLEVNLSPSLACDAPLDLKIKASMISDMFTVVGFVCQDPAQRASTRPIYPTFESSRRNPFQKPQRCRPLSASDAEMKNLVGSAREKGPGKLGGSVLGLSMEEIKVLRRVKEENDRRGGFIRIFPTSETWEIYGSYLEHKTSMNYMLATRLFQDRMTADGAPELKIESLNSKAKLHAALYERKLLSLEVRKRRRRSSRLRAMRPKYPVITQPAEMNVKTETESEEEEEVALDNEDEEQEASQEESAGFLRENQAKYTPSLTALVENTPKENSMKVREWNNKGGHCCKLETQELEPKFNLMQILQDNGNLSKMQARIAFSAYLQHVQIRLMKDSGGQTFSASWAAKEDEQMELVVRFLKRASNNLQHSLRMVLPSRRLALLERRRILAHQLGDFIIVYNKETEQMAEKKSKKKVEEEEEDGVNMENFQEFIRQASEAELEEVLTFYTQKNKSASVFLGTHSKISKNNNNYSDSGAKGDHPETIMEEVKIKPPKQQQTTEIHSDKLSRFTTSAEKEAKLVYSNSSSGPTATLQKIPNTHLSSVTTSDLSPGPCHHSSLSQIPSAIPSMPHQPTILLNTVSASASPCLHPGAQNIPSPTGLPRCRSGSHTIGPFSSFQSAAHIYSQKLSRPSSAKAGSCYLNKHHSGIAKTQKEGEDASLYSKRYNQSMVTAELQRLAEKQAARQYSPSSHTDPWKYDRSIRMCSPLNILEPEFKKYLMGIYSPHSSKKKKK

SEQ ID NO: 68514 - protein, 584 aa, Homo sapiens
MRIGTPTAGPGPSAVMEGCLGVAELRKLSTFSAYLEDHSYNVEQIWRDIEDVIIKTLISAHPIIRHNYHTCFPNHTLNSACFEILGFDILLDHKLKPWLLEVNHSPSFSTDSRLDKEVKDGLLYDTLVLINLESCDKKKVLEEERQRGQFLQQCCSREMRIEEAKGFRAVQLKKTETYEKENCGGFRLIYPSLNSEKYEKFFQDNNSLFQNTVASRAREEYARQLIQELRLKREKKPFQMKKKVEMQGESAGEQVRKKGMRGWQQKQQQKDKAATQASKQYIQPLTLVSYTPDLLLSVRGERKNETDSSLNQEAPTEEASSVFPKLTSAKPFSSLPDLRNINLSSSKLEPSKPNFSIKEAKSASAVNVFTGTVHLTSVETTPESTTQLSISPKSPPTLAVTASSEYSGPETDRVVSFKCKKQQTPPHLTQKKMLKSFLPTKSKSFWESPNTNWTLLKSDMNKPHLISELLTKLQLSGKLSFFPAHYNPKLGMNNLSQNPSLPGECHSRSDSSGEKRQLDVSSLLLQSPQSYNVTLRDLLVIATPAQLDPRPCRSHASAMRDPCMQDQEAYSHCLISGQKGCERS

SEQ ID NO: 68515 - protein, 843 aa, Homo sapiens
MPQCPTLESQEGENSEEKGDSSKEDPKETVALAFVRENPGAQNGLQNAQQQGKKKRKKKRLVINLSSCRYESVRRAAQQYGFREGGEDDDWTLYWTDYSVSLERVMEMKSYQKINHFPGMSEICRKDLLARNMSRMLKMFPKDFRFFPRTWCLPADWGDLQTYSRSRKNKTYICKPDSGCQGKGIFITRTVKEIKPGEDMICQLYISKPFIIDGFKFDLRIYVLVTSCDPLRIFVYNEGLARFATTSYSRPCTDNLDDICMHLTNYSINKHSSNFSRDAHSGSKRKLSTFSAYLEDHSYNVEQIWRDIEDVIIKTLISAHPIIRHNYHTCFPNHTLNSACFEILGFDILLDHKLKPWLLEVNHSPSFSTDSRLDKEVKDGLLYDTLVLINLESCDKKKVLEEERQRGQFLQQCCSREMRIEEAKGFRAVQLKKTETYEKENCGGFRLIYPSLNSEKYEKFFQDNNSLFQNTVASRAREEYARQLIQELRLKREKKPFQMKKKVEMQGESAGEQVRKKGMRGWQQKQQQKDKAATQASKQYIQPLTLVSYTPDLLLSVRGERKNETDSSLNQEAPTEEASSVFPKLTSAKPFSSLPDLRNINLSSSKLEPSKPNFSIKEAKSASAVNVFTGTVHLTSVETTPESTTQLSISPKSPPTLAVTASSEYSGPETDRVVSFKCKKQQTPPHLTQKKMLKSFLPTKSKSFWESPNTNWTLLKSDMNKPHLISELLTKLQLSGKLSFFPAHYNPKLGMNNLSQNPSLPGECHSRSDSSGEKRQLDVSSLLLQSPQSYNVTLRDLLVIATPAQLDPRPCRSHASAMRDPCMQDQEAYSHCLISGQKGCERS

SEQ ID NO: 68516 - protein, 185 aa, Homo sapiens
QPMGALLLHPSRRGPAGVVASWTSSPAGRDGGVGIAGAWYFPRASSQAREMPQCPTLESQEGENSEEKGDSSKEDPKETVALAFVRENPGAQNGLQNAQQQGKKKRKKKRMPLKNSRKRRFPCFKKALICPGNLVRLQYDSTILTYQDPTAACAFQFLFNISPCLAPFRLIDEGKLVHFLIHSFP

SEQ ID NO: 68517 - protein, 569 aa, Homo sapiens
MEGCLGVAELRKLSTFSAYLEDHSYNVEQIWRDIEDVIIKTLISAHPIIRHNYHTCFPNHTLNSACFEILGFDILLDHKLKPWLLEVNHSPSFSTDSRLDKEVKDGLLYDTLVLINLESCDKKKVLEEERQRGQFLQQCCSREMRIEEAKGFRAVQLKKTETYEKENCGGFRLIYPSLNSEKYEKFFQDNNSLFQNTVASRAREEYARQLIQELRLKREKKPFQMKKKVEMQGESAGEQVRKKGMRGWQQKQQQKDKAATQASKQYIQPLTLVSYTPDLLLSVRGERKNETDSSLNQEAPTEEASSVFPKLTSAKPFSSLPDLRNINLSSSKLEPSKPNFSIKEAKSASAVNVFTGTVHLTSVETTPESTTQLSISPKSPPTLAVTASSEYSGPETDRVVSFKCKKQQTPPHLTQKKMLKSFLPTKSKSFWESPNTNWTLLKSDMNKPHLISELLTKLQLSGKLSFFPAHYNPKLGMNNLSQNPSLPGECHSRSDSSGEKRQLDVSSLLLQSPQSYNVTLRDLLVIATPAQLDPRPCRSHASAMRDPCMQDQEAYSHCLISGQKGCERS

SEQ ID NO: 68518 - protein, 891 aa, Homo sapiens
MGALLLHPSRRGPAGVVASWTSSPAGRDGGVGIAGAWYFPRASSQAREMPQCPTLESQEGENSEEKGDSSKEDPKETVALAFVRENPGAQNGLQNAQQQGKKKRKKKRLVINLSSCRYESVRRAAQQYGFREGGEDDDWTLYWTDYSVSLERVMEMKSYQKINHFPGMSEICRKDLLARNMSRMLKMFPKDFRFFPRTWCLPADWGDLQTYSRSRKNKTYICKPDSGCQGKGIFITRTVKEIKPGEDMICQLYISKPFIIDGFKFDLRIYVLVTSCDPLRIFVYNEGLARFATTSYSRPCTDNLDDICMHLTNYSINKHSSNFSRDAHSGSKRKLSTFSAYLEDHSYNVEQIWRDIEDVIIKTLISAHPIIRHNYHTCFPNHTLNSACFEILGFDILLDHKLKPWLLEVNHSPSFSTDSRLDKEVKDGLLYDTLVLINLESCDKKKVLEEERQRGQFLQQCCSREMRIEEAKGFRAVQLKKTETYEKENCGGFRLIYPSLNSEKYEKFFQDNNSLFQNTVASRAREEYARQLIQELRLKREKKPFQMKKKVEMQGESAGEQVRKKGMRGWQQKQQQKDKAATQASKQYIQPLTLVSYTPDLLLSVRGERKNETDSSLNQEAPTEEASSVFPKLTSAKPFSSLPDLRNINLSSSKLEPSKPNFSIKEAKSASAVNVFTGTVHLTSVETTPESTTQLSISPKSPPTLAVTASSEYSGPETDRVVSFKCKKQQTPPHLTQKKMLKSFLPTKSKSFWESPNTNWTLLKSDMNKPHLISELLTKLQLSGKLSFFPAHYNPKLGMNNLSQNPSLPGECHSRSDSSGEKRQLDVSSLLLQSPQSYNVTLRDLLVIATPAQLDPRPCRSHASAMRDPCMQDQEAYSHCLISGQKGCERS

SEQ ID NO: 68519 - protein, 101 aa, Homo sapiens
MPQCPTLESQEGENSEEKGDSSKEDPKETVALAFVRENPGAQNGLQNAQQQGKKKRKKKRLVINLSSCRYESVRRAAQQYGFREGGEDDDWTLYWTDYSVS

SEQ ID NO: 68520 - protein, 451 aa, Homo sapiens
MRECISIHVGQAGVQIGNACWELYCLEHGIQPDGQMPSDKTIGGGDDSFNTFFSETGAGKHVPRAVFVDLEPTVIDEVRTGTYRQLFHPEQLITGKEDAANNYARGHYTIGKEIIDLVLDRIRKLADQCTGLQGFLVFHSFGGGTGSGFTSLLMERLSVDYGKKSKLEFSIYPAPQVSTAVVEPYNSILTTHTTLEHSDCAFMVDNEAIYDICRRNLDIERPTYTNLNRLIGQIVSSITASLRFDGALNVDLTEFQTNLVPYPRIHFPLATYAPVISAEKAYHEQLSVAEITNACFEPANQMVKCDPRHGKYMACCLLYRGDVVPKDVNAAIATIKTKRTIQFVDWCPTGFKVGINYQPPTVVPGGDLAKVQRAVCMLSNTTAIAEAWARLDHKFDLMYAKRAFVHWYVGEGMEEGEFSEAREDMAALEKDYEEVGVDSVEGEGEEEGEEY

SEQ ID NO: 68521 - protein, 451 aa, Homo sapiens; identical to SEQ ID NO: 68520

SEQ ID NO: 68522 - protein, 383 aa, Homo sapiens
MIDLEPTVVDEVRAGTYRQLFHPEQLITGKEDAANNYARGHYTVGKESIDLVLDRIRKLTDACSGLQGFLIFHSFGGGTGSGFTSLLMERLSLDYGKKSKLEFAIYPAPQVSTAVVEPYNSILTTHTTLEHSDCAFMVDNEAIYDICRRNLDIERPTYTNLNRLISQIVSSITASLRFDGALNVDLTEFQTNLVPYPRIHFPLVTYAPIISAEKAYHEQLSVAEITSSCFEPNSQMVKCDPRHGKYMACCMLYRGDVVPKDVNVAIAAIKTKRTIQFVDWCPTGFKVGINYQPPTVVPGGDLAKVQRAVCMLSNTTAIAEAWARLDHKFDLMYAKRAFVHWYVGEGMEEGEFSEAREDLAALEKDYEEVGTDSFEEENEGEEF

SEQ ID NO: 68523 - protein, 449 aa, Homo sapiens
MRECISVHVGQAGVQIGNACWELFCLEHGIQADGTFDAQASKINDDDSFTTFFSETGNGKHVPRAVMIDLEPTVVDEVRAGTYRQLFHPEQLITGKEDAANNYARGHYTVGKESIDLVLDRIRKLTDACSGLQGFLIFHSFGGGTGSGFTSLLMERLSLDYGKKSKLEFAIYPAPQVSTAVVEPYNSILTTHTTLEHSDCAFMVDNEAIYDICRRNLDIERPTYTNLNRLISQIVSSITASLRFDGALNVDLTEFQTNLVPYPRIHFPLVTYAPIISAEKAYHEQLSVAEITSSCFEPNSQMVKCDPRHGKYMACCMLYRGDVVPKDVNVAIAAIKTKRTIQFVDWCPTGFKVGINYQPPTVVPGGDLAKVQRAVCMLSNTTAIAEAWARLDHKFDLMYAKRAFVHWYVGEGMEEGEFSEAREDLAALEKDYEEVGTDSFEEENEGEEF

SEQ ID NO: 68524 - protein, 451 aa, Homo sapiens
MREIVHIQIGQCGNQIGAKFWEMIGEEHGIDLAGSDRGASALQLERISVYYNEAYGRKYVPRAVLVDLEPGTMDSIRSSKLGALFQPDSFVHGNSGAGNNWAKGHYTEGAELIENVLEVVRHESESCDCLQGFQIVHSLGGGTGSGMGTLLMNKIREEYPDRIMNSFSVMPSPKVSDTVVEPYNAVLSIHQLIENADACFCIDNEALYDICFRTLKLTTPTYGDLNHLVSLTMSGITTSLRFPGQLNADLRKLAVNMVPFPRLHFFMPGFAPLTAQGSQQYRALSVAELTQQMFDARNTMAACDLRRGRYLTVACIFRGKMSTKEVDQQLLSVQTRNSSCFVEWIPNNVKVAVCDIPPRGLSMAATFIGNNTAIQEIFNRVSEHFSAMFKRKAFVHWYTSEGMDINEFGEAENNIHDLVSEYQQFQDAKAVLEEDEEVTEEAEMEPEDKGH

SEQ ID NO: 68525 - protein, 445 aa, Homo sapiens [sequence omitted]

SEQ ID NO: 68526 - protein, 450 aa, Homo sapiens
MREIVHIQAGQCGNQIGAKFWEVISDEHGIDPSGNYVGDSDLQLERISVYYNEASSHKYVPRAILVDLEPGTMDSVRSGAFGHLFRPDNFIFGQSGAGNNWAKGHYTEGAELVDSVLDVVRKECENCDCLQGFQLTHSLGGGTGSGMGTLLISKVREEYPDRIMNTFSVVPSPKVSDTVVEPYNATLSIHQLVENTDETYCIDNEALYDICFRTLKLATPTYGDLNHLVSATMSGVTTSLRFPGQLNADLRKLAVNMVPFPRLHFFMPGFAPLTARGSQQYRALTVPELTQQMFDAKNMMAACDPRHGRYLTVATVFRGRMSMKEVDEQMLAIQSKNSSYFVEWIPNNVKVAVCDIPPRGLKMSSTFIGNSTAIQELFKRISEQFTAMFRRKAFLHWYTGEGMDEMEFTEAESNMNDLVSEYQQYQDATAEEEGEMYEDDEEESEAQGPK

SEQ ID NO: 68527 - protein, 378 aa, Homo sapiens
MDSVRSGAFGHLFRPDNFIFGQSGAGNNWAKGHYTEGAELVDSVLDVVRKECENCDCLQGFQLTHSLGGGTGSGMGTLLISKVREEYPDRIMNTFSVVPSPKVSDTVVEPYNATLSIHQLVENTDETYCIDNEALYDICFRTLKLATPTYGDLNHLVSATMSGVTTSLRFPGQLNADLRKLAVNMVPFPRLHFFMPGFAPLTARGSQQYRALTVPELTQQMFDAKNMMAACDPRHGRYLTVATVFRGRMSMKEVDEQMLAIQSKNSSYFVEWIPNNVKVAVCDIPPRGLKMSSTFIGNSTAIQELFKRISEQFTAMFRRKAFLHWYTGEGMDEMEFTEAESNMNDLVSEYQQYQDATAEEEGEMYEDDEEESEAQGPK

SEQ ID NO: 68528 - protein, 444 aa, Homo sapiens
MREIVHIQAGQCGNQIGAKFWEVISDEHGIDPTGTYHGDSDLQLDRISVYYNEATGGKYVPRAILVDLEPGTMDSVRSGPFGQIFRPDNFVFGQSGAGNNWAKGHYTEGAELVDSVLDVVRKEAESCDCLQGFQLTHSLGGGTGSGMGTLLISKIREEYPDRIMNTFSVVPSPKVSDTVVEPYNATLSVHQLVENTDETYCIDNEALYDICFRTLKLTTPTYGDLNHLVSATMSGVTTCLRFPGQLNADLRKLAVNMVPFPRLHFFMPGFAPLTSRGSQQYRALTVPELTQQVFDAKNMMAACDPRHGRYLTVAAVFRGRMSMKEVDEQMLNVQNKNSSYFVEWIPNNVKTAVCDIPPRGLKMAVTFIGNSTAIQELFKRISEQFTAMFRRKAFLHWYTGEGMDEMEFTEAESNMNDLVSEYQQYQDATAEEEEDFGEEAEEEA

SEQ ID NO: 68529 - protein, 372 aa, Homo sapiens
MDSVRSGPFGQIFRPDNFVFGQSGAGNNWAKGHYTEGAELVDSVLDVVRKEAESCDCLQGFQLTHSLGGGTGSGMGTLLISKIREEYPDRIMNTFSVVPSPKVSDTVVEPYNATLSVHQLVENTDETYCIDNEALYDICFRTLKLTTPTYGDLNHLVSATMSGVTTCLRFPGQLNADLRKLAVNMVPFPRLHFFMPGFAPLTSRGSQQYRALTVPELTQQVFDAKNMMAACDPRHGRYLTVAAVFRGRMSMKEVDEQMLNVQNKNSSYFVEWIPNNVKTAVCDIPPRGLKMAVTFIGNSTAIQELFKRISEQFTAMFRRKAFLHWYTGEGMDEMEFTEAESNMNDLVSEYQQYQDATAEEEEDFGEEAEEEA

SEQ ID NO: 68530 - protein, 444 aa, Homo sapiens; identical to SEQ ID NO: 68528

SEQ ID NO: 68531 - protein, 372 aa, Homo sapiens; identical to SEQ ID NO: 68529

SEQ ID NO: 68532 - protein, 426 aa, Homo sapiens
MFWEVISDEHGIDPTGTYHGDSDLQLDRISVYYNEATGGKYVPRAILVDLEPGTMDSVRSGPFGQIFRPDNFVFGQSGAGNNWAKGHYTEGAELVDSVLDVVRKEAESCDCLQGFQLTHSLGGGTGSGMGTLLISKIREEYPDRIMNTFSVVPSPKVSDTVVEPYNATLSVHQLVENTDETYCIDNEALYDICFRTLKLTTPTYGDLNHLVSATMSGVTTCLRFPGQLNADLRKLAVNMVPFPRLHFFMPGFAPLTSRGSQQYRALTVPELTQQVFDAKNMMAACDPRHGRYLTVAAVFRGRMSMKEVDEQMLNVQNKNSSYFVEWIPNNVKTAVCDIPPRGLKMAVTFIGNSTAIQELFKRISEQFTAMFRRKAFLHWYTGEGMDEMEFTEAESNMNDLVSEYQQYQDATAEEEEDFGEEAEEEA

SEQ ID NO: 68533 - protein, 372 aa, Homo sapiens; identical to SEQ ID NO: 68529

SEQ ID NO: 68534 - protein, 372 aa, Homo sapiens; identical to SEQ ID NO: 68529

SEQ ID NO: 68535 - protein, 426 aa, Homo sapiens; identical to SEQ ID NO: 68532

SEQ ID NO: 68536 - protein, 426 aa, Homo sapiens; identical to SEQ ID NO: 68532

SEQ ID NO: 68537 - protein, 372 aa, Homo sapiens; identical to SEQ ID NO: 68529

SEQ ID NO: 68538 - protein, 426 aa, Homo sapiens; identical to SEQ ID NO: 68532

SEQ ID NO: 68539 - protein, 444 aa, Homo sapiens; identical to SEQ ID NO: 68528

SEQ ID NO: 68540 - protein, 426 aa, Homo sapiens; identical to SEQ ID NO: 68532

SEQ ID NO: 68541 - protein, 372 aa, Homo sapiens; identical to SEQ ID NO: 68529

SEQ ID NO: 68542 - protein, 444 aa, Homo sapiens; identical to SEQ ID NO: 68528

SEQ ID NO: 68543 - protein, 444 aa, Homo sapiens; identical to SEQ ID NO: 68528

SEQ ID NO: 68544 - protein, 444 aa, Homo sapiens; identical to SEQ ID NO: 68528

SEQ ID NO: 68545 - protein, 353 aa, Homo sapiens
MREIVHIQAGQCGNQIGAKFWEVISDEHGIDPTGTYHGDSDLQLTHSLGGGTGSGMGTLLISKIREEYPDRIMNTFSVVPSPKVSDTVVEPYNATLSVHQLVENTDETYCIDNEALYDICFRTLKLTTPTYGDLNHLVSATMSGVTTCLRFPGQLNADLRKLAVNMVPFPRLHFFMPGFAPLTSRGSQQYRALTVPELTQQVFDAKNMMAACDPRHGRYLTVAAVFRGRMSMKEVDEQMLNVQNKNSSYFVEWIPNNVKTAVCDIPPRGLKMAVTFIGNSTAIQELFKRISEQFTAMFRRKAFLHWYTGEGMDEMEFTEAESNMNDLVSEYQQYQDATAEEEEDFGEEAEEEA

SEQ ID NO: 68546 - protein, 426 aa, Homo sapiens; identical to SEQ ID NO: 68532

SEQ ID NO: 68547 - protein, 372 aa, Homo sapiens; identical to SEQ ID NO: 68529

SEQ ID NO: 68548 - protein, 426 aa, Homo sapiens; identical to SEQ ID NO: 68532

SEQ ID NO: 68549 - protein, 426 aa, Homo sapiens; identical to SEQ ID NO: 68532

SEQ ID NO: 68550 - protein, 372 aa, Homo sapiens; identical to SEQ ID NO: 68529

SEQ ID NO: 68551 - protein, 444 aa, Homo sapiens; identical to SEQ ID NO: 68528

SEQ ID NO: 68552 - protein, 243 aa, Homo sapiens
MREIVHIQAGQCGNQIGAKFWEVISDEHGIDPTGTYHGDSDLQLDRISVYYNEATGGKYVPRAILVDLEPGTMDSVRSGPFGQIFRPDNFVFGQSGAGNNWAKGHYTEGAELVDSVLDVVRKEEVDEQMLNVQNKNSSYFVEWIPNNVKTAVCDIPPRGLKMAVTFIGNSTAIQELFKRISEQFTAMFRRKAFLHWYTGEGMDEMEFTEAESNMNDLVSEYQQYQDATAEEEEDFGEEAEEEA

SEQ ID NO: 68553 - protein, 372 aa, Homo sapiens; identical to SEQ ID NO: 68529

SEQ ID NO: 68554 - protein, 372 aa, Homo sapiens; identical to SEQ ID NO: 68529

SEQ ID NO: 68555 - protein, 444 aa, Homo sapiens; identical to SEQ ID NO: 68528

SEQ ID NO: 68556 - protein, 372 aa, Homo sapiens; identical to SEQ ID NO: 68529

SEQ ID NO: 68557 - protein, 372 aa, Homo sapiens; identical to SEQ ID NO: 68529

SEQ ID NO: 68558 - protein, 372 aa, Homo sapiens; identical to SEQ ID NO: 68529

SEQ ID NO: 68559 - protein, 372 aa, Homo sapiens; identical to SEQ ID NO: 68529

SEQ ID NO: 68560 - protein, 372 aa, Homo sapiens; identical to SEQ ID NO: 68529

SEQ ID NO: 68561 - protein, 372 aa, Homo sapiens; identical to SEQ ID NO: 68529

SEQ ID NO: 68562 - protein, 207 aa, Homo sapiens
MGTLLISKIREEYPDRIMNTFSVVPSPKVSDTVVEPYNATLSVHQLVENTDETYCIDNEALYDICFRTLKLTTPTYGDLNHLVSATMSGVTTCLRFPGQLNADLRKLAVNMVPFPRLHFFMPGFAPLTSRGSQQYRALTVPELTQQVFDAKNMMAACDPRHGRYLTVAAVFRGRMSMKEVDEQMLNVQNKNSSYFVEWPQQCQDSRL

SEQ ID NO: 68563 - protein, 415 aa, Homo sapiens
MREIVHIQAGQCGNQIGAKFWEVISDEHGIDPTGTYHGDSDLQLDRISVYYNEATGGKYVPRAILVDLEPGTMDSVRSGPFGQIFRPDNFVFGQSGAGNNCLQGFQLTHSLGGGTGSGMGTLLISKIREEYPDRIMNTFSVVPSPKVSDTVVEPYNATLSVHQLVENTDETYCIDNEALYDICFRTLKLTTPTYGDLNHLVSATMSGVTTCLRFPGQLNADLRKLAVNMVPFPRLHFFMPGFAPLTSRGSQQYRALTVPELTQQVFDAKNMMAACDPRHGRYLTVAAVFRGRMSMKEVDEQMLNVQNKNSSYFVEWIPNNVKTAVCDIPPRGLKMAVTFIGNSTAIQELFKRISEQFTAMFRRKAFLHWYTGEGMDEMEFTEAESNMNDLVSEYQQYQDATAEEEEDFGEEAEEE

SEQ ID NO: 68564 - protein, 353 aa, Homo sapiens; identical to SEQ ID NO: 68545

SEQ ID NO: 68565 - protein, 353 aa, Homo sapiens; identical to SEQ ID NO: 68545

SEQ ID NO: 68566 - protein, 435 aa, Homo sapiens
MREIVHIQAGQCGNQIGAKFWEVISDEHGIDPTGTYHGDSDLQLDRISVYYNEATGGKYVPRAILVDLEPGTMDSVRSGPFGQIFRPDNFVFGQSGAGNNWAKGHYTEGAELVDSVLDVVRKEAESCDCLQGFQLTHSLGGGTGSGMGTLLISKIREEYPDRIMNTFSVVPSPKVSDTVVEPYNATLSVHQLVENTDETYCIDNEALYDICFRTLKLTTPTYGDLNHLVSATMSGVTTCLRFPGQLNADLRKLAVNMVPFPRLHFFMPGFAPLTSRGSQQYRALTVPELTQQVFDAKNMMAACDPRHGRYLTVAAVFRGRMSMKEVDEQMLNVQNKNSSYFVEWIPNNVKTAVCDIPPRGLKMAVTFIGNSTAIQELFKRISEQFTAMFRRKAFLHWYTGEGMDEMEFTEAESNMNDLVSEYQQYQDATAEGGGL

SEQ ID NO: 68567 - protein, 435 aa, Homo sapiens; identical to SEQ ID NO: 68566

SEQ ID NO: 68568 - protein, 435 aa, Homo sapiens; identical to SEQ ID NO: 68566

SEQ ID NO: 68569 - protein, 415 aa, Homo sapiens; identical to SEQ ID NO: 68563

SEQ ID NO: 68570 - protein, 415 aa, Homo sapiens; identical to SEQ ID NO: 68563

SEQ ID NO: 68571 - protein, 415 aa, Homo sapiens; identical to SEQ ID NO: 68563

SEQ ID NO: 68572 - protein, 435 aa, Homo sapiens; identical to SEQ ID NO: 68566

SEQ ID NO: 68573 - protein, 435 aa, Homo sapiens; identical to SEQ ID NO: 68566

SEQ ID NO: 68574 - protein, 435 aa, Homo sapiens; identical to SEQ ID NO: 68566

SEQ ID NO: 68575 - protein, 353 aa, Homo sapiens; identical to SEQ ID NO: 68545

SEQ ID NO: 68576 - protein, 415 aa, Homo sapiens; identical to SEQ ID NO: 68563

SEQ ID NO: 68577 - protein, 435 aa, Homo sapiens
MREIVHIQAGQCGNQIGAKFWEVISDEHGIDPTGTYHGDSDLQLDRISVYYNEATGGKYVPRAILVDLEPGTMDSVRSGPFGQIFRPDNFVFGQSGAGNNWAKGHYTEGAELVDSVLDVVRKEAESCDCLQGFQLTHSLGGGTGSGMGTLLISKIREEYPDRIMNTFSVVPSPKVSDTVVEPYNATLSVHQLVENTDETYCIDNEALYDICFRTLKLTTPTYGDLNHLVSATMSGVTTCLRFPGQLNADLRKLAVNMVPFPRLHFFMPGFAPLTSRGSQQYRALTVPELTQQVFDAKNMMAACDPRHGRYLTVAAVFRGRMSMKEVDEQMLNVQNKNSSYFVEWIPNNVKTAVCDIPPRGLKMAVTFIGNSTAIQELFKRISEQFTAMFRRKAFLHWYTGEGMDEMEFTEAESNMNDLVSEYQQYQDATAEEGGV

SEQ ID NO: 68578 - protein, 353 aa, Homo sapiens; identical to SEQ ID NO: 68545

SEQ ID NO: 68579 - protein, 353 aa, Homo sapiens; identical to SEQ ID NO: 68545

SEQ ID NO: 68580 - protein, 353 aa, Homo sapiens; identical to SEQ ID NO: 68545

SEQ ID NO: 68581 - protein, 415 aa, Homo sapiens; identical to SEQ ID NO: 68563

SEQ ID NO: 68582 - protein, 415 aa, Homo sapiens; identical to SEQ ID NO: 68563

SEQ ID NO: 68583 - protein, 353 aa, Homo sapiens; identical to SEQ ID NO: 68545

SEQ ID NO: 68584 - protein, 453 aa, Homo sapiens
MSIVTVQLGQCGNQIGFEVFDALLSDSHSSQGLCSMRENEAYQASCKERFFSEEENGVPIARAVLVDMEPKVINQMLSKAAQSGQWKYGQHACFCQKQGSGNNWAYGYSVHGPRHEESIMNIIRKEVEKCDSFSGFFIIMSMAGGTGSGLGAFVTQNLEDQYSNSLKMNQIIWPYGTGEVIVQNYNSILTLSHLYRSSDALLLHENDAIHKICAKLMNIKQISFSDINQVLAHQLGSVFQPTYSAESSFHYRRNPLGDLMEHLVPHPEFKMLSVRNIPHMSENSLAYTTFTWAGLLKHLRQMLISNAKMEEGIDRHVWPPLSGLPPLSKMSLNKDLHFNTSIANLVILRGKDVQSADVEGFKDPALYTSWLKPVNAFNVWKTQRAFSKYEKSAVLVSNSQFLVKPLDMIVGKAWNMFASKAYIHQYTKFGIEEEDFLDSFTSLEQVVASYCNL

SEQ ID NO: 68585 - protein, 398 aa, Homo sapiens
MSIVTVQLGQCGNQIGFEVFDALLSDSHSSQGLCSMRENEAYQASCKERFFSEEENGVPIARAVLVDMEPKVINQMLSKAAQSGQWKYGQHACFCQKQGSGNNWAYGYSVHGPRHEESIMNIIRKEVEKCDSFSGFFIIMSMAGGTGSGLGAFVTQNLEDQYSNSLKMNQIIWPYGTGEVIVQNYNSILTLSHLYRSSDALLLHENDAIHKICAKLMNIKQISFSDINQVLAHQLGSVFQPTYSAESSFHYRRNPLGIDRHVWPPLSGLPPLSKMSLNKDLHFNTSIANLVILRGKDVQSADVEGFKDPALYTSWLKPVNAFNVWKTQRAFSKYEKSAVLVSNSQFLVKPLDMIVGKAWNMFASKAYIHQYTKFGIEEEDFLDSFTSLEQVVASYCNL

SEQ ID NO: 68586 - protein, 199 aa, Homo sapiens
MSIVTVQLGQCGNQIGFEVFDALLSDSHSSQGLCSMRENEAYQASCKERFFSEEENGGIDRHVWPPLSGLPPLSKMSLNKDLHFNTSIANLVILRGKDVQSADVEGFKDPALYTSWLKPVNAFNVWKTQRAFSKYEKSAVLVSNSQFLVKPLDMIVGKAWNMFASKAYIHQYTKFGIEEEDFLDSFTSLEQVVASYCNL

SEQ ID NO: 68587 - protein, 351 aa, Homo sapiens
MSIVTVQLGQCGNQIGFEVFDALLSDSHSSQGLCSMRENEAYQASCKERFFSEEENGVPIARAVLVDMEPKVINQMLSKAAQSGQWKYGQHACFCQKQGSGNNWAYGYSVHGPRHEESIMNIIRKEVEKCDSFSGFFIIMSMAGGTGSGLGAFVTQNLEDQYSNSLKMNQIIWPYGTGEVIVQNYNSILTLSHLYRSSDALLLHENDAIHKICAKLMNIKQISFSDINQVLAHQLGSVFQPTYSAESSFHYRRNPLEGFKDPALYTSWLKPVNAFNVWKTQRAFSKYEKSAVLVSNSQFLVKPLDMIVGKAWNMFASKAYIHQYTKFGIEEEDFLDSFTSLEQVVASYCNL

SEQ ID NO: 68588 - protein, 396 aa, Homo sapiens
MSIVTVQLGQCGNQIGFEVFDALLSDSHSSQGLCSMRENEAYQASCKERFFSEEENGVPIARAVLVDMEPKVINQMLSKAAQSGQWKYGQHACFCQKQGSGNNWAYGYSVHGPRHEESIMNIIRKEVEKCDSFSGFFIIMSMAGGTGSGLGAFVTQNLEDQYSNSLKMNQIIWPYGTGEVIVQNYNSILTLSHLYRSSDALLLHENDAIHKICAKLMNIKQISFSDINQVLAHQLGSVFQPTYSAESSFHYRRNPLGDLMEHLVPHPEFKMLSVRNIPHMSENSLAYTTFTWAGLLKHLRQMLISNAKMEEGIDRHVWPPLSGLPPLSKMSLNKDLHFNTSIANLVILRGKDVQSADVGKKFRAYIHQYTKFGIEEEDFLDSFTSLEQVVASYCNL

SEQ ID NO: 68589 - protein, 237 aa, Homo sapiens
MNIKQISFSDINQVLAHQLGSVFQPTYSAESSFHYRRNPLGDLMEHLVPHPEFKMLSVRNIPHMSENSLAYTTFTWAGLLKHLRQMLISNAKMEEGIDRHVWPPLSGLPPLSKMSLNKDLHFNTSIANLVILRGKDVQSADVEGFKDPALYTSWLKPVNAFNVWKTQRAFSKYEKSAVLVSNSQFLVKPLDMIVGKAWNMFASKAYIHQYTKFGIEEEDFLDSFTSLEQVVASYCNL

SEQ ID NO: 68590 - protein, 125 aa, Homo sapiens
MSIVTVQLGQCGNQIGFEVFDALLSDSHSSQGLCSMRENEAYQASCKERFFSEEENGVPIARAVLVDMEPKVINQMLSKAAQSGQWKYGQHACFCQKQGSGNNWAYGRDKDSACYPDWSGTPGLQ

SEQ ID NO: 68591 - protein, 163 aa, Homo sapiens
MTQSVVVQVGQCGNQIGCCFWDLALREHAAVNQKGIYDEAISSFFRNVDTRVVGDGGSISKGKICSLKARAVLIDMEEGVVNEILQGPLRDVFDTKQLITDISGSGNNWAVGHKVFGSLYQDQILEKFRKSAEHCDCLQCFFIIHSMGGGKIFHSFACNSVKG

SEQ ID NO: 68592 - protein, 206 aa, Homo sapiens
MESDQRKVVGDGGSISKGKICSLKARAVLIDMEEGVVNEILQGPLRDVFDTKQLITDISGSGNNWAVGHKVFGSLYQDQILEKFRKSAEHCDCLQCFFIIHSMGGGTGSGLGTFLLKVLEDEFPEVYRFVTSIYPSGEDDVITSPYNSILAMKELNEHADCVLPIDNQSLFDIISKIDLMVNSGKLGTTVKPKSLVTSSSGALKKQ

SEQ ID NO: 68593 - protein, 475 aa, Homo sapiens
MTQSVVVQVGQCGNQIGCCFWDLALREHAAVNQKGIYDEAISSFFRNVDTRVVGDGGSISKGKICSLKARAVLIDMEEGVVNEILQGPLRDVFDTKQLITDISGSGNNWAVGHKVFGSLYQDQILEKFRKSAEHCDCLQCFFIIHSMGGGTGSGLGTFLLKVLEDEFPEVYRFVTSIYPSGEDDVITSPYNSILAMKELNEHADCVLPIDNQSLFDIISKIDLMVNSGKLGTTVKPKSLVTSSSGALKKQHKKPFDAMNNIVANLLLNLTSSARFEGSLNMDLNEISMNLVPFPQLHYLVSSLTPLYTLTDVNIPPRRLDQMFSDAFSKDHQLLRADPKHSLYLACALMVRGNVQISDLRRNIERLKPSLQFVSWNQEGWKTSLCSVPPVGHSHSLLALANNTCVKPTFMELKERFMRLYKKKAHLHHYLQVEGMEESCFTEAVSSLSALIQEYDQLDATKNMPVQDLPRLSIAM

SEQ ID NO: 68594 - protein, 206 aa, Homo sapiens; identical to SEQ ID NO: 68592

SEQ ID NO: 68595 - protein, 451 aa, Homo sapiens
MPREIITLQLGQCGNQIGFEFWKQLCAEHGISPEGIVEEFATEGTDRKDVFFYQADDEHYIPRAVLLDLEPRVIHSILNSPYAKLYNPENIYLSEHGGGAGNNWASGFSQGEKIHEDIFDIIDREADGSDSLEGFVLCHSIAGGTGSGLGSYLLERLNDRYPKKLVQTYSVFPNQDEMSDVVVQPYNSLLTLKRLTQNADCVVVLDNTALNRIATDRLHIQNPSFSQINQLVSTIMSASTTTLRYPGYMNNDLIGLIASLIPTPRLHFLMTGYTPLTTDQSVASVRKTTVLDVMRRLLQPKNVMVSTGRDRQTNHCYIAILNIIQGEVDPTQVHKSLQRIRERKLANFIPWGPASIQVALSRKSPYLPSAHRVSGLMMANHTSISSLFERTCRQYDKLRKREAFLEQFRKEDMFKDNFDEMDTSREIVQQLIDEYHAATRPDYISWGTQEQ

SEQ ID NO: 68596 - protein, 451 aa, Homo sapiens
MPREIITLQLGQCGNQIGFEFWKQLCAEHGISPEGIVEEFATEGTDRKDVFFYQADDEHYIPRAVLLDLEPRVIHSILNSPYAKLYNPENIYLSEHGGGAGNNWASGFSQGEKIHEDIFDIIDREADGSDSLEGFVLCHSIAGGTGSGLGSYLLERLNDRYPKKLVQTYSVFPYQDEMSDVVVQPYNSLLTLKRLTQNADCVVVLDNTALNRIATDRLHIQNPSFSQINQLVSTIMSASTTTLRYPGYMNNDLIGLIASLIPTPRLHFLMTGYTPLTTDQSVASVRKTTVLDVMRRLLQPKNVMVSTGRDRQTNHCYIAILNIIQGEVDPTQVHKSLQRIRERKLANFIPWGPASIQVALSRKSPYLPSAHRVSGLMMANHTSISSLFESSCQQFDKLRKRDAFLEQFRKEDMFKDNFDEMDRSREVVQELIDEYHAATQPDYISWGTQEQ

SEQ ID NO: 68597 - protein, 666 aa, Homo sapiens; identical to SEQ ID NO: 68504

SEQ ID NO: 68598 - protein, 342 aa, Homo sapiens
MVVVEQIKSQKIHGCQILETVYKHSCGGLPPVRSALEKILAVCHGVMYKQLSAWMLHGLLLDQHEEFFIKQGPSSGNVSAQPEEDEEDLGIGGLTGKQLRELQDLRLIEEENMLAPSLKQFSLRVEILPSYIPVRVAEKILFVGESVQMFENQNVNLTRKGSILKNQEDTFAAELHRLKQQPLFSLVDFEQVVDRIRSTVAEHLWKLMVEESDLLGQLKIIKDFYLLGRGELFQAFIDTAQHMLKTPPTAVTEHDVNVAFQQSAHKVLLDDDNLLPLLHLTIEYHGKEHKADATQAREGPSRETSPREAPASGWAALGLSYKVQWPLHILFTPAVLEKNRQF

SEQ ID NO: 68599 - protein, 1024 aa, Homo sapiens
MARHGPPWSRLDAQQERDVRELVRGVAGLQDEADPNFQLALNFAWSNFRFHRFLDVNSHKIEKTIEGIYEKFVIHSDLSKAASWKRLTEEFLNAPLPSIKEIKTDAHYSILSLLLCLSDSPSNSSYVETPRNKEVEKKDDFDWGKYLMEDEEMDIGPYMDTPNWSEESEEENDQQPLSREDSGIQVDRTPLEEQDQNRKLDPCISWKDEPDDRSWLEHHVVHQYWTARPSQFPHSLHLHSNLAAVWDQHLYSSDPLYVPDDRVLVTETQVIRETLWLLSGVKKLFIFQLIDGKVTVRNNIIVTHLTHSCLRSVLEQIAAYGQVVFRLQEFIDEVMGHSSESMLPGSGSVPKKSTEAPFRTYQAFMWALYKYFISFKEELAEIEKCIINNDTTITLAIVVDKLAPRLSQLKVLHKVFSTGVAEVPPDTRNVVRASHLLNTLYKAILEYDNVGEASEQTVSLLFSLWVETVRPYLQTVDEWIVHGHLWDGAREFIIQRNKNVPVNHRDFWYATYTLYSVSEKTENEEKMSDNASASSGSDQGPSSRQHTMVSFLKPVLKQIIMAGKSMQLLKNLQCAESTTCQAGARDAERKSLYTLFLESVQSRLRHGEDSTPQVLTEQQATKENLMKMQSIAESHLELDDVHDPLLAINFARMYLEQSDFHEKFAGGDVCVDRSSESVTCQTFELTLRSCLYPHIDKQYLDCCGNLMQTLKKDYRLVEYLQAMRNFFLMEGGDTMYDFYTSIFDKIREKETWQNVSFLNVQLQEAVGQRYPEDSSRLSISFENVDTAKKKLPVHILDGLTLSYKVPWPVDIVISLECQKIYNQVFLLLLQIKWAKYSLDVLLFGELVSTAEKPRLKEGLIHEQDTVAQFGPQKEPVRQQIHRMFLLRVKLMHFVNSLHNYIMTRILHSTGLEFQHQVEEAKDLDQLIKIHYRYLSTIHDRCLLREKVSFVKEAIMKVLNLALMFADGWQAGLGTWRMESIEKMESDFKNCHMFLVTILNKAVCRGSFPHLESLALSLMAGMEQS

SEQ ID NO: 68600 - protein, 1024 aa, Homo sapiens
MARHGPPWSRLDAQQERDVRELVRGVAGLQDEADPNFQLALNFAWSNFRFHRFLDVNSHKIEKTIEGIYEKFVIHSDLSKAASWKRLTEEFLNAPLPSIKEIKTDAHYSILSLLLCLSDSPSNSSYVETPRNKEVEKKDDFDWGKYLMEDEEMDIGPYMDTPNWSEESEEENDQQPLSREDSGIQVDRTPLEEQDQNRKLDPCISWKDEPDDRSWLEHHVVHQYWTARPSQFPHSLHLHSNLAAVWDQHLYSSDPLYVPDDRVLVTETQVIRETLWLLSGVKKLFIFQLIDGKVTVRNNIIVTHLTHSCLRSVLEQIAAYGQVVFRLQEFIDEVMGHSSESMLPGSGSVPKKSTEAPFRTYQAFMWALYKYFISFKEELAEIEKCIINNDTTITLAIVVDKLAPRLSQLKVLHKVFSTGVAEVPPDTRNVVRASHLLNTLYKAILEYDNVGEASEQTVSLLFSLWVETVRPYLQTVDEWIVHGHLWDGAREFIIQRNKNVPVNHRDFWYATYTLYSVSEKTENEEKMSDNASASSGSDQGPSSRQHTMVSFLKPVLKQIIMAGKSMQLLKNLQCAESTTCQAGARDAERKSLYTLFLESVQSRLRHGEDSTPQVLTEQQATKENLMKMQSIAESHLELDDVHDPLLAINFARMYLEQSDFHEKFAGGDVCVDRSSESVTCQTFELTLRSCLYPHIDKQYLDCCGNLMQTLKKDYRLVEYLQAMRNFFLMEGGDTMYDFYTSIFDKIREKETWQNVSFLNVQLQEAVGQRYPEDSSRLSISFENVDTAKKKLPVHILDGLTLSYKVPWPVDIVISLECQKIYNQVFLLLLQIKWAKYSLDVLLFGELVSTAEKPRLKEGLIHEQDTVAQFGPQKEPVRQQIHRMFLLRVKLMHFVNSLHNYIMTRILHSTGLEFQHQVEEAKDLDQLIKIHYRYLSTIHDRCLLREKVSFVKEAIMKVLNLALMFADGWQAGLGTWRMESIEKMESDFKNCHMFLVTILNKAVCRGSFPHCEYIMLKYFYLCISL

SEQ ID NO: 68601 - protein, 476 aa, Homo sapiens
MWTGYKILIFSYLTTEIWMEKQYLSQREVDLEAYFTRNHTVLQGTRFKRAIFQGQYCRNFGCCEDRDDGCVTEFYAANALCYCDKFCDRENSDCCPDYKSFCREEKEWPPHTQPWYPEGCFKDGQHYEEGSVIKENCNSCTCSGQQWKCSQHVCLVRSELIEQVNKGDYGWTAQNYSQFWGMTLEDGFKFRLGTLPPSPMLLSMNEMTASLPATTDLPEFFVASYKWPGWTHGPLDQKNCAASWAFSTASVAADRIAIQSKGRYTANLSPQNLISCCAKNRHGCNSGSIDRAWWYLRKRGLVSHACYPLFKDQNATNNGCAMASRSDGRGKRHATKPCPNNVEKSNRIYQCSPPYRVSSNETEIMKEIMQNGPVQAIMQVREDFFHYKTGIYRHVTSTNKESEKYRKLQTHAVKLTGWGTLRGAQGQKEKFWIAANSWGKSWGENGYFRILRGVNESDIEKLIIAAWGQLTSSDEP

SEQ ID NO: 68602 - protein, 335 aa, Homo sapiens
MWTGYKILIFSYLTTEIWMEKQYLSQREVDLEAYFTRNHTVLQGTRFKRAIFQGQYCRNFGCCEDRDDGCVTEFYAANALCYCDKFCDRENSDCCPDYKSFCREEKEWPPHTQPWYPEGRWTAQNYSQFWGMTLEDGFKFRLGTLPPSPMLLSMNEMTRLVSHACYPLFKDQNATNNGCAMASRSDGRGKRHATKPCPNNVEKSNRIYQCSPPYRVSSNETEIMKEIMQNGPVQAIMQVREDFFHYKTGIYRHVTSTNKESEKYRKLQTHAVKLTGWGTLRGAQGQKEKFWIAANSWGKSWGENGYFRILRGVNESDIEKLIIAAWGQLTSSDEP

SEQ ID NO: 68603 - protein, 203 aa, Homo sapiens
MEKQYLSQREVDLEAYFTRNHTVLQGTRFKRAIFQGQYCRNFGCCEDRDDGCVTEFYAANALCYCDKFCDRENSDCCPDYKSFCREEKEWPPHTQPWYPEGCFKDGQHYEEGSVIKENCNSCTCSGQQWKCSQHVCLVRSELIEQVNKGDYGWTAQNYSQFWGMTLEDGFKFRLGTLPPSPMLLSMNEMTVSVPSDSRMCMYL

SEQ ID NO: 68604 - protein, 155 aa, Homo sapiens
MASRSDGRGKRHATKPCPNNVEKSNRIYQCSPPYRVSSNETEIMKEIMQNGPVQAIMQVREDFFHYKTGIYRHVTSTNKESEKYRKLQTHAVKLTGWGTLRGAQGQKEKFWIAANSWGKSWGENGYFRILRGVNESDIEKLIIAAWGQLTSSDEP

SEQ ID NO: 68605 - protein, 205 aa, Homo sapiens
MRAWMFVSMQAEIWMEKQYLSQREVDLEAYFTRNHTVLQGTRFKRAIFQGQYCRNFGCCEDRDDGCVTEFYAANALCYCDKFCDRENSDCCPDYKSFCREEKEWPPHTQPWYPEGCFKDGQHYEEGSVIKENCNSCTCSGQQWKCSQHVCLVRSELIEQVNKGDYGWTAQNYSQFWGMTLEDGFKFRLGTLPPSPMLLSMNEMTE

SEQ ID NO: 68606 - protein, 1189 aa, Homo sapiens
MSVKSPFNVMSRNNLEAPPCKMTEPFNFEKNENKLPPHESLRSPGTLPNHPNFRLKSSENGNKKNNFLLCEQTKQYLASQEDNSVSSNPNGINGEVVGSKGDRKKLPAGNSVSPPSAESNSPPKEVNIKPGNNVRPAKSKKLNKLVENSLSISNPGLFTSLGPPLRSTTCHRCGLFGSLRCSQCKQTYYCSTACQRRDWSAHSIVCRPVQPNFHKLENKSSIETKDVEVNNKSDCPLGVTKEIAIWAERIMFSDLRSLQLKKTMEIKGTVTEFKHPGDFYVQLYSSEVLEYMNQLSASLKETYANVHEKDYIPVKGEVCIAKYTVDQTWNRAIIQNVDVQQKKAHVLYIDYGNEEIIPLNRIYHLNRNIDLFPPCAIKCFVANVIPAEGNWSSDCIKATKPLLMEQYCSIKIVDILEEEVVTFAVEVELPNSGKLLDHVLIEMGYGLKPSGQDSKKENADQSDPEDVGKMTTENNIVVDKSDLIPKVLTLNVGDEFCGVVAHIQTPEDFFCQQLQSGRKLAELQASLSKYCDQLPPRSDFYPAIGDICCAQFSEDDQWYRASVLAYASEESVLVGYVDYGNFEILSLMRLCPIIPKLLELPMQAIKCVLAGVKPSLGIWTPEAICLMKKLVQNKIITVKVVDKLENSSLVELIDKSETPHVSVSKVLLDAGFAVGEQSMVTDKPSDVKETSVPLGVEGKVNPLEWTWVELGVDQTVDVVVCVIYSPGEFYCHVLKEDALKKLNDLNKSLAEHCQQKLPNGFKAEIGQPCCAFFAGDGSWYRALVKEILPNGHVKVHFVDYGNIEEVTADELRMISSTFLNLPFQGIRCQLADIQSRNKHWSEEAITRFQMCVAGIKLQARVVEVTENGIGVELTDLSTCYPRIISDVLIDEHLVLKSASPHKDLPNDRLVNKHELQVHVQGLQATSSAEQWKTIELPVDKTIQANVLEIISPNLFYALPKGMPENQEKLCMLTAELLEYCNAPKSRPPYRPRIGDACCAKYTSDDFWYRAVVLGTSDTDVEVLYADYGNIETLPLCRVQPITSSHLALPFQIIRCSLEGLMELNGSSSQLIIMLLKNFMLNQNVMLSVKGITKNVHTVSVEKCSENGTVDVADKLVTFGLAKNITPQRQSALNTEKMYRMNCCCTELQKQVEKHEHILLFLLNNSTNQNKFIEMKKLLKKTASLGGKPL

SEQ ID NO: 68607 - protein, 1104 aa, Homo sapiens
MSVKSPFNVMSRNNLEAPPCKMTEPFNFEKNENKLPPHESLRSPGTLPNHPNFRLKSSENGNKKNNFLLCEQTKQYLASQEDNSVSSNPNGINGEVVGSKGDRKKLPAGNSVSPPSAESNSPPKEVNIKPGNNVRPAKSKKLNKLVENSLSISNPGLFTSLGPPLRSTTCHRCGLFGSLRCSQCKQTYYCSTACQRRDWSAHSIVCRPVQPNFHKLENKSSIETKDVEVNNKSDCPLGVTKEIAIWAERIMFSDLRSLQLKKTMEIKGTVTEFKHPGDFYVQLYSSEVLEYMNQLSASLKETYANVHEKDYIPVKGEVCIAKYTVDQTWNRAIIQNVDVQQKKAHVLYIDYGNEEIIPLNRIYHLNRNIDLFPPCAIKCFVANVIPAEGNWSSDCIKATKPLLMEQYCSIKIVDILEEEVVTFAVEVELPNSGKLLDHVLIEMGYGLKPSGQDSKKENADQSDPEDVGKMTTENNIVVDKSDLIPKVLTLNVGDEFCGVVAHIQTPEDFFCQQLQSGRKLAELQASLSKYCDQLPPRSDFYPAIGDICCAQFSEDDQWYRASVLAYASEESVLVGYVDYGNFEILSLMRLCPIIPKLLELPMQAIKCVLAGVKPSLGIWTPEAICLMKKLVQNKIITVKVVDKLENSSLVELIDKSETPHVSVSKVLLDAGFAVGEQSMVTDKPSDVKETSVPLGVEGKVNPLEWTWVELGVDQTVDVVVCVIYSPGEFYCHVLKEDALKKLNDLNKSLAEHCQQKLPNGFKAEIGQPCCAFFAGDGSWYRALVKEILPNGHVKVHFVDYGNIEEVTADELRMISSTFLNLPFQGIRCQLADIQSRNKHWSEEAITRFQMCVAGIKLQARVVEVTENGIGVELTDLSTCYPRIISDVLIDEHLVLKSASPHKDLPNDRLVNKHELQVHVQGLQATSSAEQWKTIELPVDKTIQANVLEIISPNLFYALPKGMPENQEKLCMLTAELLEYCNAPKSRPPYRPRIGDACCAKYTSDDFWYRAVVLGTSDTDVEVLYADYGNIETLPLCRVQPITSSHLALPFQIIRCSLEEKMYRMNCCCTELQKQVEKHEHILLFLLNNSTNQNKFIEMKKLLKS

SEQ ID NO: 68608 - protein, 1075 aa, Homo sapiens
MSVKSPFNVMSRNNLEAPPCKMTEPFNFEKNENKLPPHESLRSPGTLPNHPNFRLKSSENGNKKNNFLLCEQTKQYLASQEDNSVSSNPNGINGEVVGSKGDRKKLPAGNSVSPPSAESNSPPKEVNIKPGNNVRPAKSKKLNKLVENSLSISNPGLFTSLGPPLRSTTCHRCGLFGSLRCSQCKQTYYCSTACQRRDWSAHSIVCRPVQPNFHKLENKSSIETKDVEVNNKSDCPLGVTKEIAIWAERIMFSDLRSLQLKKTMEIKGTVTEFKHPGDFYVQLYSSEVLEYMNQLSASLKETYANVHEKDYIPVKGEVCIAKYTVDQTWNRAIIQNVDVQQKKAHVLYIDYGNEEIIPLNRIYHLNRNIDLFPPCAIKCFVANVIPAEGNWSSDCIKATKPLLMEQYCSIKIVDILEEEVVTFAVEVELPNSGKLLDHVLIEMGYGLKPSGQDSKKENADQSDPEDVGKMTTENNIVVDKSDLIPKVLTLNVGDEFCGVVAHIQTPEDFFCQQLQSGRKLAELQASLSKYCDQLPPRSDFYPAIGDICCAQFSGVKPSLGIWTPEAICLMKKLVQNKIITVKVVDKLENSSLVELIDKSETPHVSVSKVLLDAGFAVGEQSMVTDKPSDVKETSVPLGVEGKVNPLEWTWVELGVDQTVDVVVCVIYSPGEFYCHVLKEDALKKLNDLNKSLAEHCQQKLPNGFKAEIGQPCCAFFADIQSRNKHWSEEAITRFQMCVAGIKLQARVVEVTENGIGVELTDLSTCYPRIISDVLIDEHLVLKSASPHKDLPNDRLVNKHELQVHVQGLQATSSAEQWKTIELPVDKTIQANVLEIISPNLFYALPKGMPENQEKLCMLTAELLEYCNAPKSRPPYRPRIGDACCAKYTSDDFWYRAVVLGTSDTDVEVLYADYGNIETLPLCRVQPITSSHLALPFQIIRCSLEGLMELNGSSSQLIIMLLKNFMLNQNVMLSVKGITKNVHTVSVEKCSENGTVDVADKLVTFGLAKNITPQRQSALNTEKMYRMNCCCTELQKQVEKHEHILLFLLNNSTNQNKFIEMKKLLKKTASLGGKPL

SEQ ID NO: 68609 - protein, 1113 aa, Homo sapiens
MSVKSPFNVMSRNNLEAPPCKMTEPFNFEKNENKLPPHESLRSPGTLPNHPNFRLKSSENGNKKNNFLLCEQTKQYLASQEDNSVSSNPNGINGEVVGSKGDRKKLPAGNSVSPPSAESNSPPKEVNIKPGNNVRPAKSKKLNKLVENSLSISNPGLFTSLGPPLRSTTCHRCGLFGSLRCSQCKQTYYCSTACQRRDWSAHSIVCRPVQPNFHKLENKSSIETKDVEVNNKSDCPLGVTKEIAIWAERIMFSDLRSLQLKKTMEIKGTVTEFKHPGDFYVQLYSSEVLEYMNQLSASLKETYANVHEKDYIPVKGEVCIAKYTVDQTWNRAIIQNVDVQQKKAHVLYIDYGNEEIIPLNRIYHLNRNIDLFPPCAIKCFVANVIPAEGNWSSDCIKATKPLLMEQYCSIKIVDILEEEVVTFAVEVELPNSGKLLDHVLIEMGYGLKPSGQDSKKENADQSDPEDVGKMTTENNIVVDKSDLIPKVLTLNVGDEFCGVVAHIQTPEDFFCQQLQSGRKLAELQASLSKYCDQLPPRSDFYPAIGDICCAQFSEDDQWYRASVLAYASEESVLVGYVDYGNFEILSLMRLCPIIPKLLELPMQAIKCVLAGVKPSLGIWTPEAICLMKKLVQNKIITVKVVDKLENSSLVELIDKSETPHVSVSKVLLDAGFAVGEQSMVTDKPSDVKETSVPLGVEGKVNPLEWTWVELGVDQTVDVVVCVIYSPGEFYCHVLKEDALKKLNDLNKSLAEHCQQKLPNGFKAEIGQPCCAFFAGDGSWYRALVKEILPNGHVKVHFVDYGNIEEVTADELRMISSTFLNLPFQGIRCQLADIQSRNKHWSEEAITRFQMCVAGIKLQARVVEVTENGIGVELTDLSTCYPRIISDVLIDEHLVLKSASPHKDLPNDRLVNKHELQVHVQGLQATSSAEQWKTIELPVDKTIQANVLEIISPNLFYALPKGMPENQEKLCMLTAELLEYCNAPKSRPPYRPRIGDACCAKYTSDDFWYRAVVLGTSDTDVEVLYADYGNIETLPLCRVQPITSSHLALPFQIIRCSLEEKMYRMNCCCTELQKQVEKHEHILLFLLNNSTNQNKFIEMKKLLKKTASLGGKPL

SEQ ID NO: 68610 - protein, 717 aa, Homo sapiens
MNQLSASLKETYANVHEKDYIPVKGEVCIAKYTVDQAIKCFVANVIPAEGNWSSDCIKATKPLLMEQYCSIKIVDILEEEVVTFAVEVELPNSGKLLDHVLIEMGYGLKPSGQDSKKENADQSDPEDVGKMTTENNIVVDKSDLIPKVLTLNVGDEFCGVVAHIQTPEDFFCQQLQSGRKLAELQASLSKYCDQLPPRSDFYPAIGDICCAQFSGVKPSLGIWTPEAICLMKKLVQNKIITVKVVDKLENSSLVELIDKSETPHVSVSKVLLDAGFAVGEQSMVTDKPSDVKETSVPLGVEGKVNPLEWTWVELGVDQTVDVVVCVIYSPGEFYCHVLKEDALKKLNDLNKSLAEHCQQKLPNGFKAEIGQPCCAFFAGDGSWYRALVKEILPNGHVKVHFVDYGNIEEVTADELRMISSTFLNLPFQGIRCQLADIQSRNKHWSEEAITRFQMCVAGIKLQARVVEVTENGIGVELTDLSTCYPRIISDVLIDEHLVLKSASPHKDLPNDRLVNKHELQVHVQGLQATSSAEQWKTIELPVDKTIQANVLEIISPNLFYALPKGMPENQEKLCMLTAELLEYCNAPKSRPPYRPRIGDACCAKYTSDDFWYRAVVLGTSDTDVEVLYADYGNIETLPLCRVQPITSSHLALPFQIIRCSLEEKMYRMNCCCTELQKQVEKHEHILLFLLNNSTNQNKFIEMKKLLKKTASLGGKPL

SEQ ID NO: 68611 - protein, 651 aa, Homo sapiens
MLRLQMTDGHISCTAVEFSYMSKISLNTPPGTKVKLSGIVDIKNGFLLLNDSNTTVLGGEVEHLIEKWELQRSLSKHNRSNIGTEGGPPPFVPFGQKCVSHVQVDSRELDRRKTLQVTMPVKPTNDNDEFEKQRTAAIAEVAKSKETKTFGGGGGGARSNLNMNAAGNRNREVLQKEKSTKSEGKHEGVYRELVDEKALKHITEMGFSKEASRQALMDNGNNLEAALNVLLTSNKQKPVMGPPLRGRGKGRGRIRSEDEEDLGNARPSAPSTLFDFLESKMGTLNVEEPKSQPQQLHQGQYRSSNTEQNGVKDNNHLRHPPRNDTRQPRNEKPPRFQRDSQNSKSVLEGSGLPRNRGSERPSTSSVSEVWAEDRIKCDRPYSRYDRTKDTSYPLGSQHSDGAFKKRDNSMQSRSGKGPSFAEAKENPLPQGSVDYNNQKRGKRESQTSIPDYFYDRKSQTINNEAFSGIKIEKHFNVNTDYQNPVRSNSFIGVPNGEVEMPLKGRRIGPIKPAGPVTAVPCDDKIFYNSGPKRRSGPIKPEKILESSIPMEYAKMWKPGDECFALYWEDNKFYRAEVEALHSSGMTAVVKFIDYGNYEEVLLSNIKPIQTEAWEEEGTYDQTLEFRRGGDGQPRRSTRPTQQFYQPPRARN

SEQ ID NO: 68612 - protein, 651 aa, Homo sapiens; identical to SEQ ID NO: 68611

SEQ ID NO: 68613 - protein, 129 aa, Homo sapiens
MLRLQMTDGHISCTAVEFSYMSKISLNTPPGTKVKLSGIVDIKNGFLLLNDSNTTVLGGEVEHLIEKWELQRSLSKHNRSNIGTEGGPPPFVPFGQKCVSHVQVDSRELDRRKTLQVTMPVKPTNDNDE

SEQ ID NO: 68614 - protein, 651 aa, Homo sapiens; identical to SEQ ID NO: 68611

SEQ ID NO: 68615 - protein, 744 aa, Homo sapiens
MAQVAGAALSQAGWYLSDEGIEACTSSPDKVNVNDIILIALNTDLRTIGKKFLPSDINSGKVEKLEGPCVLQIQKIRNVAAPKDNEESQAAPRMLRLQMTDGHISCTAVEFSYMSKISLNTPPGTKVKLSGIVDIKNGFLLLNDSNTTVLGGEVEHLIEKWELQRSLSKHNRSNIGTEGGPPPFVPFGQKCVSHVQVDSRELDRRKTLQVTMPVKPTNDNDEFEKQRTAAIAEVAKSKETKTFGGGGGGARSNLNMNAAGNRNREVLQKEKSTKSEGKHEGVYRELVDEKALKHITEMGFSKEASRQALMDNGNNLEAALNVLLTSNKQKPVMGPPLRGRGKGRGRIRSEDEEDLGNARPSAPSTLFDFLESKMGTLNVEEPKSQPQQLHQGQYRSSNTEQNGVKDNNHLRHPPRNDTRQPRNEKPPRFQRDSQNSKSVLEGSGLPRNRGSERPSTSSVSEVWAEDRIKCDRPYSRYDRTKDTSYPLGSQHSDGAFKKRDNSMQSRSGKGPSFAEAKENPLPQGSVDYNNQKRGKRESQTSIPDYFYDRKSQTINNEAFSGIKIEKHFNVNTDYQNPVRSNSFIGVPNGEVEMPLKGRRIGPIKPAGPVTAVPCDDKIFYNSGPKRRSGPIKPEKILESSIPMEYAKMWKPGDECFALYWEDNKFYRAEVEALHSSGMTAVVKFIDYGNYEEVLLSNIKPIQTEAWEEEGTYDQTLEFRRGGDGQPRRSTRPTQQFYQPPRARN

SEQ ID NO: 68616 - protein, 1098 aa, Homo sapiens
MLEGDLVSKMLRAVLQSHKNGVALPRLQGEYRSLTGDWIPFKQLGFPTLEAYLRSVPAVVRIETSRSGEITCYAMACTETARIAQLVARQRSSKRKTGRQVNCQMRVKKTMPFFLEGKPKATLRQPGFASNFSVGKKPNPAPLRDKGNSVGVKPDAEMSPYMLHTTLGNEAFKDIPVQRHVTMSTNNRFSPKASLQPPLQMHLSRTSTKEMSDNLNQTVEKPNVKPPASYTYKMDEVQNRIKEILNKHNNGIWISKLPHFYKELYKEDLNQGILQQFEHWPHICTVEKPCSGGQDLLLYPAKRKQLLRSELDTEKVPLSPLPGPKQTPPLKGCPTVMAGDFKEKVADLLVKYTSGLWASALPKAFEEMYKVKFPEDALKNLASLSDVCSIDYISGNPQKAILYAKLPLPTDKIQKDAGQAHGDNDIKAMVEQEYLQVEESIAESANTFMEDITVPPLMIPTEASPSVLVVELSNTNEVVIRYVGKDYSAAQELMEDEMKEYYSKNPKITPVQAVNVGQLLAVNAEEDAWLRAQVISTEENKIKVCYVDYGFSENVEKSKAYKLNPKFCSLSFQATKCKLAGLEVLSDDPDLVKVVESLTCGKIFAVEILDKADIPLVVLYDTSGEDDININATCLKAICDKSLEVHLQVDAMYTNVKVTNICSDGTLYCQVPCKGLNKLSDLLRKIEDYFHCKHMTSECFVSLPFCGKICLFHCKGKWLRVEITNVHSSRALDVQFLDSGTVTSVKVSELREIPPRFLQEMIAIPPQAIKCCLADLPQSIGMWTPDAVLWLRDSVLNCSDCSIKVTKVDETRGIAHVYLFTPKNFPDPHRSINRQITNADLWKHQKDVFLSAISSGADSPNSKNGNMPMSGNTGENFRKNLTDVIKKSMVDHTSAFSTEELPPPVHLSKPGEHMDVYVPVACHPGYFVIQPWQEIHKLEVLMEEMILYYSVSEERHIAVEKDQVYAAKVENKWHRVLLKGILTNGLVSVYELDYGKHELVNIRKVQPLVDMFRKLPFQAVTAQLAGVKCNQWSEEASMVFRNHVEKKPLVALVQTVIENANPWDRKVVVYLVDTSLPDTDTWIHDFMSEYLIELSKVN

SEQ ID NO: 68617 - protein, 1024 aa, Homo sapiens
MACTETARIAQLVARQRSSKRKTGRQVNCQMRVKKTMPFFLEGKPKATLRQPGFASNFSVGKKPNPAPLRDKGNSVGVKPDAEMSPYMLHTTLGNEAFKDIPVQRHVTMSTNNRFSPKASLQPPLQMHLSRTSTKEMSDNLNQTVEKPNVKPPASYTYKMDEVQNRIKEILNKHNNGIWISKLPHFYKELYKEDLNQGILQQFEHWPHICTVEKPCSGGQDLLLYPAKRKQLLRSELDTEKVPLSPLPGPKQTPPLKGCPTVMAGDFKEKVADLLVKYTSGLWASALPKAFEEMYKVKFPEDALKNLASLSDVCSIDYISGNPQKAILYAKLPLPTDKIQKDAGQAHGDNDIKAMVEQEYLQVEESIAESANTFMEDITVPPLMIPTEASPSVLVVELSNTNEVVIRYVGKDYSAAQELMEDEMKEYYSKNPKITPVQAVNVGQLLAVNAEEDAWLRAQVISTEENKIKVCYVDYGFSENVEKSKAYKLNPKFCSLSFQATKCKLAGLEVLSDDPDLVKVVESLTCGKIFAVEILDKADIPLVVLYDTSGEDDININATCLKAICDKSLEVHLQVDAMYTNVKVTNICSDGTLYCQVPCKGLNKLSDLLRKIEDYFHCKHMTSECFVSLPFCGKICLFHCKGKWLRVEITNVHSSRALDVQFLDSGTVTSVKVSELREIPPRFLQEMIAIPPQAIKCCLADLPQSIGMWTPDAVLWLRDSVLNCSDCSIKVTKVDETRGIAHVYLFTPKNFPDPHRSINRQITNADLWKHQKDVFLSAISSGADSPNSKNGNMPMSGNTGENFRKNLTDVIKKSMVDHTSAFSTEELPPPVHLSKPGEHMDVYVPVACHPGYFVIQPWQEIHKLEVLMEEMILYYSVSEERHIAVEKDQVYAAKVENKWHRVLLKGILTNGLVSVYELDYGKHELVNIRKVQPLVDMFRKLPFQAVTAQLAGVKCNQWSEEASMVFRNHVEKKPLVALVQTVIENANPWDRKVVVYLVDTSLPDTDTWIHDFMSEYLIELSKVN

SEQ ID NO: 68618 - protein, 418 aa, Homo sapiens
MYTNVKVTNICSDGTLYCQVPCKGLNKLSDLLRKIEDYFHCKITNVHSSRALDVQFLDSGTVTSVKVSELREIPPRFLQEMIAIPPQAIKCCLADLPQSIGMWTPDAVLWLRDSVLNCSDCSIKVTKVDETRGIAHVYLFTPKNFPDPHRSINRQITNADLWKHQKDVFLSAISSGADSPNSKNGNMPMSGNTGENFRKNLTDVIKKSMVDHTSAFSTEELPPPVHLSKPGEHMDVYVPVACHPGYFVIQPWQEIHKLEVLMEEMILYYSVSEERHIAVEKDQVYAAKVENKWHRVLLKGILTNGLVSVYELDYGKHELVNIRKVQPLVDMFRKLPFQAVTAQLAGVKCNQWSEEASMVFRNHVEKKPLVALVQTVIENANPWDRKVVVYLVDTSLPDTDTWIHDFMSEYLIELSKVN

SEQ ID NO: 68619 - protein, 837 aa, Homo sapiens
MSLSHLYRDGEGRIDDDDDERENFEITDWDLQNEFNPNRQRHWQTKEEATYGVWAERDSDDERPSFGGKRARDYSAPVNFISAGLKKGAAEEAELEDSDDEEKPVKQDDFPKDFGPRKLKTGGNFKPSQKGFAGGTKSFMDFGSWERHTKGIGQKLLQKMGYVPGRGLGKNAQGIINPIEAKQRKGKGAVGAYGSERTTQSMQDFPVVDSEEEAEEEFQKELSQWRKDPSGSKKKPKYSYKTVEELKAKGRISKKLTAPQKELSQVKVIDMTGREQKVYYSYSQISHKHNVPDDGLPLQSQQLPQSGKEAKAPGFALPELEHNLQLLIDLTEQEIIQNDRQLQYERDMVVNLFHELEKMTEVLDHEERVISNLSKVLEMVEECERRMQPDCSNPLTLDECARIFETLQDKYYEEYRMSDRVDLAVAIVYPLMKEYFKEWDPLKDCTYGTEIISKWKSLLENDQLLSHGGQDLSADAFHRLIWEVWMPFVRNIVTQWQPRNCDPMVDFLDSWVHIIPVWILDNILDQLIFPKLQKEVENWNPLTDTVPIHSWIHPWLPLMQARLEPLYSPIRSKLSSALQKWHPSDSSAKLILQPWKDVFTPGSWEAFMVKNIVPKLGMCLGELVINPHQQHMDAFYWVIDWEGMISVSSLVGLLEKHFFPKWLQVLCSWLSNSPNYEEITKWYLGWKSMFSDQVLAHPSVKDKFNEALDIMNRAVSSNVGAYMQPGARENIAYLTHTERRKDFQYEAMQERREAENMAQRGIGVAASSVPMNFKDLIETKAEEHNIVFMPVIGKRHEGKQLYTFGRIVIYIDRGVVFVQGEKTWVPTSLQSLIDMAK

SEQ ID NO: 68620 - protein, 837 aa, Homo sapiens; identical to SEQ ID NO: 68619

SEQ ID NO: 68621 - protein, 837 aa, Homo sapiens; identical to SEQ ID NO: 68619

SEQ ID NO: 68622 - protein, 837 aa, Homo sapiens; identical to SEQ ID NO: 68619

SEQ ID NO: 68623 - protein, 88 aa, Homo sapiens
MSLSHLYRDGEGRIDDDDDERENFEITDWDLQNEFNPNRQRHWQTKEEATYGVWAERDSDDERPSFGGKRARDYSAPVNFISAGLKKG

SEQ ID NO: 68624 - protein, 86 aa, Homo sapiens
MSLSHLYRDGEGRIDDDDDERENFEITDWDLQNEFNPNRQRHWQTKEEATYGVWAERDSDDERPSFGGKRARDYSAPVNFISAGLK

SEQ ID NO: 68625 - protein, 42 aa, Homo sapiens
MSLSHLYRDGEGRIDDDDDERENFEITDWDLQNEFNPNRQRH

SEQ ID NO: 68626 - protein, 522 aa, Homo sapiens
MSLSHLYRDGEGRIDDDDDERENFEITDWDLQNEFNLFHELEKMTEVLDHEERVISNLSKVLEMVEECERRMQPDCSNPLTLDECARIFETLQDKYYEEYRMSDRVDLAVAIVYPLMKEYFKEWDPLKDCTYGTEIISKWKSLLENDQLLSHGGQDLSADAFHRLIWEVWMPFVRNIVTQWQPRNCDPMVDFLDSWVHIIPVWILDNILDQLIFPKLQKEVENWNPLTDTVPIHSWIHPWLPLMQARLEPLYSPIRSKLSSALQKWHPSDSSAKLILQPWKDVFTPGSWEAFMVKNIVPKLGMCLGELVINPHQQHMDAFYWVIDWEGMISVSSLVGLLEKHFFPKWLQVLCSWLSNSPNYEEITKWYLGWKSMFSDQVLAHPSVKDKFNEALDIMNRAVSSNVGAYMQPGARENIAYLTHTERRKDFQYEAMQERREAENMAQRGIGVAASSVPMNFKDLIETKAEEHNIVFMPVIGKRHEGKQLYTFGRIVIYIDRGVVFVQGEKTWVPTSLQSLIDMAK

SEQ ID NO: 68627 - protein, 191 aa, Homo sapiens
  VARIANT 1: note = MOD_RES - Any amino acid
XGRGLGKNAQGIINPIEAKQRKGKGAVGAYGSERTTQSMQDFPVVDSEEEAEEWLFLAASDCILLVQEFQKELSQWRKDPSGSKKKPKYSYKTVEELKAKGRISKKLTAPQKELSQVKVIDMTGREQKVYYSYSQISHKHNVPDDGLPLQSQQLPQSGKEAKAPGFALPELEHNLQLLIDLTEQEIIQNDR

SEQ ID NO: 68628 - protein, 121 aa, Homo sapiens
MSLSHLYRDGEGRIDDDDDERENFEITDWDLQNEFNPNRQRHWQTKEEATYGVWAERDSDDERPSFGGKRARDYSAPVNFISAGLKKGAAEEAELEDSDDEEKPVKQDDFPKDFGPRKLKT

SEQ ID NO: 68629 - protein, 240 aa, Homo sapiens
MEESVVRPSVFVVDGQTDIPFTRLGRSHRRQSCSVARVGLGLLLLLMGAGLAVQGWFLLQLHWRLGEMVTRLPDGPAGSWEQLIQERRSHEVNPAAHLTGANSSLTGSGGPLLWETQLGLAFLRGLSYHDGALVVTKAGYYYIYSKVQLGGVGCPLGLASTITHGLYKRTPRYPEELELLVSQQSPCGRATSSSRVWWDSSFLGGVVHLEAGEKVVVRVLDERLVRLRDGTRSYFGAFMV

SEQ ID NO: 68630 - protein, 317 aa, Homo sapiens
MRRASRDYTKYLRGSEEMGGGPGAPHEGPLHAPPPPAPHQPPAASRSMFVALLGLGLGQVVCSVALFFYFRAQMDPNRISEDGTHCIYRILRLHENADFQDTTLESQDTKLIPDSCRRIKQAFQGAVQKELQHIVGSQHIRAEKAMVDGSWLDLAKRSKLEAQPFAHLTINATDIPSGSHKVSLSSWYHDRGWAKISNMTFSNGKLIVNQDGFYYLYANICFRHHETSGDLATEYLQLMVYVTKTSIKIPSSHTLMKGGSTKYWSGNSEFHFYSINVGGFFKLRSGEEISIEVSNPSLLDPDQDATYFGAFKVRDID

SEQ ID NO: 68631 - protein, 244 aa, Homo sapiens
MDPNRISEDGTHCIYRILRLHENADFQDTTLESQDTKLIPDSCRRIKQAFQGAVQKELQHIVGSQHIRAEKAMVDGSWLDLAKRSKLEAQPFAHLTINATDIPSGSHKVSLSSWYHDRGWAKISNMTFSNGKLIVNQDGFYYLYANICFRHHETSGDLATEYLQLMVYVTKTSIKIPSSHTLMKGGSTKYWSGNSEFHFYSINVGGFFKLRSGEEISIEVSNPSLLDPDQDATYFGAFKVRDID

SEQ ID NO: 68632 - protein, 244 aa, Homo sapiens; identical to SEQ ID NO: 68631

SEQ ID NO: 68633 - protein, 244 aa, Homo sapiens; identical to SEQ ID NO: 68631

SEQ ID NO: 68634 - protein, 244 aa, Homo sapiens; identical to SEQ ID NO: 68631

SEQ ID NO: 68635 - protein, 249 aa, Homo sapiens
MAARRSQRRRGRRGEPGTALLVPLALGLGLALACLGLLLAVVSLGSRASLSAQEPAQEELVAEEDQDPSELNPQTEESQDPAPFLNRLVRPRRSAPKGRKTRARRAIAAHYEVHPRPGQDGAQAGVDGTVSGWEEARINSSSPLRYNRQIGEFIVTRAGLYYLYCQVHFDEGKAVYLKLDLLVDGVLALRCLEEFSATAASSLGPQLRLCQVSGLLALRPGSSLRIRTLPWAHLKAAPFLTYFGLFQVH

SEQ ID NO: 68636 - protein, 330 aa, Homo sapiens
MAARRSQRRRGRRGEPGTALLVPLALGLGLALACLGLLLAVVSLGSRASLSAQEPAQEELVAEEDQDPSELNPQTEESQDPAPFLNRLVRPRRSAPKGRKTRARRAIAAHYEVHPRPGQDGAQAGVDGTVSGWEEARINSSSPLRYNRQIGEFIVTRAGLYYLYCQSSDALEAWENGERSRKRRAVLTQKQKKQHSVLHLVPINATSKDDSDVTEVMWQPALRRGRGLQAQGYGVRIQDAGVYLLYSQVLFQDVTFTMGQVVSREGQGRQETLFRCIRSMPSHPDRAYNSCYSAGVFHLHQGDILSVIIPRARAKLNLSPHGTFLGFVKL

SEQ ID NO: 68637 - protein, 240 aa, Homo sapiens; identical to SEQ ID NO: 68629

SEQ ID NO: 68638 - protein, 204 aa, Homo sapiens
MEESVVRPSVFVVDGQTDIPFTRLGRSHRRQSCSVARDGPAGSWEQLIQERRSHEVNPAAHLTGANSSLTGSGGPLLWETQLGLAFLRGLSYHDGALVVTKAGYYYIYSKVQLGGVGCPLGLASTITHGLYKRTPRYPEELELLVSQQSPCGRATSSSRVWWDSSFLGGVVHLEAGEKVVVRVLDERLVRLRDGTRSYFGAFMV

SEQ ID NO: 68639 - protein, 174 aa, Homo sapiens
MRHFLSKVYSFPMRKLILFLVFPVVRQTPTQHFKNQFPALHWEHELGLAFTKNRMNYTNKFLLIPESGDYFIYSQVTFRGMTSECSEIRQAGRPNKPDSITVVITKVTDSYPEPTQLLMGTKSVCEVGSNWFQPIYLGAMFSLQEGDKLMVNVSDISLVDYTKEDKTFFGAFLL

SEQ ID NO: 68640 - protein, 251 aa, Homo sapiens
MAEDLGLSFGETASVEMLPEHGSCRPKARSSSARWALTCCLVLLPFLAGLTTYLLVSQLRAQGEACVQFQALKGQEFAPSHQQVYAPLRADGDKPRAHLTVVRQTPTQHFKNQFPALHWEHELGLAFTKNRMNYTNKFLLIPESGDYFIYSQVTFRGMTSECSEIRQAGRPNKPDSITVVITKVTDSYPEPTQLLMGTKSVCEVGSNWFQPIYLGAMFSLQEGDKLMVNVSDISLVDYTKEDKTFFGAFLL

SEQ ID NO: 68641 - protein, 177 aa, Homo sapiens
MCLSHLENMPLSHSRTQGAQRSSWKLWLFCSIVMLLFLCSFSWLIFIFLQLETAKEPCMAKFGPLPSKWQMASSEPPCVNKVSDWKLEILQNGLYLIYGQVAPNANYNDVAPFEVRLYKNKDMIQTLTNKSKIQNVGGTYELHVGDTIDLIFNSEHQVLKNNTYWGIILLANPQFIS

SEQ ID NO: 68642 - protein, 199 aa, Homo sapiens
MTLHPSPITCEFLFSTALISPKMCLSHLENMPLSHSRTQGAQRSSWKLWLFCSIVMLLFLCSFSWLIFIFLQLETAKEPCMAKFGPLPSKWQMASSEPPCVNKVSDWKLEILQNGLYLIYGQVAPNANYNDVAPFEVRLYKNKDMIQTLTNKSKIQNVGGTYELHVGDTIDLIFNSEHQVLKNNTYWGIILLANPQFIS

SEQ ID NO: 68643 - protein, 183 aa, Homo sapiens
MERVQPLEENVGNAARPRFERNKLLLVASVIQGLGLLLCFTYICLHFSALQVSHRYPRIQSIKVQFTEYKKEKGFILTSQKEDEIMKVQNNSVIINCDGFYLISLKGYFSQEVNISLHYQKDEEPLFQLKKVRSVNSLMVASLTYKDKVYLNVTTDNTSLDDFHVNGGELILIHQNPGEFCVL

SEQ ID NO: 68644 - protein, 133 aa, Homo sapiens
MVSHRYPRIQSIKVQFTEYKKEKGFILTSQKEDEIMKVQNNSVIINCDGFYLISLKGYFSQEVNISLHYQKDEEPLFQLKKVRSVNSLMVASLTYKDKVYLNVTTDNTSLDDFHVNGGELILIHQNPGEFCVL

SEQ ID NO: 68645 - protein, 133 aa, Homo sapiens; identical to SEQ ID NO: 68644

SEQ ID NO: 68646 - protein, 254 aa, Homo sapiens
MEYASDASLDPEAPWPPAPRARACRVLPWALVAGLLLLLLLAAACAVFLACPWAVSGARASPGSAASPRLREGPELSPDDPAGLLDLRQGMFAQLVAQNVLLIDGPLSWYSDPGLAGVSLTGGLSYKEDTKELVVAKAGVYYVFFQLELRRVVAGEGSGSVSLALHLQPLRSAAGAAALALTVDLPPASSEARNSAFGFQGRLLHLSAGQRLGVHLHTEARARHAWQLTQGATVLGLFRVTPEIPAGLPSPRSE

SEQ ID NO: 68647 - protein, 616 aa, Homo sapiens
MAPRARRRRPLFALLLLCALLARLQVALQIAPPCTSEKHYEHLGRCCNKCEPGKYMSSKCTTTSDSVCLPCGPDEYLDSWNEEDKCLLHKVCDTGKALVAVVAGNSTTPRRCACTAGYHWSQDCECCRRNTECAPGLGAQHPLQLNKDTVCKPCLAGYFSDAFSSTDKCRPWTNCTFLGKRVEHHGTEKSDAVCSSSLPARKPPNEPHVYLPGLIILLLFASVALVAAIIFGVCYRKKGKALTANLWHWINEACGRLSGDKESSGDSCVSTHTANFGQQGACEGVLLLTLEEKTFPEDMCYPDQGGVCQGTCVGGGPYAQGEDARMLSLVSKTEIEEDSFRQMPTEDEYMDRPSQPTDQLLFLTEPGSKSTPPFSEPLEVGENDSLSQCFTGTQSTVGSESCNCTEPLCRTDWTPMSSENYLQKEVDSGHCPHWAASPSPNWADVCTGCRNPPGEDCEPLVGSPKRGPLPQCAYGMGLPPEEEASRTEARDQPEDGADGRLPSSARAGAGSGSSPGGQSPASGNVTGNSNSTFISSGQVMNFKGDIIVVYVSQTSQEGAAAAAEPMGRPVQEETLARRDSFAGNGPRFPDPCGGPEGLREPEKASRPVQEQGGAKA

SEQ ID NO: 68648 - protein, 259 aa, Homo sapiens
MARIPKTLKFVVVIVAVLLPVLAYSATTARQEEVPQQTVAPQQQRHSFKGEECPAGSHRSEHTGACNPCTEGVDYTNASNNEPSCFPCTVCKSDQKHKSSCTMTRDTVCQCKEGTFRNENSPEMCRKCSRCPSGEVQVSNCTSWDDIQCVEEFGANATVETPAAEETMNTSPGTPAPAAEETMNTSPGTPAPAAEETMTTSPGTPAPAAEETMTTSPGTPAPAAEETMITSPGTPASSHYLSCTIVGIIVLIVLLIVFV

SEQ ID NO: 68649 - protein, 157 aa, Homo sapiens
MTRDTVCQCKEGTFRNENSPEMCRKCSRCPSGEVQVSNCTSWDDIQCVEEFGANATVETPAAEETMNTSPGTPAPAAEETMNTSPGTPAPAAEETMTTSPGTPAPAAEETMTTSPGTPAPAAEETMITSPGTPASSHYLSCTIVGIIVLIVLLIVFV

SEQ ID NO: 68650 - protein, 277 aa, Homo sapiens
MARIPKTLKFVVVIVAVLLPVLAYSATTARQEEVPQQTVAPQQQRHSFKGEECPAGSHRSEHTGACNPCTEGVDYTNASNNEPSCFPCTVCKSDQKHKSSCTMTRDTVCQCKEGTFRNENSPEMCRKCSRCPSGEVQVSNCTSWDDIQCVEEFGANATVETPAAEETMNTSPGTPAPAAEETMNTSPGTPAPAAEETMTTSPGTPAPAAEETMTTSPGTPAPAAEETMITSPGTPASSHYLSCTIVGIIVLIVLLIVPYLKKKKKKKLKKKQKRKSK

SEQ ID NO: 68651 - protein, 616 aa, Homo sapiens; identical to SEQ ID NO: 68647

SEQ ID NO: 68652 - protein, 321 aa, Homo sapiens
GSRARWATEAAEAAAPASLSRAMAPRARRRRPLFALLLLCALLARLQVALQIAPPCTSEKHYEHLGRCCNKCEPGKYMSSKCTTTSDSVCLPCGPDEYLDSWNEEDKCLLHKVCDTGKALVAVVAGNSTTPRRCACTAGYHWSQDCECCRRNTECAPGLGAQHPLQLNKDTVCKPCLAGYFSDAFSSTDKCRPWTNCTFLGKRVEHHGTEKSDAVCSSSLPARKPPNGNVTGNSNSTFISSGQVMNFKGDIIVVYVSQTSQEGAAAAAEPMGRPVQEETLARRDSFAGNGPRFPDPCGGPEGLREPEKASRPVQEQGGAKA

SEQ ID NO: 68653 - protein, 401 aa, Homo sapiens
MNNLLCCALVFLDISIKWTTQETFPPKYLHYDEETSHQLLCDKCPPGTYLKQHCTAKWKTVCAPCPDHYYTDSWHTSDECLYCSPVCKELQYVKQECNRTHNRVCECKEGRYLEIEFCLKHRSCPPGFGVVQAGTPERNTVCKRCPDGFFSNETSSKAPCRKHTNCSVFGLLLTQKGNATHDNICSGNSESTQKCGIDVTLCEEAFFRFAVPTKFTPNWLSVLVDNLPGTKVNAESVERIKRQHSSQEQTFQLLKLWKHQNKDQDIVKKIIQDIDLCENSVQRHIGHANLTFEQLRSLMESLPGKKVGAEDIEKTIKACKPSDQILKLLSLWRIKNGDQDTLKGLMHALKHSKTYHFPKTVTQSLKKTIRFLHSFTMYKLYQKLFLEMIGNQVQSVKISCL

SEQ ID NO: 68654 - protein, 129 aa, Homo sapiens
MARGSLRRLLRLLVLGLWLALLRSVAGEQAPGTAPCSRGSSWSADLDKCMDCASCRARPHSDFCLGCAAAPPAPFRLLWPILGGALSLTFVLGLLSGFLVWRRCRRREKFTTPIEETGGEGCPAVALIQ

SEQ ID NO: 68655 - protein, 94 aa, Homo sapiens
MARGSLRRLLRLLVLGLWLALLRSVAGEQAPGAAAPPAPFRLLWPILGGALSLTFVLGLLSGFLVWRRCRRREKFTTPIEETGGEGCPAVALIQ

SEQ ID NO: 68656 - protein, 293 aa, Homo sapiens
MSGLGRSRRGGRSRVDQEERFPQGLWTGVAMRSCPEEQYWDPLLGTCMSCKTICNHQSQRTCAAFCRSLSCRKEQGKFYDHLLRDCISCASICGQHPKQCAYFCENKLRSPVNLPPELRRQRSGEVENNSDNSGRYQGLEHRGSEASPALPGLKLSADQVALVYSTLGLCLCAVLCCFLVAVACFLKKRGDPCSCQPRSRPRQSPAKSSQDHAMEAGSPVSTSPEPVETCSFCFPECRAPTQESAVTPGTPDPTCAGRWGCHTRTTVLQPCPHIPDSGLGIVCVPAQEGGPGA

SEQ ID NO: 68657 - protein, 248 aa, Homo sapiens
MSGLGRSRRGGRSRVDQEERWSLSCRKEQGKFYDHLLRDCISCASICGQHPKQCAYFCENKLRSPVNLPPELRRQRSGEVENNSDNSGRYQGLEHRGSEASPALPGLKLSADQVALVYSTLGLCLCAVLCCFLVAVACFLKKRGDPCSCQPRSRPRQSPAKSSQDHAMEAGSPVSTSPEPVETCSFCFPECRAPTQESAVTPGTPDPTCAGRKTKPPPVLTAGNCGVHRPPPETSTGSPRGQRLLWTQ

SEQ ID NO: 68658 - protein, 184 aa, Homo sapiens
MRRGPRSLRGRDAPAPTPCVPAECFDLLVRHCVACGLLRTPRPKPAGASSPAPRTALQPQESVGAGAGEAALPLPGLLFGAPALLGLALVLALVLVGLVSWRRRQRRLRGASSAEAPDGDKDAPEPLDKVIILSPGISDATAPAWPPPGEDPGTTPPGHSVPVPATELGSTELVTTKTAGPEQQ

SEQ ID NO: 68659 - protein, 283 aa, Homo sapiens
MEPPGDWGPPPWRSTPKTDVLRLVLYLTFLGAPCYAPALPSCKEDEYPVGSECCPKCSPGYRVKEACGELTGTVCEPCPPGTYIAHLNGLSKCLQCQMCDPAMGLRASRNCSRTENAVCGCSPGHFCIVQDGDHCAACRAYATSSPGQRVQKGGTESQDTLCQNCPPGTFSPNGTLEECQHQTKCSWLVTKAGAGTSSSHWVWWFLSGSLVIVIVCSTVGLIICVKRRKPRGDVVKVIVSVQRKRQEAEGEATVIEALQAPPDVTTVAVEETIPSFTGRSPNH

SEQ ID NO: 68660 - protein, 173 aa, Homo sapiens
MEPPGDWGPPPWRSTPKTDVLRLVLYLTFLGAPCYAPALPSCKEDEYPVGSECCPKCSPGYRVKEACGELTGTVCEPCPPGTYIAHLNGLSKCLQCQMCDPDIGSPCDLRGRGHLEAGAHLSPGRQKGEPDPEVAFESLSAEPHARLSMASAPCGQAGLHLRDRADGTPGGRA

SEQ ID NO: 68661 - protein, 183 aa, Homo sapiens
MEPPGDWGPPPWRSTPKTDVLRLVLYLTFLGAPCYAPALPSCKEDEYPVGSECCPKCSPGYRVKEACGELTGTVCEPCPPGTYIAHLNGLSKCLQCQMCDPAMGLRASRNCSRTENAVCGCSPGHFCIVQDGDHCAACRAYATSSPGQRVQKGGTESQDTLCQNCPPGTFSPNGTLEECQHQT

SEQ ID NO: 68662 - protein, 231 aa, Homo sapiens
MEPPGDWGPPPWRSTPKTDVLRLVLYLTFLGAPCYAPALPSCKEDEYPVGSECCPKCSPGYRVKEACGELTGTVCEPCPPGTYIAHLNGLSKCLQCQMCDPAMGLRASRNCSRTENAVCGCSPGHFCIVQDGDHCAACRAYATSSPGQRVQKGGTESQDTLCQNCPPGTFSPNGTLEECQHQTKCSWLVTKAGAGTSSSHWVWWFLSGSLVIVIVCSTVGLIICVKRRKPR

SEQ ID NO: 68663 - protein, 231 aa, Homo sapiens; identical to SEQ ID NO: 68662

SEQ ID NO: 68664 - protein, 231 aa, Homo sapiens; identical to SEQ ID NO: 68662

SEQ ID NO: 68665 - protein, 184 aa, Homo sapiens
MLQMAGQCSQNEYFDSLLHACIPCQLRCSSNTPPLTCQRYCNASVTNSVKGTNAILWTCLGLSLIISLAVFVLMFLLRKINSEPLKDEFKNTGSGLLGMANIDLEKSRTGDEIILPRGLEYTVEECTCEDCIKSKPKVDSDHCFPLPAMEEGATILVTTKTNDYCKSLPAALSATEIEKSISAR

SEQ ID NO: 68666 - protein, 135 aa, Homo sapiens
MLQMAGQCSQNEYFDSLLHACIPCQLRCSSNTPPLTCQRYCNARSGLLGMANIDLEKSRTGDEIILPRGLEYTVEECTCEDCIKSKPKVDSDHCFPLPAMEEGATILVTTKTNDYCKSLPAALSATEIEKSISAR

SEQ ID NO: 68667 - protein, 138 aa, Homo sapiens
MAGQCSQNEYFDSLLHACIPCQLRCSSNTPPLTCQRYCNASVTNSVKGTNAILWTCLGLSLIISLAVFVLMFLLRKINSEPLKDEFKNTEMESRSVAQAGVQWRDLNSLQPLPLGFKQFSHLSLLSNWDYRIRSPGHG

SEQ ID NO: 68668 - protein, 255 aa, Homo sapiens
MAQHGAMGAFRALCGLALLCALSLGQRPTGGPGCGPGRLLLGTGTDARCCRVHTTRCCRDYPGEECCSEWDCMCVQPEFHCGDPCCTTCRHHPCPPGQGVQSQGKFSFGFQCIDCASGTFSGGHEGHCKPWTDCCWRCRRRPKTPEAASSPRKSGASDRQRRRGGWETCGCEPGRPPGPPTAASPSPGAPQAAGALRSALGRALLPWQQKWVQEGGSDQRPGPCSSAAAAGPCRRERETQSWPPSSLAGPDGVGS

SEQ ID NO: 68669 - protein, 234 aa, Homo sapiens
MAQHGAMGAFRALCGLALLCALSLGQRPTGGPGCGPGRLLLGTGTDARCCRVHTTRCCRDYPGEECCSEWDCMCVQPEFHCGDPCCTTCRHHPCPPGQGVQSQGKFSFGFQCIDCASGTFSGGHEGHCKPWTDCTQFGFLTVFPGNKTHNAVCVPGSPPAEPLGWLTVVLLAVAACVLLLTSAQLGLHIWQLRKTQLLLEVPPSTEDARSCQFPEEERGERSAEEKGRLGDLWV

SEQ ID NO: 68670 - protein, 241 aa, Homo sapiens
MAQHGAMGAFRALCGLALLCALSLGQRPTGGPGCGPGRLLLGTGTDARCCRVHTTRCCRDYPGEECCSEWDCMCVQPEFHCGDPCCTTCRHHPCPPGQGVQSQGKFSFGFQCIDCASGTFSGGHEGHCKPWTDCTQFGFLTVFPGNKTHNAVCVPGSPPAEPLGWLTVVLLAVAACVLLLTSAQLGLHIWQLRSQCMWPRETQLLLEVPPSTEDARSCQFPEEERGERSAEEKGRLGDLWV

SEQ ID NO: 68671 - protein, 277 aa, Homo sapiens
MCVGARRLGRGPCAALLLLGLGLSTVTGLHCVGDTYPSNDRCCHECRPGNGMVSRCSRSQNTVCRPCGPGFYNDVVSSKPCKPCTWCNLRSGSERKQLCTATQDTVCRCRAGTQPLDSYKPGVDCAPCPPGHFSPGDNQACKPWTNCTLAGKHTLQPASNSSDAICEDRDPPATQPQETQGPPARPITVQPTEAWPRTSQGPSTRPVEVPGGRAVAAILGLGLVLGLLGPLAILLALYLLRRDQRLPPDAHKPPGGGSFRTPIQEEQADAHSTLAKI

SEQ ID NO: 68672 - protein, 132 aa, Homo sapiens
  VARIANT 1: note = MOD_RES - Any amino acid
XPGAPPLPPGAQTRPRPRGVGETTLAMWPGLAGLSRSGSERKQLCTATQDTVCRCRAGTQPLDSYKPGVDCAPCPPGHFSPGDNQACKPWTNCTLAGKHTLQPASNSSDAICEDRDPPATQPQETQGPPARP

SEQ ID NO: 68673 - protein, 140 aa, Homo sapiens
MRALEGPGLSLLCLVLALPALLPVPAVRGVAETPTYPWRDAETGERLVCAQCPPGTFVQRPCRRDSPTTCGPCPPRHYTQFWNYLERCRYCNVLCGEREEEARACHATHNRACCGCCRRCAWPGCPGWSGASVSASSLCT

SEQ ID NO: 68674 - protein, 300 aa, Homo sapiens
MRALEGPGLSLLCLVLALPALLPVPAVRGVAETPTYPWRDAETGERLVCAQCPPGTFVQRPCRRDSPTTCGPCPPRHYTQFWNYLERCRYCNVLCGEREEEARACHATHNRACRCRTGFFAHAGFCLEHASCPPGAGVIAPGTPSQNTQCQPCPPGTFSASSSSSEQCQPHRNCTALGLALNVPGSSSHDTLCTSCTGFPLSTRVPGAEECERAVIDFVAFQDISIKRLQRLLQALEAPEGWGPTPRAGRAALQLKLRRRLTELLGAQDGALLVRLLQALRVARMPGLERSVRERFLPVH

SEQ ID NO: 68675 - protein, 300 aa, Homo sapiens; identical to SEQ ID NO: 68674

SEQ ID NO: 68676 - protein, 595 aa, Homo sapiens
MRVLLAALGLLFLGALRAFPQDRPFEDTCHGNPSHYYDKAVRRCCYRCPMGLFPTQQCPQRPTDCRKQCEPDYYLDEADRCTACVTCSRDDLVEKTPCAWNSSRVCECRPGMFCSTSAVNSCARCFFHSVCPAGMIVKFPGTAQKNTVCEPASPGVSPACASPENCKEPSSGTIPQAKPTPVSPATSSASTMPVRGGTRLAQEAASKLTRAPDSPSSVGRPSSDPGLSPTQPCPEGSGDCRKQCEPDYYLDEAGRCTACVSCSRDDLVEKTPCAWNSSRTCECRPGMICATSATNSRARCVPYPICAAETVTKPQDMAEKDTTFEAPPLGTQPDCNPTPENGEAPASTSPTQSLLVDSQASKTLPIPTSAPVALSSTGKPVLDAGPVLFWVILVLVVVVGSSAFLLCHRRACRKRIRQKLHLCYPVQTSQPKLELVDSRPRRSSTQLRSGASVTEPVAEERGLMSQPLMETCHSVGAAYLESLPLQDASPAGGPSSPRDLPEPRVSTEHTNNKIEKIYIMKADTVIVGTVKAELPEGRGLAGPAEPELEEELEADHTPHYPEQETEPPLGSCSDVMLSVEEEGKEDPLPTAASGK

SEQ ID NO: 68677 - protein, 132 aa, Homo sapiens
MSQPLMETCHSVGAAYLESLPLQDASPAGGPSSPRDLPEPRVSTEHTNNKIEKIYIMKADTVIVGTVKAELPEGRGLAGPAEPELEEELEADHTPHYPEQETEPPLGSCSDVMLSVEEEGKEDPLPTAASGK

SEQ ID NO: 68678 - protein, 483 aa, Homo sapiens
MFCSTSAVNSCARCFFHSVCPAGMIVKFPGTAQKNTVCEPASPGVSPACASPENCKEPSSGTIPQAKPTPVSPATSSASTMPVRGGTRLAQEAASKLTRAPDSPSSVGRPSSDPGLSPTQPCPEGSGDCRKQCEPDYYLDEAGRCTACVSCSRDDLVEKTPCAWNSSRTCECRPGMICATSATNSRARCVPYPICAAETVTKPQDMAEKDTTFEAPPLGTQPDCNPTPENGEAPASTSPTQSLLVDSQASKTLPIPTSAPVALSSTGKPVLDAGPVLFWVILVLVVVVGSSAFLLCHRRACRKRIRQKLHLCYPVQTSQPKLELVDSRPRRSSTLRSGASVTEPVAEERGLMSQPLMETCHSVGAAYLESLPLQDASPAGGPSSPRDLPEPRVSTEHTNNKIEKIYIMKADTVIVGTVKAELPEGRGLAGPAEPELEEELEADHTPHYPEQETEPPLGSCSDVMLSVEEEGKEDPLPTAASGK

SEQ ID NO: 68679 - protein, 316 aa, Homo sapiens
MSGDTCLCPASGAKPKLSGFKGGGLGNKYVQLNVGGSLYYTTVRALTRHDTMLKAMFSGRMEVLTDKEGWILIDRCGKHFGTILNYLRDDTITLPQNRQEIKELMAEAKYYLIQGLVNMCQSALQDKKDSYQPVCNIPIITSLKEEERLIESSTKPVVKLLYNRSNNKYSYTSNSDDHLLKNIELFDKLSLRFNGRVLFIKDVIGDEICCWSFYGQGRKLAEVCCTSIVYATEKKQTKVEFPEARIYEETLNVLLYETPRVPDNSLLEATSRSRSQASPSEDEETFELRDRVRRIHVKRYSTYDDRQLGHQSTHRD

SEQ ID NO: 68680 - protein, 212 aa, Homo sapiens
MAEAKYYLIQGLVNMCQSALQDKKDSYQPVCNIPIITSLKEEERLIESSTKPVVKLLYNRSNNKYSYTSNSDDHLLKNIELFDKLSLRFNGRVLFIKDVIGDEICCWSFYGQGRKLAEVCCTSIVYATEKKQTKVEFPEARIYEETLNVLLYETPRVPDNSLLEATSRSRSQASPSEDEETFELRDRVRRIHVKRYSTYDDRQLGHQSTHRD

SEQ ID NO: 68681 - protein, 654 aa, Homo sapiens
MSEASSEDLVPPLEAGAAPYREEEEAAKKKKEKKKKSKGLANVFCVFTKGKKKKGQPSSAEPEDAAGSRQGLDGPPPTVEELKAALERGQLEAARPLLALERELAAAAAAGGVSEEELVRRQSKVEALYELLRDQVLGVLRRPLEAPPERLRQALAVVAEQEREDRQAAAAGPGTSGLAATRPRRWLQLWRRGVAEAAEERMGQRPAAGAEVPESVFLHLGRTMKEDLEAVVERLKPLFPAEFGVVAAYAESYHQHFAAHLAAVAQFELCERDTYMLLLWVQNLYPNDIINSPKLVGELQGMGLGSLLPPRQIRLLEATFLSSEAANVRELMDRALELEARRWAEDVPPQRLDGHCHSELAIDIIQITSQAQAKAESITLDLGSQIKRVLLVELPAFLRSYQRAFNEFLERGKQLTNYRANVIANINNCLSFRMSMEQNWQVPQDTLSLLLGPLGELKSHGFDTLLQNLHEDLKPLFKRFTHTRWAAPVETLENIIATVDTRLPEFSELQGCFREELMEALHLHLVKEYIIQLSKGRLVLKTAEQQQQLAGYILANADTIQHFCTQHGSPATWLQPALPTLAEIIRLQDPSAIKIEVATYATCYPDFSKGHLSAILAIKGNLSNSEVKRIRSILDVSMGAQEPSRPLFSLIKVG

SEQ ID NO: 68682 - protein, 323 aa, Homo sapiens [sequence omitted]

SEQ ID NO: 68683 - protein, 199 aa, Homo sapiens
MEALHLHLVKEYIIQLSKGRLVLKTAEQQQQLAGYILANADTIQHFCTQHGSPATWLQPALPTLAEIIRLQDPSAIKIEVATYATCYPDFSKGHLSAILAIKGNLSNSEVKRIRSILDVSMGAQEPSRPLFSLIKPRAAVSGIQQWWNGRQNWKRKKEKMSSRLAGAFRVLWRAVSTASIRRHIQVAPRPLQAGPAMGP

SEQ ID NO: 68684 - protein, 39 aa, Homo sapiens
MSEASSEDLVPPLEAGAAPYREEEEAAKKKKEKKKKSKG

SEQ ID NO: 68685 - protein, 654 aa, Homo sapiens; identical to SEQ ID NO: 68681

SEQ ID NO: 68686 - protein, 790 aa, Homo sapiens
MAEQVLPQALYLSNMRKAVKIRERTPEDIFKPTNGIIHHFKTMHRYTLEMFRTCQFCPQFREIIHKALIDRNIQATLESQKKLNWCREVRKLVALKTNGDGNCLMHATSQYMWGVQDTDLVLRKALFSTLKETDTRNFKFRWQLESLKSQEFVETGLCYDTRNWNDEWDNLIKMASTDTPMARSGLQYNSLEEIHIFVLCNILRRPIIVISDKMLRSLESGSNFAPLKVGGIYLPLHWPAQECYRYPIVLGYDSHHFVPLVTLKDSGPEIRAVPLVNRDRGRFEDLKVHFLTDPENEMKEKLLKEYLMVIEIPVQGWDHGTTHLINAAKLDEANLPKEINLVDDYFELVQHEYKKWQENSEQGRREGHAQNPMEPSVPQLSLMDVKCETPNCPFFMSVNTQPLCHECSERRQKNQNKLPKLNSKPGPEGLPGMALGASRGEAYEPLAWNPEESTGGPHSAPPTAPSPFLFSETTAMKCRSPGCPFTLNVQHNGFCERCHNARQLHASHAPDHTRHLDPGKCQACLQDVTRTFNGICSTCFKRTTAEASSSLSTSLPPSCHQRSKSDPSRLVRSPSPHSCHRAGNDAPAGCLSQAARTPGDRTGTSKCRKAGCVYFGTPENKGFCTLCFIEYRENKHFAAASGKVSPTASRFQNTIPCLGRECGTLGSTMFEGYCQKCFIEAQNQRFHEAKRTEEQLRSSQRRDVPRTTQSTSRPKCARASCKNILACRSEELCMECQHPNQRMGPGAHRGEPAPEDPPKQRCRAPACDHFGNAKCNGYCNECFQFKQMYG

SEQ ID NO: 68687 - protein, 162 aa, Homo sapiens
MAEQVLPQALYLSNMRKAVKIRERTPEDIFKPTNGIIHHFKTMHRYTLEMFRTCQFCPQFREIIHKALIDRNIQATLESQKKLNWCREVRKLVALKTNGDGNCLMHATSQYMWGVQDTDLVLRKALFSTLKETDTRNFKFRWQLESLKSQEFVETGLCYDTR

SEQ ID NO: 68688 - protein, 26 aa, Homo sapiens
MAEQVLPQALYLSNMRKAVKIRERTP

SEQ ID NO: 68689 - protein, 98 aa, Homo sapiens
MAEQVLPQALYLSNMRKAVKIRERTPEDIFKPTNGIIHHFKTMHRYTLEMFRTCQFCPQFREIIHKALIDRNIQATLESQKKLNWCREVRKLVALKTN

SEQ ID NO: 68690 - protein, 270 aa, Homo sapiens
MAEQVLPQALYLSNMRKAVKIRERTPEDIFKPTNGIIHHFKTMHRYTLEMFRTCQFCPQFREIIHKALIDRNIQATLESQKKLNWCREVRKLVALKTNGDGNCLMHATSQYMWGVQDTDLVLRKALFSTLKETDTRNFKFRWQLESLKSQEFVETGLCYDTRNWNDEWDNLIKMASTDTPMARSGLQYNSLEEIHIFVLCNILRRPIIVISDKMLRSLESGSNFAPLKVGGIYLPLHWPAQECYRYPIVLGYDSHHFVPLVTLKDSGPDI

SEQ ID NO: 68691 - protein, 749 aa, Homo sapiens
MAEQVLPQALYLSNMRKAVKIRERTPEDIFKPTNGIIHHFKTMHRYTLEMFRTCQFCPQFREIIHKALIDRNIQATLESQKKLNWCREVRKLVALKTNGDGNCLMHATSQYMWGVQDTDLVLRKALFSTLKETDTRNFKFRWQLESLKSQEFVETGLCYDTRNWNDEWDNLIKMASTDTPMARSGLQYNSLEEIHIFVLCNILRRPIIVISDKMLRSLESGSNFAPLKVGGIYLPLHWPAQECYRYPIVLGYDSHHFVPLVTLKDSGPEIRAVPLVNRDRGRFEDLKVHFLTDPENEMKEKLLKEYLMVIEIPVQGWDHGTTHLINAAKLDEANLPKEINLVDDYFELVQHEYKKWQENSEQGRREGHAQNPMEPSVPQLSLMDVKCETPNCPFFMSVNTQPLCHECSERRQKNQNKLPKLNSKPGPEGLPGMALGASRGEAYEPLAWNPEESTGGPHSAPPTAPSPFLFSETTAMKCRSPGCPFTLNVQHNGFCERCHNARQLHASHAPDHTRHLDPGKCQACLQDVTRTFNGICSTCFKRTTAEASSSLSTSLPPSCHQRSKSDPSRLVRSPSPHSCHRAGNDAPAGCLSQAARTPGDRTGTSKCRKAGCVYFGTPENKGFCTLCFIEYRENKHFAAASGKVSPTASRFQNTIPCLGRECGTLGSTMFEGYCQKCFIEAQNQRFHEAKRTEEQLRSSQRRDVPRTTQSTSRPKCARASCKNILACRSEELCMECQHQPEDGPWGPPG

SEQ ID NO: 68692 - protein, 152 aa, Homo sapiens
MAEQVLPQALYLSNMRKAVKIRERTPEDIFKPTNGIIHHFKTMHRYTLEMFRTCQFCPQFREIIHKALIDRNIQATLESQKKLNWCREVRKLVALKTNGDGNCLMHATSQYMWGVQDTDLVLRKALFSTLKETDTRNFKFRWQLESQISGIC

SEQ ID NO: 68693 - protein, 214 aa, Homo sapiens
MAEQVLPQALYLSNMRKAVKIRERTPEDIFKPTNGIIHHFKTMHRYTLEMFRTCQFCPQFREIIHKALIDRNIQATLESQKKLNWCREVRKLVALKTNGDGNCLMHATSQYMWGVQDTDLVLRKALFSTLKETDTRNFKFRWQLESLKSQEFVETGLCYDTRNWNDEWDNLIKWLPQTHPWPEVDFSTTHWKKYTYLSFATSSEGQSLSFQTKC

SEQ ID NO: 68694 - protein, 669 aa, Homo sapiens
MAEQVLPQALYLSNMRKAVKIRERTPEDIFKPTNGIIHHFKTMHRYTLEMFRTCQFCPQFREIIHKALIDRNIQATLESQKKLNWCREVRKLVALKTNGDGNCLMHATSQYMWGVQDTDLVLRKALFSTLKETDTRNFKFRWQLESLKSQEFVETGLCYDTRNWNDEWDNLIKMASTDTPMARSGLQYNSLEEIHIFVLCNILRRPIIVISDKMLRSLESGSNFAPLKVGGIYLPLHWPAQECYRYPIVLGYDSHHFVPLVTLKDSGPEIRAVPLVNRDRGRFEDLKVHFLTDPENEMKEKLLKEYLMVIEIPVQGWDHGTTHLINAAKLDEANLPKEINLVDDYFELVQHEYKKWQENSEQGRREGHAQNPMEPSVPQLSLMDVKCETPNCPFFMSVNTQPLCHECSERRQKNQNKLPKLNSKPGPEGLPGMALGASRGEAYEPLAWNPEESTGGPHSAPPTAPSPFLFSETTAMKCRSPGCPFTLNVQHNGFCERCHNARQLHASHAPDHTRHLDPGKCQACLQDVTRTFNGICSTCFKRTTAEASSSLSTSLPPSCHQRSKSDPSRLVRSPSPHSCHRAGNDAPAGCLSQAARTPGDRTGTSKCRKAGCVYFGTPENKGFCTLFHRVQRKQTFCCCLRESQSHSVQVPEHHSVPGEGMRHPWKHHV

SEQ ID NO: 68695 - protein, 277 aa, Homo sapiens
MIILIYLFLLLWEDTQGWGFKDGIFHNSIWLERAAGVYHREARSGKYKLTYAEAKAVCEFEGGHLATYKQLEAARKIGFHVCAAGWMAKGRVGYPIVKPGPNCGFGKTGIIDYGIRLNRSERWDAYCYNPHAKECGGVFTDPKQIFKSPGFPNEYEDNQICYWHIRLKYGQRIHLSFLDFDLEDDPGCLADYVEIYDSYDDVHGFVGRYCGDELPDDIISTGNVMTLKFLSDASVTAGGFQIKYVAMDPVSKSSQGKNTSTTSTGNKNFLAGRFSHL

SEQ ID NO: 68696 - protein, 188 aa, Homo sapiens
MATDVFNSKNLAVQAQKKILGKMVSKSIATTLIDDTSSEVLDELYRVTREYTQNKKEAEKIIKNLIKTVIKLAILYRNNQFNQDELALMEKFKKKVHQLAMTVVSFHQVDYTFDRNVLSRLLNECREMLHQIIQRHLTAKSHGRVNNVFDHFSDCEFLAALYNPFGNFKPHLQKLCDGINKMLDEENI

SEQ ID NO: 68697 - protein, 198 aa, Homo sapiens
MHSEAEESKEVATDVFNSKNLAVQAQKKILGKMVSKSIATTLIDDTSSEVLDELYRVTREYTQNKKEAEKIIKNLIKTVIKLAILYRNNQFNQDELALMEKFKKKVHQLAMTVVSFHQVDYTFDRNVLSRLLNECREMLHQIIQRHLTAKSHGRVNNVFDHFSDCEFLAALYNPFGNFKPHLQKLCDGINKMLDEENI

SEQ ID NO: 68698 - protein, 198 aa, Homo sapiens; identical to SEQ ID NO: 68697

SEQ ID NO: 68699 - protein, 184 aa, Homo sapiens
MESFSSKSLALQAEKKLLSKMAGRSVAHLFIDETSSEVLDELYRVSKEYTHSRPQAQRVIKDLIKVAIKVAVLHRNGSFGPSELALATRFRQKLRQGAMTALSFGEVDFTFEAAVLAGLLTECRDVLLELVEHHLTPKSHGRIRHVFDHFSDPGLLTALYGPDFTQHLGKICDGLRKLLDEGKL

SEQ ID NO: 68700 - protein, 229 aa, Homo sapiens
MDSAGQDINLNSPNKGLLSDSMTDVPVDTGVAARTPAVEGLTEAEEEELRAELTKVEEEIVTLRQVLAAKERHCGELKRRLGLSTLGELKQNLSRSWHDVQVSSAYVKTSEKLGEWNEKVTQSDLYKKTQETLSQAGQKTSAALSTVGSAISRKLGDMRAHPFSHSFSSYSIRHSISMPAMRNSATFKSFEDRVGTIKSKVVGDRENGSDNLPSSAGSGDKPLSDPAPF

SEQ ID NO: 68701 - protein, 206 aa, Homo sapiens
MDSAGQDINLNSPNKGLLSDSMTDVPVDTGVAARTPAVEGLTEAEEEELRAELTKVEEEIVTLRQVLAAKERHCGELKRRLGLSTLGELKQNLSRSWHDVQVSSAYVKTSEKLGEWNEKVTQSDLYKKTQETLSQAGQKTSAALSTVGSAISRKLGDMRNSATFKSFEDRVGTIKSKVVGDRENGSDNLPSSAGSGDKPLSDPAPF

SEQ ID NO: 68702 - protein, 186 aa, Homo sapiens
MDSAGQDINLNSPNKGLLSDSMTDVPVDTGVAARTPAVEGLTEAEEEELRAELTKVEEEIVTLRQVLAAKERHCGELKRRLGLSTLGELKQNLSRSWHDVQVSSAYKKTQETLSQAGQKTSAALSTVGSAISRKLGDMRNSATFKSFEDRVGTIKSKVVGDRENGSDNLPSSAGSGDKPLSDPAPF

SEQ ID NO: 68703 - protein, 209 aa, Homo sapiens
MDSAGQDINLNSPNKGLLSDSMTDVPVDTGVAARTPAVEGLTEAEEEELRAELTKVEEEIVTLRQVLAAKERHCGELKRRLGLSTLGELKQNLSRSWHDVQVSSAYKKTQETLSQAGQKTSAALSTVGSAISRKLGDMRAHPFSHSFSSYSIRHSISMPAMRNSATFKSFEDRVGTIKSKVVGDRENGSDNLPSSAGSGDKPLSDPAPF

SEQ ID NO: 68704 - protein, 220 aa, Homo sapiens
MDSAGQDINLNSPNKGLLSDSMTDVPVDTGVAARTPAVEGLTEAEEEELRAELTKVEEEIVTLRQVLAAKERHCGELKRRLGLSTLGELKQNLSRSWHDVQVSSAYVKTSEKLGEWNEKVTQSDLYKKTQETLSQAGQKTSAALSTVGSAISRKLGDMSSYSIRHSISMPAMRNSATFKSFEDRVGTIKSKVVGDRENGSDNLPSSAGSGDKPLSDPAPF

SEQ ID NO: 68705 - protein, 200 aa, Homo sapiens
MDSAGQDINLNSPNKGLLSDSMTDVPVDTGVAARTPAVEGLTEAEEEELRAELTKVEEEIVTLRQVLAAKERHCGELKRRLGLSTLGELKQNLSRSWHDVQVSSAYKKTQETLSQAGQKTSAALSTVGSAISRKLGDMSSYSIRHSISMPAMRNSATFKSFEDRVGTIKSKVVGDRENGSDNLPSSAGSGDKPLSDPAPF

SEQ ID NO: 68706 - protein, 163 aa, Homo sapiens
MDSAGQGVAARTPAVEGLTEAEEEELRAELTKVEEEIVTLRQVLAAKERHCGELKRRLGLSTLGELKQNLSRSWHDVQVSSAYKKTQETLSQAGQKTSAALSTVGSAISRKLGDMRNSATFKSFEDRVGTIKSKVVGDRENGSDNLPSSAGSGDKPLSDPAPF

SEQ ID NO: 68707 - protein, 1134 aa, Homo sapiens
MRFGSKMMPMFLTVYLSNNEQHFTEVPVTPETICRDVVDLCKEPGESDCHLAEVWCGSERPVADNERMFDVLQRFGSQRNEVRFFLRHERPPGRDIVSGPRSQDPSLKRNGVKVPGEYRRKENGVNSPRMDLTLAELQEMASRQQQQIEAQQQLLATKEQRLKFLKQQDQRQQQQVAEQEKLKRLKEIAENQEAKLKKVRALKGHVEQKRLSNGKLVEEIEQMNNLFQQKQRELVLAVSKVEELTRQLEMLKNGRIDSHHDNQSAVAELDRLYKELQLRNKLNQEQNAKLQQQRECLNKRNSEVAVMDKRVNELRDRLWKKKAALQQKENLPVSSDGNLPQQAASAPSRVAAVGPYIQSSTMPRMPSRPELLVKPALPDGSLVIQASEGPMKIQTLPNMRSGAASQTKGSKIHPVGPDWSPSNADLFPSQGSASVPQSTGNALDQVDDGEVPLREKEKKVRPFSMFDAVDQSNAPPSFGTLRKNQSSEDILRDAQVANKNVAKVPPPVPTKPKQINLPYFGQTNQPPSDIKPDGSSQQLSTVVPSMGTKPKPAGQQPRVLLSPSIPSVGQDQTLSPGSKQESPPAAAVRPFTPQPSKDTLLPPFRKPQTVAASSIYSMYTQQQAPGKNFQQAVQSALTKTHTRGPHFSSVYGKPVIAAAQNQQQHPENIYSNSQGKPGSPEPETEPVSSVQENHENERIPRPLSPTKLLPFLSNPYRNQSDADLEALRKKLSNAPRPLKKRSSITEPEGPNGPNIQKLLYQRTTIAAMETISVPSYPSKSASVTASSESPVEIQNPYLHVEPEKEVVSLVPESLSPEDVGNASTENSDMPAPSPGLDYEPEGVPDNSPNLQNNPEEPNPEAPHVLDVYLEEYPPYPPPPYPSGEPEGPGEDSVSMRPPEITGQVSLPPGKRTNLRKTGSERIAHGMRVKFNPLALLLDSSLEGEFDLVQRIIYEVDDPSLPNDEGITALHNAVCAGHTEIVKFLVQFGVNVNAADSDGWTPLHCAASCNNVQVCKFLVESGAAVFAMTYSDMQTAADKCEEMEEGYTQCSQFLYGVQEKMGIMNKGVIYALWDYEPQNDDELPMKEGDCMTIIHREDEDEIEWWWARLNDKEGYVPRNLLGLYPRIKPRQRSLA

SEQ ID NO: 68708 - protein, 1005 aa, Homo sapiens
MDLTLAELQEMASRQQQQIEAQQQLLATKEQRLKFLKQQDQRQQQQVAEQEKLKRLKEIAENQEAKLKKVRALKGHVEQKRLSNGKLVEEIEQMNNLFQQKQRELVLAVSKVEELTRQLEMLKNGRIDSHHDNQSAVAELDRLYKELQLRNKLNQEQNAKLQQQRECLNKRNSEVAVMDKRVNELRDRLWKKKAALQQKENLPVSSDGNLPQQAASAPSRVAAVGPYIQSSTMPRMPSRPELLVKPALPDGSLVIQASEGPMKIQTLPNMRSGAASQTKGSKIHPVGPDWSPSNADLFPSQGSASVPQSTGNALDQVDDGEVPLREKEKKVRPFSMFDAVDQSNAPPSFGTLRKNQSSEDILRDAQVANKNVAKVPPPVPTKPKQINLPYFGQTNQPPSDIKPDGSSQQLSTVVPSMGTKPKPAGQQPRVLLSPSIPSVGQDQTLSPGSKQESPPAAAVRPFTPQPSKDTLLPPFRKPQTVAASSIYSMYTQQQAPGKNFQQAVQSALTKTHTRGPHFSSVYGKPVIAAAQNQQQHPENIYSNSQGKPGSPEPETEPVSSVQENHENERIPRPLSPTKLLPFLSNPYRNQSDADLEALRKKLSNAPRPLKKRSSITEPEGPNGPNIQKLLYQRTTIAAMETISVPSYPSKSASVTASSESPVEIQNPYLHVEPEKEVVSLVPESLSPEDVGNASTENSDMPAPSPGLDYEPEGVPDNSPNLQNNPEEPNPEAPHVLDVYLEEYPPYPPPPYPSGEPEGPGEDSVSMRPPEITGQVSLPPGKRTNLRKTGSERIAHGMRVKFNPLALLLDSSLEGEFDLVQRIIYEVDDPSLPNDEGITALHNAVCAGHTEIVKFLVQFGVNVNAADSDGWTPLHCAASCNNVQVCKFLVESGAAVFAMTYSDMQTAADKCEEMEEGYTQCSQFLYGVQEKMGIMNKGVIYALWDYEPQNDDELPMKEGDCMTIIHREDEDEIEWWWARLNDKEGYVPRNLLGLYPRIKPRQRSLA

SEQ ID NO: 68709 - protein, 367 aa, Homo sapiens
METISVPSYPSKSASVTASSESPVEIQNPYLHVEPEKEVVSLVPESLSPEDVGNASTENSDMPAPSPGLDYEPEGVPDNSPNLQNNPEEPNPEAPHVLDVYLEEYPPYPPPPYPSGEPEGPGEDSVSMRPPEITGQVSLPPGKRTNLRKTGSERIAHGMRVKFNPLALLLDSSLEGEFDLVQRIIYEVDDPSLPNDEGITALHNAVCAGHTEIVKFLVQFGVNVNAADSDGWTPLHCAASCNNVQVCKFLVESGAAVFAMTYSDMQTAADKCEEMEEGYTQCSQFLYGVQEKMGIMNKGVIYALWDYEPQNDDELPMKEGDCMTIIHREDEDEIEWWWARLNDKEGYVPRNLLGLYPRIKPRQRSLA

SEQ ID NO: 68710 - protein, 680 aa, Homo sapiens
MNFETSRCATLQYCPDPYIQRFVETPAHFSWKESYYRSTMSQSTQTNEFLSPEVFQHIWDFLEQPICSVQPIDLNFVDEPSEDGATNKIEISMDCIRMQDSDLSDPMWPQYTNLGLLNSMDQQIQNGSSSTSPYNTDHAQNSVTAPSPYAQPSSTFDALSPSPAIPSNTDYPGPHSFDVSFQQSSTAKSATWTYSTELKKLYCQIAKTCPIQIKVMTPPPQGAVIRAMPVYKKAEHVTEVVKRCPNHELSREFNEGQIAPPSHLIRVEGNSHAQYVEDPITGRQSVLVPYEPPQVGTEFTTVLYNFMCNSSCVGGMNRRPILIIVTLETRDGQVLGRRCFEARICACPGRDRKADEDSIRKQQVSDSTKNGDGTKRPFRQNTHGIQMTSIKKRRSPDDELLYLPVRGRETYEMLLKIKESLELMQYLPQHTIETYRQQQQQQHQHLLQKQTSIQSPSSYGNSSPPLNKMNSMNKLPSVSQLINPQQRNALTPTTIPDGMGANIPMMGTHMPMAGDMNGLSPTQALPPPLSMPSTSHCTPPPPYPTDCSIVSFLARLGCSSCLDYFTTQGLTTIYQIEHYSMDDLASLKIPEQFRHAIWKGILDHRQLHEFSSPSHLLRTPSSASTVSVGSSETRGERVIDAVRFTLRQTISFPPRDEWNDFNFDMDARRNKQQRIKEEGE

SEQ ID NO: 68711 - protein, 510 aa, Homo sapiens
MNFETSRCATLQYCPDPYIQRFVETPAHFSWKESYYRSTMSQSTQTNEFLSPEVFQHIWDFLEQPICSVQPIDLNFVDEPSEDGATNKIEISMDCIRMQDSDLSDPMWPQYTNLGLLNSMDQQIQNGSSSTSPYNTDHAQNSVTAPSPYAQPSSTFDALSPSPAIPSNTDYPGPHSFDVSFQQSSTAKSATWTYSTELKKLYCQIAKTCPIQIKVMTPPPQGAVIRAMPVYKKAEHVTEVVKRCPNHELSREFNEGQIAPPSHLIRVEGNSHAQYVEDPITGRQSVLVPYEPPQVGTEFTTVLYNFMCNSSCVGGMNRRPILIIVTLETRDGQVLGRRCFEARICACPGRDRKADEDSIRKQQVSDSTKNGDGTKRPFRQNTHGIQMTSIKKRRSPDDELLYLPVRGRETYEMLLKIKESLELMQYLPQHTIETYRQQQQQQHQHLLQKQTSIQSPSSYGNSSPPLNKMNSMNKLPSVSQLINPQQRNALTPTTIPDGMGANRSGKSENP

SEQ ID NO: 68712 - protein, 586 aa, Homo sapiens
MLYLENNAQTQFSEPQYTNLGLLNSMDQQIQNGSSSTSPYNTDHAQNSVTAPSPYAQPSSTFDALSPSPAIPSNTDYPGPHSFDVSFQQSSTAKSATWTYSTELKKLYCQIAKTCPIQIKVMTPPPQGAVIRAMPVYKKAEHVTEVVKRCPNHELSREFNEGQIAPPSHLIRVEGNSHAQYVEDPITGRQSVLVPYEPPQVGTEFTTVLYNFMCNSSCVGGMNRRPILIIVTLETRDGQVLGRRCFEARICACPGRDRKADEDSIRKQQVSDSTKNGDGTKRPFRQNTHGIQMTSIKKRRSPDDELLYLPVRGRETYEMLLKIKESLELMQYLPQHTIETYRQQQQQQHQHLLQKQTSIQSPSSYGNSSPPLNKMNSMNKLPSVSQLINPQQRNALTPTTIPDGMGANIPMMGTHMPMAGDMNGLSPTQALPPPLSMPSTSHCTPPPPYPTDCSIVSFLARLGCSSCLDYFTTQGLTTIYQIEHYSMDDLASLKIPEQFRHAIWKGILDHRQLHEFSSPSHLLRTPSSASTVSVGSSETRGERVIDAVRFTLRQTISFPPRDEWNDFNFDMDARRNKQQRIKEEGE

SEQ ID NO: 68713 - protein, 595 aa, Homo sapiens
MNFETSRCATLQYCPDPYIQRFVETPAHFSWKESYYRSTMSQSTQTNEFLSPEVFQHIWDFLEQPICSVQPIDLNFVDEPSEDGATNKIEISMDCIRMQDSDLSDPMWYSTELKKLYCQIAKTCPIQIKVMTPPPQGAVIRAMPVYKKAEHVTEVVKRCPNHELSREFNEGQIAPPSHLIRVEGNSHAQYVEDPITGRQSVLVPYEPPQVGTEFTTVLYNFMCNSSCVGGMNRRPILIIVTLETRDGQVLGRRCFEARICACPGRDRKADEDSIRKQQVSDSTKNGDGTKRPFRQNTHGIQMTSIKKRRSPDDELLYLPVRGRETYEMLLKIKESLELMQYLPQHTIETYRQQQQQQHQHLLQKQTSIQSPSSYGNSSPPLNKMNSMNKLPSVSQLINPQQRNALTPTTIPDGMGANIPMMGTHMPMAGDMNGLSPTQALPPPLSMPSTSHCTPPPPYPTDCSIVSFLARLGCSSCLDYFTTQGLTTIYQIEHYSMDDLASLKIPEQFRHAIWKGILDHRQLHEFSSPSHLLRTPSSASTVSVGSSETRGERVIDAVRFTLRQTISFPPRDEWNDFNFDMDARRNKQQRIKEEGE

SEQ ID NO: 68714 - protein, 555 aa, Homo sapiens
MNFETSRCATLQYCPDPYIQRFVETPAHFSWKESYYRSTMSQSTQTNEFLSPEVFQHIWDFLEQPICSVQPIDLNFVDEPSEDGATNKIEISMDCIRMQDSDLSDPMWPQYTNLGLLNSMDQQIQNGSSSTSPYNTDHAQNSVTAPSPYAQPSSTFDALSPSPAIPSNTDYPGPHSFDVSFQQSSTAKSATWTYSTELKKLYCQIAKTCPIQIKVMTPPPQGAVIRAMPVYKKAEHVTEVVKRCPNHELSREFNEGQIAPPSHLIRVEGNSHAQYVEDPITGRQSVLVPYEPPQVGTEFTTVLYNFMCNSSCVGGMNRRPILIIVTLETRDGQVLGRRCFEARICACPGRDRKADEDSIRKQQVSDSTKNGDGTKRPFRQNTHGIQMTSIKKRRSPDDELLYLPVRGRETYEMLLKIKESLELMQYLPQHTIETYRQQQQQQHQHLLQKQTSIQSPSSYGNSSPPLNKMNSMNKLPSVSQLINPQQRNALTPTTIPDGMGANIPMMGTHMPMAGDMNGLSPTQALPPPLSMPSTSHCTPPPPYPTDCSIVRIWQV

SEQ ID NO: 68715 - protein, 416 aa, Homo sapiens
MLYLENNAQTQFSEPQYTNLGLLNSMDQQIQNGSSSTSPYNTDHAQNSVTAPSPYAQPSSTFDALSPSPAIPSNTDYPGPHSFDVSFQQSSTAKSATWTYSTELKKLYCQIAKTCPIQIKVMTPPPQGAVIRAMPVYKKAEHVTEVVKRCPNHELSREFNEGQIAPPSHLIRVEGNSHAQYVEDPITGRQSVLVPYEPPQVGTEFTTVLYNFMCNSSCVGGMNRRPILIIVTLETRDGQVLGRRCFEARICACPGRDRKADEDSIRKQQVSDSTKNGDGTKRPFRQNTHGIQMTSIKKRRSPDDELLYLPVRGRETYEMLLKIKESLELMQYLPQHTIETYRQQQQQQHQHLLQKQTSIQSPSSYGNSSPPLNKMNSMNKLPSVSQLINPQQRNALTPTTIPDGMGANRSGKSENP

SEQ ID NO: 68716 - protein, 461 aa, Homo sapiens
MLYLENNAQTQFSEPQYTNLGLLNSMDQQIQNGSSSTSPYNTDHAQNSVTAPSPYAQPSSTFDALSPSPAIPSNTDYPGPHSFDVSFQQSSTAKSATWTYSTELKKLYCQIAKTCPIQIKVMTPPPQGAVIRAMPVYKKAEHVTEVVKRCPNHELSREFNEGQIAPPSHLIRVEGNSHAQYVEDPITGRQSVLVPYEPPQVGTEFTTVLYNFMCNSSCVGGMNRRPILIIVTLETRDGQVLGRRCFEARICACPGRDRKADEDSIRKQQVSDSTKNGDGTKRPFRQNTHGIQMTSIKKRRSPDDELLYLPVRGRETYEMLLKIKESLELMQYLPQHTIETYRQQQQQQHQHLLQKQTSIQSPSSYGNSSPPLNKMNSMNKLPSVSQLINPQQRNALTPTTIPDGMGANIPMMGTHMPMAGDMNGLSPTQALPPPLSMPSTSHCTPPPPYPTDCSIVRIWQV

SEQ ID NO: 68717 - protein, 487 aa, Homo sapiens
MNFETSRCATLQYCPDPYIQRFVETPAHFSWKESYYRSTMSQSTQTNEFLSPEVFQHIWDFLEQPICSVQPIDLNFVDEPSEDGATNKIEISMDCIRMQDSDLSDPMWPQYTNLGLLNSMDQQIQNGSSSTSPYNTDHAQNSVTAPSPYAQPSSTFDALSPSPAIPSNTDYPGPHSFDVSFQQSSTAKSATWTYSTELKKLYCQIAKTCPIQIKVMTPPPQGAVIRAMPVYKKAEHVTEVVKRCPNHELSREFNEGQIAPPSHLIRVEGNSHAQYVEDPITGRQSVLVPYEPPQVGTEFTTVLYNFMCNSSCVGGMNRRPILIIVTLETRDGQVLGRRCFEARICACPGRDRKADEDSIRKQQVSDSTKNGDGTKRPFRQNTHGIQMTSIKKRRSPDDELLYLPVRGRETYEMLLKIKESLELMQYLPQHTIETYRQQQQQQHQHLLQKHLLSACFRNELVEPRRETPKQSDVFFRHSKPPNRSVYP

SEQ ID NO: 68718 - protein, 393 aa, Homo sapiens
MLYLENNAQTQFSEPQYTNLGLLNSMDQQIQNGSSSTSPYNTDHAQNSVTAPSPYAQPSSTFDALSPSPAIPSNTDYPGPHSFDVSFQQSSTAKSATWTYSTELKKLYCQIAKTCPIQIKVMTPPPQGAVIRAMPVYKKAEHVTEVVKRCPNHELSREFNEGQIAPPSHLIRVEGNSHAQYVEDPITGRQSVLVPYEPPQVGTEFTTVLYNFMCNSSCVGGMNRRPILIIVTLETRDGQVLGRRCFEARICACPGRDRKADEDSIRKQQVSDSTKNGDGTKRPFRQNTHGIQMTSIKKRRSPDDELLYLPVRGRETYEMLLKIKESLELMQYLPQHTIETYRQQQQQQHQHLLQKHLLSACFRNELVEPRRETPKQSDVFFRHSKPPNRSVYP

SEQ ID NO: 68719 - protein, 676 aa, Homo sapiens
MNFETSRCATLQYCPDPYIQRFVETPAHFSWKESYYRSTMSQSTQTNEFLSPEVFQHIWDFLEQPICSVQPIDLNFVDEPSEDGATNKIEISMDCIRMQDSDLSDPMWPQYTNLGLLNSMDQQIQNGSSSTSPYNTDHAQNSVTAPSPYAQPSSTFDALSPSPAIPSNTDYPGPHSFDVSFQQSSTAKSATWTYSTELKKLYCQIAKTCPIQIKVMTPPPQGAVIRAMPVYKKAEHVTEVVKRCPNHELSREFNEGQIAPPSHLIRVEGNSHAQYVEDPITGRQSVLVPYEPPQVGTEFTTVLYNFMCNSSCVGGMNRRPILIIVTLETRDGQVLGRRCFEARICACPGRDRKADEDSIRKQQVSDSTKNGDAFRQNTHGIQMTSIKKRRSPDDELLYLPVRGRETYEMLLKIKESLELMQYLPQHTIETYRQQQQQQHQHLLQKQTSIQSPSSYGNSSPPLNKMNSMNKLPSVSQLINPQQRNALTPTTIPDGMGANIPMMGTHMPMAGDMNGLSPTQALPPPLSMPSTSHCTPPPPYPTDCSIVSFLARLGCSSCLDYFTTQGLTTIYQIEHYSMDDLASLKIPEQFRHAIWKGILDHRQLHEFSSPSHLLRTPSSASTVSVGSSETRGERVIDAVRFTLRQTISFPPRDEWNDFNFDMDARRNKQQRIKEEGE

SEQ ID NO: 68720 - protein, 501 aa, Homo sapiens
MLYLENNAQTQFSEYSTELKKLYCQIAKTCPIQIKVMTPPPQGAVIRAMPVYKKAEHVTEVVKRCPNHELSREFNEGQIAPPSHLIRVEGNSHAQYVEDPITGRQSVLVPYEPPQVGTEFTTVLYNFMCNSSCVGGMNRRPILIIVTLETRDGQVLGRRCFEARICACPGRDRKADEDSIRKQQVSDSTKNGDGTKRPFRQNTHGIQMTSIKKRRSPDDELLYLPVRGRETYEMLLKIKESLELMQYLPQHTIETYRQQQQQQHQHLLQKQTSIQSPSSYGNSSPPLNKMNSMNKLPSVSQLINPQQRNALTPTTIPDGMGANIPMMGTHMPMAGDMNGLSPTQALPPPLSMPSTSHCTPPPPYPTDCSIVSFLARLGCSSCLDYFTTQGLTTIYQIEHYSMDDLASLKIPEQFRHAIWKGILDHRQLHEFSSPSHLLRTPSSASTVSVGSSETRGERVIDAVRFTLRQTISFPPRDEWNDFNFDMDARRNKQQRIKEEGE

SEQ ID NO: 68721 - protein, 582 aa, Homo sapiens
MLYLENNAQTQFSEPQYTNLGLLNSMDQQIQNGSSSTSPYNTDHAQNSVTAPSPYAQPSSTFDALSPSPAIPSNTDYPGPHSFDVSFQQSSTAKSATWTYSTELKKLYCQIAKTCPIQIKVMTPPPQGAVIRAMPVYKKAEHVTEVVKRCPNHELSREFNEGQIAPPSHLIRVEGNSHAQYVEDPITGRQSVLVPYEPPQVGTEFTTVLYNFMCNSSCVGGMNRRPILIIVTLETRDGQVLGRRCFEARICACPGRDRKADEDSIRKQQVSDSTKNGDAFRQNTHGIQMTSIKKRRSPDDELLYLPVRGRETYEMLLKIKESLELMQYLPQHTIETYRQQQQQQHQHLLQKQTSIQSPSSYGNSSPPLNKMNSMNKLPSVSQLINPQQRNALTPTTIPDGMGANIPMMGTHMPMAGDMNGLSPTQALPPPLSMPSTSHCTPPPPYPTDCSIVSFLARLGCSSCLDYFTTQGLTTIYQIEHYSMDDLASLKIPEQFRHAIWKGILDHRQLHEFSSPSHLLRTPSSASTVSVGSSETRGERVIDAVRFTLRQTISFPPRDEWNDFNFDMDARRNKQQRIKEEGE

SEQ ID NO: 68722 - protein, 188 aa, Homo sapiens
MIIYRDLISHDEMFSDIYKIREIADGLCLEVEGKMVSRTEGNIDDSLIGGNASAEGPEGEGTESTVITGVDIVMNHHLQETSFTKEAYKKYIKDYMKSIKGKLEEQRPERVKPFMTGAAEQIKHILANFKNYQFFIGENMNPDGMVALLDYREDGVTPYMIFFKDGLEMEKCVSTRKWVKINNVKKTF

SEQ ID NO: 68723 - protein, 138 aa, Homo sapiens
MVSRTEGNIDDSLIGGNASAEGPEGEGTESTVITGVDIVMNHHLQETSFTKEAYKKYIKDYMKSIKGKLEEQRPERVKPFMTGAAEQIKHILANFKNYQFFIGENMNPDGMVALLDYREDGVTPYMIFFKDGLEMEKC

SEQ ID NO: 68724 - protein, 138 aa, Homo sapiens; identical to SEQ ID NO: 68723

SEQ ID NO: 68725 - protein, 160 aa, Homo sapiens
MFSDIYKIREIADGLCLEVEGKMVSRTEGNIDDSLIGGNASAEGPEGEGTESTVITGVDIVMNHHLQETSFTKEAYKKYIKDYMKSIKGKLEEQRPERVKPFMTGAAEQIKHILANFKNYQFFIGENMNPDGMVALLDYREDGVTPYMIFFKDGLEMEKC

SEQ ID NO: 68726 - protein, 172 aa, Homo sapiens
MIIYRDLISHDEMFSDIYKIREIADGLCLEVEGKMVSRTEGNIDDSLIGGNASAEGPEGEGTESTVITGVDIVMNHHLQETSFTKEAYKKYIKDYMKSIKGKLEEQRPERVKPFMTGAAEQIKHILANFKNYQFFIGENMNPDGMVALLDYREDGVTPYMIFFKDGLEMEKC

SEQ ID NO: 68727 - protein, 387 aa, Homo sapiens
MEDDAPVIYGLEFQARALTPQTAETDAIRFLVGTQSLKYDNQIHIIDFDDENNIINKNVLLHQAGEIWHISASPADRGVLTTCYNRTSDSKVLTCAAVWRMPKELESGSHESPDDSSSTAQTLELLCHLDNTAHGNMACVVWEPMGDGKKIISLADNHILLWDLQESSSQAVLASSASLEGKGQLKFTSGRWSPHHNCTQVATANDTTLRGWDTRSMSQIYCIENAHGQLVRDLDFNPNKQYYLASCGDDCKVKFWDTRNVTEPVKTLEEHSHWVWNVRYNHSHDQLVLTGSSDSRVILSNMVSISSEPFGHLVDDDDISDQEDHRSEEKSKEPLQDNVIATYEEHEDSVYAVDWSSADPWLFASLSYDGRLVINRVPRALKYHILL

SEQ ID NO: 68728 - protein, 329 aa, Homo sapiens
MAEAGTGEPSPSVEGEHGTEYDTLPSDTVSLSDSDSDLSLPGGAEVEALSPMGLPGEEDSGPDEPPSPPSGLLPATVQPFHLRGMSSTFSQRSRDIFDCLEGAARRAPSSVAHTSMSDNGGFKRPLAPSGRSPVEGLGRAHRSPASPRVPPVPDYVAHPERWTKYSLEDVTEVSEQSNQATALAFLGSQSLAAPTDCVSSFNQDPSSCGEGRVIFTKPVRGVEARHERKRVLGKVGEPGRGGLGNPATDRGEGPVELAHLAGPGSPEAEEWGSHHGGLQEVEALSGSVHSGSVPGLPPVETVGFHGSRKRSRDHFRNKSSSPEDPGAEV

SEQ ID NO: 68729 - protein, 265 aa, Homo sapiens
MAEAGTGLLPATVQPFHLRGMSSTFSQRSRDIFDCLEGAARRAPSSVAHTSMSDNGGFKRPLAPSGRSPVEGLGRAHRSPASPRVPPVPDYVAHPERWTKYSLEDVTEVSEQSNQATALAFLGSQSLAAPTDCVSSFNQDPSSCGEGRVIFTKPVRGVEARHERKRVLGKVGEPGRGGLGNPATDRGEGPVELAHLAGPGSPEAEEWGSHHGGLQEVEALSGSVHSGSVPGLPPVETVGFHGSRKRSRDHFRNKSSSPEDPGAEV

SEQ ID NO: 68730 - protein, 112 aa, Homo sapiens
MAEAGTGEPSPSVEGEHGTEYDTLPSDTVSLSDSDSDLSLPGGAEVEALSPMGLPGEEDSGPDEPPSPPSGLLPATVQPFHLRGMSSTFSQRSRDIFDCLEGAARRAPSSVA

SEQ ID NO: 68731 - protein, 203 aa, Homo sapiens
MAEAGTGEPSPSVEGEHGTEYDTLPSDTVSLSDSDSDLSLPGGAEVEALSPMGLPGEEDSGPDEPPSPPSGLLPATVQPFHLRGMSSTFSQRSRDIFDCLEGAARRAPSSVAHTSMSDNGGFKRPLAPSGRSPVEGLGRAHRSPASPRVPPVPDYVAHPERWTKYSLEDVTEVSEQSNQATALAFLGSQSLAAPTDCVSSFNQ

SEQ ID NO: 68732 - protein, 208 aa, Homo sapiens
MAEAGTGLLPATVQPFHLRGMSSTFSQRSRDIFDCLEGAARRAPSSVAHTSMSDNGGFKRPLAPSGRSPVEGLGRAHRSPASPRVPPVPDYVAHPERWTKYSLEDVTEVSEQSNQATALAFLGSQSLAAPTDCVSSFNQDPSSCGEGRVIFTKPVRGVEARHERKRVLGKVGEPGRGGLGNPATDRGEGPVELAHLAGPGSPEAEEWG

SEQ ID NO: 68733 - protein, 329 aa, Homo sapiens; identical to SEQ ID NO: 68728

SEQ ID NO: 68734 - protein, 110 aa, Homo sapiens
MAEAGTGEPSPSVEGEHGTEYDTLPSDTVSLSDSDSDLSLPGGAEVEALSPMGLPGEEDSGPDEPPSPPSGLLPATVQPFHLRGMSSTFSQRSRDIFDCLEGAARRAPSS

SEQ ID NO: 68735 - protein, 191 aa, Homo sapiens
MAEAGTGEPSPSVEGEHGTEYDTLPSDTVSLSDSDSDLSLPGGAEVEALSPMGLPGEEDSGPDEPPSPPSGLLPATVQPFHLRGMSSTFSQRSRDIFDCLEGAARRAPSSVAHTSMSDNGGFKRPLAPSGRSPVEGLGRAHRSPASPRVPPVPDYVAHPERWTKYSLEDVTEVSEQSNQATALAFLGSQSL

SEQ ID NO: 68736 - protein, 212 aa, Homo sapiens
MGPMWRMRGGATRRGSCCGGDGAADGRGPGRSGRARGGGSPSGGGGGVGWRGRADGARQQLEERFADLAASHLEAIRARDEWDRQNARLRQENARLRLENRRLKRENRSLFRQALRLPGEGGNGTPAEARRVPEEASTNRRARDSGREDEPGSPRALRARLEKLEAMYRRALLQLHLEQRGPRPSGDKEEQPLQEPDSGLRSRDSEPSGPWL

SEQ ID NO: 68737 - protein, 348 aa, Homo sapiens
MGARGAPSRRRQAGRRLRYLPTGSFPFLLLLLLLCIQLGGGQKKKENLLAEKVEQLMEWSSRRSIFRMNGDKFRKFIKAPPRNYSMIVMFTALQPQRQCSVCRQANEEYQILANSWRYSSAFCNKLFFSMVDYDEGTDVFQQLNMNSAPTFMHFPPKGRPKRADTFDLQRIGFAAEQLAKWIADRTDVHIRVFRPPNYSGTIALALLVSLVGGLLYLRRNNLEFIYNKTGWAMVSLCIVFAMTSGQMWNHIRGPPYAHKNPHNGQVSYIHGSSQAQFVAESHIILVLNAAITMGMVLLNEAATSKGDVGKRRIICLVGLGLVVFFFSFLLSIFRSKYHGYPYSDLDFE

SEQ ID NO: 68738 - protein, 347 aa, Homo sapiens
MGARGAPSRRRQAGRRLRYLPTGSFPFLLLLLLLCIQLGGGQKKKENLLAEKVEQLMEWSSRRSIFRMNGDKFRKFIKAPPRNYSMIVMFTALQPQRQCSVCRQANEEYQILANSWRYSSAFCNKLFFSMVDYDEGTDVFQQLNMNSAPTFMHFPPKGRPKRADTFDLQRIGFAAEQLAKWIADRTDVHIRVFRPPNYSGTIALALLVSLVGGLLYLRRNNLEFIYNKTGWAMVSLCIVFAMTSGQMWNHIRGPPYAHKNPHNGQVSYIHGSSQAQFVAESHIILVLNAAITMGMVLLNEAATSKGDVGKRRIICLVGLGLVVFFFSFLLSIFRSKYHGYPYSFLIK

SEQ ID NO: 68739 - protein, 348 aa, Homo sapiens; identical to SEQ ID NO: 68737

SEQ ID NO: 68740 - protein, 348 aa, Homo sapiens; identical to SEQ ID NO: 68737

SEQ ID NO: 68741 - protein, 177 aa, Homo sapiens
MAHPVQSEFPSAQEPGSAAFLDLPEMEILLTKAENKDDKTLNLSKTLSGPLDLEQNSQGLPFKAISEGHLEAPLPRSPSRASSRRASSIATTSYAQDQEAPRDYLILAVVACFCPVWPLNLIPLIISIMSRSSMQQGNVDGARRLGRLARLLSITLIIMGIVIIMVAVTVNFTVQKK

SEQ ID NO: 68742 - protein, 390 aa, Homo sapiens
MAVSESQLKKMVSKYKYRDLTVRETVNVITLYKDLKPVLDSYVFNDGSSRELMNLTGTIPVPYRGNTYNIPICLWLLDTYPYNPPICFVKPTSSMTIKTGKHVDANGKIYLPYLHEWKHPQSDLLGLIQVMIVVFGDEPPVFSRPISASYPPYQATGPPNTSYMPGMPGGISPYPSGYPPNPSGYPGCPYPPGGPYPATTSSQYPSQPPVTTVGPSRDGTISEDTIRASLISAVSDKLRWRMKEEMDRAQAELNALKRTEEDLKKGHQKLEEMVTRLDQEVAEVDKNIELLKKKDEELSSALEKMENQSENNDIDEVIIPTAPLYKQILNLYAEENAIEDTIFYLGEALRRGVIDLDVFLKHVRLLSRKQFQLRALMQKARKTAGLSDLY

SEQ ID NO: 68743 - protein, 285 aa, Homo sapiens
MAVSESQLKKMVSKPQSDLLGLIQVMIVVFGDEPPVFSRPISASYPPYQATGPPNTSYMPGMPGGISPYPSGYPPNPSGYPGCPYPPGGPYPATTSSQYPSQPPVTTVGPSRDGTISEDTIRASLISAVSDKLRWRMKEEMDRAQAELNALKRTEEDLKKGHQKLEEMVTRLDQEVAEVDKNIELLKKKDEELSSALEKMENQSENNDIDEVIIPTAPLYKQILNLYAEENAIEDTIFYLGEALRRGVIDLDVFLKHVRLLSRKQFQLRALMQKARKTAGLSDLY

SEQ ID NO: 68744 - protein, 323 aa, Homo sapiens
MARGPGLAPPPLRLPLLLLVLAAVTGHTAAQDNCTCPTNKMTVCSPDGPGGRCQCRALGSGMAVDCSTLTSKCLLLKARMSAPKNARTLVRPSEHALVDNDGLYDPDCDPEGRFKARQCNQTSVCWCVNSVGVRRTDKGDLSLRCDELVRTHHILIDLRHRPTAGAFNHSDLDAELRRLFRERYRLHPKFVAAVHYEQPTIQIELRQNTSQKAAGDVDIGDAAYYFERDIKGESLFQGRGGLDLRVRGEPLQVERTLIYYLDEIPPKFSMKRLTAGLIAVIVVVVVALVAGMAVLVITNRRKSGKYKKVEIKELGELRKEPSL

SEQ ID NO: 68745 - protein, 450 aa, Homo sapiens
MGAPPGYRPSAWVHLLHQLPRADFQLRPVPSVFAPQEQEYQQALLLVAALAGLGLGLSLIFIAVYLIRFCCCRPPEPPGSKIPSPGGGCVTWSCIVALLAGCTGIGIGFYGNSETSDGVSQLSSALLHANHTLSTIDHLVLETVERLGEAVRTELTTLEEVLEPRTELVAAARGARRQAEAAAQQLQGLAFWQGVPLSPLQVAENVSFVEEYRWLAYVLLLLLELLVCLFTLLGLAKQSKWLVIVMTVMSLLVLVLSWGSMGLEAATAVGLSDFCSNPDPYVLNLTQEETGLSSDILSYYLLCNRAVSNPFQQRLTLSQRALANIHSQLLGLEREAVPQFPSAQKPLLSLEETLNVTEGNFHQLVALLHCRSLHKDYGAALRGLCEDALEGLLFLLLFSLLSAGALATALCSLPRAWALFPPSDDYDDTDDDDPFNPQESKRFVQWQSSI

SEQ ID NO: 68746 - protein, 460 aa, Homo sapiens
MGAPPGYRPSAWVHLLHQLPRADFQLRPVPSVFAPQEQEYQQALLLVAALAGLGLGLSLIFIAVYLIRFCCCRPPEPPGSKIPSPGGGCVTWSCIVALLAGCTGIGIGFYGNSETSDGVSQLSSALLHANHTLSTIDHLVLETVERLGEAVRTELTTLEEVLEPRTELVAAARGARRQAEAAAQQLQGLAFWQGVPLSPLQVAENVSFVEEYRWLAYVLLLLLELLVCLFTLLGLAKQSKWLVIVMTVMSLLVLVLSWGSMGLEAATAVGLSDFCSNPDPYVLNLTQEETGLSSDILSYYLLCNRAVSNPFQQRLTLSQRALANIHSQLLGLEREAVPQFPSAQKPLLSLEETLNVTEGNFHQLVALLHCRSLHKDYGAALRGLCEDALEGLLFLLLFSLLSAGALATALCSLPRAWALFPPRNPSALCSGSRLSEPLLPAGLEPGSPLRSFPGCRRRPH

SEQ ID NO: 68747 - protein, 453 aa, Homo sapiens
MGAPPGYRPSAWVHLLHQLPRADFQLRPVPSVFAPQEQEYQQDQSSLAVTQRPPPTTPLHRLRPRPRLTPALARRPPEAARGDPRPQSPPEALLLVAALAGLGLGLSLIFIAVYLIRFCCCRPPEPPGSKIPSPGGGCVTWSCIVALLAGCTGIGIGFYGNSETSDGVSQLSSALLHANHTLSTIDHLVLETVERLGEAVRTELTTLEEVLEPRTELVAAARGARRQAEAAAQQLQGLAFWQGVPLSPLQVAENVSFVEEYRWLAYVLLLLLELLVCLFTLLGLAKQSKWLVIVMTVMSLLVLVLSWGSMGLEAATAVGLSDFCSNPDPYVLNLTQEETGLSSEADSVPASSGQHPLPAAGPGARSCASVPFSAEASAVLGGDSECDRRKFPPVGGTATLPQPAQGLWCSPAGPVRRRPGRPALPATLLPAVCRSAGHCPLQPAPSLGPLPTQ

SEQ ID NO: 68748 - protein, 451 aa, Homo sapiens
MGAPPGYRPSAWVHLLHQLPRADFQLRPVPSVFAPQEQEYQQALLLVAALAGLGLGLSLIFIAVYLIRFCCCRPPEPPGSKIPSPGGGCVTWSCIVALLAGCTGIGIGFYGNSETSDGVSQLSSALLHANHTLSTIDHLVLETVERLGEAVRTELTTLEEVLEPRTELVAAARGARRQAEAAAQQLQGLAFWQGVPLSPLQVAENVSFVEEYRWLAYVLLLLLELLVCLFTLLGLAKQSKWLVIVMTVMSLLVLVLSWGSMGLEAATAVGLSDFCSNPDPYVLNLTQEETGLSSDILSYYLLCNRAVSNPFQQRLTLSQRALANIHSQLLGLEREAVPQFPSAQKPLLSLEETLNVTEGNFHQLVALLHCRSLHKDYGAALRGLCEDALEGLLFLLLFSLLSAGALATALCSLPRAWALFPPSDDYDDTDDDDPFNPQQESKRFVQWQSSI

SEQ ID NO: 68749 - protein, 384 aa, Homo sapiens
MTRRGRRRSSHFLGPPAGAAGCTQRRSRELAAAAMSHQTGIQASEDVKEIFARARNGKYRLLKISIENEQLVIGSYSQPSDSWDKDYDSFVLPLLEDKQPCYILFRLDSQNAQGYEWIFIAWSPDHSHVRQKMLYAATRATLKKEFGGGHIKDEVFGTVKEDVSLHGYKKYLLSQSSPAPLTAAEEELRQIKINEVQTDVGVDTKHQTLQGVAFPISREAFQALEKLNNRQLNYVQLEIDIKNEIIILANTTNTELKDLPKRIPKDSARYHFFLYKHSHEGDYLESIVFIYSMPGYTCSIRERMLYSSCKSRLLEIVERQLQMDVIRKIEIDNGDELTADFLYEEVHPKQHAHKQSFAKPKGPAGKRGIRRLIRGPAETEATTD

SEQ ID NO: 68750 - protein, 350 aa, Homo sapiens
MSHQTGIQASEDVKEIFARARNGKYRLLKISIENEQLVIGSYSQPSDSWDKDYDSFVLPLLEDKQPCYILFRLDSQNAQGYEWIFIAWSPDHSHVRQKMLYAATRATLKKEFGGGHIKDEVFGTVKEDVSLHGYKKYLLSQSSPAPLTAAEEELRQIKINEVQTDVGVDTKHQTLQGVAFPISREAFQALEKLNNRQLNYVQLEIDIKNEIIILANTTNTELKDLPKRIPKDSARYHFFLYKHSHEGDYLESIVFIYSMPGYTCSIRERMLYSSCKSRLLEIVERQLQMDVIRKIEIDNGDELTADFLYEEVHPKQHAHKQSFAKPKGPAGKRGIRRLIRGPAETEATTD

SEQ ID NO: 68751 - protein, 357 aa, Homo sapiens
MSHQTGIQASEDVKEIFARARNGKYRLLKISIENEQLVIGSYSQPSDSWDKDYDSFVLPLLEDKQPCYILFRLDSQNAQGYEWIFIAWSPDHSHVRQKMLYAATRATLKKEFGGGHIKDEVFGTVKEDVSLHGYKKYLLSQSSPAPLTAAEEELRQIKINESPEDHIGVQTDVGVDTKHQTLQGVAFPISREAFQALEKLNNRQLNYVQLEIDIKNEIIILANTTNTELKDLPKRIPKDSARYHFFLYKHSHEGDYLESIVFIYSMPGYTCSIRERMLYSSCKSRLLEIVERQLQMDVIRKIEIDNGDELTADFLYEEVHPKQHAHKQSFAKPKGPAGKRGIRRLIRGPAETEATTD

SEQ ID NO: 68752 - protein, 349 aa, Homo sapiens
MAHQTGIHATEELKEFFAKARAGSVRLIKVVIEDEQLVLGASQEPVGRWDQDYDRAVLPLLDAQQPCYLLYRLDSQNAQGFEWLFLAWSPDNSPVRLKMLYAATRATVKKEFGGGHIKDELFGTVKDDLSFAGYQKHLSSCAAPAPLTSAERELQQIRINEVKTEISVESKHQTLQGLAFPLQPEAQRALQQLKQKMVNYIQMKLDLERETIELVHTEPTDVAQLPSRVPRDAARYHFFLYKHTHEGDPLESVVFIYSMPGYKCSIKERMLYSSCKSRLLDSVEQDFHLEIAKKIEIGDGAELTAEFLYDEVHPKQHAFKQAFAKPKGPGGKRGHKRLIRGPGENGDDS

SEQ ID NO: 68753 - protein, 160 aa, Homo sapiens
MEEGSSSPVSPVDSLGTSEEELERQPKRFGRKRRYSKKSSEDGSPTPGKRGKKGSPSAQSFEELQSQRILANVRERQRTQSLNEAFAALRKIIPTLPSDKLSKIQTLKLAARYIDFLYQVLQSDEMDNKMTSCSYVAHERLSYAFSVWRMEGAWSMSASH

SEQ ID NO: 68754 - protein, 338 aa, Homo sapiens
MAAGCSEAPRPAAASDGSLVGQAGVLPCLELPTYAAACALVNSRYSCLVAGPHQRHIALSPRYLNRKRTGIREQLDAELLRYSESLLGVPIAYDNIKVVGELGDIYDDQGHIHLNIEADFVIFCPEPGQKLMGIVNKVSSSHIGCLVHGCFNASIPKPEQLSAEQWQTMEINMGDELEFEVFRLDSDAAGVFCIRGKLNITSLQFKRSEVSEEVTENGTEEAAKKPKKKKKKKDPETYEVDSGTTKLADDADDTPMEESALQNTNNANGIWEEEPKKKKKKKKHQEVQDQDPVFQGSDSSGYQSDHKKKKKKRKHSEEAEFTPPLKCSPKRKGKSNFL

SEQ ID NO: 68755 - protein, 223 aa, Homo sapiens
MKLHYVAVLTLAILMFLTWLPESLSCNKALCASDVSKCLIQELCQCRPGEGNCSCCKECMLCLGALWDECCDCVGMCNPRNYSDTPPTSKSTVEELHEPIPSLFRALTEGDTQLNWNIVSFPVAEELSHHENLVSFLETVNQPHHQNVSVPSNNVHAPYSSDKEHMCTVVYFDDCMSIHQCKISCESMGASKYRWFHNACCECIGPECIDYGSKTVKCMNCMF

SEQ ID NO: 68756 - protein, 816 aa, Homo sapiens
MAVSLDDDVPLILTLDEGGSAPLAPSNGLGQEELPSKNGGSYAIHDSQAPSLSSGGESSPSSPAHNWEMNYQEAAIYLQEGENNDKFFTHPKDAKALAAYLFAHNHLFYLMELATALLLLLLSLCEAPAVPALRLGIYVHATLELFALMVVVFELCMKLRWLGLHTFIRHKRTMVKTSVLVVQFVEAIVVLVRQMSHVRVTRALRCIFLVDCRYCGGVRRNLRQIFQSLPPFMDILLLLLFFMIIFAILGFYLFSPNPSDPYFSTLENSIVSLFVLLTTANFPDVMMPSYSRNPWSCVFFIVYLSIELYFIMNLLLAVVFDTFNDIEKRKFKSLLLHKRTAIQHAYRLLISQRRPAGISYRQFEGLMRFYKPRMSARERYLTFKALNQNNTPLLSLKDFYDIYEVAALKWKAKKNREHWFDELPRTALLIFKGINILVKSKAFQYFMYLVVAVNGVWILVETFMLKGGNFFSKHVPWSYLVFLTIYGVELFLKVAGLGPVEYLSSGWNLFDFSVTVFAFLGLLALALNMEPFYFIVVLRPLQLLRLFKLKERYRNVLDTMFELLPRMASLGLTLLIFYYSFAIVGMEFFCGIVFPNCCNTSTVADAYRWRNHTVGNRTVVEEGYYYLNNFDNILNSFVTLFELTVVNNWYIIMEGVTSQTSHWSRLYFMTFYIVTMVVMTIIVAFILEAFVFRMNYSRKNQDSEVDGGITLEKEISKEELVAVLELYREARGASSDVTRLLETLSQMERYQQHSMVFLGRRSRTKSDLSLKMYQEEIQEWYEEHAREQEQQRQLSSSAAPAAQQPPGSRQRSQTVT

SEQ ID NO: 68757 - protein, 748 aa, Homo sapiens
MNYQEAAIYLQEGENNDKFFTHPKDAKALAAYLFAHNHLFYLMELATALLLLLLSLCEAPAVPALRLGIYVHATLELFALMVVVFELCMKLRWLGLHTFIRHKRTMVKTSVLVVQFVEAIVVLVRQMSHVRVTRALRCIFLVDCRYCGGVRRNLRQIFQSLPPFMDILLLLLFFMIIFAILGFYLFSPNPSDPYFSTLENSIVSLFVLLTTANFPDVMMPSYSRNPWSCVFFIVYLSIELYFIMNLLLAVVFDTFNDIEKRKFKSLLLHKRTAIQHAYRLLISQRRPAGISYRQFEGLMRFYKPRMSARERYLTFKALNQNNTPLLSLKDFYDIYEVAALKWKAKKNREHWFDELPRTALLIFKGINILVKSKAFQYFMYLVVAVNGVWILVETFMLKGGNFFSKHVPWSYLVFLTIYGVELFLKVAGLGPVEYLSSGWNLFDFSVTVFAFLGLLALALNMEPFYFIVVLRPLQLLRLFKLKERYRNVLDTMFELLPRMASLGLTLLIFYYSFAIVGMEFFCGIVFPNCCNTSTVADAYRWRNHTVGNRTVVEEGYYYLNNFDNILNSFVTLFELTVVNNWYIIMEGVTSQTSHWSRLYFMTFYIVTMVVMTIIVAFILEAFVFRMNYSRKNQDSEVDGGITLEKEISKEELVAVLELYREARGASSDVTRLLETLSQMERYQQHSMVFLGRRSRTKSDLSLKMYQEEIQEWYEEHAREQEQQRQLSSSAAPAAQQPPGSRQRSQTVT

SEQ ID NO: 68758 - protein, 888 aa, Homo sapiens
MESCYIAQAGLELLGSSSSPTLTSQSAEITEDASNGGVSEQHPWPSGFERELKPETISSPGYHILRATGEENMAVSLDDDVPLILTLDEGGSAPLAPSNGLGQEELPSKNGGSYAIHDSQAPSLSSGGESSPSSPAHNWEMNYQEAAIYLQEGENNDKFFTHPKDAKALAAYLFAHNHLFYLMELATALLLLLLSLCEAPAVPALRLGIYVHATLELFALMVVVFELCMKLRWLGLHTFIRHKRTMVKTSVLVVQFVEAIVVLVRQMSHVRVTRALRCIFLVDCRYCGGVRRNLRQIFQSLPPFMDILLLLLFFMIIFAILGFYLFSPNPSDPYFSTLENSIVSLFVLLTTANFPDVMMPSYSRNPWSCVFFIVYLSIELYFIMNLLLAVVFDTFNDIEKRKFKSLLLHKRTAIQHAYRLLISQRRPAGISYRQFEGLMRFYKPRMSARERYLTFKALNQNNTPLLSLKDFYDIYEVAALKWKAKKNREHWFDELPRTALLIFKGINILVKSKAFQYFMYLVVAVNGVWILVETFMLKGGNFFSKHVPWSYLVFLTIYGVELFLKVAGLGPVEYLSSGWNLFDFSVTVFAFLGLLALALNMEPFYFIVVLRPLQLLRLFKLKERYRNVLDTMFELLPRMASLGLTLLIFYYSFAIVGMEFFCGIVFPNCCNTSTVADAYRWRNHTVGNRTVVEEGYYYLNNFDNILNSFVTLFELTVVNNWYIIMEGVTSQTSHWSRLYFMTFYIVTMVVMTIIVAFILEAFVFRMNYSRKNQDSEVDGGITLEKEISKEELVAVLELYREARGASSDVTRLLETLSQMERYQQHSMVFLGRRSRTKSDLSLKMYQEEIQEWYEEHAREQEQQRQLSSSAAPAAQQPPGSRQRSQTVT

SEQ ID NO: 68759 - protein, 888 aa, Homo sapiens; identical to SEQ ID NO: 68758

SEQ ID NO: 68760 - protein, 85 aa, Homo sapiens
MAVSLDDDVPLILTLDEGGSAPLAPSNGLGQEELPSKNGGSYAIHDSQAPSLSSGGESSPSSPAHNWEMNYQEAAIYLQEGENND

SEQ ID NO: 68761 - protein, 100 aa, Homo sapiens [sequence omitted]

SEQ ID NO: 68762 - protein, 752 aa, Homo sapiens
MAEPQAESEPLLGGARGGGGDWPAGLTTYRSIQVGPGAAARWDLCIDQAVVFIEDAIQYRSINHRVDASSMWLYRRYYSNVCQRTLSFTIFLILFLAFIETPSSLTSTADVRYRAAPWEPPCGLTESVEVLCLLVFAADLSVKGYLFGWAHFQKNLWLLGYLVVLVVSLVDWTVSLSLVCHEPLRIRRLLRPFFLLQNSSMMKKTLKCIRWSLPEMASVGLLLAIHLCLFTMFGMLLFAGGKQDDGQDRERLTYFQNLPESLTSLLVLLTTANNPDVMIPAYSKNRAYAIFFIVFTVIGSLFLMNLLTAIIYSQFRGYLMKSLQTSLFRRRLGTRAAFEVLSSMVGEGGAFPQAVGVKPQNLLQVLQKVQLDSSHKQAMMEKVRSYGSVLLSAEEFQKLFNELDRSVVKEHPPRPEYQSPFLQSAQFLFGHYYFDYLGNLIALANLVSICVFLVLDADVLPAERDDFILGILNCVFIVYYLLEMLLKVFALGLRGYLSYPSNVFDGLLTVVLLVLEISTLAVYRLPHPGWRPEMVGLLSLWDMTRMLNMLIVFRFLRIIPSMKLMAVVASTVLGLVQNMRAFGGILVVVYYVFAIIGINLFRGVIVALPGNSSLAPANGSAPCGSFEQLEYWANNFDDFAAALVTLWNLMVVNNWQVFLDAYRRYSGPWSKIYFVLWWLVSSVIWVNLFLALILENFLHKWDPRSHLQPLAGTPEATYQMTVELLFRDILEEPGEDELTERLSQHPHLWLCR

SEQ ID NO: 68763 - protein, 468 aa, Homo sapiens
MWLYRRYYSNVCQRTLSFTIFLILFLAFIETPSSLTSTADVRYRAAPWEPPCGLTESVEVLCLLVFAADLSVKGYLFGWAHFQKNLWLLGYLVVLVVSLVDWTVSLSLVCHEPLRIRRLLRPFFLLQNSSMMKKTLKCIRWSLPEMASVGLLLAIHLCLFTMFGMLLFAGGKQDDGQDRERLTYFQNLPESLTSLLVLLTTANNPDVMIPAYSKNRAYAIFFIVFTVIGSLFLMNLLTAIIYSQFRGYLMKSLQTSLFRRRLGTRAAFEVLSSMVGEGGAFPQATRRGPSTSLRFCRAPSSSSATTTLTTWGTSSPWQTWCPFACSWCWMQMCCLLSVMTSSWGFSTASSLCTTCWRCCSRSLPWACEGTCPTPATCLTGSSPLSCWRPEMVGLLSLWDMTRMLNMLIVFRFLRIIPSMKLMAVVASTVLGLVQNMRAFGGILVPGPCQWLGALWELRAAGVLGQQLR

SEQ ID NO: 68764 - protein, 527 aa, Homo sapiens
MILSSYNTIQSVFCCCCCCSVQKRQMRTQISLSTDEELPEKYTQRRRPWLSQLSNKKQSNTGRVQPSKRKPLPPLPPSEVAEEKIQVKALYDFLPREPCNLALRRAEEYLILEKYNPHWWKARDRLGNEGLIPSNYVTENKITNLEIYEWYHRNITRNQAEHLLRQESKEGAFIVRDSRHLGSYTISVFMGARRSTEAAIKHYQIKKNDSGQWYVAERHAFQSIPELIWYHQHNAAGLMTRLRYPVGLMGSCLPATAGFSYEKWEIDPSELAFIKEIGSGQFGVVHLGEWRSHIQVAIKAINEGSMSEEDFIEEAKVMMKLSHSKLVQLYGVCIQRKPLYIVTEFMENGCLLNYLRENKGKLRKEMLLSVCQDICEGMEYLERNGYIHRDLAARNCLVSSTCIVKISDFGMTRYVLDDEYVSSFGAKFPIKWSPPEVFLFNKYSSKSDVWSFGVLMWEVFTEGKMPFENKSNLQVVEAISEGFRLYRPHLAPMSIYEVMYSCWHEKPEGRPTFAELLRAVTEIAETW

SEQ ID NO: 68765 - protein, 113 aa, Homo sapiens
MGGLEPCSRLLLLPLLLAVSGLRPVQAQAQSDCSCSTVSPGVLAGIVMGDLVLTVLIALAVYFLGRLVPRGRGAAEAATRKQRITETESPYQELQGQRSDVYSDLNTQRPYYK

SEQ ID NO: 68766 - protein, 112 aa, Homo sapiens
MGGLEPCSRLLLLPLLLAVSGLRPVQAQAQSDCSCSTVSPGVLAGIVMGDLVLTVLIALAVYFLGRLVPRGRGAAEATRKQRITETESPYQELQGQRSDVYSDLNTQRPYYK

SEQ ID NO: 68767 - protein, 102 aa, Homo sapiens
MGGLEPCSRLLLLPLLLAVSDCSCSTVSPGVLAGIVMGDLVLTVLIALAVYFLGRLVPRGRGAAEAATRKQRITETESPYQELQGQRSDVYSDLNTQRPYYK

SEQ ID NO: 68768 - protein, 112 aa, Homo sapiens; identical to SEQ ID NO: 68766

SEQ ID NO: 68769 - protein, 890 aa, Homo sapiens
MALRRSMGRPGLPPLPLPPPPRLGLLLAALASLLLPESAAAGLKLMGAPVKLTVSQGQPVKLNCSVEGMEEPDIQWVKDGAVVQNLDQLYIPVSEQHWIGFLSLKSVERSDAGRYWCQVEDGGETEISQPVWLTVEGVPFFTVEPKDLAVPPNAPFQLSCEAVGPPEPVTIVWWRGTTKIGGPAPSPSVLNVTGVTQSTMFSCEAHNLKGLASSRTATVHLQALPAAPFNITVTKLSSSNASVAWMPGADGRALLQSCTVQVTQAPGGWEVLAVVVPVPPFTCLLRDLVPATNYSLRVRCANALGPSPYADWVPFQTKGLAPASAPQNLHAIRTDSGLILEWEEVIPEAPLEGPLGPYKLSWVQDNGTQDELTVEGTRANLTGWDPQKDLIVRVCVSNAVGCGPWSQPLVVSSHDRAGQQGPPHSRTSWVPVVLGVLTALVTAAALALILLRKRRKETRFGQAFDSVMARGEPAVHFRAARSFNRERPERIEATLDSLGISDELKEKLEDVLIPEQQFTLGRMLGKGEFGSVREAQLKQEDGSFVKVAVKMLKADIIASSDIEEFLREAACMKEFDHPHVAKLVGVSLRSRAKGRLPIPMVILPFMKHGDLHAFLLASRIGENPFNLPLQTLIRFMVDIACGMEYLSSRNFIHRDLAARNCMLAEDMTVCVADFGLSRKIYSGDYYRQGCASKLPVKWLALESLADNLYTVQSDVWAFGVTMWEIMTRGQTPYAGIENAEIYNYLIGGNRLKQPPECMEDVYDLMYQCWSADPKQRPSFTCLRMELENILGQLSVLSASQDPLYINIERAEEPTAGGSLELPGRDQPYSGAGDGSGMGAVGGTPSDCRYILTPGGLAEQPGQAEHQPESPLNETQRLLLLQQGLLPHSSC

SEQ ID NO: 68770 - protein, 842 aa, Homo sapiens
MEEPDIQWVKDGAVVQNLDQLYIPVSEQHWIGFLSLKSVERSDAGRYWCQVEDGGETEISQPVWLTVEGVPFFTVEPKDLAVPPNAPFQLSCEAVGPPEPVTIVWWRGTTKIGGPAPSPSVLNVTGVTQSTMFSCEAHNLKGLASSRTATVHLQALPAAPFNITVTKLSSSNASVAWMPGADGRALLQSCTVQVTQAPGGWEVLAVVVPVPPFTCLLRDLVPATNYSLRVRCANALGPSPYADWVPFQTKGLAPASAPQNLHAIRTDSGLILEWEEVIPEAPLEGPLGPYKLSWVQDNGTQDELTVEGTRANLTGWDPQKDLIVRVCVSNAVGCGPWSQPLVVSSHDRAGQQGPPHSRTSWVPVVLGVLTALVTAAALALILLRKRRKETRFGQAFDSVMARGEPAVHFRAARSFNRERPERIEATLDSLGISDELKEKLEDVLIPEQQFTLGRMLGKGEFGSVREAQLKQEDGSFVKVAVKMLKADIIASSDIEEFLREAACMKEFDHPHVAKLVGVSLRSRAKGRLPIPMVILPFMKHGDLHAFLLASRIGENPFNLPLQTLIRFMVDIACGMEYLSSRNFIHRDLAARNCMLAEDMTVCVADFGLSRKIYSGDYYRQGCASKLPVKWLALESLADNLYTVQSDVWAFGVTMWEIMTRGQTPYAGIENAEIYNYLIGGNRLKQPPECMEDVYDLMYQCWSADPKQRPSFTCLRMELENILGQLSVLSASQDPLYINIERAEEPTAGGSLELPGRDQPYSGAGDGSGMGAVGGTPSDCRYILTPGGLAEQPGQAEHQPESPLNETQRLLLLQQGLHTVAVSPQAEGIGAIWPALVATELAD

SEQ ID NO: 68771 - protein, 246 aa, Homo sapiens
MTMDKSELVQKAKLAEQAERYDDMAAAMKAVTEQGHELSNEERNLLSVAYKNVVGARRSSWRVISSIEQKTERNEKKQQMGKEYREKIEAELQDICNDVLELLDKYLIPNATQPESKVFYLKMKGDYFRYLSEVASGDNKQTTVSNSQQAYQEAFEISKKEMQPTHPIRLGLALNFSVFYYEILNSPEKACSLAKTAFDEAIAELDTLNEESYKDSTLIMQLLRDNLTLWTSENQGDEGDAGEGEN

SEQ ID NO: 68772 - protein, 246 aa, Homo sapiens; identical to SEQ ID NO: 68771

SEQ ID NO: 68773 - protein, 100 aa, Homo sapiens
MTMDKSELVQKAKLAEQAERYDDMAAAMKAVTEQGHELSNEERNLLSVAYKNVVGARRSSWRVISSIEQKTERNEKKQQMGKEYREKIEAELQDICNDVL

SEQ ID NO: 68774 - protein, 74 aa, Homo sapiens
MTMDKSELVQKAKLAEQAERYDDMAAAMKAVTEQGHELSNEERNLLSVAYKNVVGARRSSWRVISSIEQKTERN

SEQ ID NO: 68775 - protein, 255 aa, Homo sapiens
MDDREDLVYQAKLAEQAERYDEMVESMKKVAGMDVELTVEERNLLSVAYKNVIGARRASWRIISSIEQKEENKGGEDKLKMIREYRQMVETELKLICCDILDVLDKHLIPAANTGESKVFYYKMKGDYHRYLAEFATGNDRKEAAENSLVAYKAASDIAMTELPPTHPIRLGLALNFSVFYYEILNSPDRACRLAKAAFDDAIAELDTLSEESYKDSTLIMQLLRDNLTLWTSDMQGDGEEQNKEALQDVEDENQ

SEQ ID NO: 68776 - protein, 233 aa, Homo sapiens
MVESMKKVAGMDVELTVEERNLLSVAYKNVIGARRASWRIISSIEQKEENKGGEDKLKMIREYRQMVETELKLICCDILDVLDKHLIPAANTGESKVFYYKMKGDYHRYLAEFATGNDRKEAAENSLVAYKAASDIAMTELPPTHPIRLGLALNFSVFYYEILNSPDRACRLAKAAFDDAIAELDTLSEESYKDSTLIMQLLRDNLTLWTSDMQGDGEEQNKEALQDVEDENQ

SEQ ID NO: 68777 - protein, 247 aa, Homo sapiens
MVDREQLVQKARLAEQAERYDDMAAAMKNVTELNEPLSNEERNLLSVAYKNVVGARRSSWRVISSIEQKTSADGNEKKIEMVRAYREKIEKELEAVCQDVLSLLDNYLIKNCSETQYESKVFYLKMKGDYYRYLAEVATGEKRATVVESSEKAYSEAHEISKEHMQPTHPIRLGLALNYSVFYYEIQNAPEQACHLAKTAFDDAIAELDTLNEDSYKDSTLIMQLLRDNLTLWTSDQQDDDGGEGNN

SEQ ID NO: 68778 - protein, 207 aa, Homo sapiens
MVDREQLVQKARLAEQAERYDDMAAAMKNVTELNEPLSNEERNLLSVAYKNVVGARRSSWRVISSIEQKTSADGNEKKIEMVRAYREKIEKELEAEVATGEKRATVVESSEKAYSEAHEISKEHMQPTHPIRLGLALNYSVFYYEIQNAPEQACHLAKTAFDDAIAELDTLNEDSYKDSTLIMQLLRDNLTLWTSDQQDDDGGEGNN

SEQ ID NO: 68779 - protein, 225 aa, Homo sapiens
MAAAMKNVTELNEPLSNEERNLLSVAYKNVVGARRSSWRVISSIEQKTSADGNEKKIEMVRAYREKIEKELEAVCQDVLSLLDNYLIKNCSETQYESKVFYLKMKGDYYRYLAEVATGEKRATVVESSEKAYSEAHEISKEHMQPTHPIRLGLALNYSVFYYEIQNAPEQACHLAKTAFDDAIAELDTLNEDSYKDSTLIMQLLRDNLTLWTSDQQDDDGGEGNN

SEQ ID NO: 68780 - protein, 245 aa, Homo sapiens
MDKNELVQKAKLAEQAERYDDMAACMKSVTEQGAELSNEERNLLSVAYKNVVGARRSSWRVVSSIEQKTEGAEKKQQMAREYREKIETELRDICNDVLSLLEKFLIPNASQAESKVFYLKMKGDYYRYLAEVAAGDDKKGIVDQSQQAYQEAFEISKKEMQPTHPIRLGLALNFSVFYYEILNSPEKACSLAKTAFDEAIAELDTLSEESYKDSTLIMQLLRDNLTLWTSDTQGDEAEAGEGGEN

SEQ ID NO: 68781 - protein, 168 aa, Homo sapiens
MAREYREKIETELRDICNDVLSLLEKFLIPNASQAESKVFYLKMKGDYYRYLAEVAAGDDKKGIVDQSQQAYQEAFEISKKEMQPTHPIRLGLALNFSVFYYEILNSPEKACSLAKTAFDEAIAELDTLSEESYKDSTLIMQLLRDNLTLWTSDTQGDEAEAGEGGEN

SEQ ID NO: 68782 - protein, 245 aa, Homo sapiens; identical to SEQ ID NO: 68780

SEQ ID NO: 68783 - protein, 245 aa, Homo sapiens; identical to SEQ ID NO: 68780

SEQ ID NO: 68784 - protein, 245 aa, Homo sapiens; identical to SEQ ID NO: 68780

SEQ ID NO: 68785 - protein, 245 aa, Homo sapiens; identical to SEQ ID NO: 68780

SEQ ID NO: 68786 - protein, 245 aa, Homo sapiens; identical to SEQ ID NO: 68780

SEQ ID NO: 68787 - protein, 98 aa, Homo sapiens
MDKNELVQKAKLAEQAERYDDMAACMKSVTEQGAELSNEERNLLSVAYKNVVGARRSSWRVVSSIEQKTEGAEKKQQMAREYREKIETELRDICNDVL

SEQ ID NO: 68788 - protein, 245 aa, Homo sapiens; identical to SEQ ID NO: 68780

SEQ ID NO: 68789 - protein, 92 aa, Homo sapiens
MDKNELVQKAKLAEQAERYDDMAACMKSVTEQGAELSNEERNLLSVAYKNVVGARRSSWRVVSSIEQKTEGAEKKQQMAREYREKIETELRD

SEQ ID NO: 68790 - protein, 245 aa, Homo sapiens; identical to SEQ ID NO: 68780

SEQ ID NO: 68791 - protein, 168 aa, Homo sapiens; identical to SEQ ID NO: 68781

SEQ ID NO: 68792 - protein, 125 aa, Homo sapiens
MKGDYYRYLAEVAAGDDKKGIVDQSQQAYQEAFEISKKEMQPTHPIRLGLALNFSVFYYEILNSPEKACSLAKTAFDEAIAELDTLSEESYKDSTLIMQLLRDNLTLWTSDTQGDEAEAGEGGEN

SEQ ID NO: 68793 - protein, 137 aa, Homo sapiens
MDKNELVQKAKLAEQAERYDDMAACMKSVTEQGAELSNEERNLLSVAYKNVVGARRSSWRVVSSIEQKTEGAEKKQQMAREYREKIETELRDICNDVLSLLEKFLIPNASQAESKVFYLKMKGDYYRYLAEVAAGDD

SEQ ID NO: 68794 - protein, 246 aa, Homo sapiens
MDKNELVQKAKLAEQAERYDDMAACMKSVTEQGAELSNEERNLLSVAYKNVVGARRSSWRVVSSIEQKTEGAEKKQQMAREYREKIETELRDICNDVLSLLEKFLIPNASQAESKVFYLKMKGDYYRYLAEVAAGDDKKVRFGVSYPGIVDQSQQAYQEAFEISKKEMQPTHPIRLGLALNFSVFYYEILNSPEKACSLAKTAFDEAIAELDTLSEESYKDSTLIMQLLRDNLTLWTSDTQGDEAE

SEQ ID NO: 68795 - protein, 170 aa, Homo sapiens
MSQPCRKLWRHNYETSSCIEFLKSLLEKFLIPNASQAESKVFYLKMKGDYYRYLAEVAAGDDKKGIVDQSQQAYQEAFEISKKEMQPTHPIRLGLALNFSVFYYEILNSPEKACSLAKTAFDEAIAELDTLSEESYKDSTLIMQLLRDNLTLWTSDTQGDEAEAGEGGEN

SEQ ID NO: 68796 - protein, 125 aa, Homo sapiens; identical to SEQ ID NO: 68792

SEQ ID NO: 68797 - protein, 75 aa, Homo sapiens
MDKNELVQKAKLAEQAERYDDMAACMKSVTEQGAELSNEERNLLSVAYKNVVGARRSSWRVVSSIEQKTEGAEKK

SEQ ID NO: 68798 - protein, 130 aa, Homo sapiens
VFYLKMKGDYYRYLAEVAAGDDKKGIVDQSQQAYQEAFEISKKEMQPTHPIRLGLALNFSVFYYEILNSPEKACSLAKTAFDEAIAELDTLSEESYKDSTLIMQLLRDNLTLWTSDTQGDEAEAGEGGEN

SEQ ID NO: 68799 - protein, 52 aa, Homo sapiens
MDKNELVQKAKLAEQAERYDDMAACMKSVTEQGAELSNEERNLLSVAYKNVV

SEQ ID NO: 68800 - protein, 407 aa, Homo sapiens
MPTPDATTPQAKGFRRAVSELDAKQAEAIMVRGQSPRFIGRRQSLIEDARKEREAAVAAAAAAVPSEPGDPLEAVAFEEKEGKAVLNLLFSPRATKPSALSRAVKVFETFEAKIHHLETRPAQRPRAGGPHLEYFVRLEVRRGDLAALLSGVRQVSEDVRSPAGPKVPWFPRKVSELDKCHHLVTKFDPDLDLDHPGFSDQVYRQRRKLIAEIAFQYRHGDPIPRVEYTAEEIATWDCCHELLGHVPMLADRTFAQFSQDIGLASLGASDEEIEKLSTLYWFTVEFGLCKQNGEVKAYGAGLLSSYGELLHCLSEEPEIRAFDPEAAAVQPYQDQTYQSVYFVSESFSDAKDKLRSYASRIQRPFSVKFDPYTLAIDVLDSPQAVRRSLEGVQDELDTLAHALSAIG

SEQ ID NO: 68801 - protein, 497 aa, Homo sapiens
MPTPDATTPQAKGFRRAVSELDAKQAEAIMSPRFIGRRQSLIEDARKEREAAVAAAAAAVPSEPGDPLEAVAFEEKEGKAVLNLLFSPRATKPSALSRAVKVFETFEAKIHHLETRPAQRPRAGGPHLEYFVRLEVRRGDLAALLSGVRQVSEDVRSPAGPKVPWFPRKVSELDKCHHLVTKFDPDLDLDHPGFSDQVYRQRRKLIAEIAFQYRHGDPIPRVEYTAEEIATWKEVYTTLKGLYATHACGEHLEAFALLERFSGYREDNIPQLEDVSRFLKERTGFQLRPVAGLLSARDFLASLAFRVFQCTQYIRHASSPMHSPEPDCCHELLGHVPMLADRTFAQFSQDIGLASLGASDEEIEKLSTLYWFTVEFGLCKQNGEVKAYGAGLLSSYGELLHCLSEEPEIRAFDPEAAAVQPYQDQTYQSVYFVSESFSDAKDKLRSYASRIQRPFSVKFDPYTLAIDVLDSPQAVRRSLEGVQDELDTLAHALSAIG

SEQ ID NO: 68802 - protein, 524 aa, Homo sapiens
MPTPDATTPQAKGFRRAVSELDAKQAEAIMGAPGPSLTGSPWPGTAAPAASYTPTPRSPRFIGRRQSLIEDARKEREAAVAAAAAAVPSEPGDPLEAVAFEEKEGKAVLNLLFSPRATKPSALSRAVKVFETFEAKIHHLETRPAQRPRAGGPHLEYFVRLEVRRGDLAALLSGVRQVSEDVRSPAGPKVPWFPRKVSELDKCHHLVTKFDPDLDLDHPGFSDQVYRQRRKLIAEIAFQYRHGDPIPRVEYTAEEIATWKEVYTTLKGLYATHACGEHLEAFALLERFSGYREDNIPQLEDVSRFLKERTGFQLRPVAGLLSARDFLASLAFRVFQCTQYIRHASSPMHSPEPDCCHELLGHVPMLADRTFAQFSQDIGLASLGASDEEIEKLSTLYWFTVEFGLCKQNGEVKAYGAGLLSSYGELLHCLSEEPEIRAFDPEAAAVQPYQDQTYQSVYFVSESFSDAKDKLRSYASRIQRPFSVKFDPYTLAIDVLDSPQAVRRSLEGVQDELDTLAHALSAIG

SEQ ID NO: 68803 - protein, 528 aa, Homo sapiens
MPTPDATTPQAKGFRRAVSELDAKQAEAIMVRGQGAPGPSLTGSPWPGTAAPAASYTPTPRSPRFIGRRQSLIEDARKEREAAVAAAAAAVPSEPGDPLEAVAFEEKEGKAVLNLLFSPRATKPSALSRAVKVFETFEAKIHHLETRPAQRPRAGGPHLEYFVRLEVRRGDLAALLSGVRQVSEDVRSPAGPKVPWFPRKVSELDKCHHLVTKFDPDLDLDHPGFSDQVYRQRRKLIAEIAFQYRHGDPIPRVEYTAEEIATWKEVYTTLKGLYATHACGEHLEAFALLERFSGYREDNIPQLEDVSRFLKERTGFQLRPVAGLLSARDFLASLAFRVFQCTQYIRHASSPMHSPEPDCCHELLGHVPMLADRTFAQFSQDIGLASLGASDEEIEKLSTLYWFTVEFGLCKQNGEVKAYGAGLLSSYGELLHCLSEEPEIRAFDPEAAAVQPYQDQTYQSVYFVSESFSDAKDKLRSYASRIQRPFSVKFDPYTLAIDVLDSPQAVRRSLEGVQDELDTLAHALSAIG

SEQ ID NO: 68804 - protein, 1187 aa, Homo sapiens
MPLRHWGMARGSKPVGDGAQPMAAMGGLKVLLHWAGPGGGEPWVTFSESSLTAEEVCIHIAHKVGITPPCFNLFALFDAQAQVWLPPNHILEIPRDASLMLYFRIRFYFRNWHGMNPREPAVYRCGPPGTEASSDQTAQGMQLLDPASFEYLFEQGKHEFVNDVASLWELSTEEEIHHFKNESLGMAFLHLCHLALRHGIPLEEVAKKTSFKDCIPRSFRRHIRQHSALTRLRLRNVFRRFLRDFQPGRLSQQMVMVKYLATLERLAPRFGTERVPVCHLRLLAQAEGEPCYIRDSGVAPTDPGPESAAGPPTHEVLVTGTGGIQWWPVEEEVNKEEGSSGSSGRNPQASLFGKKAKAHKAVGQPADRPREPLWAYFCDFRDITHVVLKEHCVSIHRQDNKCLELSLPSRAAALSFVSLVDGYFRLTADSSHYLCHEVAPPRLVMSIRDGIHGPLLEPFVQAKLRPEDGLYLIHWSTSHPYRLILTVAQRSQAPDGMQSLRLRKFPIEQQDGAFVLEGWGRSFPSVRELGAALQGCLLRAGDDCFSLRRCCLPQPGETSNLIIMRGARASPRTLNLSQLSFHRVDQKEITQLSHLGQGTRTNVYEGRLRVEGSGDPEEGKMDDEDPLVPGRDRGQELRVVLKVLDPSHHDIALAFYETASLMSQVSHTHLAFVHGVCVRGPENIMVTEYVEHGPLDVWLRRERGHVPMAWKMVVAQQLASALSYLENKNLVHGNVCGRNILLARLGLAEGTSPFIKLSDPGVGLGALSREERVERIPWLAPECLPGGANSLSTAMDKWGFGATLLEICFDGEAPLQSRSPSEKEHFYQRQHRLPEPSCPQLATLTSQCLTYEPTQRPSFRTILRDLTRLQPHNLADVLTVNPDSPASDPTVFHKRYLKKIRDLGEGHFGKVSLYCYDPTNDGTGEMVAVKALKADCGPQHRSGWKQEIDILRTLYHEHIIKYKGCCEDQGEKSLQLVMEYVPLGSLRDYLPRHSIGLAQLLLFAQQICEGMAYLHAQHYIHRDLAARNVLLDNDRLVKIGDFGLAKAVPEGHEYYRVREDGDSPVFWYAPECLKEYKFYYASDVWSFGVTLYELLTHCDSSQSPPTKFLELIGIAQGQMTVLRLTELLERGERLPRPDKCPCEVYHLMKNCWETEASFRPTFENLIPILKTVHEKYQGQAPSVFSVC

SEQ ID NO: 68805 - protein, 1187 aa, Homo sapiens; identical to SEQ ID NO: 68804

SEQ ID NO: 68806 - protein, 118 aa, Homo sapiens
MPLRHWGMARGSKPVGDGAQPMAAMGGLKVLLHWAGPGGGEPWVTFSESSLTAEEVCIHIAHKVGITPPCFNLFALFDAQAQVWLPPNHILEIPRDASLMLYFRIRFYFRNWHGMNPR

SEQ ID NO: 68807 - protein, 934 aa, Homo sapiens
MVMVKYLATLERLAPRFGTERVPVCHLRLLAQAEGEPCYIRDSGVAPTDPGPESAAGPPTHEVLVTGTGGIQWWPVEEEVNKEEGSSGSSGRNPQASLFGKKAKAHKAVGQPADRPREPLWAYFCDFRDITHVVLKEHCVSIHRQDNKCLELSLPSRAAALSFVSLVDGYFRLTADSSHYLCHEVAPPRLVMSIRDGIHGPLLEPFVQAKLRPEDGLYLIHWSTSHPYRLILTVAQRSQAPDGMQSLRLRKFPIEQQDGAFVLEGWGRSFPSVRELGAALQGCLLRAGDDCFSLRRCCLPQPGETSNLIIMRGARASPRTLNLSQLSFHRVDQKEITQLSHLGQGTRTNVYEGRLRVEGSGDPEEGKMDDEDPLVPGRDRGQELRVVLKVLDPSHHDIALAFYETASLMSQVSHTHLAFVHGVCVRGPENIMVTEYVEHGPLDVWLRRERGHVPMAWKMVVAQQLASALSYLENKNLVHGNVCGRNILLARLGLAEGTSPFIKLSDPGVGLGALSREERVERIPWLAPECLPGGANSLSTAMDKWGFGATLLEICFDGEAPLQSRSPSEKEHFYQRQHRLPEPSCPQLATLTSQCLTYEPTQRPSFRTILRDLTRLQPHNLADVLTVNPDSPASDPTVFHKRYLKKIRDLGEGHFGKVSLYCYDPTNDGTGEMVAVKALKADCGPQHRSGWKQEIDILRTLYHEHIIKYKGCCEDQGEKSLQLVMEYVPLGSLRDYLPRHSIGLAQLLLFAQQICEGMAYLHAQHYIHRDLAARNVLLDNDRLVKIGDFGLAKAVPEGHEYYRVREDGDSPVFWYAPECLKEYKFYYASDVWSFGVTLYELLTHCDSSQSPPTKFLELIGIAQGQMTVLRLTELLERGERLPRPDKCPCEVYHLMKNCWETEASFRPTFENLIPILKTVHEKYQGQAPSVFSVC

SEQ ID NO: 68808 - protein, 661 aa, Homo sapiens
MLPEAGSLWLLKLLRDIQLAQFYWPILEELNVTRPEHFDFVKPEDLDGIGMGRPAQRRLSEALKRLRSGPKSKNWVYKILGGFAPEHKEPTLPSDSPRHLPEPEGGLKCLIPEGAVCRGELLGSGCFGVVHRGLWTLPSGKSVPVAVKSLRVGPEGPMGTELGDFLREVSVMMNLEHPHVLRLHGLVLGQPLQMVMELAPLGSLHARLTAPAPTPPLLVALLCLFLRQLAGAMAYLGARGLVHRDLATRNLLLASPRTIKVADFGLVRPLGGARGRYVMGGPRPIPYAWCAPESLRHGAFSSASDVWMFGVTLWEMFSGGEEPWAGVPPYLILQRLEDRARLPRPPLCSRALYSLALRCWAPHPADRPSFSHLEGLLQEAGPSEACCVRDVTEPGALRMETGDPITVIEGSPDSTIWKGQNGRTFKVGSFPASAVTLADAGGLPATRPVHRGTPARGDQHPGSIDGDRKKANLWDAPPARGQRRNMPLERMKGISRSLESVLSLGPRPTGGGSSPPEIRQARAVPQGPPGLPPRPPLSSSSPQPSQPSRERLPWPKRKPPHNHPMGMPGARKAAALSGGLLSDPELQRKIMEVELSVHGVTHQECQTALGATGGDVVSAIRNLKVDQLFHLSSRSRADCWRILEHYQWDLSAASRYVLARP

SEQ ID NO: 68809 - protein, 661 aa, Homo sapiens; identical to SEQ ID NO: 68808

SEQ ID NO: 68810 - protein, 528 aa, Homo sapiens
MQPEEGTGWLLELLSEVQLQQYFLRLRDDLNVTRLSHFEYVKNEDLEKIGMGRPGQRRLWEAVKRRKALCKRKSWMSKVFSGKRLEAEFPPHHSQSTFRKTSPAPGGPAGEGPLQSLTCLIGEKDLRLLEKLGDGSFGVVRRGEWDAPSGKTVSVAVKCLKPDVLSQPEAMDDFIREVNAMHSLDHRNLIRLYGVVLTPPMKMVTELAPLGSLLDRLRKHQGHFLLGTLSRYAVQVAEGMGYLESKRFIHRDLAARNLLLATRDLVKIGDFGLMRALPQNDDHYVMQEHRKVPFAWCAPESLKTRTFSHASDTWMFGVTLWEMFTYGQEPWIGLNGSQILHKIDKEGERLPRPEDCPQDIYNVMVQCWAHKPEDRPTFVALRDFLLEAQPTDMRALQDFEEPDKLHIQMNDVITVIEGRAENYWWRGQNTRTLCVGPFPRNVVTSVAGLSAQDISQPLQNSFIHTGHGDSDPRHCWGFPDRIDECPFSAFSPGHPPAETCGQVLWTGRREACASDPRLHPVSSRTKGL

SEQ ID NO: 68811 - protein, 1038 aa, Homo sapiens
MQPEEGTGWLLELLSEVQLQQYFLRLRDDLNVTRLSHFEYVKNEDLEKIGMGRPGQRRLWEAVKRRKALCKRKSWMSKVFSGKRLEAEFPPHHSQSTFRKTSPAPGGPAGEGPLQSLTCLIGEKDLRLLEKLGDGSFGVVRRGEWDAPSGKTVSVAVKCLKPDVLSQPEAMDDFIREVNAMHSLDHRNLIRLYGVVLTPPMKMVTELAPLGSLLDRLRKHQGHFLLGTLSRYAVQVAEGMGYLESKRFIHRDLAARNLLLATRDLVKIGDFGLMRALPQNDDHYVMQEHRKVPFAWCAPESLKTRTFSHASDTWMFGVTLWEMFTYGQEPWIGLNGSQILHKIDKEGERLPRPEDCPQDIYNVMVQCWAHKPEDRPTFVALRDFLLEAQPTDMRALQDFEEPDKLHIQMNDVITVIEGRAENYWWRGQNTRTLCVGPFPRNVVTSVAGLSAQDISQPLQNSFIHTGHGDSDPRHCWGFPDRIDELYLGNPMDPPDLLSVELSTSRPPQHLGGVKKPTYDPVSEDQDPLSSDFKRLGLRKPGLPRGLWLAKPSARVPGTKASRGSGAEVTLIDFGEEPVVPALRPCAPSLAQLAMDACSLLDETPPQSPTRALPRPLHPTPVVDWDARPLPPPPAYDDVAQDEDDFEICSINSTLVGAGVPAGPSQGQTNYAFVPEQARPPPPLEDNLFLPPQGGGKPPSSAQTAEIFQALQQECMRQLQAPAGSPAPSPSPGGDDKPQVPPRVPIPPRPTRPHVQLSPAPPGEEETSQWPGPASPPRVPPREPLSPQGSRTPSPLVPPGSSPLPPRLSSSPGKTMPTTQSFASDPKYATPQVIQAPGPRAGPCILPIVRDGKKVSSTHYYLLPERPSYLERYQRFLREAQSPEEPTPLPVPLLLPPPSTPAPAAPTATVRPMPQAALDPKANFSTNNSNPGARPPPPRATARLPQRGCPGDGPEAGRPADKIQMAMVHGVTTEECQAALQCHGWSVQRAAQYLKVEQLFGLGLRPRGECHKVLEMFDWNLEQAGCHLLGSWGPAHHKR

SEQ ID NO: 68812 - protein, 1086 aa, Homo sapiens
MLEARPPRTQGSDAAGAAAGRGLRALLLSLTAAAGIWGSMGERSAYQRLAGGEEGPQRLGGGRMQPEEGTGWLLELLSEVQLQQYFLRLRDDLNVTRLSHFEYVKNEDLEKIGMGRPGQRRLWEAVKRRKALCKRKSWMSKVFSGKRLEAEFPPHHSQSTFRKTSPAPGGPAGEGPLQSLTCLIGEKDLRLLEKLGDGSFGVVRRGEWDAPSGKTVSVAVKCLKPDVLSQPEAMDDFIREVNAMHSLDHRNLIRLYGVVLTPPMKMVTELAPLGSLLDRLRKHQGHFLLGTLSRYAVQVAEGMGYLESKRFIHRDLAARNLLLATRDLVKIGDFGLMRALPQNDDHYVMQEHRKVPFAWCAPESLKTRTFSHASDTWMFGVTLWEMFTYGQEPWIGLNGSQILHKIDKEGERLPRPEDCPQDIYNVMVQCWAHKPEDRPTFVALRDFLLEAQPTDMRALQDFEEPDKLHIQMNDVITVIEGRAENYWWRGQNTRTLCVGPFPRNVVTSVAGLSAQDISQPLQNSFIHTGHGDSDPRHCWGFPDRIDELYLGNPMDPPDLLSVELSTSRPPQHLGGVKREPPPRPPQPAFFTQKPTYDPVSEDQDPLSSDFKRLGLRKPGLPRGLWLAKPSARVPGTKASRGSGAEVTLIDFGEEPVVPALRPCAPSLAQLAMDACSLLDETPPQSPTRALPRPLHPTPVVDWDARPLPPPPAYDDVAQDEDDFEICSINSTLVGAGVPAGPSQGQTNYAFVPEQARPPPPLEDNLFLPPQGGGKPPSSAQTAEIFQALQQECMRQLQAPAGSPAPSPSPGGDDKPQVPPRVPIPPRPTRPHVQLSPAPPGEEETSQWPGPASPPRVPPREPLSPQGSRTPSPLVPPGSSPLPPRLSSSPGKTMPTTQSFASDPKYATPQVIQAPGPRAGPCILPIVRDGKKVSSTHYYLLPERPSYLERYQRFLREAQSPEEPTPLPVPLLLPPPSTPAPAAPTATVRPMPQAALDPKANFSTNNSNPGARPPPPRATARLPQRGCPGDGPEAGRPADKIQMVEQLFGLGLRPRGECHKVLEMFDWNLEQAGCHLLGSWGPAHHKR

SEQ ID NO: 68813 - protein, 1038 aa, Homo sapiens; identical to SEQ ID NO: 68811

SEQ ID NO: 68814 - protein, 97 aa, Homo sapiens
MQPEEGTGWLLELLSEVQLQQYFLRLRDDLNVTRLSHFEYVKNEDLEKIGMGRPGQRRLWEAVKRRKALCKRKSWMSKVFSGKRLEAEFPPHHSQST

SEQ ID NO: 68815 - protein, 608 aa, Homo sapiens
MSQEGDYGRWTISSSDESEEEKPKPDKPSTSSLLCARQGAANEPRYTCSEAQKAAHKRKISPVKFSNTDSVLPPKRQKSGSQEDLGWCLSSSDDELQPEMPQKQAEKVVIKKEKDISAPNDGTAQRTENHGAPACHRLKEEEDEYETSGEGQDIWDMLDKGNPFQFYLTRVSGVKPKYNSGALHIKDILSPLFGTLVSSAQFNYCFDVDWLVKQYPPEFRKKPILLVHGDKREAKAHLHAQAKPYENISLCQAKLDIAFGTHHTKMMLLLYEEGLRVVIHTSNLIHADWHQKTQGIWLSPLYPRIADGTHKSGESPTHFKADLISYLMAYNAPSLKEWIDVIHKHDLSETNVYLIGSTPGRFQGSQKDNWGHFRLKKLLKDHASSMPNAESWPVVGQFSSVGSLGADESKWLCSEFKESMLTLGKESKTPGKSSVPLYLIYPSVENVRTSLEGYPAGGSLPYSIQTAEKQNWLHSYFHKWSAETSGRSNAMPHIKTYMRPSPDFSKIAWFLVTSANLSKAAWGALEKNGTQLMIRSYELGVLFLPSAFGLDSFKVKQKFFAGSQEPMATFPVPYDLPPELYGSKDRPWIWNIPYVKAPDTHGNMWVPS

SEQ ID NO: 68816 - protein, 369 aa, Homo sapiens
MVISERLRLTSMPRPSLTRTSLSARKMMLLLYEEGLRVVIHTSNLIHADWHQKTQGIWLSPLYPRIADGTHKSGESPTHFKADLISYLMAYNAPSLKEWIDVIHKHDLSETNVYLIGSTPGRFQGSQKDNWGHFRLKKLLKDHASSMPNAESWPVVGQFSSVGSLGADESKWLCSEFKESMLTLGKESKTPGKSSVPLYLIYPSVENVRTSLEGYPAGGSLPYSIQTAEKQNWLHSYFHKWSAETSGRSNAMPHIKTYMRPSPDFSKIAWFLVTSANLSKAAWGALEKNGTQLMIRSYELGVLFLPSAFGLDSFKVKQKFFAGSQEPMATFPVPYDLPPELYGSKDRPWIWNIPYVKAPDTHGNMWVPS

SEQ ID NO: 68817 - protein, 608 aa, Homo sapiens; identical to SEQ ID NO: 68815

SEQ ID NO: 68818 - protein, 298 aa, Homo sapiens
MSQEGDYGRWTISSSDESEEEKPKPDKPSTSSLLCARQGAANEPRYTCSEAQKAAHKRKISPVKFSNTDSVLPPKRQKSGSQEDLGWCLSSSDDELQPEMPQKQAEKVVIKKEKDISAPNDGTAQRTENHGAPACHRLKEEEDEYETSGEGQDIWDMLDKGNPFQFYLTRVSGVKPKYNSGALHIKDILSPLFGTLVSSAQFNYCFDVDWLVKQYPPEFRKKPILLVHGDKREAKAHLHAQAKPYENISLCQAKLDIAFGTHHTKMMLLLYEEGLRVVIHTSNLIHADWHQKTQGTHL

SEQ ID NO: 68819 - protein, 146 aa, Homo sapiens
MSQEGDYGRWTISSSDESEEEKPKPDKPSTSSLLCARQGAANEPRYTCSEAQKAAHKRKISPVKFSNTDSVLPPKRQKSGSQEDLGWCLSSSDDELQPEMPQKQAEKVVIKKEKDISAPNDGTAQRTENHGAPACHRLKEEEDEYE

SEQ ID NO: 68820 - protein, 148 aa, Homo sapiens
MSQEGDYGRWTISSSDESEEEKPKPDKPSTSSLLCARQGAANEPRYTCSEAQKAAHKRKISPVKFSNTDSVLPPKRQKSGSQEDLGWCLSSSDDELQPEMPQKQAEKVVIKKEKDISAPNDGTAQRTENHGAPACHRLKEEEDEYETS

SEQ ID NO: 68821 - protein, 279 aa, Homo sapiens
MSQEGDYGRWTISSSDESEEEKPKPDKPSTSSLLCARQGAANEPRYTCSEAQKAAHKRKISPVKFSNTDSVLPPKRQKSGSQEDLGWCLSSSDDELQPEMPQKQAEKVVIKKEKDISAPNDGTAQRTENHGAPACHRLKEEEDEYETSGEGQDIWDMLDKGNPFQFYLTRVSGVKPKYNSGALHIKDILSPLFGTLVSSAQFNYCFDVDWLVKQYPPEFRKKPILLVHGDKREAKAHLHAQAKPYENISLCQAKLDIAFGTHHTKMMLLLYEEGLRVVI

SEQ ID NO: 68822 - protein, 161 aa, Homo sapiens
MSQEGDYGRWTISSSDESEEEKPKPDKPSTSSLLCARQGAANEPRYTCSEAQKAAHKRKISPVKFSNTDSVLPPKRQKSGSQEDLGWCLSSSDDELQPEMPQKQAEKVVIKKEKDISAPNDGTAQRTENHGAPACHRLKEEEDEYETSGEGQDIWDMLDKG

SEQ ID NO: 68823 - protein, 151 aa, Homo sapiens
MSQEGDYGRWTISSSDESEEEKPKPDKPSTSSLLCARQGAANEPRYTCSEAQKAAHKRKISPVKFSNTDSVLPPKRQKSGSQEDLGWCLSSSDDELQPEMPQKQAEKVVIKKEKDISAPNDGTAQRTENHGAPACHRLKEEEDEYETSGEG

SEQ ID NO: 68824 - protein, 370 aa, Homo sapiens
MVGKLKQNLLLACLVISSVTVFYLGQHAMECHHRIEERSQPVKLESTRTTVRTGLDLKANKTFAYHKDMPLIFIGGVPRSGTTLMRAMLDAHPDIRCGEETRVIPRILALKQMWSRSSKEKIRLDEAGVTDEVLDSAMQAFLLEIIVKHGEPAPYLCNKDPFALKSLTYLSRLFPNAKFLLMVRDGRASVHSMISRKVTIAGFDLNSYRDCLTKWNRAIETMYNQCMEVGYKKCMLVHYEQLVLHPERWMRTLLKFLQIPWNHSVLHHEEMIGKAGGVSLSKVERSTDQVIKPVNVGALSKWVGKIPPDVLQDMAVIAPMLAKLGYDPYANPPNYGKPDPKIIENTRRVYKGEFQLPDFLKEKPQTEQVE

SEQ ID NO: 68825 - protein, 42 aa, Homo sapiens
MVGKLKQNLLLACLVISSVTVFYLGQHAMECHHRIEERSQPV

SEQ ID NO: 68826 - protein, 140 aa, Homo sapiens
MVGKLKQNLLLACLVISSVTVFYLGQHAMECHHRIEERSQPVKLESTRTTVRTGLDLKANKTFAYHKDMPLIFIGGVPRSGTTLMRAMLDAHPDIRCGEETRVIPRILALKQMWSRSSKEKIRLDEAGVTDEVLDSAMQA

SEQ ID NO: 68827 - protein, 360 aa, Homo sapiens
MVGKLKQNLLLACLVISSVTVFYLGQHAMECHHRIEERSQPVKLESTRTTVRTGLDLKANKTFAYHKDMPLIFIGGVPRSGTTLMRAMLDAHPDIRCGEETRVIPRILALKQMWSRSSKEKIRLDEAGVTDEVLDSAMQAFLLEIIVKHGEPAPYLCNKDPFALKSLTYLSRLFPNAKFLLMVRDGRASVHSMISRKVTIAGFDLNSYRDCLTKWNRAIETMYNQCMEVGYKKCMLVHYEQLVLHPERWMRTLLKFLQIPWNHSVLHHEEMIGKAGGVSLSKVERSTDQVIKPVNVGALSKWVGKIPPDVLQDMAVIAPMLAKLGYDPYANPPNYGKPDPKIIENTRRERLLPFQQKGNS

SEQ ID NO: 68828 - protein, 377 aa, Homo sapiens
MRLSVRRVLLAAGCALVLVLAVQLGQQVLECRAVLAGLRSPRGAMRPEQEELVMVGTNHVEYRYGKAMPLIFVGGVPRSGTTLMRAMLDAHPEVRCGEETRIIPRVLAMRQAWSKSGREKLRLDEAGVTDEVLDAAMQAFILEVIAKHGEPARVLCNKDPFTLKSSVYLSRLFPNSKFLLMVRDGRASVHSMITRKVTIAGFDLSSYRDCLTKWNKAIEVMYAQCMEVGKEKCLPVYYEQLVLHPRRSLKLILDFLGIAWSDAVLHHEDLIGKPGGVSLSKIERSTDQVIKPVNLEALSKWTGHIPGDVVRDMAQIAPMLAQLGYDPYANPPNYGNPDPFVINNTQRVLKGDYKTPANLKGYFQVNQNSTSSHLGSS

SEQ ID NO: 68829 - protein, 377 aa, Homo sapiens; identical to SEQ ID NO: 68828

SEQ ID NO: 68830 - protein, 377 aa, Homo sapiens; identical to SEQ ID NO: 68828

SEQ ID NO: 68831 - protein, 64 aa, Homo sapiens
MRLSVRRVLLAAGCALVLVLAVQLGQQVLECRAVLAGLRSPRGAMRPEQEELVMVGTNHVEYRY

SEQ ID NO: 68832 - protein, 142 aa, Homo sapiens
MRLSVRRVLLAAGCALVLVLAVQLGQQVLECRAVLAGLRSPRGAMRPEQEELVMVGTNHVEYRYGKAMPLIFVGGVPRSGTTLMRAMLDAHPEVRCGEETRIIPRVLAMRQAWSKSGREKLRLDEAGVTDEVLDAAMQAFIL

SEQ ID NO: 68833 - protein, 47 aa, Homo sapiens
MRLSVRRVLLAAGCALVLVLAVQLGQQVLECRAVLAGLRSPRGAMRP

SEQ ID NO: 68834 - protein, 48 aa, Homo sapiens
MRLSVRRVLLAAGCALVLVLAVQLGQQVLECRAVLAGLRSPRGAMRPE

SEQ ID NO: 68835 - protein, 120 aa, Homo sapiens
MRLSVRRVLLAAGCALVLVLAVQLGQQVLECRAVLAGLRSPRGAMRPEQEELVMVGTNHVEYRYGKAMPLIFVGGVPRSGTTLMRAMLDAHPEVRCGEETRIIPRVLAMRQAWSKSGREK

SEQ ID NO: 68836 - protein, 310 aa, Homo sapiens
MPLIFVGGVPRSGTTLMRAMLDAHPEVRCGEETRIIPRVLAMRQAWSKSGREKLRLDEAGVTDEVLDAAMQAFILEVIAKHGEPARVLCNKDPFTLKSSVYLSRLFPNSKFLLMVRDGRASVHSMITRKVTIAGFDLSSYRDCLTKWNKAIEVMYAQCMEVGKEKCLPVYYEQLVLHPRRSLKLILDFLGIAWSDAVLHHEDLIGKPGGVSLSKIERSTDQVIKPVNLEALSKWTGHIPGDVVRDMAQIAPMLAQLGYDPYANPPNYGNPDPFVINNTQRVLKGDYKTPANLKGYFQVNQNSTSSHLGSS

SEQ ID NO: 68837 - protein, 528 aa, Homo sapiens
MGDAPSPEEKLHLITRNLQEVLGEEKLKEILKERELKIYWGTATTGKPHVAYFVPMSKIADFLKAGCEVTILFADLHAYLDNMKAPWELLELRVSYYENVIKAMLESIGVPLEKLKFIKGTDYQLSKEYTLDVYRLSSVVTQHDSKKAGAEVVKQVEHPLLSGLLYPGLQALDEEYLKVDAQFGGIDQRKIFTFAEKYLPALGYSKRVHLMNPMVPGLTGSKMSSSEEESKIDLLDRKEDVKKKLKKAFCEPGNVENNGVLSFIKHVLFPLKSEFVILRDEKWGGNKTYTAYVDLEKDFAAEVVHPGDLKNSVEVALNKLLDPIREKFNTPALKKLASAAYPDPSKQKPMAKGPAKNSEPEEVIPSRLDIRVGKIITVEKHPDADSLYVEKIDVGEAEPRTVVSGLVQFVPKEELQDRLVVVLCNLKPQKMRGVESQGMLLCASIEGINRQVEPLDPPAGSAPGEHVFVKGYEKGQPDEELKPKKKVFEKLQADFKISEECIAQWKQTNFMTKLGSISCKSLKGGNIS

SEQ ID NO: 68838 - protein, 477 aa, Homo sapiens
MAAPILRSFSWGRWSGTLNLSVLLPLGLRKAHSGAQGLLAAQKARGLFKDFFPETGTKIELPELFDRGTASFPQTIYCGFDPTADSLHVGHLLALLGLFHLQRAGHNVIALVGGATARLGDPSGRTKEREALETERVRANARALRLGLEALAANHQQLFTDGRSWGSFTVLDNSAWYQKQHLVDFLAAVGGHFRMGTLLSRQSVQLRLKSPEGMSLAEFFYQVLQAYDFYYLFQRYGCRVQLGGSDQLGNIMSGYEFINKLTGEDVFGITVPLITSTTGAKLGKSAGNAVWLNRDKTSPFELYQFFVRQPDDSVERYLKLFTFLPLPEIDHIMQLHVKEPERRGPQKRLAAEVTKLVHGREGLDSAKRCTQALYHSSIDALEVMSDQELKELFKEAPFSEFFLDPGTSVLDTCRKANAIPDGPRGYRMITEGGVSINHQQVTNPESVLIVGQHILKNGLSLLKIGKRNFYIIKWLQL

SEQ ID NO: 68839 - protein, 240 aa, Homo sapiens
MAEYLASIFGTEKDKVNCSFYFKIGACRHGDRCSRLHNKPTFSQTIALLNIYRNPQNSSQSADGLRCAVSDVEMQEHYDEFFEEVFTEMEEKYGEVEEMNVCDNLGDHLVGNVYVKFRREEDAEKAVIDLNNRWFNGQPIHAELSPVTDFREACCRQYEMGECTRGGFCNFMHLKPISRELRRELYGRRRKKHRSRSRSRERRSRSRDRGRGGGGGGGGGGGGRERDRRRSRDRERSGRF

SEQ ID NO: 68840 - protein, 240 aa, Homo sapiens
MAEYLASIFGTEKDKVNCSFYFKIGACRHGDRCSRLHNKPTFSQTILIQNIYRNPQNSAQTADGSHCAVSDVEMQEHYDEFFEEVFTEMEEKYGEVEEMNVCDNLGDHLVGNVYVKFRREEDAEKAVIDLNNRWFNGQPIHAELSPVTDFREACCRQYEMGECTRGGFCNFMHLKPISRELRRELYGRRRKKHRSRSRSRERRSRSRDRGRGGGGGGGGGGGGRERDRRRSRDRERSGRF

SEQ ID NO: 68841 - protein, 167 aa, Homo sapiens
MQEHYDEFFEEVFTEMEEKYGEVEEMNVCDNLGDHLVGNVYVKFRREEDAEKAVIDLNNRWFNGQPIHAELSPVTDFREACCRQYEMGECTRGGFCNFMHLKPISRELRRELYGRRRKKHRSRSRSRERRSRSRDRGRGGGGGGGGGGGGRERDRRRSRDRERSGRF

SEQ ID NO: 68842 - protein, 167 aa, Homo sapiens; identical to SEQ ID NO: 68841

SEQ ID NO: 68843 - protein, 405 aa, Homo sapiens
MFVQEEKIFAGKVLRLHICASDGAEWLEEATEDTSVEKLKERCLKHCAHGSLEDPKSITHHKLIHAASERVLSDARTILEENIQDQDVLLLIKKRAPSPLPKMADVSAEEKKKQDQKAPDKEAILRATANLPSYNMDRAAVQTNMRDFQTELRKILVSLIEVAQKLLALNPDAVELFKKANAMLDEDEDERVDEAALRQLTEMGFPENRATKALQLNHMSVPQAMEWLIEHAEDPTIDTPLPGQAPPEAEGATAAASEAAAGASATDEEARDELTEIFKKIRRKREFRADARAVISLMEMGFDEKEVIDALRVNNNQQNAACEWLLGDRKPSPEELDKGIDPDSPLFQAILDNPVVQLGLTNPKTLLAFEDMLENPLNSTQWMNDPETGPVMLQISRIFQTLNRT

SEQ ID NO: 68844 - protein, 179 aa, Homo sapiens
MAASQVLGEKINILSGETVKAGDRDPLGNDCPEQDRLPQRSWRQKCASYVLALRPWSFSASLTPVALGSALAYRSHGVLDPRLLVGCAVAVLAVHGAGNLVNTYYDFSKGIDHKKSDDRTLVDRILEPQDVVRFGVFLYTLGCVCAACLYYLSPLKLEHLALIYFGGLSGSFLYTGVLI

SEQ ID NO: 68845 - protein, 338 aa, Homo sapiens
MAASQVLGEKINILSGETVKAGDRDPLGNDCPEQDRLPQRSWRQKCASYVLALRPWSFSASLTPVALGSALAYRSHGVLDPRLLVGCAVAVLAVHGAGNLVNTYYDFSKGIDHKKSDDRTLVDRILEPQDVVRFGVFLYTLGCVCAACLYYLSPLKLEHLALIYFGGLSGSFLYTGGIGFKYVALGDLIILITFGPLAVMFAYAIQVGSLAIFPLVYAIPLALSTEAILHSNNTRDMESDREAGIVTLAILIGPTFSYILYNTLLFLPYLVFSILATHCTISLALPLLTIPMAFSLERQFRSQAFNKLPQRTAKLNLLLGLFYVFGIILAPAGSLPKI

SEQ ID NO: 68846 - protein, 1134 aa, Homo sapiens
MSEPHRVQFTSLPGSLNPAFLKKSRKEEAGAGEQHQDCEPAAAAVRITLTLFEPDHKRCPEFFYPELVKNIRGKVKGLQPGDKKKDLSDPFNDEEKERHKVEALARKFEEKYGGKKRRKDRIQDLIDMGYGYDESDSFIDNSEAYDELVPASLTTKYGGFYINSGTLQFRQASESEDDFIKEKKKKSPKKRKLKEGGEKIKKKKKDDTYDKEKKSKKSKFSKAGFTALNASKEKKKKKYSGALSVKEMLKKFQKEKEAQKKREEEHKPVAVPSAEAQGLRELEGASDPLLSLFGSTSDNDLLQAATAMDSLTDLDLEHLLSESPEGSPFRDMDDGSDSLGVGLDQEFRQPSSLPEGLPAPLEKRVKELAQAARAAEGESRQKFFTQDINGILLDIEAQTRELSSQVRSGVYAYLASFLPCSKDALLKRARKLHLYEQGGRLKEPLQKLKEAIGRAMPEQMAKYQDECQAHTQAKVAKMLEEEKDKEQRDRICSDEEEDEEKGGRRIMGPRKKFQWNDEIRELLCQVVKIKLESQDLERNNKAQAWEDCVKGFLDAEVKPLWPKGWMQARTLFKESRRGHGHLTSILAKKKVMAPSKIKVKESSTKPDKKVSVPSGQIGGPIALPSDHQTGGLSIGASSRELPSQASGGLANPPPVNLEDSLDEDLIRNPASSVEAVSKELAALNSRAAGNSEFTLPAPSKAPAEKVGGVLCTEEKRNFAKPSPSAPPPASSLQSPLNFLAEQALALGQSSQEKKPESSGYKELSCQAPLNKGLPEVHQSKAKHHSLPRTSHGPQVAVPVPGPQVKVFHAGTQQQKNFTPPSPFANKLQGPKASPTQCHRSLLQLVKTAAKGQGFHPSAPATSGGLSASSSSSHKTPASSSSALSHPAKPHSVSSAGSSYKNNPFASSISKHGVSSGSSSSGGTPVQSSVSGSLVPGIQPPSVGQATSRPVPSSAGKKMPVSQKLTLVAPPGGPNGDSSGGTQGVAKLLTSPSLKPSAVSSVTSSTSLSKGASGTVLLAGSSLMASPYKSSSPKLSGAMSSNSLGIITPVPIPVHVLSFSADSSAKAGVSKDAIVTGPAPGSFHHGLGHSLLAGLHSSPPHAAPLPHAAVPTHIPQSLPGASQLHGKGPAVPRKL

SEQ ID NO: 68847 - protein, 1134 aa, Homo sapiens; identical to SEQ ID NO: 68846

SEQ ID NO: 68848 - protein, 1104 aa, Homo sapiens
MSEPHRVQFTSLPGSLNPAFLKKSRKEEAGAGEQHQDCEPAAAAVRITLTLFEPDHKRCPEFFYPELVKNIRGKVKGLQPGDKKKDLSDPFNDEEKERHKVEALARKFEEKYGGKKRRKDRIQDLIDMGYGYDESDSFIDNSEAYDELVPASLTTKYGGFYINSGTLQFRQASESEDDFIKEKKKKSPKKRKLKEGGEKIKKKKKDDTYDKEKKSKKSKFSKAGFTALNASKEKKKKKYSGALSVKEMLKKFQKEKEAQKKREEEHKPVAVPSAEAQGLRELEGASDPLLSLFGSTSDNDLLQAATAMDSLTDLDLEHLLSESPEGSPFRDMDDGSDSLGVGLDQEFRQPSSLPEGLPAPLEKRVKELAQAARAAEGESRQKFFTQDINGILLDIEAQTRELSSQVRSGVYAYLASFLPCSKDALLKRARKLHLYEQGGRLKEPLQKLKEAIGRAMPEQMAKYQDECQAHTQAKVAKMLEEEKDKEQRDRICSDEEEDEEKGGRRIMGPRKKFQWNDEIRELLCQVVKIKLESQDLERNNKAQAWEDCVKGFLDAEVKPLWPKGWMQARTLFKESRRGHGHLTSILAKKKVMAPSKIKVKESSTKPDKKVSVPSGQIGGPIALPSDHQTGGLSIGASSRELPSQASGGLANPPPVNLEDSLDEDLIRNPASSVEAVSKELAALNSRAAGNSEFTLPAPSKAPAEKVGGVLCTEEKRNFAKPSPSAPPPASSLQSPLNFLAEQALALGQSSQEKKPESSGYKELSCQAPLNKGLPEVHQSKAKHHSLPRTSHGPQVAVPVPGPQVKVFHAGTQQQKNFTPPSPFANKLQGPKASPTQCHRSLLQLVKTAAKGQGFHPSAPATSGGLSASSSSSHKTPASSSSALSHPAKPHSVSSAGSSYKNNPFASSISKHGVSSGSSSSGGTPVQSSVSGSLVPGIQPPSVGQATSRPVPSSAGKKMPVSQKLTLVAPPGGPNGDSSGGTQGVAKLLTSPSLKPSAVSSVTSSTSLSKGASGTVLLAGSSLMASPYKSSSPKLSGAMSSNSLGIITPVPIPVHVLSFSADSSAKAGVSKDAIVTGPAPGSFHHGLGHSASQLHGKGPAVPRKL

SEQ ID NO: 68849 - protein, 1264 aa, Homo sapiens
MSLQREPPRPEPPPPFPPLPLQPPPPRESASRAEQPPRPPRETVRLELVLKDPTDESCVEFSYPELLLCGEQRKKLIHTEDPFNDEHQERQEVEMLAKKFEMKYGGKPRKHRKDRLQDLIDIGFGYDETDPFIDNSEAYDELVPASLTTKYGGFYINTGTLQFRQASDTEEDDITDNQKHKPPKVPKIKEDDIEMKKRKRKEEGEKEKKPRKKVPKQLGVVALNSHKSEKKKKRYKDSLSLAAMIRKFQKEKDALKKESNPKVPVTLSTPSLNKPPCAAAALGNDVPDLNLSSGDPDLPIFVSTNEHELFQEAENALEMLDDFDFDRLLDAASDGSPLSESGGENGTTTQPTYTSQVMPKVVPTLPEGLPVLLEKRIEDLRVAAKLFDEEGRKKFFTQDMNNILLDIELQLQELGPVIRSGVYSHLEAFVPCNKETLVKRLKKLHLNVQDDRLREPLQKLKLAVSNVMPEQLFKYQEDCQARSQAKCAKLQTDEEREKNGSEEDDDEKPGKRVIGPRKKFHWDDTIRTLLCNLVEIKLGCYELEPNKSQSAEDYLKSFMETEVKPLWPKGWMQARMLFKESRSVHNHLTSAPAKKKVIPAPKPKVKEVMVKTLPLHSFPTMLKECSPKKDQKTPTSLVASVSGPPTSSSTAAIAAASSSSAPAQETICLDDSLDEDLSFHSPSLDLVSEALAVINNGNKGPPVGSRISMPTTKPRPGLREEKLASIMSKLPLATPKKLDSTQTTHSSSLIAGHTGPVPKKPQDLAHTGISSGLIAGSSIQNPKVSLEPLPARLLQQGLQRSSQIHTSSSSQTHVSSSSQAQIAASSHALGTSEAQDASSLTQVTKVHQHSAVQQNYVSPLQATISKSQTNPVVKLSNNPQLSCSSSLIKTSDKPLMYRLPLSTPSPGNGSQGSHPLVSRTVPSTTTSSNYLAKAMVSQISTQGFKSPFSMAASPKLAASPKPATSPKPLPSPKPSASPKPSLSAKPSVSTKLISKSNPTPKPTVSPSSSSPNALVAQGSHSSTNSPVHKQPSGMNISRQSPTLNLLPSSRTSGLPPTKNLQAPSKLTNSSSTGTVGKNSLSGIAMNVPASRGSNLNSSGANRTSLSGGTGSGTQGATKPLSTPHRPSTASGSSVVTASVQSTAGASLLANASPLTLMTSPLSVTNQNVTPFGMLGGLVPVTMPFQFPLEIFGFGTDTAGVTTTSGSTSAAFHHSLTQNLLKGLQPGGAQHAATLSHSPLPAHLQQAFHDGGQSKGDTKLPRKSQ

SEQ ID NO: 68850 - protein, 1347 aa, Homo sapiens
MAEPRRVAFISLSPVRRREAEYPGPEREPEYPREPPRLEPQPYREPARAEPPAPREPAPRSDAQPPSREKPLPQREVSRAEPPMSLQREPPRPEPPPPFPPLPLQPPPPRESASRAEQPPRPPRETVRLELVLKDPTDESCVEFSYPELLLCGEQRKKLIHTEDPFNDEHQERQEVEMLAKKFEMKYGGKPRKHRKDRLQDLIDIGFGYDETDPFIDNSEAYDELVPASLTTKYGGFYINTGTLQFRQASDTEEDDITDNQKHKPPKVPKIKEDDIEMKKRKRKEEGEKEKKPRKKVPKQLGVVALNSHKSEKKKKRYKDSLSLAAMIRKFQKEKDALKKESNPKVPVTLSTPSLNKPPCAAAALGNDVPDLNLSSGDPDLPIFVSTNEHELFQEAENALEMLDDFDFDRLLDAASDGSPLSESGGENGTTTQPTYTSQVMPKVVPTLPEGLPVLLEKRIEDLRVAAKLFDEEGRKKFFTQDMNNILLDIELQLQELGPVIRSGVYSHLEAFVPCNKETLVKRLKKLHLNVQDDRLREPLQKLKLAVSNVMPEQLFKYQEDCQARSQAKCAKLQTDEEREKNGSEEDDDEKPGKRVIGPRKKFHWDDTIRTLLCNLVEIKLGCYELEPNKSQSAEDYLKSFMETEVKPLWPKGWMQARMLFKESRSVHNHLTSAPAKKKVIPAPKPKVKEVMVKTLPLHSFPTMLKECSPKKDQKTPTSLVASVSGPPTSSSTAAIAAASSSSAPAQETICLDDSLDEDLSFHSPSLDLVSEALAVINNGNKGPPVGSRISMPTTKPRPGLREEKLASIMSKLPLATPKKLDSTQTTHSSSLIAGHTGPVPKKPQDLAHTGISSGLIAGSSIQNPKVSLEPLPARLLQQGLQRSSQIHTSSSSQTHVSSSSQAQIAASSHALGTSEAQDASSLTQVTKVHQHSAVQQNYVSPLQATISKSQTNPVVKLSNNPQLSCSSSLIKTSDKPLMYRLPLSTPSPGNGSQGSHPLVSRTVPSTTTSSNYLAKAMVSQISTQGFKSPFSMAASPKLAASPKPATSPKPLPSPKPSASPKPSLSAKPSVSTKLISKSNPTPKPTVSPSSSSPNALVAQGSHSSTNSPVHKQPSGMNISRQSPTLNLLPSSRTSGLPPTKNLQAPSKLTNSSSTGTVGKNSLSGIAMNVPASRGSNLNSSGANRTSLSGGTGSGTQGATKPLSTPHRPSTASGSSVVTASVQSTAGASLLANASPLTLMTSPLSVTNQNVTPFGMLGGLVPVTMPFQFPLEIFGFGTDTAGVTTTSGSTSAAFHHSLTQNLLKGLQPGGAQHAATLSHSPLPAHLQQAFHDGGQSKGDTKLPRKSQ

SEQ ID NO: 68851 - protein, 561 aa, Homo sapiens
MAESGESGGPPGSQDSAAGAEGAGAPAAAASAEPKIMKVTVKTPKEKEEFAVPENSSVQQFKEEISKRFKSHTDQLVLIFAGKILKDQDTLSQHGIHDGLTVHLVIKTQNRPQDHSAQQTNTAGSNVTTSSTPNSNSTSGSATSNPFGLGGLGGLAGLSSLGLNTTNFSELQSQMQRQLLSNPEMMVQIMENPFVQSMLSNPDLMRQLIMANPQMQQLIQRNPEISHMLNNPDIMRQTLELARNPAMMQEMMRNQDRALSNLESIPGGYNALRRMYTDIQEPMLSAAQEQFGGNPFASLVSNTSSGEGSQPSRTENRDPLPNPWAPQTSQSSSASSGTASTVGGTTGSTASGTSGQSTTAPNLVPGVGASMFNTPGMQSLLQQITENPQLMQNMLSAPYMRSMMQSLSQNPDLAAQMQNPDTLSAMSNPRAMQALLQIQQGLQTLATEAPGLIPGFTPGLGALGSTGGSSGTNGSNATPSENTSPTAGTTEPGHQQFIQQMLQALAGVNPQLQNPEVRFQQQLEQLSAMGFLNREANLQALIATGGDINAAIERLLGSQPS

SEQ ID NO: 68852 - protein, 589 aa, Homo sapiens
MAESGESGGPPGSQDSAAGAEGAGAPAAAASAEPKIMKVTVKTPKEKEEFAVPENSSVQQFKEEISKRFKSHTDQLVLIFAGKILKDQDTLSQHGIHDGLTVHLVIKTQNRPQDHSAQQTNTAGSNVTTSSTPNSNSTSGSATSNPFGLGGLGGLAGLSSLGLNTTNFSELQSQMQRQLLSNPEMMVQIMENPFVQSMLSNPDLMRQLIMANPQMQQLIQRNPEISHMLNNPDIMRQTLELARNPAMMQEMMRNQDRALSNLESIPGGYNALRRMYTDIQEPMLSAAQEQFGGNPFASLVSNTSSGEGSQPSRTENRDPLPNPWAPQTSQSSSASSGTASTVGGTTGSTASGTSGQSTTAPNLVPGVGASMFNTPGMQSLLQQITENPQLMQNMLSAPYMRSMMQSLSQNPDLAAQMMLNNPLFAGNPQLQEQMRQQLPTFLQQMQNPDTLSAMSNPRAMQALLQIQQGLQTLATEAPGLIPGFTPGLGALGSTGGSSGTNGSNATPSENTSPTAGTTEPGHQQFIQQMLQALAGVNPQLQNPEVRFQQQLEQLSAMGFLNREANLQALIATGGDINAAIERLLGSQPS

SEQ ID NO: 68853 - protein, 624 aa, Homo sapiens
MAENGESSGPPRPSRGPAAAQGSAAAPAEPKIIKVTVKTPKEKEEFAVPENSSVQQFKEAISKRFKSQTDQLVLIFAGKILKDQDTLIQHGIHDGLTVHLVIKSQNRPQGQSTQPSNAAGTNTTSASTPRSNSTPISTNSNPFGLGSLGGLAGLSSLGLSSTNFSELQSQMQQQLMASPEMMIQIMENPFVQSMLSNPDLMRQLIMANPQMQQLIQRNPEISHLLNNPDIMRQTLEIARNPAMMQEMMRNQDLALSNLESIPGGYNALRRMYTDIQEPMLNAAQEQFGGNPFASVGSSSSSGEGTQPSRTENRDPLPNPWAPPPATQSSATTSTTTSTGSGSGNSSSNATGNTVAAANYVASIFSTPGMQSLLQQITENPQLIQNMLSAPYMRSMMQSLSQNPDLAAQMMLNSPLFTANPQLQEQMRPQLPAFLQQMQNPDTLSAMSNPRAMQALMQIQQGLQTLATEAPGLIPSFTPGVGVGVLGTAIGPVGPVTPIGPIGPIVPFTPIGPIGPIGPTGPAAPPGSTGSGGPTGPTVSSAAPSETTSPTSESGPNQQFIQQMVQALAGANAPQLPNPEVRFQQQLEQLNAMGFLNREANLQALIATGGDINAAIERLLGSQPS

SEQ ID NO: 68854 - protein, 488 aa, Homo sapiens
MAENGESSGPPRPSRGPAAAQGSAAAPAEPKIIKVTVKTPKEKEEFAVPENSSVQQFKEAISKRFKSQTDQLVLIFAGKILKDQDTLIQHGIHDGLTVHLVIKSQNRPQGQSTQPSNAAGTNTTSASTPRSNSTPISTNSNPFGLGSLGGLAGLSSLGLSSTNFSELQSQMQQQLMASPEMMIQIMENPFVQSMLSNPDLMRQLIMANPQMQQLIQRNPEISHLLNNPDIMRQTLEIARNPAMMQEMMRNQDLALSNLESIPGGYNALRRMYTDIQEPMLNAAQEQFGGNPFASVGSSSSSGEGTQPSRTENRDPLPNPWAPPPATQSSATTSTTTSTGSGSGNSSSNATGNTVAAANYVASIFSTPGMQSLLQQITENPQLIQNMLSAPYMRSMMQSLSQNPDLAAQMMLNSPLFTANPQLQEQMRPQLPAFLQQMQNPDTLSAMSNPTSSSFSKWCRPWLEQMLHSCRIQKSDFSNNWNSSTQWGS

SEQ ID NO: 68855 - protein, 655 aa, Homo sapiens
MAKGGEALPQGSPAPVQDPHLIKVTVKTPKDKEDFSVTDTCTIQQLKEEISQRFKAHPDQLVLIFAGKILKDPDSLAQCGVRDGLTVHLVIKRQHRAMGNECPAASVPTQGPSPGSLPQPSSIYPADGPPAFSLGLLTGLSRLGLAYRGFPDQPSSLMRQHVSVPEFVTQLIDDPFIPGLLSNTGLVRQLVLDNPHMQQLIQHNPEIGHILNNPEIMRQTLEFLRNPAMMQEMIRSQDRVLSNLESIPGGYNVLCTMYTDIMDPMLNAVQEQFGGNPFATATTDNATTTTSQPSRMENCDPLPNPWTSTHGGSGSRQGRQDGDQDAPDIRNRFPNFLGIIRLYDYLQQLHENPQSLGTYLQGTASALSQSQEPPPSVNRVPPSSPSSQEPGSGQPLPEESVAIKGRSSCPAFLRYPTENSTGQGGDQDGAGKSSTGHSTNLPDLVSGLGDSANRVPFAPLSFSPTAAIPGIPEPPWLPSPAYPRSLRPDGMNPAPQLQDEIQPQLPLLMHLQAAMANPRALQALRQIEQGLQVLATEAPRLLLWFMPCLAGTGSVAGGIESREDPLMSEDPLPNPPPEVFPALDSAELGFLSPPFLHMLQDLVSTNPQQLQPEAHFQVQLEQLRSMGFLNREANLQALIATGGDVDAAVEKLRQS

SEQ ID NO: 68856 - protein, 221 aa, Homo sapiens
MAKGGEALPQGSPAPVQDPHLIKVTVKTPKDKEDFSVTDTCTIQQLKEEISQRFKAHPDQLVLIFAGKILKDPDSLAQCGVRDGLTVHLVIKRQHRAMGNECPAASVPTQGPSPGSLPQPSSIYPADGPPAFSLGLLTGLSRLGLAYRGFPDQPSSLMRQHVSVPEFVTQLIDDPFIPGLLSNTGLVRQLVLDNPHMQQLIQHNPEIGHILNNPEIMRQTL

SEQ ID NO: 68857 - protein, 226 aa, Homo sapiens
MAEPSGAETRPPIRVTVKTPKDKEEIVICDRASVKEFKEEISRRFKAQQDQLVLIFAGKILKDGDTLNQHGIKDGLTVHLVIKTPQKAQDPAPPAAPSLPAADAEPRVTLHPYQSPSHAGIAADPAGTTDLADRGPWAGTQPWLLWDIPDPSTLSRQQRRVYARGPHFLTSHASHIFSNRGFQRPAATHAADDPAFGWKWKLTGADARSEISAAAGAAQLHGLHQS

SEQ ID NO: 68858 - protein, 601 aa, Homo sapiens
MAEPSGAETRPPIRVTVKTPKDKEEIVICDRASVKEFKEEISRRFKAQQDQLVLIFAGKILKDGDTLNQHGIKDGLTVHLVIKTPQKAQDPAAATASSPSTPDPASAPSTTPASPATPAQPSTSGSASSDAGSGSRRSSGGGPSPGAGEGSPSATASILSGFGGILGLGSLGLGSANFMELQQQMQRQLMSNPEMLSQIMENPLVQDMMSNPDLMRHMIMANPQMQQLMERNPEISHMLNNPELMRQTMELARNPAMMQEMMRNQDRALSNLESIPGGYNALRRMYTDIQEPMFSAAREQFGNNPFSSLAGNSDSSSSQPLRTENREPLPNPWSPSPPTSQAPGSGGEGTGGSGTSQVHPTVSNPFGINAASLGSGMFNSPEMQALLQQISENPQLMQNVISAPYMRSMMQTLAQNPDFAAQMMVNVPLFAGNPQLQEQLRLQLPVFLQQMQNPESLSILTNPRAMQALLQIQQGLQTLQTEAPGLVPSLGSFGISRTPAPSAGSNAGSTPEAPTSSPATPATSSPTGASSAQQQLMQQMIQLLAGSGNSQVQTPEVRFQQQLEQLNSMGFINREANLQALIATGGDINAAIERLLGSQLS

SEQ ID NO: 68859 - protein, 111 aa, Homo sapiens
MAGKQAVSASGKWLDGIRKWYYNAAGFNKLGLMRDDTIYEDEDVKEAIRRLPENLYNDRMFRIKRALDLNLKHQILPKEQWTKYEEENFYLEPYLKEVIRERKEREEWAKK

SEQ ID NO: 68860 - protein, 480 aa, Homo sapiens
MAASVVCRAATAGAQVLLRARRSPALLRTPALRSTATFAQALQFVPETQVSLLDNGLRVASEQSSQPTCTVGVWIDVGSRFETEKNNGAGYFLEHLAFKGTKNRPGSALEKEVESMGAHLNAYSTREHTAYYIKALSKDLPKAVELLGDIVQNCSLEDSQIEKERDVILREMQENDASMRDVVFNYLHATAFQGTPLAQAVEGPSENVRKLSRADLTEYLSTHYKAPRMVLAAAGGVEHQQLLDLAQKHLGGIPWTYAEDAVPTLTPCRFTGSEIRHRDDALPFAHVAIAVEGPGWASPDNVALQVANAIIGHYDCTYGGGVHLSSPLASGAVANKLCQSFQTFSICYAETGLLGAHFVCDRMKIDDMMFVLQGQWMRLCTSATESEVARGKNILRNALVSHLDGTTPVCEDIGRSLLTYGRRIPLAEWESRIAEVDASVVREICSKYIYDQCPAVAGYGPIEQLPDYNRIRSGMFWLRF

SEQ ID NO: 68861 - protein, 453 aa, Homo sapiens
MKLLTRAGSFSRFYSLKVAPKVKATAAPAGAPPQPQDLEFTKLPNGLVIASLENYSPVSRIGLFIKAGSRYEDFSNLGTTHLLRLTSSLTTKGASSFKITRGIEAVGGKLSVTATRENMAYTVECLRGDVDILMEFLLNVTTAPEFRRWEVADLQPQLKIDKAVAFQNPQTHVIENLHAAAYRNALANPLYCPDYRIGKVTSEELHYFVQNHFTSARMALIGLGVSHPVLKQVAEQFLNMRGGLGLSGAKANYRGGEIREQNGDSLVHAAFVAESAVAGSAEANAFSVLQHVLGAGPHVKRGSNTTSHLHQAVAKATQQPFDVSAFNASYSDSGLFGIYTISQATAAGDVIKAAYNQVKTIAQGNLSNTDVQAAKNKLKAGYLMSVESSECFLEEVGSQALVAGSYMPPSTVLQQIDSVANADIINAAKKFVSGQKSMAASGNLGHTPFVDEL

SEQ ID NO: 68862 - protein, 91 aa, Homo sapiens
MGLEDEQKMLTESGDPEEEEEEEEELVDPLTTVREQCEQLEKCVKARERLELCDERVSSRSHTEEDCTEELFDFLHARDHCVAHKLFNNLK

SEQ ID NO: 68863 - protein, 82 aa, Homo sapiens
MGREFGNLTRMRHVISYSLSPFEQRAYPHVFTKGIPNVLRRIRESFFRVVPQFVVFYLIYTWGTEEFERSKRKNPAAYENDK

SEQ ID NO: 68864 - protein, 82 aa, Homo sapiens; identical to SEQ ID NO: 68863

SEQ ID NO: 68865 - protein, 82 aa, Homo sapiens; identical to SEQ ID NO: 68863

SEQ ID NO: 68866 - protein, 128 aa, Homo sapiens
MQIFVKTLTGKTITLEVEPSDTIENVKAKIQDKEGIPPDQQRLIFAGKQLEDGRTLSDYNIQKESTLHLVLRLRGGIIEPSLRQLAQKYNCDKMICRKCYARLHPRAVNCRKKKCGHTNNLRPKKKVK

SEQ ID NO: 68867 - protein, 128 aa, Homo sapiens; identical to SEQ ID NO: 68866

SEQ ID NO: 68868 - protein, 623 aa, Homo sapiens
MAAGETQLYAKVSNKLKSRSSPSLLEPLLAMGFPVHTALKALAATGRKTAEEALAWLHDHCNDPSLDDPIPQEYALFLCPTGPLLEKLQEFWRESKRQCAKNRAHEVFPHVTLCDFFTCEDQKVECLYEALKRAGDRLLGSFPTAVPLALHSSISYLGFFVSGSPADVIREFAMTFATEASLLADCSVKPCTKQLHLTLAHKFYPHHQRTLEQLARAIPLGHSCQWTAALYSRDMRFVHYQTLRALFQYKPQNVDELTLSPGDYIFVDPTQQDEASEGWVIGISQRTGCRGFLPENYTDRASESDTWVKHRMYTFSLATDLNSRKDGEASSRCSGEFLPQTARSLSSLQALQATVARKSVLVVRHGERVDQIFGKAWLQQCSTPDGKYYRPDLNFPCSLPRRSRGIKDFENDPPLSSCGIFQSRIAGDALLDSGIRISSVFASPALRCVQTAKLILEELKLEKKIKIRVEPGIFEWTKWEAGKTTPTLMSLEELKEANFNIDTDYRPAFPLSALMPAESYQEYMDRCTASMVQIVNTCPQDTGVILIVSHGSTLDSCTRPLLGLPPRECGDFAQLVRKIPSLGMCFCEENKEEGKWELVNPPVKTLTHGANAAFNWRNWISGN

SEQ ID NO: 68869 - protein, 661 aa, Homo sapiens
MAAGETQLYAKVSNKLKSRSSPSLLEPLLAMGFPVHTALKALAATGRKTAEEALAWLHDHCNDPSLDDPIPQEYALFLCPTGPLLEKLQEFWRESKRQCAKNRAHEVFPHVTLCDFFTCEDQKVECLYEALKRAGDRLLGSFPTAVPLALHSSISYLGFFVSGSPADVIREFAMTFATEASLLAGTSVSRFWIFSQVPGHGPNLRLSNLTRASFVSHYILQKYCSVKPCTKQLHLTLAHKFYPHHQRTLEQLARAIPLGHSCQWTAALYSRDMRFVHYQTLRALFQYKPQNVDELTLSPGDYIFVDPTQQDEASEGWVIGISQRTGCRGFLPENYTDRASESDTWVKHRMYTFSLATDLNSRKDGEASSRCSGEFLPQTARSLSSLQALQATVARKSVLVVRHGERVDQIFGKAWLQQCSTPDGKYYRPDLNFPCSLPRRSRGIKDFENDPPLSSCGIFQSRIAGDALLDSGIRISSVFASPALRCVQTAKLILEELKLEKKIKIRVEPGIFEWTKWEAGKTTPTLMSLEELKEANFNIDTDYRPAFPLSALMPAESYQEYMDRCTASMVQIVNTCPQDTGVILIVSHGSTLDSCTRPLLGLPPRECGDFAQLVRKIPSLGMCFCEENKEEGKWELVNPPVKTLTHGANAAFNWRNWISGN

SEQ ID NO: 68870 - protein, 122 aa, Homo sapiens
MAAGETQLYAKVSNKLKSRSSPSLLEPLLAMGFPVHTALKALAATGRKTAEEALAWLHDHCNDPSLDDPIPQEYALFLCPTGPLLEKLQEFWRESKRQCAKNRAHEVFPHVTLCDFFTGPAV

SEQ ID NO: 68871 - protein, 526 aa, Homo sapiens
MAAGETQLYAKVSNKLKSRSSPSLLEPLLAMGFPVHTALKALAATGRKTAEEALAWLHDHCNDPSLDDPIPQEYALFLCPTGPLLEKLQEFWRESKRQCAKNRAHEVFPHVTLCDFFTCEDQKVECLYEALKRAGDRLLGSFPTAVPLALHSSISYLGFFVSGSPADVIREFAMTFATEASLLADCSVKPCTKQLHLTLAHKFYPHHQRTLEQLARAIPLGHSCQWTAALYSRDMRFVHYQTLRALFQYKPQNVDELTLSPGDYIFVDPTQQDEASEGWVIGISQRTGCRGFLPENYTDRASESDTWVKHRMYTFSLATDLNSRKDGEASSRCSGEFLPQTARSLSSLQALQATVARKSVLVVRHGERVDQIFGKAWLQQCSTPDGKYYRPDLNFPCSLPRRSRGIKDFENDPPLSSCGIFQSRIAGDALLDSGIRISSVFASPALRCVQTAKLILEELKLEKKIKIRVEPGIFEWTKWEAGKTTPTLMSLEELKEANFNIDTDYRSLPWACASVKKIKRKENGSW

SEQ ID NO: 68872 - protein, 649 aa, Homo sapiens
MAQYGHPSPLGMAAREELYSKVTPRRNRQQRPGTIKHGSALDVLLSMGFPRARAQKALASTGGRSVQAACDWLFSHVGDPFLDDPLPREYVLYLRPTGPLAQKLSDFWQQSKQICGKNKAHNIFPHITLCQFFMCEDSKVDALGEALQTTVSRWKCKFSAPLPLELYTSSNFIGLFVKEDSAEVLKKFAADFAAEAASKTEVHVEPHKKQLHVTLAYHFQASHLPTLEKLAQNIDVKLGCDWVATIFSRDIRFANHETLQVIYPYTPQNDDELELVPGDFIFMSPMEQTSTSEGWIYGTSLTTGCSGLLPENYITKADECSTWIFHGSYSILNTSSSNSLTFGDGVLERRPYEDQGLGETTPLTIICQPMQPLRVNSQPGPQKRCLFVCRHGERMDVVFGKYWLSQCFDAKGRYIRTNLNMPHSLPQRSGGFRDYEKDAPITVFGCMQARLVGEALLESNTIIDHVYCSPSLRCVQTAHNILKGLQQENHLKIRVEPGLFEWTKWVAGSTLPAWIPPSELAAANLSVDTTYRPHIPISKLVVSESYDTYISRSFQVTKEIISECKSKGNNILIVAHASSLEACTCQLQGLSPQNSKDFVQMVRKIPYLGFCSCEELGETGIWQLTDPPILPLTHGPTGGFNWRETLLQE

SEQ ID NO: 68873 - protein, 502 aa, Homo sapiens
MASKKLGADFHGTFSYLDDVPFKTGDKFKTPAKVGLPIGFSLPDCLQVVREVQYDFSLEKKTIEWAEEIKKIEEAEREAECKIAEAEAKVNSKSGPEGDSKMSFSKTHSTATMPPPINPILASLQHNSILTPTRVSSSATKQKVLSPPHIKADFNLADFECEEDPFDNLELKTIDEKEELRNILVGTTGPIMAQLLDNNLPRGGSGSVLQDEEVLASLERATLDFKPLHKPNGFITLPQLGNCEKMSLSSKVSLPPIPAVSNIKSLSFPKLDSDDSNQKTAKLASTFHSTSCLRNGTFQNSLKPSTQSSASELNGHHTLGLSALNLDSGTEMPALTSSQMPSLSVLSVCTEESSPPNTGPTVTPPNFSVSQVPNMPSCPQAYSELQMLSPSERQCVETVVNMGYSYECVLRAMKKKGENIEQILDYLFAHGQLCEKGFDPLLVEEALEMHQCSEEKMMEFLQLMSKFKEMGFELKDIKEVLLLHNNDQDNALEDLMARAGAS

SEQ ID NO: 68874 - protein, 502 aa, Homo sapiens; identical to SEQ ID NO: 68873

SEQ ID NO: 68875 - protein, 441 aa, Homo sapiens
MASKKLGADFHGTFSYLDDVPFKTGDKFKTPAKVGLPIGFSLPDCLQVVREVQYDFSLEKKTIEWAEEIKKIEEAEREAECKIAEAEAKVNSKSGPEGDSKMSFSKTHSTATMPPPINPILASLQHNSILTPTRVSSSATKQKVLSPPHIKADFNLADFECEEDPFDNLELKTIDEKEELRNILVGTTGPIMAQLLDNNLPRGGSGSVLQDEEVLASLERATLDFKPLHKPNGFITLPQLGNCEKMSLSSKVSLPPIPAVSNIKSLSFPKLDSDDSNQKTAKLASTFHSTSCLRNGTFQNSLKPSTQSSASELNGHHTLGLSALNLDSGTEMPALTSSQMPSLSVLSVCTEESSPPNTGPTILDYLFAHGQLCEKGFDPLLVEEALEMHQCSEEKMMEFLQLMSKFKEMGFELKDIKEVLLLHNNDQDNALEDLMARAGAS

SEQ ID NO: 68876 - protein, 502 aa, Homo sapiens; identical to SEQ ID NO: 68873

SEQ ID NO: 68877 - protein, 502 aa, Homo sapiens; identical to SEQ ID NO: 68873

SEQ ID NO: 68878 - protein, 538 aa, Homo sapiens
MSGAVRGRRREVGLQHGGCGTGGGYGDGLARSGQSWRWWRSLSLGAVGSSAGTEPGRPAGASTFRLLRRRQQRHSGSKWLLRSWVQIFMYDFSLEKKTIEWAEEIKKIEEAEREAECKIAEAEAKVNSKSGPEGDSKMSFSKTHSTATMPPPINPILASLQHNSILTPTRVSSSATKQKVLSPPHIKADFNLADFECEEDPFDNLELKTIDEKEELRNILVGTTGPIMAQLLDNNLPRGGSGSVLQDEEVLASLERATLDFKPLHKPNGFITLPQLGNCEKMSLSSKVSLPPIPAVSNIKSLSFPKLDSDDSNQKTAKLASTFHSTSCLRNGTFQNSLKPSTQSSASELNGHHTLGLSALNLDSGTEMPALTSSQMPSLSVLSVCTEESSPPNTGPTVTPPNFSVSQVPNMPSCPQAYSELQMLSPSERQCVETVVNMGYSYECVLRAMKKKGENIEQILDYLFAHGQLCEKGFDPLLVEEALEMHQCSEEKMMEFLQLMSKFKEMGFELKDIKEVLLLHNNDQDNALEDLMARAGAS

SEQ ID NO: 68879 - protein, 566 aa, Homo sapiens
MSGAVRGRRREVGLQHGGCGTGGGYGDGLARSGQSWRWWRSLSLGAVGSSAGTEPGRPAGASTFRLLRRRQQRHSGTFSYLDDVPFKTGDKFKTPAKVGLPIGFSLPDCLQVVREVQYDFSLEKKTIEWAEEIKKIEEAEREAECKIAEAEAKVNSKSGPEGDSKMSFSKTHSTATMPPPINPILASLQHNSILTPTRVSSSATKQKVLSPPHIKADFNLADFECEEDPFDNLELKTIDEKEELRNILVGTTGPIMAQLLDNNLPRGGSGSVLQDEEVLASLERATLDFKPLHKPNGFITLPQLGNCEKMSLSSKVSLPPIPAVSNIKSLSFPKLDSDDSNQKTAKLASTFHSTSCLRNGTFQNSLKPSTQSSASELNGHHTLGLSALNLDSGTEMPALTSSQMPSLSVLSVCTEESSPPNTGPTVTPPNFSVSQVPNMPSCPQAYSELQMLSPSERQCVETVVNMGYSYECVLRAMKKKGENIEQILDYLFAHGQLCEKGFDPLLVEEALEMHQCSEEKMMEFLQLMSKFKEMGFELKDIKEVLLLHNNDQDNALEDLMARAGAS

SEQ ID NO: 68880 - protein, 229 aa, Homo sapiens
MQIFVKTLTGKTITLEVEPSDTIENVKAKIQDKEGIPPDQQRLIFAGKQLEDGRTLSDYNIQKESTLHLVLRLRGGMQIFVKTLTGKTITLEVEPSDTIENVKAKIQDKEGIPPDQQRLIFAGKQLEDGRTLSDYNIQKESTLHLVLRLRGGMQIFVKTLTGKTITLEVEPSDTIENVKAKIQDKEGIPPDQQRLIFAGKQLEDGRTLSDYNIQKESTLHLVLRLRGGC

SEQ ID NO: 68881 - protein, 229 aa, Homo sapiens; identical to SEQ ID NO: 68880

SEQ ID NO: 68882 - protein, 229 aa, Homo sapiens; identical to SEQ ID NO: 68880

SEQ ID NO: 68883 - protein, 153 aa, Homo sapiens
MQIFVKTLTGKTITLEVEPSDTIENVKAKIQDKEGIPPDQQRLIFAGKQLEDGRTLSDYNIQKESTLHLVLRLRGGMQIFVKTLTGKTITLEVEPSDTIENVKAKIQDKEGIPPDQQRLIFAGKQLEDGRTLSDYNIQKESTLHLVLRLRGGC

SEQ ID NO: 68884 - protein, 685 aa, Homo sapiens
MQIFVKTLTGKTITLEVEPSDTIENVKAKIQDKEGIPPDQQRLIFAGKQLEDGRTLSDYNIQKESTLHLVLRLRGGMQIFVKTLTGKTITLEVEPSDTIENVKAKIQDKEGIPPDQQRLIFAGKQLEDGRTLSDYNIQKESTLHLVLRLRGGMQIFVKTLTGKTITLEVEPSDTIENVKAKIQDKEGIPSDQQRLIFAGKQLEDGRTLSDYNIQKESTLHLVLRLRGGMQIFVKTLTGKTITLEVEPSDTIENVKAKIQDKEGIPPDQQRLIFAGKQLEDGRTLSDYNIQKESTLHLVLRLRGGMQIFVKTLTGKTITLEVEPSDTIENVKAKIQDKEGIPPDQQRLIFAGKQLEDGRTLSDYNIQKESTLHLVLRLRGGMQIFVKTLTGKTITLEVEPSDTIENVKAKIQDKEGIPPDQQRLIFAGKQLEDGRTLSDYNIQKESTLHLVLRLRGGMQIFVKTLTGKTITLEVEPSDTIENVKAKIQDKEGIPPDQQRLIFAGKQLEDGRTLSDYNIQKESTLHLVLRLRGGMQIFVKTLTGKTITLEVEPSDTIENVKAKIQDKEGIPPDQQRLIFAGKQLEDGRTLSDYNIQKESTLHLVLRLRGGMQIFVKTLTGKTITLEVEPSDTIENVKAKIQDKEGIPPDQQRLIFAGKQLEDGRTLSDYNIQKESTLHLVLRLRGGV

SEQ ID NO: 68885 - protein, 149 aa, Homo sapiens
MQIFVKTLTGKTITLEVEPSDTIENVKAKIQDKEGIPPDQQRLIFAGKQLEDGRTLSDYNIQKESTLHLVLRLRGGMQIFVKTLTGKTITLEVEPSDTIENVKAKIQDKEGIPPDQQRLIFAGKQLEDGRTLSDYNIQKESTLHLVLRL

SEQ ID NO: 68886 - protein, 123 aa, Homo sapiens
MQIFVKTLTGKTITLEVEPSDTIENVKAKIQDKEGIPPDQQRLIFAGKQLEDGRTLSDYNIQKESTLHLVLRLRGGMQIFVKTLTGKTITLEVEPSDTIENVKAKIQDKEGIPPDQQRLIFAG

SEQ ID NO: 68887 - protein, 685 aa, Homo sapiens; identical to SEQ ID NO: 68884

SEQ ID NO: 68888 - protein, 161 aa, Homo sapiens
MQIFVKTLTGKTITLEVEPSDTIENVKAKIQDKEGIPPDQQRLIFAGKQLEDGRTLSDYNIQKESTLHLVLRLRGGMQIFVKTLTGKTITLEVEPSDTIENVKAKIQDKEGIPPDQQRLIFAGKQLEDGRTLSDYNIQKESTLHLVLRLRGGMQIFVKTLT

SEQ ID NO: 68889 - protein, 134 aa, Homo sapiens
MQIFVKTLTGKTITLEVEPSDTIENVKAKIQDKEGIPPDQQRLIFAGKQLEDGRTLSDYNIQKESTLHLVLRLRGGMQIFVKTLTGKTITLEVEPSDTIENVKAKIQDKEGIPPDQQRLIFAGKQLEDGRTLSD

SEQ ID NO: 68890 - protein, 169 aa, Homo sapiens
MQIFVKTLTGKTITLEVEPSDTIENVKAKIQDKEGIPPDQQRLIFAGKQLEDGRTLSDYNIQKESTLHLVLRLRGGMQIFVKTLTGKTITLEVEPSDTIENVKAKIQDKEGIPSDQQRLIFAGKQLEDGRTLSDYNIQKESTLHLVLRLRGGMQIFVKTLTGKTITLEV

SEQ ID NO: 68891 - protein, 155 aa, Homo sapiens
MQIFVKTLTGKTITLEVEPSDTIENVKAKIQDKEGIPPDQQRLIFAGKQLEDGRTLSDYNIQKESTLHLVLRLRGGMQIFVKTLTGKTITLEVEPSDTIENVKAKIQDKEGIPPDQQRLIFAGKQLEDGRTLSDYNIQKESTLHLVLRLRGGMQI

SEQ ID NO: 68892 - protein, 61 aa, Homo sapiens
MQIFVKTLTGKTITLEVEPSDTIENVKAKIQDKEGIPPDQQRLIFAGKQLEDGRTLSDYNI

SEQ ID NO: 68893 - protein, 609 aa, Homo sapiens
MQIFVKTLTGKTITLEVEPSDTIENVKAKIQDKEGIPPDQQRLIFAGKQLEDGRTLSDYNIQKESTLHLVLRLRGGMQIFVKTLTGKTITLEVEPSDTIENVKAKIQDKEGIPSDQQRLIFAGKQLEDGRTLSDYNIQKESTLHLVLRLRGGMQIFVKTLTGKTITLEVEPSDTIENVKAKIQDKEGIPPDQQRLIFAGKQLEDGRTLSDYNIQKESTLHLVLRLRGGMQIFVKTLTGKTITLEVEPSDTIENVKAKIQDKEGIPPDQQRLIFAGKQLEDGRTLSDYNIQKESTLHLVLRLRGGMQIFVKTLTGKTITLEVEPSDTIENVKAKIQDKEGIPPDQQRLIFAGKQLEDGRTLSDYNIQKESTLHLVLRLRGGMQIFVKTLTGKTITLEVEPSDTIENVKAKIQDKEGIPPDQQRLIFAGKQLEDGRTLSDYNIQKESTLHLVLRLRGGMQIFVKTLTGKTITLEVEPSDTIENVKAKIQDKEGIPPDQQRLIFAGKQLEDGRTLSDYNIQKESTLHLVLRLRGGMQIFVKTLTGKTITLEVEPSDTIENVKAKIQDKEGIPPDQQRLIFAGKQLEDGRTLSDYNIQKESTLHLVLRLRGGV

SEQ ID NO: 68894 - protein, 136 aa, Homo sapiens
MQIFVKTLTGKTITLEVEPSDTIENVKAKIQDKEGIPPDQQRLIFAGKQLEDGRTLSDYNIQKESTLHLVLRLRGGMQIFVKTLTGKTITLEVEPSDTIENVKAKIQDKEGIPPDQQRLIFAGKQLEDGRTLSDYN

SEQ ID NO: 68895 - protein, 223 aa, Homo sapiens [sequence omitted]

SEQ ID NO: 68896 - protein, 213 aa, Homo sapiens
MQLKPMEINPEMLNKVLSRLGVAGQWRFVDVLGLEEESLGSVPAPACALLLLFPLTAQHENFRKKQIEELKGQEVSPKVYFMKQTIGNSCGTIGLIHAVANNQDKLGFEDGSVLKQFLSETEKMSPEDRAKCFEKNEAIQAAHDAVAQEGQCRVDDKVNFHFILFNNVDGHLYELDGRMPFPVNHGASSEDTLLKDAAKVCREFTEREQGEVR

SEQ ID NO: 68897 - protein, 58 aa, Homo sapiens
MQLKPMEINPEMLNKVLSRLGVAGQWRFVDVLGLEEESLGSVPAPACALLLLFPLTAQ

SEQ ID NO: 68898 - protein, 251 aa, Homo sapiens
MVPRPVCAVLLLFPITEKYEVFRTEEEEKIKSQGQDVTSSVYFMKQTISNACGTIGLIHAIANNKDKMHFESGSTLKKFLEESVSMSPEERARYLENYDAIRVTHETSAHEGQTESSSPSSSQPHSSHCRTKASSLCHHASLPWVKRNHVGPAKATSPSLRLRRWRPFLRLPSLGLHSVAPSIDEKVDLHFIALVHVDGHLYELDGRKPFPINHGETSDETLLEDAIEVCKKFMERDPDELRFNAIALSAA

SEQ ID NO: 68899 - protein, 230 aa, Homo sapiens
MEGQRWLPLEANPEVTNQFLKQLGLHPNWQFVDVYGMDPELLSMVPRPVCAVLLLFPITEKYEVFRTEEEEKIKSQGQDVTSSVYFMKQTISNACGTIGLIHAIANNKDKMHFESGSTLKKFLEESVSMSPEERARYLENYDAIRVTHETSAHEGQTEAPSIDEKVDLHFIALVHVDGHLYELDGRKPFPINHGETSDETLLEDAIEVCKKFMERDPDELRFNAIALSAA

SEQ ID NO: 68900 - protein, 228 aa, Homo sapiens
TEEEEKIKSQGQDVTSSVYFMKQTISNACGTIGLIHAIANNKDKMHFESGSTLKKFLEESVSMSPEERARYLENYDAIRVTHETSAHEGQTESSSPSSSQPHSSHCRTKASSLCHHASLPWVKRNHVGPAKATSPSLRLRRWRPFLRLPSLGLHSVAPSIDEKVDLHFIALVHVDGHLYELDGRKPFPINHGETSDETLLEDAIEVCKKFMERDPDELRFNAIALSAA

SEQ ID NO: 68901 - protein, 326 aa, Homo sapiens
MTGNAGEWCLMESDPGVFTELIKGFGCRGAQVEEIWSLEPENFEKLKPVHGLIFLFKWQPGEEPAGSVVQDSRLDTIFFAKQVINNACATQAIVSVLLNCTHQDVHLGETLSEFKEFSQSFDAAMKGLALSNSDVIRQVHNSFARQQMFEFDTKTSAKEEDAFHFVSYVPVNGRLYELDGLREGPIDLGACNQDDWISAVRPVIEKRIQKYSEGEIRFNLMAIVSDRKMIYEQKIAELQRQLAEEPMDTDQGNSMLSAIQSEVAKNQMLIEEEVQKLKRYKIENIRRKHNYLPFIMELLKTLAEHQQLIPLVEKFEKHFEKTLLGK

SEQ ID NO: 68902 - protein, 316 aa, Homo sapiens
MTGNAGEWCLMESDPGVFTELIKGFGCRGAQVEEIWSLEPENFEKLKPVHGLIFLFKWQPGEEPAGSVVQDSRLDTIFFAKQVINNACATQAIVSVLLNCTHQDVHLGETLSEFKEFSQSFDAAMKGLALSNSDVIRQVHNSFARQQMFEFDTKTSAKEEDAFHFVSYVPVNGRLYELDGLREGPIDLGACNQDDWISAVRPVIEKRIQKYSEGEIRFNLMAIVSDRKMIYEQKIAELQRQLAEEPMDTDQGNSMLSAIQSEVAKNQMLIEEEVQKLKRYKIENIRRKHNYLPFIMELLKTLAEHQQLIPLVEKGK

SEQ ID NO: 68903 - protein, 368 aa, Homo sapiens
ARGGSGRCVARAMTGNAGEWCLMESDPGVFTELIKGFGCRGAQVEEIWSLEPENFEKLKPVHGLIFLFKWQPGEEPAGSVVQDSRLDTIFFAKQVINNACATQAIVSVLLNCTHQDVHLGETLSEFKEFSQSFDAAMKGLALSNSDVIRQVHNSFARQQMFEFDTKTSAKEEDAFHFVSYVPVNGRLYELDGLREGPIDLGACNQDDWISAVRPVIEKRIQKDGFSPCCPGWSQTPELKPSACLDLPKWYSEGEIRFNLMAIVSDRKMIYEQKIAELQRQLAEEEPMDTDQGNSMLSAIQSEVAKNQMLIEEEVQKLKRYKIENIRRKHNYLPFIMELLKTLAEHQQLIPLVEKAKEKQNAKKAQETK

SEQ ID NO: 68904 - protein, 355 aa, Homo sapiens
MTGNAGEWCLMESDPGVFTELIKGFGCRGAQVEEIWSLEPENFEKLKPVHGLIFLFKWQPGEEPAGSVVQDSRLDTIFFAKQVINNACATQAIVSVLLNCTHQDVHLGETLSEFKEFSQSFDAAMKGLALSNSDVIRQVHNSFARQQMFEFDTKTSAKEEDAFHFVSYVPVNGRLYELDGLREGPIDLGACNQDDWISAVRPVIEKRIQKDGFSPCCPGWSQTPELKPSACLDLPKWYSEGEIRFNLMAIVSDRKMIYEQKIAELQRQLAEEPMDTDQGNSMLSAIQSEVAKNQMLIEEEVQKLKRYKIENIRRKHNYLPFIMELLKTLAEHQQLIPLVEKAKEKQNAKKAQETK

SEQ ID NO: 68905 - protein, 192 aa, Homo sapiens
MKGLALSNSDVIRQVHNSFARQQMFEFDTKTSAKEEDAFHFVSYVPVNGRLYELDGLREGPIDLGACNQDDWISAVRPVIEKRIQKYSEGEIRFNLMAIVSDRKMIYEQKIAELQRQLAEEPMDTDQGNSMLSAIQSEVAKNQMLIEEEVQKLKRYKIENIRRKHNYLPFIMELLKTLAEHQQLIPLVEKIF

SEQ ID NO: 68906 - protein, 328 aa, Homo sapiens
MTGNAGEWCLMESDPGVFTELIKGFGCRGAQVEEIWSLEPENFEKLKPVHGLIFLFKWQPGEEPAGSVVQDSRLDTIFFAKQVINNACATQAIVSVLLNCTHQDVHLGETLSEFKEFSQSFDAAMKGLALSNSDVIRQVHNSFARQQMFEFDTKTSAKEEDAFHFVSYVPVNGRLYELDGLREGPIDLGACNQDDWISAVRPVIEKRIQKYSEGEIRFNLMAIVSDRKMIYEQKIAELQRQLAEEPMDTDQGNSMLSAIQSEVAKNQMLIEEEVQKLKRYKIENIRRKHNYLPFIMELLKTLAEHQQLIPLVEKAKEKQNAKKAQETK

SEQ ID NO: 68907 - protein, 329 aa, Homo sapiens
MTGNAGEWCLMESDPGVFTELIKGFGCRGAQVEEIWSLEPENFEKLKPVHGLIFLFKWQPGEEPAGSVVQDSRLDTIFFAKQVINNACATQAIVSVLLNCTHQDVHLGETLSEFKEFSQSFDAAMKGLALSNSDVIRQVHNSFARQQMFEFDTKTSAKEEDAFHFVSYVPVNGRLYELDGLREGPIDLGACNQDDWISAVRPVIEKRIQKYSEGEIRFNLMAIVSDRKMIYEQKIAELQRQLAEEEPMDTDQGNSMLSAIQSEVAKNQMLIEEEVQKLKRYKIENIRRKHNYLPFIMELLKTLAEHQQLIPLVEKAKEKQNAKKAQETK

SEQ ID NO: 68908 - protein, 317 aa, Homo sapiens
MESDPGVFTELIKGFGCRGAQVEEIWSLEPENFEKLKPVHGLIFLFKWQPGEEPAGSVVQDSRLDTIFFAKQVINNACATQAIVSVLLNCTHQDVHLGETLSEFKEFSQSFDAAMKGLALSNSDVIRQVHNSFARQQMFEFDTKTSAKEEDAFHFVSYVPVNGRLYELDGLREGPIDLGACNQDDWISAVRPVIEKRIQKYSEGEIRFNLMAIVSDRKMIYEQKIAELQRQLAEEEPMDTDQGNSMLSAIQSEVAKNQMLIEEEVQKLKRYKIENIRRKHNYLPFIMELLKTLAEHQQLIPLVEKFEKHFEKTLLGK

SEQ ID NO: 68909 - protein, 99 aa, Homo sapiens
  VARIANT 1: note = MOD_RES - Any amino acid
XNLMAIVSDRKMIYEQKIAELQRQLAEEPMDTDQGNSMLSAIQSEVAKNQMLIEEEVQKLKRYKIENIRRKHNYLPFIMELLKTLAEHQQLIPLVEKIF

SEQ ID NO: 68910 - protein, 165 aa, Homo sapiens
MVRPGLARMSLPRCWFRYPGWTGAEAGRGRAIVSRRLPSLNPWDAGERHGGLVRICASLGPHKRLPAGLPQCPHLYLAADPLDPQRRQEKSCAALGNDKRRQPDGQRQPQQQQQPHCRRGFQAPALPNPLRVLQGLGRVSMSLGWLERPPALSRAAGCRGAQVEE

SEQ ID NO: 68911 - protein, 218 aa, Homo sapiens
  VARIANT 1: note = MOD_RES - Any amino acid
XLSEFKEFSQSFDAAMKGLALSNSDVIRQVHNSFARQQMFEFDTKTSAKEEDAFHFVSYVPVNGRLYELDGLREGPIDLGACNQDDWISAVRPVIEKRIQKYSEGEIRFNLMAIVSDRKMIYEQKIAELQRQLAEEEPMDTDQGNSMLSAIQSEVAKNQMLIEEEVQKLKRYKIENIRRKHNYLPFIMELLKTLAEHQQLIPLVEKFEKHFEKTLLGK

SEQ ID NO: 68912 - protein, 258 aa, Homo sapiens
MSLGWLERPPALSRAAGCRGAQVEEIWSLEPENFEKLKPVHGLIFLFKWQPGEEPAGSVVQDSRLDTIFFAKQVINNACATQAIVSVLLNCTHQDVHLGETLSEFKEFSQSFDAAMKGLALSNSDVIRQVHNSFARQQMFEFDTKTSAKEEDAFHFVSYVPVNGRLYELDGLREGPIDLGACNQDDWISAVRPVIEKRIQKYSEGEIRFNLMAIVSDRKMIYEQKIAELQRQLAEEPMDTDQGNSMLSAIQSEVAKNQ

SEQ ID NO: 68913 - protein, 183 aa, Homo sapiens
  VARIANT 1: note = MOD_RES - Any amino acid
XQQMFEFDTKTSAKEEDAFHFVSYVPVNGRLYELDGLREGPIDLGACNQDDWISAVRPVIEKRIQKYSEGEIRFNLMAIVSDRKMIYEQKIAELQRQLAEEEPMDTDQGNSMLSAIQSEVAKNQMLIEEEVQKLKRYKIENIRRKHNYLPFIMELLKTLAEHQQLIPLVEKFEKHFEKTLLGK

SEQ ID NO: 68914 - protein, 115 aa, Homo sapiens
  VARIANT 1: note = MOD_RES - Any amino acid
XEGEIRFNLMAIVSDRKMIYEQKIAELQRQLAEEPMDTDQGNSMLSAIQSEVAKNQMLIEEEVQKLKRYKIENIRRKHNYLPFIMELLKTLAEHQQLIPLVEKFEKHFEKTLLGK

SEQ ID NO: 68915 - protein, 193 aa, Homo sapiens
MKGLALSNSDVIRQVHNSFARQQMFEFDTKTSAKEEDAFHFVSYVPVNGRLYELDGLREGPIDLGACNQDDWISAVRPVIEKRIQKYSEGEIRFNLMAIVSDRKMIYEQKIAELQRQLAEEEPMDTDQGNSMLSAIQSEVAKNQMLIEEEVQKLKRYKIENIRRKHNYLPFIMELLKTLAEHQQLIPLVEKIF

SEQ ID NO: 68916 - protein, 165 aa, Homo sapiens
MAPNASCLCVHVRSEEWDLMTFDANPYDSVKKIKEHVRSKTKVPVQDQVLLLGSKILKPRRSLSSYGIDKEKTIHLTLKVVKPSDEELPLFLVESGDEAKRHLLQVRRSSSVAQVKAMIETKTGIIPETQIVTCNGKRLEDGKMMADYGIRKGNLLFLACYCIGG

SEQ ID NO: 68917 - protein, 165 aa, Homo sapiens
MAPNASCLCVHVRSEEWDLMTFDANPYDSVKKIKEHVRSKTKVPVQDQVLLLGSKILKPRRSLSSYGIDKEKTIHLTLKVVKPSDEELPLFLVESGDEAKRHLLQVRRSSSVAQVKAMIETKTGIIPETQIVTCNGKRLEDGKMMADYGIRKGNLLFLASYCIGG

SEQ ID NO: 68918 - protein, 165 aa, Homo sapiens
MAPNASCLCVHVRSEEWDLMTFDANPYDSVKKIKEHVRSKTKVPVQDQVLLLGSKILKPRRSLSSYGTDKEKTIHLTLKVVKPSDEELPLFLVESGDEAKRHLLQVRRSSSVAQVKAMIETKTGIIPETQIVTCNGKRLEDGKMMADYGIRKGNLLFLASYCIGG

SEQ ID NO: 68919 - protein, 165 aa, Homo sapiens; identical to SEQ ID NO: 68918

SEQ ID NO: 68920 - protein, 165 aa, Homo sapiens; identical to SEQ ID NO: 68916

SEQ ID NO: 68921 - protein, 165 aa, Homo sapiens; identical to SEQ ID NO: 68918

SEQ ID NO: 68922 - protein, 165 aa, Homo sapiens; identical to SEQ ID NO: 68917

SEQ ID NO: 68923 - protein, 234 aa, Homo sapiens
MGGCVGAQHDSSGSLNENSEGTGVALGRNQPLKKEKPKWKSDYPMTDGQLRSKRDEFWDTAPAFEGRKEIWDALKAAAHAFESNDHELAQAIIDGANITLPHGALTECYDELGNRYQLPVYCLAPPINMIEEKSDIETLDIPEPPPNSGYECQLRLRLSTGKDLKLVVRSTDTVFHMKRRLHAAEGVEPGSQRWFFSGRPLTDKMKFEELKIPKDYVVQVIVSQPVQNPTPVEN

SEQ ID NO: 68924 - protein, 307 aa, Homo sapiens
MFSFNMFDHPIPRVFQNRFSTQYRCFSVSMLAGPNDRSDVEKGGKIIMPPSALDQLSRLNITYPMLFKLTNKNSDRMTHCGVLEFVADEGICYLPHWMMQNLLLEEGGLVQVESVNLQVATYSKFQPQSPDFLDITNPKAVLENALRNFACLTTGDVIAINYNEKIYELRVMETKPDKAVSIIECDMNVDFDAPLGYKEPERQVQHEESTEGEADHSGYAGELGFRAFSGSGNRLDGKKKGVEPSPSPIKPGDIKRGIPNYEFKLGKITFIRNSRPLVKKVEEDEAGGRFVAFSGEGQSLRKKGRKP

SEQ ID NO: 68925 - protein, 296 aa, Homo sapiens
MFSFNMFDHPIPRVFQNRFSTQYRCFSVSMLAGPNDRSDVEKGGKSRLNITYPMLFKLTNKNSDRMTHCGVLEFVADEGICYLPHWMMQNLLLEEGGLVQVESVNLQVATYSKFQPQSPDFLDITNPKAVLENALRNFACLTTGDVIAINYNEKIYELRVMETKPDKAVSIIECDMNVDFDAPLGYKEPERQVQHEESTEGEADHSGYAGELGFRAFSGSGNRLDGKKKGVEPSPSPIKPGDIKRGIPNYEFKLGKITFIRNSRPLVKKVEEDEAGGRFVAFSGEGQSLRKKGRKP

SEQ ID NO: 68926 - protein, 343 aa, Homo sapiens
MFSFNMFDHPIPRVFQNRFSTQYRCFSVSMLAGPNDRSDVEKGGKIIMPPSALDQLSRLNITYPMLFKLTNKNSDRMTHCGVLEFVADEGICYLPHWVVYRLSLERDGLKSLEVAEVSGSDYFPSPFCGLEVWMMQNLLLEEGGLVQVESVNLQVATYSKFQPQSPDFLDITNPKAVLENALRNFACLTTGDVIAINYNEKIYELRVMETKPDKAVSIIECDMNVDFDAPLGYKEPERQVQHEESTEGEADHSGYAGELGFRAFSGSGNRLDGKKKGVEPSPSPIKPGDIKRGIPNYEFKLGKITFIRNSRPLVKKVEEDEAGGRFVAFSGEGQSLRKKGRKP

SEQ ID NO: 68927 - protein, 266 aa, Homo sapiens
MFSFNMFDHPIPRVFQNRFSTQYRCFSVSMLAGPNDRSDVEKGGKIIMPPSALDQLSRLNITYPMLFKLTNKNSDRMTHCGVLEFVADEGICYLPHWMMQNLLLEEGGLVQVESVNLQVATYSKFQPQSPDFLDITNPKAVLENALRNFACLTTGDVIAINYNEKIYELRVMETKPDKAVSIIECDMNVDFDAPLGYKEPERQVQHEESTEGEADHSGYAGELGFRAFSGSGNRLDGKKKGVEPSPSPIKPGDIKRGIPNYEFKLG

SEQ ID NO: 68928 - protein, 350 aa, Homo sapiens
MLPLPDLDLWPLDRLPSPIKRKPQTLGSLKSSQGIVEETSEEGNSVPASQSVAALTSKRSLVLMPESSAEEITVCPETQLSSSETFDLEREVSPGSRDILDGVRIIMADKEVGNKEDAEKEVAISTFSSSNQVSCPLCDQCFPPTKIERHAMYCNGLMEEDTEVLTRRQKEAKTKSDSGTAAQTSLDIDKNEKCYLCKSLVPFREYQCHVDSCLQLAKADQGDGPEGSGRACSTVEGKWQQRLKNPKEKGHSEGRLLSFLEQSEHKTSDADIKSSETGAFRVPSPGMEEAGCSREMQSSFTRRDLNESPVKSFVSISEATDCLVDFKKQVTVQPGSRTRTKAGRGRRRKF

SEQ ID NO: 68929 - protein, 720 aa, Homo sapiens
MPRRKKKVKEVSESRNLEKKDVETTSSVSVKRKRRLEDAFIVISDSDGEEPKEENGLQKTKTKQSNRAKCLAKRKIAQMTEEEQFALALKMSEQEAREVNSQEEEEEELLRKAIAESLNSCRPSDASATRSRPLATGPSSQSHQEKTTDSGLTEGIWQLVPPSLFKGSHISQGNEAEEREEPWDHTEKTEEEPVSGSSGSWDQSSQPVFENVNVKSFDRCTGHSAEHTQCGKPQESTGRGSAFLKAVQGSGDTSRHCLPTLADAKGLQDTGGTVNYFWGIPFCPDGVDPNQYTKVILCQLEVYQKSLKMAQRQLLNKKGFGEPVLPRPPSLIQNECGQGEQASEKNECISEDMGDEDKEERQESRASDWHSKTKDFQESSIKSLKEKLLLEEEPTTSHGQSSQGIVEETSEEGNSVPASQSVAALTSKRSLVLMPESSAEEITVCPETQLSSSETFDLEREVSPGSRDILDGVRIIMADKEVGNKEDAEKEVAISTFSSSNQVSCPLCDQCFPPTKIERHAMYCNGLMEEDTEVLTRRQKEAKTKSDSGTAAQTSLDIDKNEKCYLCKSLVPFREYQCHVDSCLQLAKADQGDGPEGSGRACSTVEGKWQQRLKNPKEKGHSEGRLLSFLEQSEHKTSDADIKSSETGAFRVPSPGMEEAGCSREMQSSFTRRDLNESPVKSFVSISEATDCLVDFKKQVTVQPGSRTRTKAGRGRRRKF

SEQ ID NO: 68930 - protein, 642 aa, Homo sapiens
MTEEEQFALALKMSEQEAREVNSQEEEEEELLRKAIAESLNSCRPSDASATRSRPLATGPSSQSHQEKTTDSGLTEGIWQLVPPSLFKGSHISQGNEAEEREEPWDHTEKTEEEPVSGSSGSWDQSSQPVFENVNVKSFDRCTGHSAEHTQCGKPQESTGRGSAFLKAVQGSGDTSRHCLPTLADAKGLQDTGGTVNYFWGIPFCPDGVDPNQYTKVILCQLEVYQKSLKMAQRQLLNKKGFGEPVLPRPPSLIQNECGQGEQASEKNECISEDMGDEDKEERQESRASDWHSKTKDFQESSIKSLKEKLLLEEEPTTSHGQSSQGIVEETSEEGNSVPASQSVAALTSKRSLVLMPESSAEEITVCPETQLSSSETFDLEREVSPGSRDILDGVRIIMADKEVGNKEDAEKEVAISTFSSSNQVSCPLCDQCFPPTKIERHAMYCNGLMEEDTEVLTRRQKEAKTKSDSGTAAQTSLDIDKNEKCYLCKSLVPFREYQCHVDSCLQLAKADQGDGPEGSGRACSTVEGKWQQRLKNPKEKGHSEGRLLSFLEQSEHKTSDADIKSSETGAFRVPSPGMEEAGCSREMQSSFTRRDLNESPVKSFVSISEATDCLVDFKKQVTVQPGSRTRTKAGRGRRRKF

SEQ ID NO: 68931 - protein, 719 aa, Homo sapiens
MPRRKKKVKEVSESRNLEKKDVETTSSVSVKRKRRLEDAFIVISDSDGEEPKEENGLQKTKTKQSNRAKCLAKRKIAQMTEEEQFALALKMSEQEAREVNSQEEEEEELLRKAIAESLNSCRPSDASATRSRPLATGPSSQSHQEKTTDSGLTEGIWQLVPPSLFKGSHISQGNEAEEREEPWDHTEKTEEEPVSGSSGSWDQSSQPVFENVNVKSFDRCTGHSAEHTQCGKPQESTGRGSAFLKAVQGSGDTSRHCLPTLADAKGLQDTGGTVNYFWGIPFCPDGVDPNQYTKVILCQLEVYQKSLKMAQRQLLNKKGFGEPVLPRPPSLIQNECGQGEQASEKNECISEDMGDEDKEERQESRASDWHSKTKDFQESSIKSLKEKLLLEEEPTTSHGQSSQGIVEETSEEGNSVPASQSVAALTSKRSLVLMPESSAEEITVCPETQLSSSETFDLEREVSPGSRDILDGVRIIMADKEVGNKEDAEKEVAISTFSSSNQVSCPLCDQCFPPTKIERHAMYCNGLMEEDTVLTRRQKEAKTKSDSGTAAQTSLDIDKNEKCYLCKSLVPFREYQCHVDSCLQLAKADQGDGPEGSGRACSTVEGKWQQRLKNPKEKGHSEGRLLSFLEQSEHKTSDADIKSSETGAFRVPSPGMEEAGCSREMQSSFTRRDLNESPVKSFVSISEATDCLVDFKKQVTVQPGSRTRTKAGRGRRRKF

SEQ ID NO: 68932 - protein, 31 aa, Homo sapiens
MPRRKKKVKEVSESRNLEKKDVETTSSVSVK

SEQ ID NO: 68933 - protein, 89 aa, Homo sapiens
MPRRKKKVKEVSESRNLEKKDVETTSSVSVKRKRRLEDAFIVISDSDGEEPKEENGLQKTKTKQSNRAKCLAKRKIAQMTEEEQFALAL

SEQ ID NO: 68934 - protein, 157 aa, Homo sapiens
MPRRKKKVKEVSESRNLEKKDVETTSSVSVKRKRRLEDAFIVISDSDGEEPKEENGLQKTKTKQSNRAKCLAKRKIAQMTEEEQFALALKMSEQEAREVNSQEEEEEELLRKAIAESLNSCRPSDASATRSRPLATGPSSQSHQEKTTDSGLTEGIW

SEQ ID NO: 68935 - protein, 719 aa, Homo sapiens; identical to SEQ ID NO: 68931

SEQ ID NO: 68936 - protein, 1749 aa, Homo sapiens
MADEEAGGTERMEISAELPQTPQRLASWWDQQVDFYTAFLHHLAQLVPEIYFAEMDPDLEKQEESVQMSIFTPLEWYLFGEDPDICLEKLKHSGAFQLCGRVFKSGETTYSCRDCAIDPTCVLCMDCFQDSVHKNHRYKMHTSTGGGFCDCGDTEAWKTGPFCVNHEPGRAGTIKENSRCPLNEEVIVQARKIFPSVIKYVVEMTIWEEEKELPPELQIREKNERYYCVLFNDEHHSYDHVIYSLQRALDCELAEAQLHTTAIDKEGRRAVKAGAYAACQEAKEDIKSHSENVSQHPLHVEVLHSEIMAHQKFALRLGSWMNKIMSYSSDFRQIFCQACLREEPDSENPCLISRLMLWDAKLYKGARKILHELIFSSFFMEMEYKKLFAMEFVKYYKQLQKEYISDDHDRSISITALSVQMFTVPTLARHLIEEQNVISVITETLLEVLPEYLDRNNKFNFQGYSQDKLGRVYAVICDLKYILISKPTIWTERLRMQFLEGFRSFLKILTCMQGMEEIRRQVGQHIEVDPDWEAAIAIQMQLKNILLMFQEWCACDEELLLVAYKECHKAVMRCSTSFISSSKTVVQSCGHSLETKSYRVSEDLVSIHLPLSRTLAGLHVRLSRLGAVSRLHEFVSFEDFQVEVLVEYPLRCLVLVAQVVAEMWRRNGLSLISQVFYYQDVKCREEMYDKDIIMLQIGASLMDPNKFLLLVLQRYELAEAFNKTISTKDQDLIKQYNTLIEEMLQVLIYIVGERYVPGVGNVTKEEVTMREIIHLLCIEPMPHSAIAKNLPENENNETGLENVINKVATFKKPGVSGHGVYELKDESLKDFNMYFYHYSKTQHSKAEHMQKKRRKQENKDEALPPPPPPEFCPAFSKVINLLNCDIMMYILRTVFERAIDTDSNLWTEGMLQMAFHILALGLLEEKQQLQKAPEEEVTFDFYHKASRLGSSAMNIQMLLEKLKGIPQLEGQKDMITWILQMFDTVKRLREKSCLIVATTSGSESIKNDEITHDKEKAERKRKAEAARLHRQKIMAQMSALQKNFIETHKLMYDNTSEMPGKEDSIMEEESTPAVSDYSRIALGPKRGPSVTEKEVLTCILCQEEQEVKIENNAMVLSACVQKSTALTQHRGKPIELSGEALDPLFMDPDLAYGTYTGSCGHVMHAVCWQKYFEAVQLSSQQRIHVDLFDLESGEYLCPLCKSLCNTVIPIIPLQPQKINSENADALAQLLTLARWIQTVLARISGYNIRHAKGENPIPIFFNQGMGDSTLEFHSILSFGVESSIKYSNSIKEMVILFATTIYRIGLKVPPDERDPRVPMLTWSTCAFTIQAIENLLGDEGKPLFGALQNRQHNGLKALMQFAVAQRITCPQVLIQKHLVRLLSVVLPNIKSEDTPCLLSIDLFHVLVGAVLAFPSLYWDDPVDLQPSSVSSSYNHLYLFHLITMAHMLQILLTVDTGLPLAQVQEDSEEAHSASSFFAEISQYTSGSIGCDIPGWYLWVSLKNGITPYLRCAALFFHYLLGVTPPEELHTNSAEGEYSALCSYLSLPTNLFLLFQEYWDTVRPLLQRWCADPALLNCLKQKNTVVRYPRKRNSLIELPDDYSCLLNQASHFRCPRSADDERKHPVLCLFCGAILCSQNICCQEIVNGEEVGACIFHALHCGAGVCIFLKIRECRVVLVEGKARGCAYPAPYLDEYGETDPGLKRGNPLHLSRERYRKLHLVWQQHCIIEEIARSQETNQMLFGFNWQLL

SEQ ID NO: 68937 - protein, 803 aa, Homo sapiens
MADEEAGGTERMEISAELPQTPQRLASWWDQQVDFYTAFLHHLAQLVPEIYFAEMDPDLEKQEESVQMSIFTPLEWYLFGEDPDICLEKLKHSGAFQLCGRVFKSGETTYSCRDCAIDPTCVLCMDCFQDSVHKNHRYKMHTSTGGGFCDCGDTEAWKTGPFCVNHEPGRAGTIKENSRCPLNEEVIVQARKIFPSVIKYVVEMTIWEEEKELPPELQIREKNERYYCVLFNDEHHSYDHVIYSLQRALDCELAEAQLHTTAIDKEGRRAVKAGAYAACQEAKEDIKSHSENVSQHPLHVEVLHSEIMAHQKFALRLGSWMNKIMSYSSDFRQIFCQACLREEPDSENPCLISRLMLWDAKLYKGARKILHELIFSSFFMEMEYKKLFAMEFVKYYKQLQKEYISDDHDRSISITALSVQMFTVPTLARHLIEEQNVISVITETLLEVLPEYLDRNNKFNFQGYSQDKLGRVYAVICDLKYILISKPTIWTERLRMQFLEGFRSFLKILTCMQGMEEIRRQVGQHIEVDPDWEAAIAIQMQLKNILLMFQEWCACDEELLLVAYKECHKAVMRCSTSFISSSKTVVQSCGHSLETKSYRVSEDLVSIHLPLSRTLAGLHVRLSRLGAVSRLHEFVSFEDFQVEVLVEYPLRCLVLVAQVVAEMWRRNGLSLISQVFYYQDVKCREEMYDKDIIMLQIGASLMDPNKFLLLVLQRYELAEAFNKTISTKDQDLIKQYNTLIEEMLQVLIYIVGERYVPGVGNVTKEEVTMREIIHLLCIEPMPHSAIAKNLPENETRCIRPWSL

SEQ ID NO: 68938 - protein, 1013 aa, Homo sapiens
MADEEAGGTERMEISAELPQTPQRLASWWDQQVDFYTAFLHHLAQLVPEIYFAEMDPDLEKQEESVQMSIFTPLEWYLFGEDPDICLEKLKHSGAFQLCGRVFKSGETTYSCRDCAIDPTCVLCMDCFQDSVHKNHRYKMHTSTGGGFCDCGDTEAWKTGPFCVNHEPGRAGTIKENSRCPLNEEVIVQARKIFPSVIKYVVEMTIWEEEKELPPELQIREKNERYYCVLFNDEHHSYDHVIYSLQRALDCELAEAQLHTTAIDKEGRRAVKAGAYAACQEAKEDIKSHSENVSQHPLHVEVLHSEIMAHQKFALRLGSWMNKIMSYSSDFRQIFCQACLREEPDSENPCLISRLMLWDAKLYKGARKILHELIFSSFFMEMEYKKLFAMEFVKYYKQLQKEYISDDHDRSISITALSVQMFTVPTLARHLIEEQNVISVITETLLEVLPEYLDRNNKFNFQGYSQDKLGRVYAVICDLKYILISKPTIWTERLRMQFLEGFRSFLKILTCMQGMEEIRRQVGQHIEVDPDWEAAIAIQMQLKNILLMFQEWCACDEELLLVAYKECHKAVMRCSTSFISSSKTVVQSCGHSLETKSYRVSEDLVSIHLPLSRTLAGLHVRLSRLGAVSRLHEFVSFEDFQVEVLVEYPLRCLVLVAQVVAEMWRRNGLSLISQVFYYQDVKCREEMYDKDIIMLQIGASLMDPNKFLLLVLQRYELAEAFNKTISTKDQDLIKQYNTLIEEMLQVLIYIVGERYVPGVGNVTKEEVTMREIIHLLCIEPMPHSAIAKNLPENENNETGLENVINKVATFKKPGVSGHGVYELKDESLKDFNMYFYHYSKTQHSKAEHMQKKRRKQENKDEALPPPPPPEFCPAFSKVINLLNCDIMMYILRTVFERAIDTDSNLWTEGMLQMAFHILALGLLEEKQQLQKAPEEEVTFDFYHKASRLGSSAMNIQMLLEKLKGIPQLEGQKDMITWILQMFDTVKRLREKSCLIVATTSGSESIKNDEILHH

SEQ ID NO: 68939 - protein, 575 aa, Homo sapiens
MYAGNIPIYKTESRSRNEQGMDPITRQVGQHIEMEPEWEAAFTLQMKLTHVISMMQDWCASDEKVLIEAYKKCLAVLMQCHGGYTDGEQPITLSICGHSVETIRYCVSQEKVSIHLPVSRLLAGLHVLLSKSEVAYKFPELLPLSELSPPMLIEHPLRCLVLCAQVHAGMWRRNGFSLVNQIYYYHNVKCRREMFDKDVVMLQTGVSMMDPNHFLMIMLSRFELYQIFSTPDYGKRFSSEITHKDVVQQNNTLIEEMLYLIIMLVGERFSPGVGQVNATDEIKREIIHQLSIKPMAHSELVKSLPEDENKETGMESVIEAVAHFKKPGLTGRGMYELKPECAKEFNLYFYHFSRAEQSKAEEAQRKLKRQNREDTALPPPVLPPFCPLFASLVNILQSDVMLCIMGTILQWAVEHNGYAWSESMLQRVLHLIGMALQEEKQHLENVTEEHVVTFTFTQKISKPGEAPKNSPSILAMLETLQNAPYLEVHKDMIRWILKTFNAVKKMRESSPTSPVAETEGTIMEEHNFRVQGTKTKLRGREKQRLPDCAEKRSWLRCLKCSGILLMKTKNSFSRH

SEQ ID NO: 68940 - protein, 1755 aa, Homo sapiens
MASELEPEVQAIDRSLLECSAEEIAGKWLQATDLTREVYQHLAHYVPKIYCRGPNPFPQKEDMLAQHVLLGPMEWYLCGEDPAFGFPKLEQANKPSHLCGRVFKVGEPTYSCRDCAVDPTCVLCMECFLGSIHRDHRYRMTTSGGGGFCDCGDTEAWKEGPYCQKHELNTSEIEEEEDPLVHLSEDVIARTYNIFAITFRYAVEILTWEKESELPADLEMVEKSDTYYCMLFNDEVHTYEQVIYTLQKAVNCTQKEAIGFATTVDRDGRRSVRYGDFQYCEQAKSVIVRNTSRQTKPLKVQVMHSSIVAHQNFGLKLLSWLGSIIGYSDGLRRILCQVGLQEGPDGENSSLVDRLMLSDSKLWKGARSVYHQLFMSSLLMDLKYKKLFAVRFAKNYQQLQRDFMEDDHERAVSVTALSVQFFTAPTLARMLITEENLMSIIIKTFMDHLRHRDAQGRFQFERYTALQAFKFRRVQSLILDLKYVLISKPTEWSDELRQKFLEGFDAFLELLKCMQGMDPITRQVGQHIEMEPEWEAAFTLQMKLTHVISMMQDWCASDEKVLIEAYKKCLAVLMQCHGGYTDGEQPITLSICGHSVETIRYCVSQEKVSIHLPVSRLLAGLHVLLSKSEVAYKFPELLPLSELSPPMLIEHPLRCLVLCAQVHAGMWRRNGFSLVNQIYYYHNVKCRREMFDKDVVMLQTGVSMMDPNHFLMIMLSRFELYQIFSTPDYGKRFSSEITHKDVVQQNNTLIEEMLYLIIMLVGERFSPGVGQVNATDEIKREIIHQLSIKPMAHSELVKSLPEDENKETGMESVIEAVAHFKKPGLTGRGMYELKPECAKEFNLYFYHFSRAEQSKAEEAQRKLKRQNREDTALPPPVLPPFCPLFASLVNILQSDVMLCIMGTILQWAVEHNGYAWSESMLQRVLHLIGMALQEEKQHLENVTEEHVVTFTFTQKISKPGEAPKNSPSILAMLETLQNAPYLEVHKDMIRWILKTFNAVKKMRESSPTSPVAETEGTIMEESSRDKDKAERKRKAEIARLRREKIMAQMSEMQRHFIDENKELFQQTLELDASTSAVLDHSPVASDMTLTALGPAQTQVPEQRQFVTCILCQEEQEVKVESRAMVLAAFVQRSTVLSKNRSKFIQDPEKYDPLFMHPDLSCGTHTSSCGHIMHAHCWQRYFDSVQAKEQRRQQRLRLHTSYDVENGEFLCPLCECLSNTVIPLLLPPRNIFNNRLNFSDQPNLTQWIRTISQQIKALQFLRKEESTPNNASTKNSENVDELQLPEGFRPDFRPKIPYSESIKEMLTTFGTATYKVGLKVHPNEEDPRVPIMCWGSCAYTIQSIERILSDEDKPLFGPLPCRLDDCLRSLTRFAAAHWTVASVSVVQGHFCKLFASLVPNDSHEELPCILDIDMFHLLVGLVLAFPALQCQDFSGISLGTGDLHIFHLVTMAHIIQILLTSCTEENGMDQENPPCEEESAVLALYKTLHQYTGSALKEIPSGWHLWRSVRAGIMPFLKCSALFFHYLNGVPSPPDIQVPGTSHFEHLCSYLSLPNNLICLFQENSEIMNSLIESWCRNSEVKRYLEGERDAIRYPRESNKLINLPEDYSSLINQASNFSCPKSGGDKSRAPTLCLVCGSLLCSQSYCCQTELEGEDVGACTAHTYSCGSGVGIFLRVRECQVLFLAGKTKGCFYSPPYLDDYGETDQGLRRGNPLHLCKERFKKIQKLWHQHSVTEEIGHAQEANQTLVGIDWQHL

SEQ ID NO: 68941 - protein, 1755 aa, Homo sapiens
MASELEPEVQAIDRSLLECSAEEIAGKWLQATDLTREVYQHLAHYVPKIYCRGPNPFPQKEDMLAQHVLLGPMEWYLCGEDPAFGFPKLEQANKPSHLCGRVFKVGEPTYSCRDCAVDPTCVLCMECFLGSIHRDHRYRMTTSGGGGFCDCGDTEAWKEGPYCQKHELNTSEIEEEEDPLVHLSEDVIARTYNIFAITFRYAVEILTWEKESELPADLEMVEKSDTYYCMLFNDEVHTYEQVIYTLQKAVNCTQKEAIGFATTVDRDGRRSVRYGDFQYCEQAKSVIVRNTSRQTKPLKVQVMHSSIVAHQNFGLKLLSWLGSIIGYSDGLRRILCQVGLQEGPDGENSSLVDRLMLSDSKLWKGARSVYHQLFMSSLLMDLKYKKLFAVRFAKNYERLQSDYVTDDHDREFSVADLSVQIFTVPSLARMLITEENLMSIIIKTFMDHLRHRDAQGRFQFERYTALQAFKFRRVQSLILDLKYVLISKPTEWSDELRQKFLEGFDAFLELLKCMQGMDPITRQVGQHIEMEPEWEAAFTLQMKLTHVISMMQDWCASDEKVLIEAYKKCLAVLMQCHGGYTDGEQPITLSICGHSVETIRYCVSQEKVSIHLPVSRLLAGLHVLLSKSEVAYKFPELLPLSELSPPMLIEHPLRCLVLCAQVHAGMWRRNGFSLVNQIYYYHNVKCRREMFDKDVVMLQTGVSMMDPNHFLMIMLSRFELYQIFSTPDYGKRFSSEITHKDVVQQNNTLIEEMLYLIIMLVGERFSPGVGQVNATDEIKREIIHQLSIKPMAHSELVKSLPEDENKETGMESVIEAVAHFKKPGLTGRGMYELKPECAKEFNLYFYHFSRAEQSKAEEAQRKLKRQNREDTALPPPVLPPFCPLFASLVNILQSDVMLCIMGTILQWAVEHNGYAWSESMLQRVLHLIGMALQEEKQHLENVTEEHVVTFTFTQKISKPGEAPKNSPSILAMLETLQNAPYLEVHKDMIRWILKTFNAVKKMRESSPTSPVAETEGTIMEESSRDKDKAERKRKAEIARLRREKIMAQMSEMQRHFIDENKELFQQTLELDASTSAVLDHSPVASDMTLTALGPAQTQVPEQRQFVTCILCQEEQEVKVESRAMVLAAFVQRSTVLSKNRSKFIQDPEKYDPLFMHPDLSCGTHTSSCGHIMHAHCWQRYFDSVQAKEQRRQQRLRLHTSYDVENGEFLCPLCECLSNTVIPLLLPPRNIFNNRLNFSDQPNLTQWIRTISQQIKALQFLRKEESTPNNASTKNSENVDELQLPEGFRPDFRPKIPYSESIKEMLTTFGTATYKVGLKVHPNEEDPRVPIMCWGSCAYTIQSIERILSDEDKPLFGPLPCRLDDCLRSLTRFAAAHWTVASVSVVQGHFCKLFASLVPNDSHEELPCILDIDMFHLLVGLVLAFPALQCQDFSGISLGTGDLHIFHLVTMAHIIQILLTSCTEENGMDQENPPCEEESAVLALYKTLHQYTGSALKEIPSGWHLWRSVRAGIMPFLKCSALFFHYLNGVPSPPDIQVPGTSHFEHLCSYLSLPNNLICLFQENSEIMNSLIESWCRNSEVKRYLEGERDAIRYPRESNKLINLPEDYSSLINQASNFSCPKSGGDKSRAPTLCLVCGSLLCSQSYCCQTELEGEDVGACTAHTYSCGSGVGIFLRVRECQVLFLAGKTKGCFYSPPYLDDYGETDQGLRRGNPLHLCKERFKKIQKLWHQHSVTEEIGHAQEANQTLVGIDWQHL

SEQ ID NO: 68942 - protein, 439 aa, Homo sapiens
MASELEPEVQAIDRSLLECSAEEIAGKWLQATDLTREVYQHLAHYVPKIYCRGPNPFPQKEDMLAQHVLLGPMEWYLCGEDPAFGFPKLEQANKPSHLCGRVFKVGEPTYSCRDCAVDPTCVLCMECFLGSIHRDHRYRMTTSGGGGFCDCGDTEAWKEGPYCQKHELNTSEIEEEEDPLVHLSEDVIARTYNIFAITFRYAVEILTWEKESELPADLEMVEKSDTYYCMLFNDEVHTYEQVIYTLQKAVNCTQKEAIGFATTVDRDGRRSVRYGDFQYCEQAKSVIVRNTSRQTKPLKVQVMHSSIVAHQNFGLKLLSWLGSIIGYSDGLRRILCQVGLQEGPDGENSSLVDRLMLSDSKLWKGARSVYHQLFMSSLLMDLKYKKLFAVRFAKNYERLQSDYVTDDHDREFSVADLSVQIFTVPSLFSISAGRSGSPL

SEQ ID NO: 68943 - protein, 1888 aa, Homo sapiens
MAAAAAAAVGGQQPSQPELPAPGLALDKAATAAHLKAALSRPDNRAGAEELQALLERVLSAERPLAAAAGGEDAAAAGGGGGPGAAEEEALEWCKCLLAGGGGYDEFCAAVRAYDPAALCGLVWTANFVAYRCRTCGISPCMSLCAECFHQGDHTGHDFNMFRSQAGGACDCGDSNVMRESGFCKRHQIKSSSNIPCVPKDLLMMSEFVLPRFIFCLIQYLREGYNEPAADGPSEKDLNKVLQLLEPQISFLEDLTKMGGAMRSVLTQVLTNQQNYKDLTSGLGENACVKKSHEKYLIALKSSGLTYPEDKLVYGVQEPSAGTSSLAVQGFIGATGTLGQVDSSDEDDQDGSQGLGKRKRVKLSSGTKDQSIMDVLKHKSFLEELLFWTIKYEFPQKMVTFLLNMLPDQEYKVAFTKTFVQHYAFIMKTLKKSHESDTMSNRIVHISVQLFSNEELARQVTEECQLLDIMVTVLLYMMESCLIKSELQDEENSLHVVVNCGEALLKNNTYWPLVSDFINILSHQSVAKRFLEDHGLLVTWMNFVSFFQGMNLNKRELNEHVEFESQTYYAAFAAELEACAQPMWGLLSHCKVRETQEYTRNVVRYCLEALQDWFDAINFVDEPAPNQVTFHLPLHRYYAMFLSKAVKCQELDLDSVLPDQEMLMKLMIHPLQIQASLAEIHSNMWVRNGLQIKGQAMTYVQSHFCNSMIDPDIYLLQVCASRLDPDYFISSVFERFKVVDLLTMASQHQNTVLDAEHERSMLEGALTFLVILLSLRLHLGMSDDEILRAEMVAQLCMNDRTHSSLLDLIPENPNPKSGIIPGSYSFESVLSAVADFKAPVFEPGGSMQQGMYTPKAEVWDQEFDPVMVILRTVYRRDVQSAMDRYTAFLKQSGKFPGNPWPPYKKRTSLHPSYKGLMRLLHCKTLHIVLFTLLYKILMDHQNLSEHVLCMVLYLIELGLENSAEEESDEEASVGGPERCHDSWFPGSNLVSNMRHFINYVRVRVPETAPEVKRDSPASTSSDNLGSLQNSGTAQVFSLVAERRKKFQEIINRSSSEANQVVRPKTSSKWSAPGSAPQLTTAILEIKESILSLLIKLHHKLSGKQNSYYPPWLDDIEILIQPEIPKYSHGDGITAVERILLKAASQSRMNKRIIEEICRKVTPPVPPKKVTAAEKKTLDKEERRQKARERQQKLLAEFASRQKSFMETAMDVDSPENDIPMEITTAEPQVSEAVYDCVICGQSGPSSEDRPTGLVVLLQASSVLGQCRDNVEPKKLPISEEEQIYPWDTCAAVHDVRLSLLQRYFKDSSCLLAVSIGWEGGVYVQTCGHTLHIDCHKSYMESLRNDQVLQGFSVDKGEFTCPLCRQFANSVLPCYPGSNVENNPWQRPSNKSIQDLIKEVEELQGRPGAFPSETNLSKEMESVMKDIKNTTQKKYRDYSKTPGSPDNDFLFMYSVARTNLELELIHRGGNLCSGGASTAGKRSCLNQLFHVLALHMRLYSIDSEYNPWRKLTQLEEMNPQLGYEEQQPEVPILYHDVTSLLLIQILMMPQPLRKDHFTCIVKVLFTLLYTQALAALSVKCSEEDRSAWKHAGALKKSTCDAEKSYEVLLSFVISELFKGKLYHEEGTQECAMVNPIAWSPESMEKCLQDFCLPFLRITSLLQHHLFGEDLPSCQEEEEFSVLASCLGLLPTFYQTEHPFISASCLDWPVPAFDIITQWCFEIKSFTERHAEQGKALLIQESKWKLPHLLQLPENYNTIFQYYHRKTCSVCTKVPKDPAVCLVCGTFVCLKGLCCKQQSYCECVLHSQNCGAGTGIFLLINASVIIIIRGHRFCLWGSVYLDAHGEEDRDLRRGKPLYICKERYKVLEQQWISHTFDHINKRWGPHYNGL

SEQ ID NO: 68944 - protein, 709 aa, Homo sapiens
MIASKQRQFTEVFRIMSSTFSQSRFLYAAVVTDSPENDIPMEITTAEPQVSEAVYDCVICGQSGPSSEDRPTGLVVLLQASSVLGQCRDNVEPKKLPISEEEQIYPWDTCAAVHDVRLSLLQRYFKDSSCLLAVSIGWEGGVYVQTCGHTLHIDCHKSYMESLRNDQVLQGFSVDKGEFTCPLCRQFANSVLPCYPGSNVENNPWQRPSNKSIQDLIKEVEELQGRPGAFPSETNLSKEMESVMKDIKNTTQKKYRDYSKTPGSPDNDFLFMYSVARTNLELELIHRGGNLCSGGASTAGKRSCLNQLFHVLALHMRLYSIDSEYNPWRKLTQLEEMNPQLGYEEQQPEVPILYHDVTSLLLIQILMMPQPLRKDHFTCIVKVLFTLLYTQALAALSVKCSEEDRSAWKHAGALKKSTCDAEKSYEVLLSFVISELFKGKLYHEEGTQECAMVNPIAWSPESMEKCLQDFCLPFLRITSLLQHHLFGEDLPSCQEEEEFSVLASCLGLLPTFYQTEHPFISASCLDWPVPAFDIITQWCFEIKSFTERHAEQGKALLIQESKWKLPHLLQLPENYNTIFQYYHRKTCSVCTKVPKDPAVCLVCGTFVCLKGLCCKQQSYCECVLHSQNCGAGTGIFLLINASVIIIIRGHRFCLWGSVYLDAHGEEDRDLRRGKPLYICKERYKVLEQQWISHTFDHINKRWGPHYNGL

SEQ ID NO: 68945 - protein, 1888 aa, Homo sapiens; identical to SEQ ID NO: 68943

SEQ ID NO: 68946 - protein, 1917 aa, Homo sapiens
MAAAAAAAVGGQQPSQPELPAPGLALDKAATAAHLKAALSRPDNRAGAEELQALLERVLSAERPLAAAAGGEDAAAAGGGGGPGAAEEEALEWCKCLLAGGGGYDEFCAAVRAYDPAALCGLVWTANFVAYRCRTCGISPCMSLCAECFHQGDHTGHDFNMFRSQAGGACDCGDSNVMRESGFCKRHQIKSSSNIPCVPKDLLMMSEFVLPRFIFCLIQYLREGYNEPAADGPSEKDLNKVLQLLEPQISFLEDLTKMGGAMRSVLTQVLTNQQNYKDLTSGLGENACVKKSHEKYLIALKSSGLTYPEDKLVYGVQEPSAGTSSLAVQGFIGATGTLGQVDSSDEDDQDGSQGLGKRKRVKLSSGTKDQSIMDVLKHKSFLEELLFWTIKYEFPQKMVTFLLNMLPDQEYKVAFTKTFVQHYAFIMKTLKKSHESDTMSNRIVHISVQLFSNEELARQVTEECQLLDIMVTVLLYMMESCLIKSELQDEENSLHVVVNCGEALLKNNTYWPLVSDFINILSHQSVAKRFLEDHGLLVTWMNFVSFFQGMNLNKRELNEHVEFESQTYYAAFAAELEACAQPMWGLLSHCKVRETQEYTRNVVRYCLEALQDWFDAINFVDEPAPNQVTFHLPLHRYYAMFLSKAVKCQELDLDSVLPDQEMLMKLMIHPLQIQASLAEIHSNMWVRNGLQIKGQAMTYVQSHFCNSMIDPDIYLLQVCASRLDPDYFISSVFERFKVVDLLTMASQHQNTVLDAEHERSMLEGALTFLVILLSLRLHLGMSDDEILRAEMVAQLCMNDRTHSSLLDLIPENPNPKSGIIPGSYSFESVLSAVADFKAPVFEPGGSMQQGMYTPKAEVWDQEFDPVMVILRTVYRRDVQSAMDRYTAFLKQSGKFPGNPWPPYKKRTSLHPSYKGLMRLLHCKTLHIVLFTLLYKILMDHQNLSEHVLCMVLYLIELGLENSAEEESDEEASVGGPERCHDSWFPGSNLVSNMRHFINYVRVRVPETAPEVKRDSPASTSSDNLGSLQNSGTAQVFSLVAERRKKFQEIINRSSSEANQVVRPKTSSKWSAPGSAPQLTTAILEIKESILSLLIKLHHKLSGKQNSYYPPWLDDIEILIQPEIPKYSHGDGITAVERILLKAASQSRMNKRIIEEICRKVTPPVPPKKVTAAEKKTLDKEERRQKARERQQKLLAEFASRQKSFMETAMDVDSPENDIPMEITTAEPQVSEAVYDCVICGQSGPSSEDRPTGLVVLLQASSVLGQCRDNVEPKKLPISEEEQIYPWDTCAAVHDVRLSLLQRYFKDSSCLLAVSIGWEGGVYVQTCGHTLHIDCHKSYMESLRNDQVLQGFSVDKGEFTCPLCRQFANSVLPCYPGSNVENNPWQRPSNKSIQDLIKEVEELQGRPGAFPSETNLSKEMESVMKDIKNTTQKKYRDYSKTPGSPDNDFLFMYSVARTNLELELIHRGGNLCSGGASTAGKRSCLNFCFIIFPFTKSEIILCQYRKSHDKVYPKYQLFHVLALHMRLYSIDSEYNPWRKLTQLEEMNPQLGYEEQQPEVPILYHDVTSLLLIQILMMPQPLRKDHFTCIVKVLFTLLYTQALAALSVKCSEEDRSAWKHAGALKKSTCDAEKSYEVLLSFVISELFKGKLYHEEGTQECAMVNPIAWSPESMEKCLQDFCLPFLRITSLLQHHLFGEDLPSCQEEEEFSVLASCLGLLPTFYQTEHPFISASCLDWPVPAFDIITQWCFEIKSFTERHAEQGKALLIQESKWKLPHLLQLPENYNTIFQYYHRKTCSVCTKVPKDPAVCLVCGTFVCLKGLCCKQQSYCECVLHSQNCGAGTGIFLLINASVIIIIRGHRFCLWGSVYLDAHGEEDRDLRRGKPLYICKERYKVLEQQWISHTFDHINKRWGPHYNGL

SEQ ID NO: 68947 - protein, 425 aa, Homo sapiens
MAGAEGAAGRQSELEPVVSLVDVLEEDEELENEACAVLGGSDSEKCSYSQGSVKRQALYACSTCTPEGEEPAGICLACSYECHGSHKLFELYTKRNFRCDCGNSKFKNLECKLLPDKAKVNSGNKYNDNFFGLYCICKRPYPDPEDEIPDEMIQCVVCEDWFHGRHLGAIPPESGDFQEMVCQACMKRCSFLWAYAAQLAVTKISTEDDGLVRNIDGIGDQEVIKPENGEHQDSTLKEDVPEQGKDDVREVKVEQNSEPCAGSSSESDLQTVFKNESLNAESKSGCKLQELKAKQLIKKDTATYWPLNWRSKLCTCQDCMKMYGDLDVLFLTDEYDTVLAYENKGKIAQATDRSDPLMDTLSSMNRVQQVELICEYNDLKTELKDYLKRFADEGTVVKREDIQQFFEEFQSKKRRRVDGMQYYCS

SEQ ID NO: 68948 - protein, 349 aa, Homo sapiens
MRRALSWAAATPRSAPTLRNFRCDCGNSKFKNLECKLLPDKAKVNSGNKYNDNFFGLYCICKRPYPDPEDEIPDEMIQCVVCEDWFHGRHLGAIPPESGDFQEMVCQACMKRCSFLWAYAAQLAVTKISTEDDGLVRNIDGIGDQEVIKPENGEHQDSTLKEDVPEQGKDDVREVKVEQNSEPCAGSSSESDLQTVFKNESLNAESKSGCKLQELKAKQLIKKDTATYWPLNWRSKLCTCQDCMKMYGDLDVLFLTDEYDTVLAYENKGKIAQATDRSDPLMDTLSSMNRVQQVELICEYNDLKTELKDYLKRFADEGTVVKREDIQQFFEEFQSKKRRRVDGMQYYCS

SEQ ID NO: 68949 - protein, 360 aa, Homo sapiens
MRRALSWAAATPRSAPTLRNFRCDCGNSKFKNLECKLLPDKAKVNSGNKYNDNFFGLYCICKRPYPDPEDEIPDEMIQCVVCEDWFHGRHLGAIPPESGDFQEMVCQACMKRCSFLWAYAAQLAVTKISTEDDGLVRNIDGIGDQEVIKPENGEHQDSTLKEDVPEQGKDDVREVKVEQNSEPCAGSSSESDLQTVFKNESLNAESKSGCKLQELKAKQLIKKDTATYWPLNWRSKLCTCQDCMKMYGDLDVLFLTDEYDTVLAYENKGKIAQATDRSDPLMDTLSSMNRVQQVELICEYNDLKTELKDYLKRFADEGTVVKREDIQQFFEEFQKKEKKSGWDAVLLQLEWSMKLSHSSQ

SEQ ID NO: 68950 - protein, 872 aa, Homo sapiens
MATACKRSGEPQSDDIEASRMKRAAAKHLIERYYHQLTEGCGNEACTNEFCASCPTFLRMDNNAAAIKALELYKINAKLCDPHPSKKGASSAYLENSKGAPNNSCSEIKMNKKGARIDFKDVTYLTEEKVYEILELCREREDYSPLIRVIGRVFSSAEALVQSFRKVKQHTKEELKSLQAKDEDKDEDEKEKAACSAAAMEEDSEASSSRIGDSSQGDNNLQKLGPDDVSVDIDAIRRVYTRLLSNEKIETAFLNALVYLSPNVECDLTYHNVYSRDPNYLNLFIIVMENRNLHSPEYLEMALPLFCKAMSKLPLAAQGKLIRLWSKYNADQIRRMMETFQQLITYKVISNEFNSRNLVNDDDAIVAASKCLKMVYYANVVGGEVDTNHNEEDDEEPIPESSELTLQELLGEERRNKKGPRVDPLETELGVKTLDCRKPLIPFEEFINEPLNEVLEMDKDYTFFKVETENKFSFMTCPFILNAVTKNLGLYYDNRIRMYSERRITVLYSLVQGQQLNPYLRLKVRRDHIIDDALVRLEMIAMENPADLKKQLYVEFEGEQGVDEGGVSKEFFQLVVEEIFNPDIGMFTYDESTKLFWFNPSSFETEGQFTLIGIVLGLAIYNNCILDVHFPMVVYRKLMGKKGTFRDLGDSHPVLYQSLKDLLEYEGNVEDDMMITFQISQTDLFGNPMMYDLKENGDKIPITNENRKEFVNLYSDYILNKSVEKQFKAFRRGFHMVTNESPLKYLFRPEEIELLICGSRNLDFQALEETTEYDGGYTRDSVLIREFWEIVHSFTDEQKRLFLQFTTGTDRAPVGGLGKLKMIIAKNGPDTERLPTSHTCFNVLLLPEYSSKEKLKERLLKAITYAKGFGML

SEQ ID NO: 68951 - protein, 872 aa, Homo sapiens
MRSVCHRSGEPQSDDIEASRMKRAAAKHLIERYYHQLTEGCGNEACTNEFCASCPTFLRMDNNAAAIKALELYKINAKLCDPHPSKKGASSAYLENSKGAPNNSCSEIKMNKKGARIDFKDVTYLTEEKVYEILELCREREDYSPLIRVIGRVFSSAEALVQSFRKVKQHTKEELKSLQAKDEDKDEDEKEKAACSAAAMEEDSEASSSRIGDSSQGDNNLQKLGPDDVSVDIDAIRRVYTRLLSNEKIETAFLNALVYLSPNVECDLTYHNVYSRDPNYLNLFIIVMENRNLHSPEYLEMALPLFCKAMSKLPLAAQGKLIRLWSKYNADQIRRMMETFQQLITYKVISNEFNSRNLVNDDDAIVAASKCLKMVYYANVVGGEVDTNHNEEDDEEPIPESSELTLQELLGEERRNKKGPRVDPLETELGVKTLDCRKPLIPFEEFINEPLNEVLEMDKDYTFFKVETENKFSFMTCPFILNAVTKNLGLYYDNRIRMYSERRITVLYSLVQGQQLNPYLRLKVRRDHIIDDALVRLEMIAMENPADLKKQLYVEFEGEQGVDEGGVSKEFFQLVVEEIFNPDIGMFTYDESTKLFWFNPSSFETEGQFTLIGIVLGLAIYNNCILDVHFPMVVYRKLMGKKGTFRDLGDSHPVLYQSLKDLLEYEGNVEDDMMITFQISQTDLFGNPMMYDLKENGDKIPITNENRKEFVNLYSDYILNKSVEKQFKAFRRGFHMVTNESPLKYLFRPEEIELLICGSRNLDFQALEETTEYDGGYTRDSVLIREFWEIVHSFTDEQKRLFLQFTTGTDRAPVGGLGKLKMIIAKNGPDTERLPTSHTCFNVLLLPEYSSKEKLKERLLKAITYAKGFGML

SEQ ID NO: 68952 - protein, 875 aa, Homo sapiens
MEKLHQCYWKSGEPQSDDIEASRMKRAAAKHLIERYYHQLTEGCGNEACTNEFCASCPTFLRMDNNAAAIKALELYKINAKLCDPHPSKKGASSAYLENSKGAPNNSCSEIKMNKKGARIDFKDVTYLTEEKVYEILELCREREDYSPLIRVIGRVFSSAEALVQSFRKVKQHTKEELKSLQAKDEDKDEDEKEKAACSAAAMEEDSEASSSRIGDSSQGDNNLQKLGPDDVSVDIDAIRRVYTRLLSNEKIETAFLNALVYLSPNVECDLTYHNVYSRDPNYLNLFIIVMENRNLHSPEYLEMALPLFCKAMSKLPLAAQGKLIRLWSKYNADQIRRMMETFQQLITYKVISNEFNSRNLVNDDDAIVAASKCLKMVYYANVVGGEVDTNHNEEDDEEPIPESSELTLQELLGEERRNKKGPRVDPLETELGVKTLDCRKPLIPFEEFINEPLNEVLEMDKDYTFFKVETENKFSFMTCPFILNAVTKNLGLYYDNRIRMYSERRITVLYSLVQGQQLNPYLRLKVRRDHIIDDALVRLEMIAMENPADLKKQLYVEFEGEQGVDEGGVSKEFFQLVVEEIFNPDIGMFTYDESTKLFWFNPSSFETEGQFTLIGIVLGLAIYNNCILDVHFPMVVYRKLMGKKGTFRDLGDSHPVLYQSLKDLLEYEGNVEDDMMITFQISQTDLFGNPMMYDLKENGDKIPITNENRKEFVNLYSDYILNKSVEKQFKAFRRGFHMVTNESPLKYLFRPEEIELLICGSRNLDFQALEETTEYDGGYTRDSVLIREFWEIVHSFTDEQKRLFLQFTTGTDRAPVGGLGKLKMIIAKNGPDTERLPTSHTCFNVLLLPEYSSKEKLKERLLKAITYAKGFGML

SEQ ID NO: 68953 - protein, 852 aa, Homo sapiens
MKRAAAKHLIERYYHQLTEGCGNEACTNEFCASCPTFLRMDNNAAAIKALELYKINAKLCDPHPSKKGASSAYLENSKGAPNNSCSEIKMNKKGARIDFKDVTYLTEEKVYEILELCREREDYSPLIRVIGRVFSSAEALVQSFRKVKQHTKEELKSLQAKDEDKDEDEKEKAACSAAAMEEDSEASSSRIGDSSQGDNNLQKLGPDDVSVDIDAIRRVYTRLLSNEKIETAFLNALVYLSPNVECDLTYHNVYSRDPNYLNLFIIVMENRNLHSPEYLEMALPLFCKAMSKLPLAAQGKLIRLWSKYNADQIRRMMETFQQLITYKVISNEFNSRNLVNDDDAIVAASKCLKMVYYANVVGGEVDTNHNEEDDEEPIPESSELTLQELLGEERRNKKGPRVDPLETELGVKTLDCRKPLIPFEEFINEPLNEVLEMDKDYTFFKVETENKFSFMTCPFILNAVTKNLGLYYDNRIRMYSERRITVLYSLVQGQQLNPYLRLKVRRDHIIDDALVRLEMIAMENPADLKKQLYVEFEGEQGVDEGGVSKEFFQLVVEEIFNPDIGMFTYDESTKLFWFNPSSFETEGQFTLIGIVLGLAIYNNCILDVHFPMVVYRKLMGKKGTFRDLGDSHPVLYQSLKDLLEYEGNVEDDMMITFQISQTDLFGNPMMYDLKENGDKIPITNENRKEFVNLYSDYILNKSVEKQFKAFRRGFHMVTNESPLKYLFRPEEIELLICGSRNLDFQALEETTEYDGGYTRDSVLIREFWEIVHSFTDEQKRLFLQFTTGTDRAPVGGLGKLKMIIAKNGPDTERLPTSHTCFNVLLLPEYSSKEKLKERLLKAITYAKGFGML

SEQ ID NO: 68954 - protein, 852 aa, Homo sapiens; identical to SEQ ID NO: 68953

SEQ ID NO: 68955 - protein, 1083 aa, Homo sapiens
MFSFEGDFKTRPKVSLGGASRKEEKASLLHRTQEERRKREEERRRLKNAIIIQSFIRGYRDRKQQYSIQRSAFDRCATLSQSGGAFPIANGPNLTLLVRQLLFFYKQNEDSKRLIWLYQNLIKHSSLFVKQLDGSERLTCLFQIKRLMSLCCRLLQNCNDDSLNVALPMRMLEVFSSENTYLPVLQDASYVVSVIEQILHYMIHNGYYRSLYLLINSKLPSSIEYSDLSRVPIAKILLENVLKPLHFTYNSCPEGARQQVFTAFTEEFLAAPFTDQIFHFIIPALADAQTVFPYEPFLNALLLIESRCSRKSGGAPWLFYFVLTVGENYLGALSEEGLLVYLRVLQTFLSQLPVSPASASCHDSASDSEEESEEADKPSSPEDGRLSVSYITEECLKKLDTKQQTNTLLNLVWRDSASEEVFTTMASVCHTLMVQHRMMVPKVRLLYSLAFNARFLRHLWFLISSMSTRMITGSMVPLLQVISRGSPMSFEDSSRIIPLFYLFSSLFSHSLISIHDNEFFGDPIEVVGQRQSSMMPFTLEELIMLSRCLRDACLGIIKLAYPETKPEVREEYITAFQSIGVTTSSEMQQCIQMEQKRWIQLFKVITNLVKMLKSRDTRRNFCPPNHWLSEQEDIKADKVTQLYVPASRHVWRFRRMGRIGPLQSTLDVGLESPPLSVSEERQLAVLTELPFVVPFEERVKIFQRLIYADKQEVQGDGPFLDGINVTIRRNYIYEDAYDKLSPENEPDLKKRIRVHLLNAHGLDEAGIDGGGIFREFLNELLKSGFNPNQGFFKTTNEGLLYPNPAAQMLVGDSFARHYYFLGRMLGKALYENMLVELPFAGFFLSKLLGTSADVDIHHLASLDPEVYKNLLFLKSYEDDVEELGLNFTVVNNDLGEAQVVELKFGGKDIPVTSANRIAYIHLVADYRLNRQIRQHCLAFRQGLANVVSLEWLRMFDQQEIQVLISGAQVPISLEDLKSFTNYSGGYSADHPVIKVFWRVVEGFTDEEKRKLLKFVTSCSRPPLLGFKELYPAFCIHNGGSDLERLPTASTCMNLLKLPEFYDETLLRSKLLYAIECAAGFELS

SEQ ID NO: 68956 - protein, 404 aa, Homo sapiens
MFSFEGDFKTRPKVSLGGASRKYSIQRSAFDRCATLSQSGGAFPIANGPNLTLLVRQLLFFYKQNEDSKRLIWLYQNLIKHSSLFVKQLDGSERLTCLFQIKRLMSLCCRLLQNCNDDSLNVALPMRMLEVFSSENTYLPVLQDASYVVSVIEQILHYMIHNGYYRSLYLLINSKLPSSIEYSDLSRVPIAKILLENVLKPLHFTYNSCPEGARQQVFTAFTEEFLAAPFTDQIFHFIIPALADAQTVFPYEPFLNALLLIESRCSRKSGGAPWLFYFVLTVGENYLGALSEEGLLVYLRVLQTFLSQLPVSPASASCHDSASDSEEESEEADKPSSPEDGRLSVSYITEECLKKLDTKQQTNTLLNLVWRDSASEEVFTTMASVCHTLMVQHRMMVPKVRVYK

SEQ ID NO: 68957 - protein, 63 aa, Homo sapiens
MAAPLSVEVEFGSSPGCLFLWSSFAEVVRSSCLTVLRNIESLCLDRRNPGTSGTCSSGSRRIC

SEQ ID NO: 68958 - protein, 63 aa, Homo sapiens
MAAPLSVEVEFGGGAELLFDGIKKHRVTLPGQEEPWDIRNLLIWIKKNLLKERPELFIQGDSV

SEQ ID NO: 68959 - protein, 101 aa, Homo sapiens
MAAPLSVEVEFGGGAELLFDGIKKHRVTLPGQEEPWDIRNLLIWIKKNLLKERPELFIQGDSVRPGILVLINDADWELLGELDYQLQDQDSVLFISTLHGG

SEQ ID NO: 68960 - protein, 146 aa, Homo sapiens
MAAPLSVEVEFGGGAELLFDGIKKHRVTLPGQEEPWDIRNLLIWIKKNLLKERPELFIQGDSVRPGILVLINDADWELLVSTLGDIPPPAPALAASVGKRWASPQAHIEWLGNPPPHSSPTLRLLESPTPGEEGMGSWGHGSTPPS

SEQ ID NO: 68961 - protein, 785 aa, Homo sapiens
MPGVIPSESNGLSRGSPSKKNRLSLKFFQKKETKRALDFTDSQENEEKASEYRASEIDQVVPAAQSSPINCEKRENLLPFVGLNNLGNTCYLNSILQVLYFCPGFKSGVKHLFNIISRKKEALKDEANQKDKGNCKEDSLASYELICSLQSLIISVEQLQASFLLNPEKYTDELATQPRRLLNTLRELNPMYEGYLQHDAQEVLQCILGNIQETCQLLKKEEVKNVAELPTKVEEIPHPKEEMNGINSIEMDSMRHSEDFKEKLPKGNGKRKSDTEFGNMKKKVKLSKEHQSLEENQRQTRSKRKATSDTLESPPKIIPKYISENESPRPSQKKSRVKINWLKSATKQPSILSKFCSLGKITTNQGVKGQSKENECDPEEDLGKCESDNTTNGCGLESPGNTVTPVNVNEVKPINKGEEQIGFELVEKLFQGQLVLRTRCLECESLTERREDFQDISVPVQEDELSKVEESSEISPEPKTEMKTLRWAISQFASVERIVGEDKYFCENCHHYTEAERSLLFDKMPEVITIHLKCFAASGLEFDCYGGGLSKINTPLLTPLKLSLEEWSTKPTNDSYGLFAVVMHSGITISSGHYTASVKVTDLNSLELDKGNFVVDQMCEIGKPEPLNEEEARGVVENYNDEEVSIRVGGNTQPSKVLNKKNVEAIGLLGGQKSKADYELYNKASNPDKVASTAFAENRNSETSDTTGTHESDRNKESSDQTGINISGFENKISYVVQSLKEYEGKWLLFDDSEVKVTEEKDFLNSLSPSTSPTSTPYLLFYKKL

SEQ ID NO: 68962 - protein, 785 aa, Homo sapiens; identical to SEQ ID NO: 68961

SEQ ID NO: 68963 - protein, 87 aa, Homo sapiens
MPGVIPSESNGLSRGSPSKKNRLSLKFFQKKETKRALDFTDSQENEEKASEYRASEIDQVVPAAQSSPINCEKRENLLPFVGLNNLG

SEQ ID NO: 68964 - protein, 186 aa, Homo sapiens
MPGVIPSESNGLSRGSPSKKNRLSLKFFQKKETKRALDFTDSQENEEKASEYRASEIDQVVPAAQSSPINCEKRENLLPFVGLNNLGNTCYLNSILQVLYFCPGFKSGVKHLFNIISRKKEALKDEANQKDKGNCKEDSLASYELICSLQSLIISVEQLQASFLLNPEKYTDELATQPRRLLNTLR

SEQ ID NO: 68965 - protein, 798 aa, Homo sapiens
MALHSPQYIFGDFSPDEFNQFFVTPRSSVELPPYSGTVLCGTQAVDKLPDGQEYQRIEFGVDEVIEPSDTLPRTPSYSISSTLNPQAPEFILGCTASKITPDGITKEASYGSIDCQYPGSALALDGSSNVEAEVLENDGVSGGLGQRERKKKKKRPPGYYSYLKDGGDDSISTEALVNGHANSAVPNSVSAEDAEFMGDMPPSVTPRTCNSPQNSTDSVSDIVPDSPFPGALGSDTRTAGQPEGGPGADFGQSCFPAEAGRDTLSRTAGAQPCVGTDTTENLGVANGQILESSGEGTATNGVELHTTESIDLDPTKPESASPPADGTGSASGTLPVSQPKSWASLFHDSKPSSSSPVAYVETKYSPPAISPLVSEKQVEVKEGLVPVSEDPVAIKIAELLENVTLIHKPVSLQPRGLINKGNWCYINATLQALVACPPMYHLMKFIPLYSKVQRPCTSTPMIDSFVRLMNEFTNMPVPPKPRQALGDKIVRDIRPGAAFEPTYIYRLLTVNKSSLSEKGRQEDAEEYLGFILNGLHEEMLNLKKLLSPSNEKLTISNGPKNHSVNEEEQEEQGEGSEDEWEQVGPRNKTSVTRQADFVQTPITGIFGGHIRSVVYQQSSKESATLQPFFTLQLDIQSDKIRTVQDALESLVARESVQGYTTKTKQEVEISRRVTLEKLPPVLVLHLKRFVYEKTGGCQKLIKNIEYPVDLEISKELLSPGVKNKNFKCHRTYRLFAVVYHHGNSATGGHYTTDVFQIGLNGWLRIDDQTVKVINQYQVVKPTAERTAYLLYYRRVDLL

SEQ ID NO: 68966 - protein, 228 aa, Homo sapiens
MYHLMKFIPLYSKVQRPCTSTPMIDSFVRLMNEFTNMPVPPKPRQALGDKIVRDIRPGAAFEPTYIYRLLTVNKSSLSEKGRQEDAEEYLGFILNGLHEEMLNLKKLLSPSNEKLTISNGPKNHSVNEEEQEEQGEGSEDEWEQVGPRNKTSVTRQADFVQTPITGFWWTHQVCGLPAEFKRICHFAAIFHVAVGYPVRQDTHSPGCTGELGGKRICPRLYHKNQTRG

SEQ ID NO: 68967 - protein, 62 aa, Homo sapiens
MALHSPQYIFGDFSPDEFNQFFVTPRSSVEDKNIRELSLVSMKSLNPVTLCREPPATVFQAH

SEQ ID NO: 68968 - protein, 963 aa, Homo sapiens
MAVAPRLFGGLCFRFRDQNPEVAVEGRLPISHSCVGCRRERTAMATVAANPAAAAAAVAAAAAVTEDREPQHEELPGLDSQWRQIENGESGRERPLRAGESWFLVEKHWYKQWEAYVQGGDQDSSTFPGCINNATLFQDEINWRLKEGLVEGEDYVLLPAAAWHYLVSWYGLEHGQPPIERKVIELPNIQKVEVYPVELLLVRHNDLGKSHTVQFSHTDSIGLVLRTARERFLVEPQEDTRLWAKNSEGSLDRLYDTHITVLDAALETGQLIIMETRKKDGTWPSAQLHVMNNNMSEEDEDFKGQPGICGLTNLGNTCFMNSALQCLSNVPQLTEYFLNNCYLEELNFRNPLGMKGEIAEAYADLVKQAWSGHHRSIVPHVFKNKVGHFASQFLGYQQHDSQELLSFLLDGLHEDLNRVKKKEYVELCDAAGRPDQEVAQEAWQNHKRRNDSVIVDTFHGLFKSTLVCPDCGNVSVTFDPFCYLSVPLPISHKRVLEVFFIPMDPRRKPEQHRLVVPKKGKISDLCVALSKHTGISPERMMVADVFSHRFYKLYQLEEPLSSILDRDDIFVYEVSGRIEAIEGSREDIVVPVYLRERTPARDYNNSYYGLMLFGHPLLVSVPRDRFTWEGLYNVLMYRLSRYVTKPNSDDEDDGDEKEDDEEDKDDVPGPSTGGSLRDPEPEQAGPSSGVTNRCPFLLDNCLGTSQWPPRRRRKQLFTLQTVNSNGTSDRTTSPEEVHAQPYIAIDWEPEMKKRYYDEVEAEGYVKHDCVGYVMKKAPVRLQECIELFTTVETLEKENPWYCPSCKQHQLATKKLDLWMLPEILIIHLKRFSYTKFSREKLDTLVEFPIRDLDFSEFVIQPQNESNPELYKYDLIAVSNHYGGMRDGHYTTFACNKDSGQWHYFDDNSVSPVNENQIESKAAYVLFYQRQDVARRLLSPAGSSGAPASPACSSPPSSEFMDVN

SEQ ID NO: 68969 - protein, 920 aa, Homo sapiens
MATVAANPAAAAAAVAAAAAVTEDREPQHEELPGLDSQWRQIENGESGRERPLRAGESWFLVEKHWYKQWEAYVQGGDQDSSTFPGCINNATLFQDEINWRLKEGLVEGEDYVLLPAAAWHYLVSWYGLEHGQPPIERKVIELPNIQKVEVYPVELLLVRHNDLGKSHTVQFSHTDSIGLVLRTARERFLVEPQEDTRLWAKNSEGSLDRLYDTHITVLDAALETGQLIIMETRKKDGTWPSAQLHVMNNNMSEEDEDFKGQPGICGLTNLGNTCFMNSALQCLSNVPQLTEYFLNNCYLEELNFRNPLGMKGEIAEAYADLVKQAWSGHHRSIVPHVFKNKVGHFASQFLGYQQHDSQELLSFLLDGLHEDLNRVKKKEYVELCDAAGRPDQEVAQEAWQNHKRRNDSVIVDTFHGLFKSTLVCPDCGNVSVTFDPFCYLSVPLPISHKRVLEVFFIPMDPRRKPEQHRLVVPKKGKISDLCVALSKHTGISPERMMVADVFSHRFYKLYQLEEPLSSILDRDDIFVYEVSGRIEAIEGSREDIVVPVYLRERTPARDYNNSYYGLMLFGHPLLVSVPRDRFTWEGLYNVLMYRLSRYVTKPNSDDEDDGDEKEDDEEDKDDVPGPSTGGSLRDPEPEQAGPSSGVTNRCPFLLDNCLGTSQWPPRRRRKQLFTLQTVNSNGTSDRTTSPEEVHAQPYIAIDWEPEMKKRYYDEVEAEGYVKHDCVGYVMKKAPVRLQECIELFTTVETLEKENPWYCPSCKQHQLATKKLDLWMLPEILIIHLKRFSYTKFSREKLDTLVEFPIRDLDFSEFVIQPQNESNPELYKYDLIAVSNHYGGMRDGHYTTFACNKDSGQWHYFDDNSVSPVNENQIESKAAYVLFYQRQDVARRLLSPAGSSGAPASPACSSPPSSEFMDVN

SEQ ID NO: 68970 - protein, 370 aa, Homo sapiens
MEILMTVSKFASICTMGANASALEKEIGPEQFPVNEHYFGLVNFGNTCYCNSVLQALYFCRPFREKVLAYKSQPRKKESLLTCLADLFHSIATQKKKVGVIPPKKFITRLRKENELFDNYMQQDAHEFLNYLLNTIADILQEERKQEKQNGRLPNGNIDNENNNSTPDPTWVHEIFQGTLTNETRCLTCETISSKDEDFLDLSVDVEQNTSITHCLRGFSNTETLCSEYKYYCEECRSKQEAHKRMKVKKLPMILALHLKRFKYMDQLHRYTKLSYRVVFPLELRLFNTSGDATNPDRMYDLVAVVVHCGSGPNRGHYIAIVKSHDFWLLFDDDIVEKIDAQAIEEFYGLTSDISKNSESGYILFYQSRD

SEQ ID NO: 68971 - protein, 863 aa, Homo sapiens
MQRRGALFGMPGGSGGRKMAAGDIGELLVPHMPTIRVPRSGDRVYKNECAFSYDSPNSEGGLYVCMNTFLAFGREHVERHFRKTGQSVYMHLKRHVREKVRGASGGALPKRRNSKIFLDLDTDDDLNSDDYEYEDEAKLVIFPDHYEIALPNIEELPALVTIACDAVLSSKSPYRKQDPDTWENELPVSKYANNLTQLDNGVRIPPSGWKCARCDLRENLWLNLTDGSVLCGKWFFDSSGGNGHALEHYRDMGYPLAVKLGTITPDGADVYSFQEEEPVLDPHLAKHLAHFGIDMLHMHGTENGLQDNDIKLRVSEWEVIQESGTKLKPMYGPGYTGLKNLGNSCYLSSVMQAIFSIPEFQRAYVGNLPRIFDYSPLDPTQDFNTQMTKLGHGLLSGQYSKPPVKSELIEQVMKEEHKPQQNGISPRMFKAFVSKSHPEFSSNRQQDAQEFFLHLVNLVERNRIGSENPSDVFRFLVEERIQCCQTRKVRYTERVDYLMQLPVAMEAATNKDELIAYELTRREAEANRRPLPELVRAKIPFSACLQAFSEPENVDDFWSSALQAKSAGVKTSRFASFPEYLVVQIKKFTFGLDWVPKKFDVSIDMPDLLDINHLRARGLQPGEEELPDISPPIVIPDDSKDRLMNQLIDPSDIDESSVMQLAEMGFPLEACRKAVYFTGNMGAEVAFNWIIVHMEEPDFAEPLTMPGYGGAASAGASVFGASGLDNQPPEEIVAIITSMGFQRNQAIQALRATNNNLERALDWIFSHPEFEEDSDFVIEMENNANANIISEAKPEGPRVKDGSGTYELFAFISHMGTSTMSGHYICHIKKEGRWVIYNDHKVCASERPPKDLGYMYFYRRIPS

SEQ ID NO: 68972 - protein, 494 aa, Homo sapiens
MPLYSVTVKWGKEKFEGVELNTDEPPMVFKAQLFALTGVQPARQKVMVKGGTLKDDDWGNIKIKNGMTLLMMGSADALPEEPSAKTVFVEDMTEEQLASAMELPCGLTNLGNTCYMNATVQCIRSVPELKDALKRYAGALRASGEMASAQYITAALRDLFDSMDKTSSSIPPIILLQFLHMAFPQFAEKGEQGQYLQQDANECWIQMMRVLQQKLEAIEDDSVKETDSSSASAATPSKKKSLIDQFFGVEFETTMKCTESEEEEVTKGKENQLQLSCFINQEVKYLFTGLKLRLQEEITKQSPTLQRNALYIKSSKISRLPAYLTIQMVRFFYKEKESVNAKVLKDVKFPLMLDMYELCTPELQEKMVSFRSKFKDLEDKKVNQQPNTSDKKSSPQKEVKYEPFSFADDIGSNNCGYYDLQAVLTHQGRSSSSGHYVSWVKRKQDEWIKFDDDKVSIVTPEDILRLSGGGDWHIAYVLLYGPRRVEIMEEESEQ

SEQ ID NO: 68973 - protein, 459 aa, Homo sapiens
MPLYSVTVKWGKEKFEGVELNTDEPPMVFKAQLFALTGVQPARQKVMVKGGTLKDDDWGNIKIKNMELPCGLTNLGNTCYMNATVQCIRSVPELKDALKRYAGALRASGEMASAQYITAALRDLFDSMDKTSSSIPPIILLQFLHMAFPQFAEKGEQGQYLQQDANECWIQMMRVLQQKLEAIEDDSVKETDSSSASAATPSKKKSLIDQFFGVEFETTMKCTESEEEEVTKGKENQLQLSCFINQEVKYLFTGLKLRLQEEITKQSPTLQRNALYIKSSKISRLPAYLTIQMVRFFYKEKESVNAKVLKDVKFPLMLDMYELCTPELQEKMVSFRSKFKDLEDKKVNQQPNTSDKKSSPQKEVKYEPFSFADDIGSNNCGYYDLQAVLTHQGRSSSSGHYVSWVKRKQDEWIKFDDDKVSIVTPEDILRLSGGGDWHIAYVLLYGPRRVEIMEEESEQ

SEQ ID NO: 68974 - protein, 483 aa, Homo sapiens
MPLYSVTVKWGKEKFEGVELNTDEPPMVFKAQLFALTGVQPARQKVMVKGGTLKGMTLLMMGSADALPEEPSAKTVFVEDMTEEQLASAMELPCGLTNLGNTCYMNATVQCIRSVPELKDALKRYAGALRASGEMASAQYITAALRDLFDSMDKTSSSIPPIILLQFLHMAFPQFAEKGEQGQYLQQDANECWIQMMRVLQQKLEAIEDDSVKETDSSSASAATPSKKKSLIDQFFGVEFETTMKCTESEEEEVTKGKENQLQLSCFINQEVKYLFTGLKLRLQEEITKQSPTLQRNALYIKSSKISRLPAYLTIQMVRFFYKEKESVNAKVLKDVKFPLMLDMYELCTPELQEKMVSFRSKFKDLEDKKVNQQPNTSDKKSSPQKEVKYEPFSFADDIGSNNCGYYDLQAVLTHQGRSSSSGHYVSWVKRKQDEWIKFDDDKVSIVTPEDILRLSGGGDWHIAYVLLYGPRRVEIMEEESEQ

SEQ ID NO: 68975 - protein, 459 aa, Homo sapiens; identical to SEQ ID NO: 68973

SEQ ID NO: 68976 - protein, 372 aa, Homo sapiens
MSKAFGLLRQICQSILAESSQSPADLEEKKEEDSNMKREQPRERPRAWDYPHGLVGLHNIGQTCCLNSLIQVFVMNVDFTRILKRITVPRGADEQRRSVPFQMLLLLEKMQDSRQKAVRPLELAYCLQKCNVPLFVQHDAAQLYLKLWNLIKDQITDVHLVERLQALYTIRVKDSLICVDCAMESSRNSSMLTLPLSLFDVDSKPLKTLEDALHCFFQPRELSSKSKCFCENCGKKTRGKQVLKLTHLPQTLTIHLMRFSIRNSQTRKICHSLYFPQSLDFSQILPMKRESCDAEEQSGGQYELFAVIAHVGMADSGHYCVYIRNAVDGKWFCFNDSNICLVSWEDIQCTYGNPNYHWQETAYLLVYMKMEC

SEQ ID NO: 68977 - protein, 243 aa, Homo sapiens
TIRVKDSLICVDCAMESSRNSSMLTLPLSLFDVDSKPLKTLEDALHCFFQPRELSSKSKCFCENCGKKTRGKQVLKLTHLPQTLTIHLMRFSIRNSQTRKICHSLYFPQSLDFSQILPMKRESCDAEEQSGGQYELFAVIAHVGMADSGHYCVYIRNAVDGKWFCFNDSNICLVSWEDIQCTYGNPNYHWPPFLCHACILIEDGEYLRLFRPANIRQFTSREETWVECWCVLTLQCKQLQQVW

SEQ ID NO: 68978 - protein, 565 aa, Homo sapiens
MPQASEHRLGRTREPPVNIQPRVGSKLPFAPRARSKERRNPASGPNPMLRPLPPRPGLPDERLKKLELGRGRTSGPRPRGPLRADHGVPLPGSPPPTVALPLPSRTNLARSKSVSSGDLRPMGIALGGHRGTGELGAALSRLALRPEPPTLRRSTSLRRLGGFPGPPTLFSIRTEPPASHGSFHMISARSSEPFYSDDKMAHHTLLLGSGHVGLRNLGNTCFLNAVLQCLSSTRPLRDFCLRRDFRQEVPGGGRAQELTEAFADVIGALWHPDSCEAVNPTRFRAVFQKYVPSFSGYSQQDAQEFLKLLMERLHLEINRRGRRAPPILANGPVPSPPRRGGALLEEPELSDDDRANLMWKRYLEREDSKIVDLFVGQLKSCLKCQACGYRSTTFEVFCDLSLPIPKKGFAGGKVSLRDCFNLFTKEEELESENAPVCDRCRQKTRSTKKLTVQRFPRILVLHLNRFSASRGSIKKSSVGVDFPLQRLSLGDFASDKAGSPVYQLYALCNHSGSVHYGHYTALCRCQTGWHVYNDSRVSPVSENQVASSEGYVLFYQLMQEPPRCL

SEQ ID NO: 68979 - protein, 551 aa, Homo sapiens
MPQASEHRLGRTREPPVNIQPRVGSKLPFAPRARSKERRNPASGPNPMLRPLPPRPGLPDERLKKLELGRGRTSGPRPRGPLRADHGVPLPGSPPPTVALPLPSRTNLARSKSVSSGDLRPMGIALGGHRGTGELGAALSRLALRPEPPTLRRSTSLRRLGGFPGPPTLFSIRTEPPASHGSFHMISARSSEPFYSDDKMAHHTLLLGSGHVGLRNLGNTCFLNAVLQCLSSTRPLRDFCLRRDFRQEVPGGGRAQELTEAFADVIGALWHPDSCEAVNPTRFRAVFQKYVPSFSGYSQQDAQEFLKLLMERLHLEINRRGRRAPPILANGPVPSPPRRGGALLEEPELSDDDRANLMWKRYLEREDSKIVDLFVGQLKSCLKCQACGYRSTTFEVFCDLSLPIPKKGFAGGKVSLRDCFNLFTKEEELESENAPVCDRCRQKTRSTKKLTVQRFPRILVLHLNRFSASRGSIKKSSVGVDFPLQRLSLGDFASDKAGSVHYGHYTALCRCQTGWHVYNDSRVSPVSENQVASSEGYVLFYQLMQEPPRCL

SEQ ID NO: 68980 - protein, 565 aa, Homo sapiens; identical to SEQ ID NO: 68978

SEQ ID NO: 68981 - protein, 525 aa, Homo sapiens
MVSRPEPEGEAMDAELAVAPPGCSHLGSFKVDNWKQNLRAIYQCFVWSGTAEARKRKAKSCICHVCGVHLNRLHSCLYCVFFGCFTKKHIHEHAKAKRHNLAIDLMYGGIYCFLCQDYIYDKDMEIIAKEEQRKAWKMQGVGEKFSTWEPTKRELELLKHNPKRRKITSNCTIGLRGLINLGNTCFMNCIVQALTHTPLLRDFFLSDRHRCEMQSPSSCLVCEMSSLFQEFYSGHRSPHIPYKLLHLVWTHARHLAGYEQQDAHEFLIAALDVLHRHCKGDDNGKKANNPNHCNCIIDQIFTGGLQSDVTCQVCHGVSTTIDPFWDISLDLPGSSTPFWPLSPGSEGNVVNGESHVSGTTTLTDCLRRFTRPEHLGSSAKIKCSGCHSYQESTKQLTMKKLPIVACFHLKRFEHSAKLRRKITTYVSFPLELDMTPFMASSKESRMNGQYQQPTDSLNNDNKYSLFAVVNHQGTLESGHYTSFIRQHKDQWFKCDDAIITKASIKDVLDSEGYLLFYHKQFLEYE

SEQ ID NO: 68982 - protein, 593 aa, Homo sapiens
AAAARGRCLPCSLPSAIAQPHLCPASALCSRRPGLGQPGQPPSSPHAALASSSPPSPPPPARGRALPPMVSRPEPEGEAMDAELAVAPPGCSHLGSFKVDNWKQNLRAIYQCFVWSGTAEARKRKAKSCICHVCGVHLNRLHSCLYCVFFGCFTKKHIHEHAKAKRHNLAIDLMYGGIYCFLCQDYIYDKDMEIIAKEEQRKAWKMQGVGEKFSTWEPTKRELELLKHNPKRRKITSNCTIGLRGLINLGNTCFMNCIVQALTHTPLLRDFFLSDRHRCEMQSPSSCLVCEMSSLFQEFYSGHRSPHIPYKLLHLVWTHARHLAGYEQQDAHEFLIAALDVLHRHCKGDDNGKKANNPNHCNCIIDQIFTGGLQSDVTCQVCHGVSTTIDPFWDISLDLPGSSTPFWPLSPGSEGNVVNGESHVSGTTTLTDCLRRFTRPEHLGSSAKIKCSGCHSYQESTKQLTMKKLPIVACFHLKRFEHSAKLRRKITTYVSFPLELDMTPFMASSKESRMNGQYQQPTDSLNNDNKYSLFAVVNHQGTLESGHYTSFIRQHKDQWFKCDDAIITKASIKDVLDSEGYLLFYHKQFLEYE

SEQ ID NO: 68983 - protein, 513 aa, Homo sapiens
MAPGWPSLSAGSRQEAPQLAAGGSAYQAVGRQFQPRATALQGPSQAKSCICHVCGVHLNRLHSCLYCVFFGCFTKKHIHEHAKAKRHNLAIDLMYGGIYCFLCQDYIYDKDMEIIAKEEQRKAWKMQGVGEKFSTWEPTKRELELLKHNPKRRKITSNCTIGLRGLINLGNTCFMNCIVQALTHTPLLRDFFLSDRHRCEMQSPSSCLVCEMSSLFQEFYSGHRSPHIPYKLLHLVWTHARHLAGYEQQDAHEFLIAALDVLHRHCKGDDNGKKANNPNHCNCIIDQIFTGGLQSDVTCQVCHGVSTTIDPFWDISLDLPGSSTPFWPLSPGSEGNVVNGESHVSGTTTLTDCLRRFTRPEHLGSSAKIKCSGCHSYQESTKQLTMKKLPIVACFHLKRFEHSAKLRRKITTYVSFPLELDMTPFMASSKESRMNGQYQQPTDSLNNDNKYSLFAVVNHQGTLESGHYTSFIRQHKDQWFKCDDAIITKASIKDVLDSEGYLLFYHKQFLEYE

SEQ ID NO: 68984 - protein, 2620 aa, Homo sapiens
MESEEEQHMTTLLCMGFSDPATIRKALRLAKNDINEAVALLTNERPGLDYGGYEPMDSGGGPSPGPGGGPRGDGGGDGGGGGPSRGGSTGGGGGFDPPPAYHEVVDAEKNDENGNCSGEGIEFPTTNLYELESRVLTDHWSIPYKREESLGKCLLASTYLARLGLSESDENCRRFMDRCMPEAFKKLLTSSAVHKWGTEIHEGIYNMLMLLIELVAERIKQDPIPTGLLGVLTMAFNPDNEYHFKNRMKVSQRNWAEVFGEGNMFAVSPVSTFQKEPHGWVVDLVNKFGELGGFAAIQAKLHSEDIELGAVSALIQPLGVCAEYLNSSVVQPMLDPVILTTIQDVRSVEEKDLKDKRLVSIPELLSAVKLLCMRFQPDLVTIVDDLRLDILLRMLKSPHFSAKMNSLKEVTKLIEDSTLSKSVKNAIDTDRLLDWLVENSVLSIALEGNIDQAQYCDRIKGIIELLGSKLSLDELTKIWKIQSGQSSTVIENIHTIIAAAAVKFNSDQLNHLFVLIQKSWETESDRVRQKLLSLIGRIGREARFETTSGKVLDVLWELAHLPTLPSSLIQQALEEHLTILSDAYAVKEAIKRSYIIKCIEDIKRPGEWSGLEKNKKDGFKSSQLNNPQFVWVVPALRQLHEITRSFIKQTYQKQDKSIIQDLKKNFEIVKLVTGSLIACHRLAAAVAGPGGLSGSTLVDGRYTYREYLEAHLKFLAFFLQEATLYLGWNRAKEIWECLVTGQDVCELDREMCFEWFTKGQHDLESDVQQQLFKEKILKLESYEITMNGFNLFKTFFENVNLCDHRLKRQGAQLYVEKLELIGMDFIWKIAMESPDEEIANEAIQLIINYSYINLNPRLKKDSVSLHKKFIADCYTRLEAASSALGGPTLTHAVTRATKMLTATAMPTVATSVQSPYRSTKLVIIERLLLLAERYVITIEDFYSVPRTILPHGASFHGHLLTLNVTYESTKDTFTVEAHSNETIGSVRWKIAKQLCSPVDNIQIFTNDSLLTVNKDQKLLHQLGFSDEQILTVKTSGSGTPSGSSADSSTSSSSSSSGVFSSSYAMEQEKSLPGVVMALVCNVFDMLYQLANLEEPRITLRVRKLLLLIPTDPAIQEALDQLDSLGRKKTLLSESSSQSSKSPSLSSKQQHQPSASSILESLFRSFAPGMSTFRVLYNLEVLSSKLMPTADDDMARSCAKSFCENFLKAGGLSLVVNVMQRDSIPSEVDYETRQGVYSICLQLARFLLVGQTMPTLLDEDLTKDGIEALSSRPFRNVSRQTSRQMSLCGTPEKSSYRQLSVSDRSSIRVEEIIPAARVAIQTMEVSDFTSTVACFMRLSWAAAAGRLDLVGSSQPIKESNSLCPAGIRNRLSSSGSNCSSGSEGEPVALHAGICVRQQSVSTKDSLIAGEALSLLVTCLQLRSQQLASFYNLPCVADFIIDILLGSPSAEIRRVACDQLYTLSQTDTSAHPDVQKPNQFLLGVILTAQLPLWSPTSIMRGVNQRLLSQCMEYFDLRCQLLDDLTTSEMEQLRISPATMLEDEITWLDNFEPNRTAECETSEADNILLAGHLRLIKTLLSLCGAEKEMLGSSLIKPLLDDFLFRASRIILNSHSPAGSAAISQQDFHPKCSTANSRLAAYEVLVMLADSSPSNLQIIIKELLSMHHQPDPALTKEFDYLPPVDSRSSSGFVGLRNGGATCYMNAVFQQLYMQPGLPESLLSVDDDTDNPDDSVFYQVQSLFGHLMESKLQYYVPENFWKIFKMWNKELYVREQQDAYEFFTSLIDQMDEYLKKMGRDQIFKNTFQGIYSDQKICKDCPHRYEREEAFMALNLGVTSCQSLEISLDQFVRGEVLEGSNAYYCEKCKEKRITVKRTCIKSLPSVLVIHLMRFGFDWESGRSIKYDEQIRFPWMLNMEPYTVSGMARQDSSSEVGENGRSVDQGGGGSPRKKVALTENYELVGVIVHSGQAHAGHYYSFIKDRRGCGKGKWYKFNDTVIEEFDLNDETLEYECFGGEYRPKVYDQTNPYTDVRRRYWNAYMLFYQRVSDQNSPVLPKKSRVSVVRQEAEDLSLSAPSSPEISPQSSPRPHRPNNDRLSILTKLVKKGEKKGLFVEKMPARIYQMVRDENLKFMKNRDVYSSDYFSFVLSLASLNATKLKHPYYPCMAKVSLQLAIQFLFQTYLRTKKKLRVDTEEWIATIEALLSKSFDACQWLVEYFISSEGRELIKIFLLECNVREVRVAVATILEKTLDSALFYQDKLKSLHQLLEVLLALLDKDVPENCKNCAQYFFLFNTFVQKQGIRAGDLLLRHSALRHMISFLLGASRQNNQIRRWSSAQAREFGNLHNTVALLVLHSDVSSQRNVAPGIFKQRPPISIAPSSPLLPLHEEVEALLFMSEGKPYLLEVMFALRELTGSLLALIEMVVYCCFCNEHFSFTMLHFIKNQLETAPPHELKNTFQLLHEILVIEDPIQVERVKFVFETENGLLALMHHSNHVDSSRCYQCVKFLVTLAQKCPAAKEYFKENSHHWSWAVQWLQKKMSEHYWTPQSNVSNETSTGKTFQRTISAQDTLAYATALLNEKEQSGSSNGSESSPANENGDRHLQQGSESPMMIGELRSDLDDVDP

SEQ ID NO: 68985 - protein, 2460 aa, Homo sapiens
MTTLLCMGFSDPATIRKALRLAKNDINEAVALLTNERPGLDYGGYEPMDSGGLSESDENCRRFMDRCMPEAFKKLLTSSAVHKWGTEIHEGIYNMLMLLIELVAERIKQDPIPTGLLGVLTMAFNPDNEYHFKNRMKVSQRNWAEVFGEGNMFAVSPVSTFQKEPHGWVVDLVNKFGELGGFAAIQAKLHSEDIELGAVSALIQPLGVCAEYLNSSVVQPMLDPVILTTIQDVRSVEEKDLKDKRLVSIPELLSAVKLLCMRFQPDLVTIVDDLRLDILLRMLKSPHFSAKMNSLKEVTKLIEDSTLSKSVKNAIDTDRLLDWLVENSVLSIALEGNIDQAQYCDRIKGIIELLGSKLSLDELTKIWKIQSGQSSTVIENIHTIIAAAAVKFNSDQLNHLFVLIQKVLDVLWELAHLPTLPSSLIQQALEEHLTILSDAYAVKEAIKRSYIIKCIEDIKRSSQLNNPQFVWVVPALRQLHEITRSFIKQTYQKQDKSIIQDLKKNFEIVKLVTGSLIACHRLAAAVAGPGGLSGSTLVDGRYTYREYLEAHLKFLAFFLQEATLYLGWNRAKEIWECLVTGQDVCELDREMCFEWFTKGQHDLESDVQQQLFKEKILKLESYEITMNGFNLFKTFFENVNLCDHRLKRQGAQLYVEKLELIGMDFIWKIAMESPDEEIANEAIQLIINYSYINLNPRLKKDSVSLHKKFIADCYTRLEAASSALGGPTLTHAVTRATKMLTATAMPTVATSVQSPYRSTKLVIIERLLLLAERYVITIEDFYSVPRTILPHGASFHGHLLTLNVTYESTKDTFTVEAHSNETIGSVRWKIAKQLCSPVDNIQIFTNDSLLTVNKDQKLLHQLGFSDEQILTVKTSGSGTPSGSSADSSTSSSSSSSGVFSSSYAMEQEKSLPGVVMALVCNVFDMLYQLANLEEPRITLRVRKLLLLIPTDPAIQEALDQLDSLGRKKTLLSESSSQSSKSPSLSSKQQHQPSASSILESLFRSFAPGMSTFRVLYNLEVLSSKLMPTADDDMARSCAKSFCENFLKAGGLSLVVNVMQRDSIPSEVDYETRQGVYSICLQLARFLLVGQTMPTLLDEDLTKDGIEALSSRPFRNVSRQTSRQMSLCGTPEKSSYRQLSVSDRSSIRVEEIIPAARVAIQTMEVSDFTSTVACFMRLSWAAAAGRLDLVGSSQPIKESNSLCPAGIRNRLSSSGSNCSSGSEGEPVALHAGICVRQQSVSTKDSLIAGEALSLLVTCLQLRSQQLASFYNLPCVADFIIDILLGSPSAEIRRVACDQLYTLSQTDTSAHPDVQKPNQFLLGVILTAQLPLWSPTSIMRGVNQRLLSQCMEYFDLRCQLLDDLTTSEMEQLRISPATMLEDEITWLDNFEPNRTAECETSEADNILLAGHLRLIKTLLSLCGAEKEMLGSSLIKPLLDDFLFRASRIILNSHSPAGSAAISQQDFHPKCSTANSRLAAYEVLVMLADSSPSNLQIIIKELLSMHHQPDPALTKEFDYLPPVDSRSSSGFVGLRNGGATCYMNAVFQQLYMQPGLPESLLSVDDDTDNPDDSVFYQVQSLFGHLMESKLQYYVPENFWKIFKMWNKELYVREQQDAYEFFTSLIDQMDEYLKKMGRDQIFKNTFQGIYSDQKICKDCPHRYEREEAFMALNLGVTSCQSLEISLDQFVRGEVLEGSNAYYCEKCKEKRITVKRTCIKSLPSVLVIHLMRFGFDWESGRSIKYDEQIRFPWMLNMEPYTVSGMARQDSSSEVGENGRSVDQGGGGSPRKKVALTENYELVGVIVHSGQAHAGHYYSFIKDRRGCGKGKWYKFNDTVIEEFDLNDETLEYECFGGEYRPKVYDQTNPYTDVRRRYWNAYMLFYQRVSDQNSPVLPKKSRVSVVRQEAEDLSLSAPSSPEISPQSSPRPHRPNNDRLSILTKLVKKGEKKGLFVEKMPARIYQMVRDENLKFMKNRDVYSSDYFSFVLSLASLNATKLKHPYYPCMAKVSLQLAIQFLFQTYLRTKKKLRVDTEEWIATIEALLSKSFDACQWLVEYFISSEGRELIKIFLLECNVREVRVAVATILEKTLDSALFYQDKLKSLHQLLEVLLALLDKDVPENCKNCAQYFFLFNTFVQKQGIRAGDLLLRHSALRHMISFLLGASRQNNQIRRWSSAQAREFGNLHNTVALLVLHSDVSSQRNVAPGIFKQRPPISIAPSSPLLPLHEEVEALLFMSEGKPYLLEVMFALRELTGSLLALIEMVVYCCFCNEHFSFTMLHFIKNQLETAPPHELKNTFQLLHEILVIEDPIQVERVKFVFETENGLLALMHHSNHVDSSRCYQCVKFLVTLAQKCPAAKEYFKENSHHWSWAVQWLQKKMSEHYWTPQSNVSNETSTGKTFQRTISAQDTLAYATALLNEKEQSGSSNGSESSPANENGDRHLQQGSESPMMIGELRSDLDDVDP

SEQ ID NO: 68986 - protein, 913 aa, Homo sapiens
MAALFLRGFVQIGNCKTGISKSKEAFIEAVERKKKDRLVLYFKSGKYSTFRLSDNIQNVVLKSYRGNQNHLHLTLQNNNGLFIEGLSSTDAEQLKIFLDRVHQNEVQPPVRPGKGGSVFSSTTQKEINKTSFHKVDEKSSSKSFEIAKGSGTGVLQRMPLLTSKLTLTCGELSENQHKKRKRMLSSSSEMNEEFLKENNSVEYKKSKADCSRCVSYNREKQLKLKELEENKKLECESSCIMNATGNPYLDDIGLLQALTEKMVLVFLLQQGYSDGYTKWDKLKLFFELFPEKICHGLPNLGNTCYMNAVLQSLLSIPSFADDLLNQSFPWGKIPLNALTMCLARLLFFKDTYNIEIKEMLLLNLKKAISAAAEIFHGNAQNDAHEFLAHCLDQLKDNMEKLNTIWKPKSEFGEDNFPKQVFADDPDTSGFSCPVITNFELELLHSIACKACGQVILKTELNNYLSINLPQRIKAHPSSIQSTFDLFFGAEELEYKCAKCEHKTSVGVHSFSRLPRILIVHLKRYSLNEFCALKKNDQEVIISKYLKVSSHCNEGTRPPLPLSEDGEITDFQLLKVIRKMTSGNISVSWPATKESKDILAPHIGSDKESEQKKGQTVFKGASRRQQQKYLGKNSKPNELESVYSGDRAFIEKEPLAHLMTYLEDTSLCQFHKAGGKPASSPGTPLSKVDFQTVPENPKRKKYVKTSKFVAFDRIINPTKDLYEDKNIRIPERFQKVSEQTQQCDGMRICEQAPQQALPQSFPKPGTQGHTKNLLRPTKLNLQKSNRNSLLALGSNKNPRNKDILDKIKSKAKETKRNDDKGDHTYRLISVVSHLGKTLKSGHYICDAYDFEKQIWFTYDDMRVLGIQEAQMQEDRRCTGYIFFYMHNEIFEEMLKREENAQLNSKEVEETLQKE

SEQ ID NO: 68987 - protein, 913 aa, Homo sapiens; identical to SEQ ID NO: 68986

SEQ ID NO: 68988 - protein, 1077 aa, Homo sapiens
MTAELQQDDAAGAADGHGSSCQMLLNQLREITGIQDPSFLHEALKASNGDITQAVSLLTDERVKEPSQDTVATEPSEVEGSAANKEVLAKVIDLTHDNKDDLQAAIALSLLESPKIQADGRDLNRMHEATSAETKRSKRKRCEVWGENPNPNDWRRVDGWPVGLKNVGNTCWFSAVIQSLFQLPEFRRLVLSYSLPQNVLENCRSHTEKRNIMFMQELQYLFALMMGSNRKFVDPSAALDLLKGAFRSSEEQQQDVSEFTHKLLDWLEDAFQLAVNVNSPRNKSENPMVQLFYGTFLTEGVREGKPFCNNETFGQYPLQVNGYRNLDECLEGAMVEGDVELLPSDHSVKYGQERWFTKLPPVLTFELSRFEFNQSLGQPEKIHNKLEFPQIIYMDRYMYRSKELIRNKRECIRKLKEEIKILQQKLERYVKYGSGPARFPLPDMLKYVIEFASTKPASESCPPESDTHMTLPLSSVHCSVSDQTSKESTSTESSSQDVESTFSSPEDSLPKSKPLTSSRSSMEMPSQPAPRTVTDEEINFVKTCLQRWRSEIEQDIQDLKTCIASTTQTIEQMYCDPLLRQVPYRLHAVLVHEGQANAGHYWAYIYNQPRQSWLKYNDISVTESSWEEVERDSYGGLRNVSAYCLMYINDKLPYFNAEAAPTESDQMSEVEALSVELKHYIQEDNWRFEQEVEEWEEEQSCKIPQMESSTNSSSQDYSTSQEPSVASSHGVRCLSSEHAVIVKEQTAQAIANTARAYEKSGVEAALSEVMLSPAMQGVILAIAKARQTFDRDGSEAGLIKAFHEEYSRLYQLAKETPTSHSDPRLQHVLVYFFQNEAPKRVVERTLLEQFADKNLSYDERSISIMKVAQAKLKEIGPDDMNMEEYKKWHEDYSLFRKVSVYLLTGLELYQKGKYQEALSYLVYAYQSNAALLMKGPRRGVKESVIALYRRKCLLELNAKAASLFETNDDHSVTEGINVMNELIIPCIHLIINNDISKDDLDAIEVMRNHWCSYLGQDIAENLQLCLGEFLPRLLDPSAEIIVLKEPPTIRPNSPYDLCSRFAAVMESIQGVSTVTVK

SEQ ID NO: 68989 - protein, 1045 aa, Homo sapiens
MTAELQQDDAAGAADGHGSSCQMLLNQLREITGIQDPSFLHEALKASNGDITQAVSLLTDERVKEPSQDTVATEPSEVEGSAANKEVLAKVIDLTHDNKDDLQAAIALSLLESPKIQADGRDLNRMHEATSAETKRSKRKRCEVWGENPNPNDWRRVDGWPVGLKNVGNTCWFSAVIQSLFQLPEFRRLVLSYSLPQNVLENCRSHTEKRNIMFMQELQYLFALMMGSNRKFVDPSAALDLLKGAFRSSEEQQQDVSEFTHKLLDWLEDAFQLAVNVNSPRNKSENPMVQLFYGTFLTEGVREGKPFCNNETFGQYPLQVNGYRNLDECLEGAMVEGDVELLPSDHSVKYGQERWFTKLPPVLTFELSRFEFNQSLGQPEKIHNKLEFPQIIYMDRYMYRSKELIRNKRECIRKLKEEIKILQQKLERYVKYGSGPARFPLPDMLKYVIEFASTKPASESCPPESDTHMTLPLSSVHCSVSDQTSKESTSTESSSQDVESTFSSPEDSLPKSKPLTSSRSSMEMPSQPAPRTVTDEEINFVKTCLQRWRSEIEQDIQDLKTCIASTTQTIEQMYCDPLLRQVPYRLHAVLVHEGQANAGHYWAYIYNQPRQSWLKYNDISVTESSWEEVERDSYGGLRNVSAYCLMYINDKLPYFNAEAAPTESDQMSEVEALSVELKHYIQEDNWRFEQEVEEWEEEQSCKIPQMESSTNSSSQDYSTSQEPSVASSHGVRCLSSEHAVIVKEQTAQAIANTARAYEKSGVEAALSEAFHEEYSRLYQLAKETPTSHSDPRLQHVLVYFFQNEAPKRVVERTLLEQFADKNLSYDERSISIMKVAQAKLKEIGPDDMNMEEYKKWHEDYSLFRKVSVYLLTGLELYQKGKYQEALSYLVYAYQSNAALLMKGPRRGVKESVIALYRRKCLLELNAKAASLFETNDDHSVTEGINVMNELIIPCIHLIINNDISKDDLDAIEVMRNHWCSYLGQDIAENLQLCLGEFLPRLLDPSAEIIVLKEPPTIRPNSPYDLCSRFAAVMESIQGVSTVTVK

SEQ ID NO: 68990 - protein, 498 aa, Homo sapiens
MQSPPHLAVCRSNKSPWVCLTCSSVHCGRYVNGHAKKHYEDAQVPLTNHKKSEKQDKVQHTVCMDCSSYSTYCYRCDDFVVNDTKLGLVQKVREHLQNLENSAFTADRHKKRKLLENSTLNSKLLKVNGSTTAICATGLRNLGNTCFMNAILQSLSNIEQFCCYFKELPAVELRNGKTAGRRTYHTRSQGDNNVSLVEEFRKTLCALWQGSQTAFSPESLFYVVWKIMPNFRGYQQQDAHEFMRYLLDHLHLELQGGFNGVSRSAILQENSTLSASNKCCINGASTVVTAIFGGILQNEVNCLICGTESRKFDPFLDLSLDIPSQFRSKRSKNQENGPVCSLRDCLRSFTDLEELDETELYMCHKCKKKQKSTKKFWIQKLPKVLCLHLKRFHWTAYLRNKVDTYVEFPLRGLDMKCYLLEPENSGPESCLYDLAAVVVHHGSGVGSGHYTAYATHEGRWFHFNDSTVTLTDEETVVKAKAYILFYVEHQAKAGSDKL

SEQ ID NO: 68991 - protein, 520 aa, Homo sapiens
MECPHLSSSVCIAPDSAKFPNGSPSSWCCSVCRSNKSPWVCLTCSSVHCGRYVNGHAKKHYEDAQVPLTNHKKSEKQDKVQHTVCMDCSSYSTYCYRCDDFVVNDTKLGLVQKVREHLQNLENSAFTADRHKKRKLLENSTLNSKLLKVNGSTTAICATGLRNLGNTCFMNAILQSLSNIEQFCCYFKELPAVELRNGKTAGRRTYHTRSQGDNNVSLVEEFRKTLCALWQGSQTAFSPESLFYVVWKIMPNFRGYQQQDAHEFMRYLLDHLHLELQGGFNGVSRSAILQENSTLSASNKCCINGASTVVTAIFGGILQNEVNCLICGTESRKFDPFLDLSLDIPSQFRSKRSKNQENGPVCSLRDCLRSFTDLEELDETELYMCHKCKKKQKSTKKFWIQKLPKVLCLHLKRFHWTAYLRNKVDTYVEFPLRGLDMKCYLLEPENSGPESCLYDLAAVVVHHGSGVGSGHYTAYATHEGRWFHFNDSTVTLTDEETVVKAKAYILFYVEHQAKAGSDKL

SEQ ID NO: 68992 - protein, 156 aa, Homo sapiens [sequence omitted]

SEQ ID NO: 68993 - protein, 356 aa, Homo sapiens [sequence omitted]

SEQ ID NO: 68994 - protein, 271 aa, Homo sapiens
MPNFRGYQQQDAHEFMRYLLDHLHLELQGGFNGVSRSAILQENSTLSASNKCCINGASTVVTAIFGGILQNEVNCLICGTESRKFDPFLDLSLDIPSQFRSKRSKNQENGPVCSLRDCLRSFTDLEELDETELYMCHKCKKKQKSTKKFWIQKLPKVLCLHLKRFHWTAYLRNKVDTYVEFPLRGLDMKCYLLEPENSGPESCLYDLAAVVVHHGSGVGSGHYTAYATHEGRWFHFNDSTVTLTDEETVVKAKAYILFYVEHQAKAGSDKL

SEQ ID NO: 68995 - protein, 476 aa, Homo sapiens
MECPHLSSSVCIAPDSAKFPNGSPSSWCCSVCRSNKSPWVCLTCSSVHCGSYRCDDFVVNDTKLGLVQKVREHLQNLENSAFTADRHKKRKLLENSTLNSKLLKVNGSTTAICATGLRNLGNTCFMNAILQSLSNIEQFCCYFKELPAVELRNGKTAGRRTYHTRSQGDNNVSLVEEFRKTLCALWQGSQTAFSPESLFYVVWKIMPNFRGYQQQDAHEFMRYLLDHLHLELQGGFNGVSRSAILQENSTLSASNKCCINGASTVVTAIFGGILQNEVNCLICGTESRKFDPFLDLSLDIPSQFRSKRSKNQENGPVCSLRDCLRSFTDLEELDETELYMCHKCKKKQKSTKKFWIQKLPKVLCLHLKRFHWTAYLRNKVDTYVEFPLRGLDMKCYLLEPENSGPESCLYDLAAVVVHHGSGVGSGHYTAYATHEGRWFHFNDSTVTLTDEETVVKAKAYILFYVEHQAKAGSDKL

SEQ ID NO: 68996 - protein, 55 aa, Homo sapiens
MECPHLSSSVCIAPDSAKFPNGSPSSWCCSVCRSNKSPWVCLTCSSVHCGRIWGT

SEQ ID NO: 68997 - protein, 517 aa, Homo sapiens
MLSSRAEAAMTAADRAIQRFLRTGAAVRYKVMKNWGVIGGIAAALAAGIYVIWGPITERKKRRKGLVPGLVNLGNTCFMNSLLQGLSACPAFIRWLEEFTSQYSRDQKEPPSHQYLSLTLLHLLKALSCQEVTDDEVLDASCLLDVLRMYRWQISSFEEQDAHELFHVITSSLEDERDRQPRVTHLFDVHSLEQQSEITPKQITCRTRGSPHPTSNHWKSQHPFHGRLTSNMVCKHCEHQSPVRFDTFDSLSLSIPAATWGHPLTLDHCLHHFISSESVRDVVCDNCTKIEAKGTLNGEKVEHQRTTFVKQLKLGKLPQCLCIHLQRLSWSSHGTPLKRHEHVQFNEFLMMDIYKYHLLGHKPSQHNPKLNKNPGPTLELQDGPGAPTPVLNQPGAPKTQIFMNGACSPSLLPTLSAPMPFPLPVVPDYSSSTYLFRLMAVVVHHGDMHSGHFVTYRRSPPSARNPLSTSNQWLWVSDDTVRKASLQEVLSSSAYLLFYERVLSRMQHQSQECKSEE

SEQ ID NO: 68998 - protein, 1604 aa, Homo sapiens
MGAKESRIGFLSYEEALRRVTDVELKRLKDAFKRTCGLSYYMGQHCFIREVLGDGVPPKVAEVIYCSFGGTSKGLHFNNLIVGLVLLTRGKDEEKAKYIFSLFSSESGNYVIREEMERMLHVVDGKVPDTLRKCFSEGEKVNYEKFRNWLFLNKDAFTFSRWLLSGGVYVTLTDDSDTPTFYQTLAGVTHLEESDIIDLEKRYWLLKAQSRTGRFDLETFGPLVSPPIRPSLSEGLFNAFDENRDNHIDFKEISCGLSACCRGPLAERQKFCFKVFDVDRDGVLSRVELRDMVVALLEVWKDNRTDDIPELHMDLSDIVEGILNAHDTTKMGHLTLEDYQIWSVKNVLANEFLNLLFQVCHIVLGLRPATPEEEGQIIRGWLERESRYGLQAGHNWFIISMQWWQQWKEYVKYDANPVVIEPSSVLNGGKYSFGTAAHPMEQVEDRIGSSLSYVNTTEEKFSDNISTASEASETAGSGFLYSATPGADVCFARQHNTSDNNNQCLLGANGNILLHLNPQKPGAIDNQPLVTQEPVKATSLTLEGGRLKRTPQLIHGRDYEMVPEPVWRALYHWYGANLALPRPVIKNSKTDIPELELFPRYLLFLRQQPATRTQQSNIWVNMGNVPSPNAPLKRVLAYTGCFSRMQTIKEIHEYLSQRLRIKEEDMRLWLYNSENYLTLLDDEDHKLEYLKIQDEQHLVIEVRNKDMSWPEEMSFIANSSKIDRHKVPTEKGATGLSNLGNTCFMNSSIQCVSNTQPLTQYFISGRHLYELNRTNPIGMKGHMAKCYGDLVQELWSGTQKNVAPLKLRWTIAKYAPRFNGFQQQDSQELLAFLLDGLHEDLNRVHEKPYVELKDSDGRPDWEVAAEAWDNHLRRNRSIVVDLFHGQLRSQVKCKTCGHISVRFDPFNFLSLPLPMDSYMHLEITVIKLDGTTPVRYGLRLNMDEKYTGLKKQLSDLCGLNSEQILLAEVHGSNIKNFPQDNQKVRLSVSGFLCAFEIPVPVSPISASSPTQTDFSSSPSTNEMFTLTTNGDLPRPIFIPNGMPNTVVPCGTEKNFTNGMVNGHMPSLPDSPFTGYIIAVHRKMMRTELYFLSSQKNRPSLFGMPLIVPCTVHTRKKDLYDAVWIQVSRLASPLPPQEASNHAQDCDDSMGYQYPFTLRVVQKDGNSCAWCPWYRFCRGCKIDCGEDRAFIGNAYIAVDWDPTALHLRYQTSQERVVDEHESVEQSRRAQAEPINLDSCLRAFTSEEELGENEMYYCSKCKTHCLATKKLDLWRLPPILIIHLKRFQFVNGRWIKSQKIVKFPRESFDPSAFLVPRDPALCQHKPLTPQGDELSEPRILAREVKKVDAQSSAGEEDVLLSKSPSSLSANIISSPKGSPSSSRKSGTSCPSSKNSSPNSSPRTLGRSKGRLRLPQIGSKNKLSSSKENLDASKENGAGQICELADALSRGHVLGGSQPELVTPQDHEVALANGFLYEHEACGNGYSNGQLGNHSEEDSTDDQREDTRIKPIYNLYAISCHSGILGGGHYVTYAKNPNCKWYCYNDSSCKELHPDEIDTDSAYILFYEQQGIDYAQFLPKTDGKKMADTSSMDEDFESDYKKYCVLQ

SEQ ID NO: 68999 - protein, 390 aa, Homo sapiens
MGAKESRIGFLSYEEALRRVTDVELKRLKDAFKRTCGLSYYMGQHCFIREVLGDGVPPKVAEVIYCSFGGTSKGLHFNNLIVGLVLLTRGKDEEKAKYIFSLFSSESGNYVIREEMERMLHVVDGKVPDTLRKCFSEGEKVNYEKFRNWLFLNKDAFTFSRWLLSGGVYVTLTDDSDTPTFYQTLAGVTHLEESDIIDLEKRYWLLKAQSRTGRFDLETFGPLVSPPIRPSLSEGLFNAFDENRDNHIDFKEISCGLSACCRGPLAERQKFCFKVFDVDRDGVLSRVELRDMVVALLEVWKDNRTDDIPELHMDLSDIVEGILNAHDTTKMGHLTLEDYQIWSVKNVLANEFLNLLFQVCHIVLGLRPATPEEEGQIIRTLETDQIYTRN

SEQ ID NO: 69000 - protein, 1123 aa, Homo sapiens
MPIVDKLKEALKPGRKDSADDGELGKLLASSAKKVLLQKIEFEPASKSFSYQLEALKSKYVLLNPKTEGASRHKSGDDPPARRQGSEHTYESCGDGVPAPQKVLFPTERLSLRWERVFRVGAGLHNLGNTCFLNATIQCLTYTPPLANYLLSKEHARSCHQGSFCMLCVMQNHIVQAFANSGNAIKPVSFIRDLKKIARHFRFGNQEDAHEFLRYTIDAMQKACLNGCAKLDRQTQATTLVHQIFGGYLRSRVKCSVCKSVSDTYDPYLDVALEIRQAANIVRALELFVKADVLSGENAYMCAKCKKKVPASKRFTIHRTSNVLTLSLKRFANFSGGKITKDVGYPEFLNIRPYMSQNNGDPVMYGLYAVLVHSGYSCHAGHYYCYVKASNGQWYQMNDSLVHSSNVKVVLNQQAYVLFYLRIPGSKKSPEGLISRTGSSSLPGRPSVIPDHSKKNIGNGIISSPLTGKRQDSGTMKKPHTTEEIGVPISRNGSTLGLKSQNGCIPPKLPSGSPSPKLSQTPTHMPTILDDPGKKVKKPAPPQHFSPRTAQGLPGTSNSNSSRSGSQRQGSWDSRDVVLSTSPKLLATATANGHGLKGNDESAGLDRRGSSSSSPEHSASSDSTKAPQTPRSGAAHLCDSQETNCSTAGHSKTPPSGADSKTVKLKSPVLSNTTTEPASTMSPPPAKKLALSAKKASTLWRATGNDLRPPPPSPSSDLTHPMKTSHPVVASTWPVHRARAVSPAPQSSSRLQPPFSPHPTLLSSTPKPPGTSEPRSCSSISTALPQVNEDLVSLPHQLPEASEPPQSPSEKRKKTFVGEPQRLGSETRLPQHIREATAAPHGKRKRKKKKRPEDTAASALQEGQTQRQPGSPMYRREGQAQLPAVRRQEDGTQPQVNGQQVGCVTDGHHASSRKRRRKGAEGLGEEGGLHQDPLRHSCSPMGDGDPEAMEESPRKKKKKKRKQETQRAVEEDGHLKCPRSAKPQDAVVPESSSCAPSANGWCPGDRMGLSQAPPVSWNGERESDVVQELLKYSSDKAYGRKVLTWDGKMSAVSQDAIEDSRQARTETVVDDWDEEFDRGKEKKIKKFKREKRRNFNAFQKLQTRRNFWSVTHPAKAASLSYRR

SEQ ID NO: 69001 - protein, 548 aa, Homo sapiens
MPIVDKLKEALKPGRKDSADDGELGKLLASSAKKVLLQKIEFEPASKSFSYQLEALKSKYVLLNPKTEGASRHKSGDDPPARRQGSEHTYESCGDGVPAPQKVLFPTERLSLRWERVFRVGAGLHNLGNTCFLNATIQCLTYTPPLANYLLSKEHARSCHQGSFCMLCVMQNHIVQAFANSGNAIKPVSFIRDLKKIARHFRFGNQEDAHEFLRYTIDAMQKACLNGCAKLDRQTQATTLVHQIFGGYLRSRVKCSVCKSVSDTYDPYLDVALEIRQAANIVRALELFVKADVLSGENAYMCAKCKKKVPASKRFTIHRTSNVLTLSLKRFANFSGGKITKDVGYPEFLNIRPYMSQNNGDPVMYGLYAVLVHSGYSCHAGHYYCYVKASNGQWYQMNDSLVHSSNVKVVLNQQAYVLFYLRIPGSKKSPEGLISRTGSSSLPGRPSVIPDHSKKNIGNGIISSPLTGKRQDSGTMKKPHTTEEIGVPISRNGSTLGLKSQNGCIPPKLPSGSPSPKLSQTPTHMPTILDDPGKKVKKPAPPLPTGMG

SEQ ID NO: 69002 - protein, 728 aa, Homo sapiens
MCAKCKKKVPASKRFTIHRTSNVLTLSLKRFANFSGGKITKDVGYPEFLNIRPYMSQNNGDPVMYGLYAVLVHSGYSCHAGHYYCYVKASNGQWYQMNDSLVHSSNVKVVLNQQAYVLFYLRIPGSKKSPEGLISRTGSSSLPGRPSVIPDHSKKNIGNGIISSPLTGKRQDSGTMKKPHTTEEIGVPISRNGSTLGLKSQNGCIPPKLPSGSPSPKLSQTPTHMPTILDDPGKKVKKPAPPQHFSPRTAQGLPGTSNSNSSRSGSQRQGSWDSRDVVLSTSPKLLATATANGHGLKGNDESAGLDRRGSSSSSPEHSASSDSTKAPQTPRSGAAHLCDSQETNCSTAGHSKTPPSGADSKTVKLKSPVLSNTTTEPASTMSPPPAKKLALSAKKASTLWRATGNDLRPPPPSPSSDLTHPMKTSHPVVASTWPVHRARAVSPAPQSSSRLQPPFSPHPTAASALQEGQTQRQPGSPMYRREGQAQLPAVRRQEDGTQPQVNGQQVGCVTDGHHASSRKRRRKGAEGLGEEGGLHQDPLRHSCSPMGDGDPEAMEESPRKKKKKKRKQETQRAVEEDGHLKCPRSAKPQDAVVPESSSCAPSANGWCPGDRMGLSQAPPVSWNGERESDVVQELLKYSSDKAYGRKVLTWDGKMSAVSQDAIEDSRQARTETVVDDWDEEFDRGKEKKIKKFKREKRRNFNAFQKLQTRRNFWSVTHPAKAASLSYRR

SEQ ID NO: 69003 - protein, 1123 aa, Homo sapiens; identical to SEQ ID NO: 69000

SEQ ID NO: 69004 - protein, 565 aa, Homo sapiens
MSGRSKRESRGSTRGKRESESRGSSGRVKRERDREREPEAASSRGSPVRVKREFEPASAREAPASVVPFVRVKREREVDEDSEPEREVRAKNGRVDSEDRRSRHCPYLDTINRSVLDFDFEKLCSISLSHINAYACLVCGKYFQGRGLKSHAYIHSVQFSHHVFLNLHTLKFYCLPDNYEIIDSSLEDITYVLKPTFTKQQIANLDKQAKLSRAYDGTTYLPGIVGLNNIKANDYANAVLQALSNVPPLRNYFLEEDNYKNIKRPPGDIMFLLVQRFGELMRKLWNPRNFKAHVSPHEMLQAVVLCSKKTFQITKQGDGVDFLSWFLNALHSALGGTKKKKKTIVTDVFQGSMRIFTKKLPHPDLPAEEKEQLLHNDEYQETMVESTFMYLTLDLPTAPLYKDEKEQLIIPQVPLFNILAKFNGITEKEYKTYKENFLKRFQLTKLPPYLIFCIKRFTKNNFFVEKNPTIVNFPITNVDLREYLSEEVQAVHKNTTYDLIANIVHDGKPSEGSYRIHVLHHGTGKWYELQDLQVTDILPQMITLSEAYIQIWKRRDNDETNQQGA

SEQ ID NO: 69005 - protein, 565 aa, Homo sapiens; identical to SEQ ID NO: 69004

SEQ ID NO: 69006 - protein, 462 aa, Homo sapiens
MLTAVPSHLFSAKNGRVDSEDRRSRHCPYLDTINSFSPFPTGRGLKSHAYIHSVQFSHHVFLNLHTLKFYCLPDNYEIIDSSLEDITYVLKPTFTKQQIANLDKQAKLSRAYDGTTYLPGIVGLNNIKANDYANAVLQALSNVPPLRNYFLEEDNYKNIKRPPGDIMFLLVQRFGELMRKLWNPRNFKAHVSPHEMLQAVVLCSKKTFQITKQGDGVDFLSWFLNALHSALGGTKKKKKTIVTDVFQGSMRIFTKKLPHPDLPAEEKEQLLHNDEYQETMVESTFMYLTLDLPTAPLYKDEKEQLIIPQVPLFNILAKFNGITEKEYKTYKENFLKRFQLTKLPPYLIFCIKRFTKNNFFVEKNPTIVNFPITNVDLREYLSEEVQAVHKNTTYDLIANIVHDGKPSEGSYRIHVLHHGTGKWYELQDLQVTDILPQMITLSEAYIQIWKRRDNDETNQQGA

SEQ ID NO: 69007 - protein, 488 aa, Homo sapiens
MSGRSKRESRGSTRGKRESESRGSSGRVKRERDREREPEAASSRGSPVRVKREFEPASAREAPASVVPFVRVKREREVDEDSEPEREVRAKNGRVDSEDRRSRHCPYLDTINRSVLDFDFEKLCSISLSHINAYACLVCGKYFQGRGLKSHAYIHSVQFSHHVFLNLHTLKFYCLPDNYEIIDSSLEDITYVLKPTFTKQQIANLDKQAKLSRAYDGTTYLPGIVGLNNIKANDYANAVLQALSNVPPLRNYFLEEDNYKNIKRPPGDIMFLLVQRFGELMRKLWNPRNFKAHVSPHEMLQAVVLCSKKTFQITKQGDGVDFLSWFLNALHSALGGTKKKKKTIVTDVFQGSMRIFTKKLPHPDLPAEEKEQLLHNDEYQETMVESTFMYLTLDLPTAPLYKDEKEQLIIPQVPLFNILAKFNGITEKEYKTYKENFLKRFQLTKLPPYLIFCIKRFTKNNFFVEKNPTIVNFPITGQANGMNYKTSR

SEQ ID NO: 69008 - protein, 963 aa, Homo sapiens
MAEGGGCRERPDAETQKSELGPLMRTTLQRGAQWYLIDSRWFKQWKKYVGFDSWDMYNVGEHNLFPGPIDNSGLFSDPESQTLKEHLIDELDYVLVPTEAWNKLLNWYGCVEGQQPIVRKVVEHGLFVKHCKVEVYLLELKLCENSDPTNVLSCHFSKADTIATIEKEMRKLFNIPAERETRLWNKYMSNTYEQLSKLDNTVQDAGLYQGQVLVIEPQNEDGTWPRQTLQSKSSTAPSRNFTTSPKSSASPYSSVSASLIANGDSTSTCGMHSSGVSRGGSGFSASYNCQEPPSSHIQPGLCGLGNLGNTCFMNSALQCLSNTAPLTDYFLKDEYEAEINRDNPLGMKGEIAEAYAELIKQMWSGRDAHVAPRMFKTQVGRFAPQFSGYQQQDSQELLAFLLDGLHEDLNRVKKKPYLELKDANGRPDAVVAKEAWENHRLRNDSVIVDTFHGLFKSTLVCPECAKVSVTFDPFCYLTLPLPLKKDRVMEVFLVPADPHCRPTQYRVTVPLMGAVSDLCEALSRLSGIAAENMVVADVYNHRFHKIFQMDEGLNHIMPRDDIFVYEVCSTSVDGSECVTLPVYFRERKSRPSSTSSASALYGQPLLLSVPKHKLTLESLYQAVCDRISRYVKQPLPDEFGSSPLEPGACNGSRNSCEGEDEEEMEHQEEGKEQLSETEGSGEDEPGNDPSETTQKKIKGQPCPKRLFTFSLVNSYGTADINSLAADGKLLKLNSRSTLAMDWDSETRRLYYDEQESEAYEKHVSMLQPQKKKKTTVALRDCIELFTTMETLGEHDPWYCPNCKKHQQATKKFDLWSLPKILVVHLKRFSYNRYWRDKLDTVVEFPIRGLNMSEFVCNLSARPYVYDLIAVSNHYGAMGVGHYTAYAKNKLNGKWYYFDDSNVSLASEDQIVTKAAYVLFYQRRDDEFYKTPSLSSSGSSDGGTRPSSSQQGFGDDEACSMDTN

SEQ ID NO: 69009 - protein, 916 aa, Homo sapiens
MAEGGGCRERPDAETQKSELGPLMRTTLQRGAQWYLIDSRWFKQWKKYVGFDSWDMYNVGEHNLFPGPIDNSGLFSDPESQTLKEHLIDELDYVLVPTEAWNKLLNWYGCVEGQQPIVRKVVEHGLFVKHCKVEVYLLELKLCENSDPTNVLSCHFSKADTIATIEKEMRKLFNIPAERETRLWNKYMSNTYEQLSKLDNTVQDAGLYQGQVLVIEPQNEDGTWPRQTLQSNGSGFSASYNCQEPPSSHIQPGLCGLGNLGNTCFMNSALQCLSNTAPLTDYFLKDEYEAEINRDNPLGMKGEIAEAYAELIKQMWSGRDAHVAPRMFKTQVGRFAPQFSGYQQQDSQELLAFLLDGLHEDLNRVKKKPYLELKDANGRPDAVVAKEAWENHRLRNDSVIVDTFHGLFKSTLVCPECAKVSVTFDPFCYLTLPLPLKKDRVMEVFLVPADPHCRPTQYRVTVPLMGAVSDLCEALSRLSGIAAENMVVADVYNHRFHKIFQMDEGLNHIMPRDDIFVYEVCSTSVDGSECVTLPVYFRERKSRPSSTSSASALYGQPLLLSVPKHKLTLESLYQAVCDRISRYVKQPLPDEFGSSPLEPGACNGSRNSCEGEDEEEMEHQEEGKEQLSETEGSGEDEPGNDPSETTQKKIKGQPCPKRLFTFSLVNSYGTADINSLAADGKLLKLNSRSTLAMDWDSETRRLYYDEQESEAYEKHVSMLQPQKKKKTTVALRDCIELFTTMETLGEHDPWYCPNCKKHQQATKKFDLWSLPKILVVHLKRFSYNRYWRDKLDTVVEFPIRGLNMSEFVCNLSARPYVYDLIAVSNHYGAMGVGHYTAYAKNKLNGKWYYFDDSNVSLASEDQIVTKAAYVLFYQRRDDEFYKTPSLSSSGSSDGGTRPSSSQQGFGDDEACSMDTN

SEQ ID NO: 69010 - protein, 313 aa, Homo sapiens
MAEGGGCRERPDAETQKSELGPLMRTTLQRGAQWYLIDSRWFKQWKKYVGFDSWDMYNVGEHNLFPGPIDNSGLFSDPESQTLKEHLIDELDYVLVPTEAWNKLLNWYGCVEGQQPIVRKVVEHGLFVKHCKVEVYLLELKLCENSDPTNVLSCHFSKADTIATIEKEMRKLFNIPAERETRLWNKYMSNTYEQLSKLDNTVQDAGLYQGQVLVIEPQNEDGTWPRQTLQSKVSFFLPRLECNGAILAHCNFCLPGSSNSPASASRVAPSHLANFFFFEMESHSVTKLECGGAVSAYSRVQVMLLPQPPEWLG

SEQ ID NO: 69011 - protein, 712 aa, Homo sapiens
MLAMDTCKHVGQLQLAQDHSSLNPQKWHCVDCNTTESIWACLSCSHVACGRYIEEHALKHFQESSHPVALEVNEMYVFCYLCDDYVLNDNTTGDLKLLRRTLSAIKSQNYHCTTRSGRFLRSMGTGDDSYFLHDGAQSLLQSEDQLYTALWHRRRILMGKIFRTWFEQSPIGRKKQEEPFQEKIVVKREVKKRRQELEYQVKAELESMPPRKSLRLQGLAQSTIIEIVSVQVPAQTPASPAKDKVLSTSENEISQKVSDSSVKRRPIVTPGVTGLRNLGNTCYMNSVLQVLSHLLIFRQCFLKLDLNQWLAMTASEKTRSCKHPPVTDTVVYQMNECQEKDTGFVCSRQSSLSSGLSGGASKGRKMELIQPKEPTSQYISLCHELHTLFQVMWSGKWALVSPFAMLHSVWRLIPAFRGYAQQDAQEFLCELLDKIQRELETTGTSLPALIPTSQRKLIKQVLNVVNNIFHGQLLSQVTCLACDNKSNTIEPFWDLSLEFPERYQCSGKDIASQPCLVTEMLAKFTETEALEGKIYVCDQCNSKRRRFSSKPVVLTEAQKQLMICHLPQVLRLHLKRFRWSGRNNREKIGVHVGFEEILNMEPYCCRETLKSLRPECFIYDLSAVVMHHGKGFGSGHYTAYCYNSEGGFWVHCNDSKLSMCTMDEVCKAQAYILFYTQRVTENGHSKLLPPELLLGSQHPNEDADTSSNEILS

SEQ ID NO: 69012 - protein, 712 aa, Homo sapiens; identical to SEQ ID NO: 69011

SEQ ID NO: 69013 - protein, 712 aa, Homo sapiens; identical to SEQ ID NO: 69011

SEQ ID NO: 69014 - protein, 111 aa, Homo sapiens
MLAMDTCKHVGQLQLAQDHSSLNPQKWHCVDCNTTESIWACLSCSHVACGRYIEEHALKHFQESSHPVALEVNEMYVFCYLCDDYVLNDNTTGDLKLLRRTLSAIKSQNYH

SEQ ID NO: 69015 - protein, 164 aa, Homo sapiens
MLAMDTCKHVGQLQLAQDHSSLNPQKWHCVDCNTTESIWACLSCSHVACGRYIEEHALKHFQESSHPVALEVNEMYVFCYLCDDYVLNDNTTGDLKLLRRTLSAIKSQNYHCTTRSGRFLRSMGTGDDSYFLHDGAQSLLQSEDQLYTALWHRRRILMGKIFRT

SEQ ID NO: 69016 - protein, 366 aa, Homo sapiens
MTVRNIASICNMGTNASALEKDIGPEQFPINEHYFGLVNFGNTCYCNSVLQALYFCRPFRENVLAYKAQQKKKENLLTCLADLFHSIATQKKKVGVIPPKKFISRLRKENDLFDNYMQQDAHEFLNYLLNTIADILQEEKKQEKQNGKLKNGNMNEPAENNKPELTWVHEIFQGTLTNETRCLNCETVSSKDEDFLDLSVDVEQNTSITHCLRDFSNTETLCSEQKYYCETCCSKQEAQKRMRVKKLPMILALHLKRFKYMEQLHRYTKLSYRVVFPLELRLFNTSSDAVNLDRMYDLVAVVVHCGSGPNRGHYITIVKSHGFWLLFDDDIVEKIDAQAIEEFYGLTSDISKNSESGYILFYQSRE

SEQ ID NO: 69017 - protein, 359 aa, Homo sapiens
MNCFQGTNASALEKDIGPEQFPINEHYFGLVNFGNTCYCNSVLQALYFCRPFRENVLAYKAQQKKKENLLTCLADLFHSIATQKKKVGVIPPKKFISRLRKENDLFDNYMQQDAHEFLNYLLNTIADILQEEKKQEKQNGKLKNGNMNEPAENNKPELTWVHEIFQGTLTNETRCLNCETVSSKDEDFLDLSVDVEQNTSITHCLRDFSNTETLCSEQKYYCETCCSKQEAQKRMRVKKLPMILALHLKRFKYMEQLHRYTKLSYRVVFPLELRLFNTSSDAVNLDRMYDLVAVVVHCGSGPNRGHYITIVKSHGFWLLFDDDIVEKIDAQAIEEFYGLTSDISKNSESGYILFYQSRE

SEQ ID NO: 69018 - protein, 1406 aa, Homo sapiens
MDMVENADSLQAQERKDILMKYDKGHRAGLPEDKGPEPVGINSSIDRFGILHETELPPVTAREAKKIRREMTRTSKWMEMLGEWETYKHSSKLIDRVYKGIPMNIRGPVWSVLLNIQEIKLKNPGRYQIMKERGKRSSEHIHHIDLDVRTTLRNHVFFRDRYGAKQRELFYILLAYSEYNPEVGYCRDLSHITALFLLYLPEEDAFWALVQLLASERHSLPGFHSPNGGTVQGLQDQQEHVVPKSQPKTMWHQDKEGLCGQCASLGCLLRNLIDGISLGLTLRLWDVYLVEGEQVLMPITSIALKVQQKRLMKTSRCGLWARLRNQFFDTWAMNDDTVLKHLRASTKKLTRKQGDLPPPAKREQGSLAPRPVPASRGGKTLCKGYRQAPPGPPAQFQRPICSASPPWASRFSTPCPGGAVREDTYPVGTQGVPSLALAQGGPQGSWRFLEWKSMPRLPTDLDIGGPWFPHYDFEWSCWVRAISQEDQLATCWQAEHCGEVHNKDMSWPEEMSFTANSSKIDRQKVPTEKGATGLSNLGNTCFMNSSIQCVSNTQPLTQYFISGRHLYELNRTNPIGMKGHMAKCYGDLVQELWSGTQKSVAPLKLRRTIAKYAPKFDGFQQQDSQELLAFLLDGLHEDLNRVHEKPYVELKDSDGRPDWEVAAEAWDNHLRRNRSIIVDLFHGQLRSQVKCKTCGHISVRFDPFNFLSLPLPMDSYMDLEITVIKLDGTTPVRYGLRLNMDEKYTGLKKQLRDLCGLNSEQILLAEVHDSNIKNFPQDNQKVQLSVSGFLCAFEIPVPSSPISASSPTQIDFSSSPSTNGMFTLTTNGDLPKPIFIPNGMPNTVVPCGTEKNFTNGMVNGHMPSLPDSPFTGYIIAVHRKMMRTELYFLSPQENRPSLFGMPLIVPCTVHTRKKDLYDAVWIQVSWLARPLPPQEASIHAQDRDNCMGYQYPFTLRVVQKDGNSCAWCPQYRFCRGCKIDCGEDRAFIGNAYIAVDWHPTALHLRYQTSQERVVDKHESVEQSRRAQAEPINLDSCLRAFTSEEELGESEMYYCSKCKTHCLATKKLDLWRLPPFLIIHLKRFQFVNDQWIKSQKIVRFLRESFDPSAFLVPRDPALCQHKPLTPQGDELSKPRILAREVKKVDAQSSAGKEDMLLSKSPSSLSANISSSPKGSPSSSRKSGTSCPSSKNSSPNSSPRTLGRSKGRLRLPQIGSKNKPSSSKKNLDASKENGAGQICELADALSRGHMRGGSQPELVTPQDHEVALANGFLYEHEACGNGCGDGYSNGQLGNHSEEDSTDDQREDTHIKPIYNLYAISCHSGILSGGHYITYAKNPNCKWYCYNDSSCEELHPDEIDTDSAYILFYEQQGIDYAQFLPKIDGKKMADTSSTDEDSESDYEKYSMLQ

SEQ ID NO: 69019 - protein, 1089 aa, Homo sapiens
MPQRLPHARQHTPLPLGSADYRRVVSVRPQGPHRDPKDSRDAAKREQGSLAPRPVPASRGGKTLCKGYRQAPPGPPAQFQRPICSASPPWASRFSTPCPGGAVREDTYPVGTQGVPSLALAQGGPQGSWRFLEWKSMPRLPTDLDIGGPWFPHYDFEWSCWVRAISQEDQLATCWQAEHCGEVHNKDMSWPEEMSFTANSSKIDRQKVPTEKGATGLSNLGNTCFMNSSIQCVSNTQPLTQYFISGRHLYELNRTNPIGMKGHMAKCYGDLVQELWSGTQKSVAPLKLRRTIAKYAPKFDGFQQQDSQELLAFLLDGLHEDLNRVHEKPYVELKDSDGRPDWEVAAEAWDNHLRRNRSIIVDLFHGQLRSQVKCKTCGHISVRFDPFNFLSLPLPMDSYMDLEITVIKLDGTTPVRYGLRLNMDEKYTGLKKQLRDLCGLNSEQILLAEVHDSNIKNFPQDNQKVQLSVSGFLCAFEIPVPSSPISASSPTQIDFSSSPSTNGMFTLTTNGDLPKPIFIPNGMPNTVVPCGTEKNFTNGMVNGHMPSLPDSPFTGYIIAVHRKMMRTELYFLSPQENRPSLFGMPLIVPCTVHTRKKDLYDAVWIQVSWLARPLPPQEASIHAQDRDNCMGYQYPFTLRVVQKDGNSCAWCPQYRFCRGCKIDCGEDRAFIGNAYIAVDWHPTALHLRYQTSQERVVDKHESVEQSRRAQAEPINLDSCLRAFTSEEELGESEMYYCSKCKTHCLATKKLDLWRLPPFLIIHLKRFQFVNDQWIKSQKIVRFLRESFDPSAFLVPRDPALCQHKPLTPQGDELSKPRILAREVKKVDAQSSAGKEDMLLSKSPSSLSANISSSPKGSPSSSRKSGTSCPSSKNSSPNSSPRTLGRSKGRLRLPQIGSKNKPSSSKKNLDASKENGAGQICELADALSRGHMRGGSQPELVTPQDHEVALANGFLYEHEACGNGCGDGYSNGQLGNHSEEDSTDDQREDTHIKPIYNLYAISCHSGILSGGHYITYAKNPNCKWYCYNDSSCEELHPDEIDTDSAYILFYEQQGIDYAQFLPKIDGKKMADTSSTDEDSESDYEKYSMLQ

SEQ ID NO: 69020 - protein, 786 aa, Homo sapiens
MDMVENADSLQAQERKDILMKYDKGHRAGLPEDKGPEPVGINSSIDRFGILHETELPPVTAREAKKIRREMTRTSKWMEMLGEWETYKHSSKLIDRVYKGIPMNIRGPVWSVLLNIQEIKLKNPGRYQIMKERGKRSSEHIHHIDLDVRTTLRNHVFFRDRYGAKQRELFYILLAYSEYNPEVGYCRDLSHITALFLLYLPEEDAFWALVQLLASERHSLPGFHSPNGGTVQGLQDQQEHVVPKSQPKTMWHQDKEGLCGQCASLGCLLRNLIDGISLGLTLRLWDVYLVEGEQVLMPITSIALKVQQKRLMKTSRCGLWARLRNQFFDTWAMNDDTVLKHLRASTKKLTRKQGDLPPPAKREQGSLAPRPVPASRGGKTLCKGYRQAPPGPPAQFQRPICSASPPWASRFSTPCPGGAVREDTYPVGTQGVPSLALAQGGPQGSWRFLEWKSMPRLPTDLDIGGPWFPHYDFEWSCWVRAISQEDQLATCWQAEHCGEVHNKDMSWPEEMSFTANSSKIDRQKVPTEKGATGLSNLGNTCFMNSSIQCVSNTQPLTQYFISGRHLYELNRTNPIGMKGHMAKCYGDLVQELWSGTQKSVAPLKLRRTIAKYAPKFDGFQQQDSQELLAFLLDGLHEDLNRVHEKPYVELKDSDGRPDWEVAAEAWDNHLRRNRSIIVDLFHGQLRSQVKCKTCGHISVRFDPFNFLSLPLPMDSYMDLEITVIKLDGTTPVRYGLRLNMDEKYTGLKKQLRDLCGLNSEQILLAEVHDSNIKISPLHHLQMECSP

SEQ ID NO: 69021 - protein, 27 aa, Homo sapiens
MDMVENADSLQAQERKDILMKYDKGHR

SEQ ID NO: 69022 - protein, 57 aa, Homo sapiens
MDMVENADSLQAQERKDILMKYDKGHRAGLPEDKGSPLESTAALIVLAFCMRRSCLL

SEQ ID NO: 69023 - protein, 1102 aa, Homo sapiens
MNHQQQQQQQKAGEQQLSEPEDMEMEAGDTDDPPRITQNPVINGNVALSDGHNTAEEDMEDDTSWRSEATFQFTVERFSRLSESVLSPPCFVRNLPWKIMVMPRFYPDRPHQKSVGFFLQCNAESDSTSWSCHAQAVLKIINYRDDEKSFSRRISHLFFHKENDWGFSNFMAWSEVTDPEKGFIDDDKVTFEVFVQADAPHGVAWDSKKHTGYVGLKNQGATCYMNSLLQTLFFTNQLRKAVYMMPTEGDDSSKSVPLALQRVFYELQHSDKPVGTKKLTKSFGWETLDSFMQHDVQELCRVLLDNVENKMKGTCVEGTIPKLFRGKMVSYIQCKEVDYRSDRREDYYDIQLSIKGKKNIFESFVDYVAVEQLDGDNKYDAGEHGLQEAEKGVKFLTLPPVLHLQLMRFMYDPQTDQNIKINDRFEFPEQLPLDEFLQKTDPKDPANYILHAVLVHSGDNHGGHYVVYLNPKGDGKWCKFDDDVVSRCTKEEAIEHNYGGHDDDLSVRHCTNAYMLVYIRESKLSEVLQAVTDHDIPQQLVERLQEEKRIEAQKRKERQEAHLYMQVQIVAEDQFCGHQGNDMYDEEKVKYTVFKVLKNSSLAEFVQSLSQTMGFPQDQIRLWPMQARSNGTKRPAMLDNEADGNKTMIELSDNENPWTIFLETVDPELAASGATLPKFDKDHDVMLFLKMYDPKTRSLNYCGHIYTPISCKIRDLLPVMCDRAGFIQDTSLILYEEVKPNLTERIQDYDVSLDKALDELMDGDIIVFQKDDPENDNSELPTAKEYFRDLYHRVDVIFCDKTIPNDPGFVVTLSNRMNYFQVAKTVAQRLNTDPMLLQFFKSQGYRDGPGNPLRHNYEGTLRDLLQFFKPRQPKKLYYQQLKMKITDFENRRSFKCIWLNSQFREEEITLYPDKHGCVRDLLEECKKAVELGEKASGKLRLLEIVSYKIIGVHQEDELLECLSPATSRTFRIEEIPLDQVDIDKENEMLVTVAHFHKEVFGTFGIPFLLRIHQGEHFREVMKRIQSLLDIQEKEFEKFKFAIVMMGRHQYINEDEYEVNLKDFEPQPGNMSHPRPWLGLDHFNKAPKRSRYTYLEKAIKIHN

SEQ ID NO: 69024 - protein, 1110 aa, Homo sapiens
CSHSDVGERTSPIPQQRPLQSHAEMAGNHRLGLEAGDTDDPPRITQNPVINGNVALSDGHNTAEEDMEDDTSWRSEATFQFTVERFSRLSESVLSPPCFVRNLPWKIMVMPRFYPDRPHQKSVGFFLQCNAESDSTSWSCHAQAVLKIINYRDDEKSFSRRISHLFFHKENDWGFSNFMAWSEVTDPEKGFIDDDKVTFEVFVQADAPHGVAWDSKKHTGYVGLKNQGATCYMNSLLQTLFFTNQLRKAVYMMPTEGDDSSKSVPLALQRVFYELQHSDKPVGTKKLTKSFGWETLDSFMQHDVQELCRVLLDNVENKMKGTCVEGTIPKLFRGKMVSYIQCKEVDYRSDRREDYYDIQLSIKGKKNIFESFVDYVAVEQLDGDNKYDAGEHGLQEAEKGVKFLTLPPVLHLQLMRFMYDPQTDQNIKINDRFEFPEQLPLDEFLQKTDPKDPANYILHAVLVHSGDNHGGHYVVYLNPKGDGKWCKFDDDVVSRCTKEEAIEHNYGGHDDDLSVRHCTNAYMLVYIRESKLSEVLQAVTDHDIPQQLVERLQEEKRIEAQKRKERQEAHLYMQVQIVAEDQFCGHQGNDMYDEEKVKYTVFKVLKNSSLAEFVQSLSQTMGFPQDQIRLWPMQARSNGTKRPAMLDNEADGNKTMIELSDNENPWTIFLETVDPELAASGATLPKFDKDHDVMLFLKMYDPKTRSLNYCGHIYTPISCKIRDLLPVMCDRAGFIQDTSLILYEEVKPNLTERIQDYDVSLDKALDELMDGDIIVFQKDDPENDNSELPTAKEYFRDLYHRVDVIFCDKTIPNDPGFVVTLSNRMNYFQVAKTVAQRLNTDPMLLQFFKSQGYRDGPGNPLRHNYEGTLRDLLQFFKPRQPKKLYYQQLKMKITDFENRRSFKCIWLNSQFREEEITLYPDKHGCVRDLLEECKKAVELGEKASGKLRLLEIVSYKIIGVHQEDELLECLSPATSRTFRIEEIPLDQVDIDKENEMLVTVAHFHKEVFGTFGIPFLLRIHQGEHFREVMKRIQSLLDIQEKEFEKFKFAIVMMGRHQYINEDEYEVNLKDFEPQPGNMSHPRPWLGLDHFNKAPKRSRYTYLEKAIKIHN

SEQ ID NO: 69025 - protein, 1003 aa, Homo sapiens
MVMPRFYPDRPHQKSVGFFLQCNAESDSTSWSCHAQAVLKIINYRDDEKSFSRRISHLFFHKENDWGFSNFMAWSEVTDPEKGFIDDDKVTFEVFVQADAPHGVAWDSKKHTGYVGLKNQGATCYMNSLLQTLFFTNQLRKAVYMMPTEGDDSSKSVPLALQRVFYELQHSDKPVGTKKLTKSFGWETLDSFMQHDVQELCRVLLDNVENKMKGTCVEGTIPKLFRGKMVSYIQCKEVDYRSDRREDYYDIQLSIKGKKNIFESFVDYVAVEQLDGDNKYDAGEHGLQEAEKGVKFLTLPPVLHLQLMRFMYDPQTDQNIKINDRFEFPEQLPLDEFLQKTDPKDPANYILHAVLVHSGDNHGGHYVVYLNPKGDGKWCKFDDDVVSRCTKEEAIEHNYGGHDDDLSVRHCTNAYMLVYIRESKLSEVLQAVTDHDIPQQLVERLQEEKRIEAQKRKERQEAHLYMQVQIVAEDQFCGHQGNDMYDEEKVKYTVFKVLKNSSLAEFVQSLSQTMGFPQDQIRLWPMQARSNGTKRPAMLDNEADGNKTMIELSDNENPWTIFLETVDPELAASGATLPKFDKDHDVMLFLKMYDPKTRSLNYCGHIYTPISCKIRDLLPVMCDRAGFIQDTSLILYEEVKPNLTERIQDYDVSLDKALDELMDGDIIVFQKDDPENDNSELPTAKEYFRDLYHRVDVIFCDKTIPNDPGFVVTLSNRMNYFQVAKTVAQRLNTDPMLLQFFKSQGYRDGPGNPLRHNYEGTLRDLLQFFKPRQPKKLYYQQLKMKITDFENRRSFKCIWLNSQFREEEITLYPDKHGCVRDLLEECKKAVELGEKASGKLRLLEIVSYKIIGVHQEDELLECLSPATSRTFRIEEIPLDQVDIDKENEMLVTVAHFHKEVFGTFGIPFLLRIHQGEHFREVMKRIQSLLDIQEKEFEKFKFAIVMMGRHQYINEDEYEVNLKDFEPQPGNMSHPRPWLGLDHFNKAPKRSRYTYLEKAIKIHN

SEQ ID NO: 69026 - protein, 509 aa, Homo sapiens
MEDDTSWRSEATFQFTVERFSRLSESVLSPPCFVRNLPWKIMVMPRFYPDRPHQKSVGFFLQCNAESDSTSWSCHAQAVLKIINYRDDEKSFSRRISHLFFHKENDWGFSNFMAWSEVTDPEKGFIDDDKVTFEVFVQADAPHGVAWDSKKHTGYVGLKNQGATCYMNSLLQTLFFTNQLRKAVYMMPTEGDDSSKSVPLALQRVFYELQHSDKPVGTKKLTKSFGWETLDSFMQHDVQELCRVLLDNVENKMKGTCVEGTIPKLFRGKMVSYIQCKEVDYRSDRREDYYDIQLSIKGKKNIFESFVDYVAVEQLDGDNKYDAGEHGLQEAEKGVKFLTLPPVLHLQLMRFMYDPQTDQNIKINDRFEFPEQLPLDEFLQKTDPKDPANYILHAVLVHSGDNHGGHYVVYLNPKGDGKWCKFDDDVVSRCTKEEAIEHNYGGHDDDLSVRHCTNAYMLVYIRESKLTVGGAITRREKDRGSEAEGAAGSPSLYASADSRRGPVLWPPRE

SEQ ID NO: 69027 - protein, 2570 aa, Homo sapiens
MTATTRGSPVGGNDNQGQAPDGQSQPPLQQNQTSSPDSSNENSPATPPDEQGQGDAPPQLEDEEPAFPHTDLAKLDDMINRPRWVVPVLPKGELEVLLEAAIDLSKKGLDVKSEACQRFFRDGLTISFTKILTDEAVSGWKFEIHRCIINNTHRLVELCVAKLSQDWFPLLELLAMALNPHCKFHIYNGTRPCESVSSSVQLPEDELFARSPDPRSPKGWLVDLLNKFGTLNGFQILHDRFINGSALNVQIIAALIKPFGQCYEFLTLHTVKKYFLPIIEMVPQFLENLTDEELKKEAKNEAKNDALSMIIKSLKNLASRVPGQEETVKNLEIFRLKMILRLLQISSFNGKMNALNEVNKVISSVSYYTHRHGNPEEEEWLTAERMAEWIQQNNILSIVLRDSLHQPQYVEKLEKILRFVIKEKALTLQDLDNIWAAQAGKHEAIVKNVHDLLAKLAWDFSPEQLDHLFDCFKASWTNASKKQREKLLELIRRLAEDDKDGVMAHKVLNLLWNLAHSDDVPVDIMDLALSAHIKILDYSCSQDRDTQKIQWIDRFIEELRTNDKWVIPALKQIREICSLFGEAPQNLSQTQRSPHVFYRHDLINQLQHNHALVTLVAENLATYMESMRLYARDHEDYDPQTVRLGSRYSHVQEVQERLNFLRFLLKDGQLWLCAPQAKQIWKCLAENAVYLCDREACFKWYSKLMGDEPDLDPDINKDFFESNVLQLDPSLLTENGMKCFERFFKAVNCREGKLVAKRRAYMMDDLELIGLDYLWRVVIQSNDDIASRAIDLLKEIYTNLGPRLQVNQVVIHEDFIQSCFDRLKASYDTLCVLDGDKDSVNCARQEAVRMVRVLTVLREYINECDSDYHEERTILPMSRAFRGKHLSFVVRFPNQGRQVDDLEVWSHTNDTIGSVRRCILNRIKANVAHTKIELFVGGELIDPADDRKLIGQLNLKDKSLITAKLTQISSNMPSSPDSSSDSSTGSPGNHGNHYSDGPNPEVESCLPGVIMSLHPRYISFLWQVADLGSSLNMPPLRDGARVLMKLMPPDSTTIEKLRAICLDHAKLGESSLSPSLDSLFFGPSASQVLYLTEVVYALLMPAGAPLADDSSDFQFHFLKSGGLPLVLSMLTRNNFLPNADMETRRGAYLNALKIAKLLLTAIGYGHVRAVAEACQPGVEGVNPMTQINQVTHDQAVVLQSALQSIPNPSSECMLRNVSVRLAQQISDEASRYMPDICVIRAIQKIIWASGCGSLQLVFSPNEEITKIYEKTNAGNEPDLEDEQVCCEALEVMTLCFALIPTALDALSKEKAWQTFIIDLLLHCHSKTVRQVAQEQFFLMCTRCCMGHRPLLFFITLLFTVLGSTARERAKHSGDYFTLLRHLLNYAYNSNINVPNAEVLLNNEIDWLKRIRDDVKRTGETGIEETILEGHLGVTKELLAFQTSEKKFHIGCEKGGANLIKELIDDFIFPASNVYLQYMRNGELPAEQAIPVCGSPPTINAGFELLVALAVGCVRNLKQIVDSLTEMYYIGTAITTCEALTEWEYLPPVGPRPPKGFVGLKNAGATCYMNSVIQQLYMIPSIRNGILAIEGTGSDVDDDMSGDEKQDNESNVDPRDDVFGYPQQFEDKPALSKTEDRKEYNIGVLRHLQVIFGHLAASRLQYYVPRGFWKQFRLWGEPVNLREQHDALEFFNSLVDSLDEALKALGHPAMLSKVLGGSFADQKICQGCPHRYECEESFTTLNVDIRNHQNLLDSLEQYVKGDLLEGANAYHCEKCNKKVDTVKRLLIKKLPPVLAIQLKRFDYDWERECAIKFNDYFEFPRELDMEPYTVAGVAKLEGDNVNPESQLIQQSEQSESETAGSTKYRLVGVLVHSGQASGGHYYSYIIQRNGGDGERNRWYKFDDGDVTECKMDDDEEMKNQCFGGEYMGEVFDHMMKRMSYRRQKRWWNAYILFYERMDTIDQDDELIRYISELAITTRPHQIIMPSAIERSVRKQNVQFMHNRMQYSMEYFQFMKKLLTCNGVYLNPPPGQDHLLPEAEEITMISIQLAARFLFTTGFHTKKVVRGSASDWYDALCILLRHSKNVRFWFAHNVLFNVSNRFSEYLLECPSAEVRGAFAKLIVFIAHFSLQDGPCPSPFASPGPSSQAYDNLSLSDHLLRAVLNLLRREVSEHGRHLQQYFNLFVMYANLGVAEKTQLLKLSVPATFMLVSLDEGPGPPIKYQYAELGKLYSVVSQLIRCCNVSSRMQSSINGNPPLPNPFGDPNLSQPIMPIQQNVADILFVRTSYVKKIIEDCSNSEETVKLLRFCCWENPQFSSTVLSELLWQVAYSYTYELRPYLDLLLQILLIEDSWQTHRIHNALKGIPDDRDGLFDTIQRSKNHYQKRAYQCIKCMVALFSNCPVAYQILQGNGDLKRKWTWAVEWLGDELERRPYTGNPQYTYNNWSPPVQSNETSNGYFLERSHSARMTLAKACELCPEEVKKATSVQQIEMEESKEPDDQDAPDEHESPPPEDAPLYPHSPGSQYQQNNHVHGQPYTGPAAHHMNNPQRTGQRAQENYEGSEEVSPPQTKDQ

SEQ ID NO: 69028 - protein, 2554 aa, Homo sapiens
MTATTRGSPVGGNDNQGQAPDGQSQPPLQQNQTSSPDSSNENSPATPPDEQGQGDAPPQLEDEEPAFPHTDLAKLDDMINRPRWVVPVLPKGELEVLLEAAIDLSKKGLDVKSEACQRFFRDGLTISFTKILTDEAVSGWKFEIHRCIINNTHRLVELCVAKLSQDWFPLLELLAMALNPHCKFHIYNGTRPCESVSSSVQLPEDELFARSPDPRSPKGWLVDLLNKFGTLNGFQILHDRFINGSALNVQIIAALIKPFGQCYEFLTLHTVKKYFLPIIEMVPQFLENLTDEELKKEAKNEAKNDALSMIIKSLKNLASRVPGQEETVKNLEIFRLKMILRLLQISSFNGKMNALNEVNKVISSVSYYTHRHGNPEEEEWLTAERMAEWIQQNNILSIVLRDSLHQPQYVEKLEKILRFVIKEKALTLQDLDNIWAAQAGKHEAIVKNVHDLLAKLAWDFSPEQLDHLFDCFKASWTNASKKQREKLLELIRRLAEDDKDGVMAHKVLNLLWNLAHSDDVPVDIMDLALSAHIKILDYSCSQDRDTQKIQWIDRFIEELRTNDKWVIPALKQIREICSLFGEAPQNLSQTQRSPHVFYRHDLINQLQHNHALVTLVAENLATYMESMRLYARDHEDYDPQTVRLGSRYSHVQEVQERLNFLRFLLKDGQLWLCAPQAKQIWKCLAENAVYLCDREACFKWYSKLMGDEPDLDPDINKDFFESNVLQLDPSLLTENGMKCFERFFKAVNCREGKLVAKRRAYMMDDLELIGLDYLWRVVIQSNDDIASRAIDLLKEIYTNLGPRLQVNQVVIHEDFIQSCFDRLKASYDTLCVLDGDKDSVNCARQEAVRMVRVLTVLREYINECDSDYHEERTILPMSRAFRGKHLSFVVRFPNQGRQVDDLEVWSHTNDTIGSVRRCILNRIKANVAHTKIELFVGGELIDPADDRKLIGQLNLKDKSLITAKLTQISSNMPSSPDSSSDSSTGSPGNHGNHYSDGPNPEVESCLPGVIMSLHPRYISFLWQVADLGSSLNMPPLRDGARVLMKLMPPDSTTIEKLRAICLDHAKLGESSLSPSLDSLFFGPSASQVLYLTEVVYALLMPAGAPLADDSSDFQFHFLKSGGLPLVLSMLTRNNFLPNADMETRRGAYLNALKIAKLLLTAIGYGHVRAVAEACQPGVEGVNPMTQINQVTHDQAVVLQSALQSIPNPSSECMLRNVSVRLAQQISDEASRYMPDICVIRAIQKIIWASGCGSLQLVFSPNEEITKIYEKTNAGNEPDLEDEQVCCEALEVMTLCFALIPTALDALSKEKAWQTFIIDLLLHCHSKTVRQVAQEQFFLMCTRCCMGHRPLLFFITLLFTVLGSTARERAKHSGDYFTLLRHLLNYAYNSNINVPNAEVLLNNEIDWLKRIRDDVKRTGETGIEETILEGHLGVTKELLAFQTSEKKFHIGCEKGGANLIKELIDDFIFPASNVYLQYMRNGELPAEQAIPVCGSPPTINAGFELLVALAVGCVRNLKQIVDSLTEMYYIGTAITTCEALTEWEYLPPVGPRPPKGFVGLKNAGATCYMNSVIQQLYMIPSIRNGILAIEGTGSDVDDDMSGDEKQDNESNVDPRDDVFGYPQQFEDKPALSKTEDRKEYNIGVLRHLQVIFGHLAASRLQYYVPRGFWKQFRLWGEPVNLREQHDALEFFNSLVDSLDEALKALGHPAMLSKVLGGSFADQKICQGCPHRYECEESFTTLNVDIRNHQNLLDSLEQYVKGDLLEGANAYHCEKCNKKVDTVKRLLIKKLPPVLAIQLKRFDYDWERECAIKFNDYFEFPRELDMEPYTVAGVAKLEGDNVNPESQLIQQSEQSESETAGSTKYRLVGVLVHSGQASGGHYYSYIIQRNGGDGERNRWYKFDDGDVTECKMDDDEEMKNQCFGGEYMGEVFDHMMKRMSYRRQKRWWNAYILFYERMDTIDQDDELIRYISELAITTRPHQIIMPSAIERSVRKQNVQFMHNRMQYSMEYFQFMKKLLTCNGVYLNPPPGQDHLLPEAEEITMISIQLAARFLFTTGFHTKKVVRGSASDWYDALCILLRHSKNVRFWFAHNVLFNVSNRFSEYLLECPSAEVRGAFAKLIVFIAHFSLQDGPCPSPFASPGPSSQAYDNLSLSDHLLRAVLNLLRREVSEHGRHLQQYFNLFVMYANLGVAEKTQLLKLSVPATFMLVSLDEGPGPPIKYQYAELGKLYSVVSQLIRCCNVSSRMQSSINGNPPLPNPFGDPNLSQPIMPIQQNVADILFVRTSYVKKIIEDCSNSEETVKLLRFCCWENPQFSSTVLSELLWQVAYSYTYELRPYLDLLLQILLIEDSWQTHRIHNALKGIPDDRDGLFDTIQRSKNHYQKRAYQCIKCMVALFSNCPVAYQILQGNGDLKRKWTWAVEWLGDELERRPYTGNPQYTYNNWSPPVQSNETSNGYFLERSHSARMTLAKACELCPEEEPDDQDAPDEHESPPPEDAPLYPHSPGSQYQQNNHVHGQPYTGPAAHHMNNPQRTGQRAQENYEGSEEVSPPQTKDQ

SEQ ID NO: 69029 - protein, 2555 aa, Homo sapiens
MTAITHGSPVGGNDSQGQVLDGQSQHLFQQNQTSSPDSSNENSVATPPPEEQGQGDAPPQHEDEEPAFPHTELANLDDMINRPRWVVPVLPKGELEVLLEAAIDLSVKGLDVKSEACQRFFRDGLTISFTKILMDEAVSGWKFEIHRCIINNTHRLVELCVAKLSQDWFPLLELLAMALNPHCKFHIYNGTRPCELISSNAQLPEDELFARSSDPRSPKGWLVDLINKFGTLNGFQILHDRFFNGSALNIQIIAALIKPFGQCYEFLSQHTLKKYFIPVIEIVPHLLENLTDEELKKEAKNEAKNDALSMIIKSLKNLASRISGQDETIKNLEIFRLKMILRLLQISSFNGKMNALNEINKVISSVSYYTHRHSNPEEEEWLTAERMAEWIQQNNILSIVLQDSLHQPQYVEKLEKILRFVIKEKALTLQDLDNIWAAQAGKHEAIVKNVHDLLAKLAWDFSPGQLDHLFDCFKASWTNASKKQREKLLELIRRLAEDDKDGVMAHKVLNLLWNLAQSDDVPVDIMDLALSAHIKILDYSCSQDRDAQKIQWIDHFIEELRTNDKWVIPALKQIREICSLFGEASQNLSQTQRSPHIFYRHDLINQLQQNHALVTLVAENLATYMNSIRLYAGDHEDYDPQTVRLGSRYSHVQEVQERLNFLRFLLKDGQLWLCAPQAKQIWKCLAENAVYLCDREACFKWYSKLMGDEPDLDPDINKDFFESNVLQLDPSLLTENGMKCFERFFKAVNCRERKLIAKRRSYMMDDLELIGLDYLWRVVIQSSDEIANRAIDLLKEIYTNLGPRLKANQVVIHEDFIQSCFDRLKASYDTLCVFDGDKNSINCARQEAIRMVRVLTVIKEYINECDSDYHKERMILPMSRAFRGKHLSLIVRFPNQGRQVDELDIWSHTNDTIGSVRRCIVNRIKANVAHKKIELFVGGELIDSEDDRKLIGQLNLKDKSLITAKLTQINFNMPSSPDSSSDSSTASPGNHRNHYNDGPNLEVESCLPGVIMSVHPRYISFLWQVADLGSNLNMPPLRDGARVLMKLMPPDRTAVEKLRAVCLDHAKLGEGKLSPPLDSLFFGPSASQVLYLTEVVYALLMPAGVPLTDGSSDFQVHFLKSGGLPLVLSMLIRNNFLPNTDMETRRGAYLNALKIAKLLLTAIGYGHVRAVAEACQPVVDGTDPITQINQVTHDQAVVLQSALQSIPNPSSECVLRNESILLAQEISNEASRYMPDICVIRAIQKIIWASACGALGLVFSPNEEITKIYQMTTNGSNKLEVEDEQVCCEALEVMTLCFALLPTALDALSKEKAWQTFIIDLLLHCPSKTVRQLAQEQFFLMCTRCCMGHRPLLFFITLLFTILGSTAREKGKYSGDYFTLLRHLLNYAYNGNINIPNAEVLLVSEIDWLKRIRDNVKNTGETGVEEPILEGHLGVTKELLAFQTSEKKYHFGCEKGGANLIKELIDDFIFPASKVYLQYLRSGELPAEQAIPVCSSPVTINAGFELLVALAIGCVRNLKQIVDCLTEMYYMGTAITTCEALTEWEYLPPVGPRPPKGFVGLKNAGATCYMNSVIQQLYMIPSIRNSILAIEGTGSDLHDDMFGDEKQDSESNVDPRDDVFGYPHQFEDKPALSKTEDRKEYNIGVLRHLQVIFGHLAASQLQYYVPRGFWKQFRLWGEPVNLREQHDALEFFNSLVDSLDEALKALGHPAILSKVLGGSFADQKICQGCPHRYECEESFTTLNVDIRNHQNLLDSLEQYIKGDLLEGANAYHCEKCDKKVDTVKRLLIKKLPRVLAIQLKRFDYDWERECAIKFNDYFEFPRELDMGPYTVAGVANLERDNVNSENELIEQKEQSDNETAGGTKYRLVGVLVHSGQASGGHYYSYIIQRNGKDDQTDHWYKFDDGDVTECKMDDDEEMKNQCFGGEYMGEVFDHMMKRMSYRRQKRWWNAYILFYEQMDMIDEDDEMIRYISELTIARPHQIIMSPAIERSVRKQNVKFMHNRLQYSLEYFQFVKKLLTCNGVYLNPAPGQDYLLPEAEEITMISIQLAARFLFTTGFHTKKIVRGPASDWYDALCVLLRHSKNVRFWFTHNVLFNVSNRFSEYLLECPSAEVRGAFAKLIVFIAHFSLQDGSCPSPFASPGPSSQACDNLSLSDHLLRATLNLLRREVSEHGHHLQQYFNLFVMYANLGVAEKTQLLKLNVPATFMLVSLDEGPGPPIKYQYAELGKLYSVVSQLIRCCNVSSTMQSSINGNPPLPNPFGDLNLSQPIMPIQQNVLDILFVRTSYVKKIIEDCSNSEDTIKLLRFCSWENPQFSSTVLSELLWQVAYSYTYELRPYLDLLFQILLIEDSWQTHRIHNALKGIPDDRDGLFDTIQRSKNHYQKRAYQCIKCMVALFSSCPVAYQILQGNGDLKRKWTWAVEWLGDELERRPYTGNPQYSYNNWSPPVQSNETANGYFLERSHSARMTLAKACELCPEEEPDDQDAPDEHEPSPSEDAPLYPHSPASQYQQNNHVHGQPYTGPAAHHLNNPQKTGQRTQENYEGNEEVSSPQMKDQ

SEQ ID NO: 69030 - protein, 237 aa, Homo sapiens
  VARIANT 1: note = MOD_RES - Any amino acid
XLLKTAVTQRIPSNYFAFALGRILSSHLLSSANFSGRIHNALKGIPDDRDGLFDTIQRSKNHYQKRAYQCIKCMVALFSSCPVAYQILQGNGDLKRKWTWAVEWLGDELERRPYTGNPQYSYNNWSPPVQSNETANGYFLERSHSARMTLAKACELCPEEEPDDQDAPDEHEPSPSEDAPLYPHSPASQYQQNNHVHGQPYTGPAAHHLNNPQKTGQRTQENYEGNEEVSSPQMKDQ

SEQ ID NO: 69031 - protein, 1066 aa, Homo sapiens
MTDQENNNNISSNPFAALFGSLADAKQFAAIQKEQLKQQSDELPASPDDSDNSVSESLDEFDYSVAEISRSFRSQQEICEQLNINHMIQRIFLITLDNSDPSLKSGNGIPSRCVYLEEMAVELEDQDWLDMSNVEQALFARLLLQDPGNHLINMTSSTTLNLSADRDAGERHIFCYLYSCFQRAKEEITKVPENLLPFAVQCRNLTVSNTRTVLLTPEIYVDQNIHEQLVDLMLEAIQGAHFEDVTEFLEEVIEALILDEEVRTFPEVMIPVFDILLGRIKDLELCQILLYAYLDILLYFTRQKDMAKVFVEYIQPKDPTNGQMYQKTLLGVILSISCLLKTPGVVENHGYFLNPSRSSPQEIKVQEANIHQFMAQFHEKIYQMLKNLLQLSPETKHCILSWLGNCLHANAGRTKIWANQMPEIFFQMYASDAFFLNLGAALLKLCQPFCKPRSSRLLTFNPTYCALKELNDEERKIKNVHMRGLDKETCLIPAVQEPKFPQNYNLVTENLALTEYTLYLGFHRLHDQMVKINQNLHRLQVAWRDAQQSSSPAADNLREQFERLMTIYLSTKTAMTEPQMLQNCLNLQVSMAVLLVQLAIGNEGSQPIELTFPLPDGYSSLAYVPEFFADNLGDFLIFLRRFADDILETSADSLEHVLHFITIFTGSIERMKNPHLRAKLAEVLEAVMPHLDQTPNPLVSSVFHRKRVFCNFQYAPQLAEALIKVFVDIEFTGDPHQFEQKFNYRRPMYPILRYMWGTDTYRESIKDLADYASKNLEAMNPPLFLRFLNLLMNDAIFLLDEAIQYLSKIKIQQIEKDRGEWDSLTPEARREKEAGLQMFGQLARFHNIMSNETIGTLAFLTSEIKSLFVHPFLAERIISMLNYFLQHLVGPKMGALKVKDFSEFDFKPQQLVSDICTIYLNLGDEENFCATVPKDGRSYSPTLFAQTVRVLKKINKPGNMIMAFSNLAERIKSLADLQQQEEETYADACDEFLDPIMSTLMCDPVVLPSSRVTVDRSTIARHLLSDQTDPFNRSPLTMDQIRPNTELKEKIQRWLAERKQQKEQLE

SEQ ID NO: 69032 - protein, 1073 aa, Homo sapiens
MTDQENNNNISSNPFAALFGSLADAKQFAAIQKEQLKQQSDELPASPDDSDNSVSESLDEFDYSVAEISRSFRSQQEICEQLNINHMIQRIFLITLDNSDPSLKSGNGIPSRCVYLEEMAVELEDQDWLDMSNVEQALFARLLLQDPGNHLINMTSSTTLNLSADRDAGERHIFCYLYSCFQRAKEEITKVPENLLPFAVQCRNLTVSNTRTVLLTPEIYVDQNIHEQLVDLMLEAIQGAREYMNKIYFEDVTEFLEEVIEALILDEEVRTFPEVMIPVFDILLGRIKDLELCQILLYAYLDILLYFTRQKDMAKVFVEYIQPKDPTNGQMYQKTLLGVILSISCLLKTPGVVENHGYFLNPSRSSPQEIKVQEANIHQFMAQFHEKIYQMLKNLLQLSPETKHCILSWLGNCLHANAGRTKIWANQMPEIFFQMYASDAFFLNLGAALLKLCQPFCKPRSSRLLTFNPTYCALKELNDEERKIKNVHMRGLDKETCLIPAVQEPKFPQNYNLVTENLALTEYTLYLGFHRLHDQMVKINQNLHRLQVAWRDAQQSSSPAADNLREQFERLMTIYLSTKTAMTEPQMLQNCLNLQVSMAVLLVQLAIGNEGSQPIELTFPLPDGYSSLAYVPEFFADNLGDFLIFLRRFADDILETSADSLEHVLHFITIFTGSIERMKNPHLRAKLAEVLEAVMPHLDQTPNPLVSSVFHRKRVFCNFQYAPQLAEALIKVFVDIEFTGDPHQFEQKFNYRRPMYPILRYMWGTDTYRESIKDLADYASKNLEAMNPPLFLRFLNLLMNDAIFLLDEAIQYLSKIKIQQIEKDRGEWDSLTPEARREKEAGLQMFGQLARFHNIMSNETIGTLAFLTSEIKSLFVHPFLAERIISMLNYFLQHLVGPKMGALKVKDFSEFDFKPQQLVSDICTIYLNLGDEENFCATVPKDGRSYSPTLFAQTVRVLKKINKPGNMIMAFSNLAERIKSLADLQQQEEETYADACDEFLDPIMSTLMCDPVVLPSSRVTVDRSTIARHLLSDQTDPFNRSPLTMDQIRPNTELKEKIQRWLAERKQQKEQLE

SEQ ID NO: 69033 - protein, 538 aa, Homo sapiens
MVKINQNLHRLQVAWRDAQQSSSPAADNLREQFERLMTIYLSTKTAMTEPQMLQNCLNLQVSMAVLLVQLAIGNEGSQPIELTFPLPDGYSSLAYVPEFFADNLGDFLIFLRRFADDILETSADSLEHVLHFITIFTGSIERMKNPHLRAKLAEVLEAVMPHLDQTPNPLVSSVFHRKRVFCNFQYAPQLAEALIKVFVDIEFTGDPHQFEQKFNYRRPMYPILRYMWGTDTYRESIKDLADYASKNLEAMNPPLFLRFLNLLMNDAIFLLDEAIQYLSKIKIQQIEKDRGEWDSLTPEARREKEAGLQMFGQLARFHNIMSNETIGTLAFLTSEIKSLFVHPFLAERIISMLNYFLQHLVGPKMGALKVKDFSEFDFKPQQLVSDICTIYLNLGDEENFCATVPKDGRSYSPTLFAQTVRVLKKINKPGNMIMAFSNLAERIKSLADLQQQEEETYADACDEFLDPIMSTLMCDPVVLPSSRVTVDRSTIARHLLSDQTDPFNRSPLTMDQIRPNTELKEKIQRWLAERKQQKEQLE

SEQ ID NO: 69034 - protein, 1173 aa, Homo sapiens
MEELSADEIRRRRLARLAGGQTSQPTTPLTSPQRENPPGPPIAASAPGPSQSLGLNVHNMTPATSPIGASGVAHRSQSSEGVSSLSSSPSNSLETQSQSLSRSQSMDIDGVSCEKSMSQVDVDSGIENMEVDENDRREKRSLSDKEPSSGPEVSEEQALQLVCKIFRVSWKDRDRDVIFLSSLSAQFKQNPKEVFSDFKDLIGQILMEVLMMSTQTRDENPFASLTATSQPIAAAARSPDRNLLLNTGSNPGTSPMFCSVASFGASSLSSLGASGGASNWDSYSDHFTIETCKETDMLNYLIECFDRVGIEEKKAPKMCSQPAVSQLLSNIRSQCISHTALVLQGSLTQPRSLQQPSFLVPYMLCRNLPYGFIQELVRTTHQDEEVFKQIFIPILQGLALAAKECSLDSDYFKYPLMALGELCETKFGKTHPVCNLVASLRLWLPKSLSPGCGRELQRLSYLGAFFSFSVFAEDDVKVVEKYFSGPAITLENTRVVSQSLQHYLELGRQELFKILHSILLNGETREAALSYMAAVVNANMKKAQMQTDDRLVSTDGFMLNFLWVLQQLSTKIKLETVDPTYIFHPRCRITLPNDETRVNATMEDVNDWLTELYGDQPPFSEPKFPTECFFLTLHAHHLSILPSCRRYIRRLRAIRELNRTVEDLKNNESQWKDSPLATRHREMLKRCKTQLKKLVRCKACADAGLLDESFLRRCLNFYGLLIQLLLRILDPAYPDITLPLNSDVPKVFAALPEFYVEDVAEFLFFIVQYSPQALYEPCTQDIVMFLVVMLCNQNYIRNPYLVAKLVEVMFMTNPAVQPRTQKFFEMIENHPLSTKLLVPSLMKFYTDVEHTGATSEFYDKFTIRYHISTIFKSLWQNIAHHGTFMEEFNSGKQFVRYINMLINDTTFLLDESLESLKRIHEVQEEMKNKEQWDQLPRDQQQARQSQLAQDERVSRSYLALATETVDMFHILTKQVQKPFLRPELGPRLAAMLNFNLQQLCGPKCRDLKVENPEKYGFEPKKLLDQLTDIYLQLDCARFAKAIADDQRSYSKELFEEVISKMRKAGIKSTIAIEKFKLLAEKVEEIVAKNARAEIDYSDAPDEFRDPLMDTLMTDPVRLPSGTIMDRSIILRHLLNSPTDPFNRQTLTESMLEPVPELKEQIQAWMREKQNSDH

SEQ ID NO: 69035 - protein, 1302 aa, Homo sapiens
MEELSADEIRRRRLARLAGGQTSQPTTPLTSPQRENPPGPPIAASAPGPSQSLGLNVHNMTPATSPIGASGVAHRSQSSEGVSSLSSSPSNSLETQSQSLSRSQSMDIDGVSCEKSMSQVDVDSGIENMEVDENDRREKRSLSDKEPSSGPEVSEEQALQLVCKIFRVSWKDRDRDVIFLSSLSAQFKQNPKEVFSDFKDLIGQILMEVLMMSTQTRDENPFASLTATSQPIAAAARSPDRNLLLNTGSNPGTSPMFCSVASFGASSLSSLYESSPAPTPSFWSSVPVMGPSLASPSRAASQLAVPSTPLSPHSAASGTAAGSQPSSPRYRPYTVTHPWASSGVSILSSSPSPPALASSPQAVPASSSRQRPSSTGPPLPPASPSATSRRPSSLRISPSLGASGGASNWDSYSDHFTIETCKETDMLNYLIECFDRVGIEEKKAPKMCSQPAVSQLLSNIRSQCISHTALVLQGSLTQPRSLQQPSFLVPYMLCRNLPYGFIQELVRTTHQDEEVFKQIFIPILQGLALAAKECSLDSDYFKYPLMALGELCETKFGKTHPVCNLVASLRLWLPKSLSPGCGRELQRLSYLGAFFSFSVFAEDDVKVVEKYFSGPAITLENTRVVSQSLQHYLELGRQELFKILHSILLNGETREAALSYMAAVVNANMKKAQMQTDDRLVSTDGFMLNFLWVLQQLSTKIKLETVDPTYIFHPRCRITLPNDETRVNATMEDVNDWLTELYGDQPPFSEPKFPTECFFLTLHAHHLSILPSCRRYIRRLRAIRELNRTVEDLKNNESQWKDSPLATRHREMLKRCKTQLKKLVRCKACADAGLLDESFLRRCLNFYGLLIQLLLRILDPAYPDITLPLNSDVPKVFAALPEFYVEDVAEFLFFIVQYSPQALYEPCTQDIVMFLVVMLCNQNYIRNPYLVAKLVEVMFMTNPAVQPRTQKFFEMIENHPLSTKLLVPSLMKFYTDVEHTGATSEFYDKFTIRYHISTIFKSLWQNIAHHGTFMEEFNSGKQFVRYINMLINDTTFLLDESLESLKRIHEVQEEMKNKEQWDQLPRDQQQARQSQLAQDERVSRSYLALATETVDMFHILTKQVQKPFLRPELGPRLAAMLNFNLQQLCGPKCRDLKVENPEKYGFEPKKLLDQLTDIYLQLDCARFAKAIADDQRSYSKELFEEVISKMRKAGIKSTIAIEKFKLLAEKVEEIVAKNARAEIDYSDAPDEFRDPLMDTLMTDPVRLPSGTIMDRSIILRHLLNSPTDPFNRQTLTESMLEPVPELKEQIQAWMREKQNSDH

SEQ ID NO: 69036 - protein, 100 aa, Homo sapiens
MEELSADEIRRRRLARLAGGQTSQPTTPLTSPQRENPPGPPIAASAPGPSQSLGLNVHNMTPATSPIGASGLGIISDDKMIKTEFGSADFMNLVDGFKIK

SEQ ID NO: 69037 - protein, 1061 aa, Homo sapiens
MSQVDVDSGIENMEVDENDRREKRSLSDKEPSSGPEVSEEQALQLVCKIFRVSWKDRDRDVIFLSSLSAQFKQNPKEVFSDFKDLIGQILMEVLMMSTQTRDENPFASLTATSQPIAAAARSPDRNLLLNTGSNPGTSPMFCSVASFGASSLSSLGASGGASNWDSYSDHFTIETCKETDMLNYLIECFDRVGIEEKKAPKMCSQPAVSQLLSNIRSQCISHTALVLQGSLTQPRSLQQPSFLVPYMLCRNLPYGFIQELVRTTHQDEEVFKQIFIPILQGLALAAKECSLDSDYFKYPLMALGELCETKFGKTHPVCNLVASLRLWLPKSLSPGCGRELQRLSYLGAFFSFSVFAEDDVKVVEKYFSGPAITLENTRVVSQSLQHYLELGRQELFKILHSILLNGETREAALSYMAAVVNANMKKAQMQTDDRLVSTDGFMLNFLWVLQQLSTKIKLETVDPTYIFHPRCRITLPNDETRVNATMEDVNDWLTELYGDQPPFSEPKFPTECFFLTLHAHHLSILPSCRRYIRRLRAIRELNRTVEDLKNNESQWKDSPLATRHREMLKRCKTQLKKLVRCKACADAGLLDESFLRRCLNFYGLLIQLLLRILDPAYPDITLPLNSDVPKVFAALPEFYVEDVAEFLFFIVQYSPQALYEPCTQDIVMFLVVMLCNQNYIRNPYLVAKLVEVMFMTNPAVQPRTQKFFEMIENHPLSTKLLVPSLMKFYTDVEHTGATSEFYDKFTIRYHISTIFKSLWQNIAHHGTFMEEFNSGKQFVRYINMLINDTTFLLDESLESLKRIHEVQEEMKNKEQWDQLPRDQQQARQSQLAQDERVSRSYLALATETVDMFHILTKQVQKPFLRPELGPRLAAMLNFNLQQLCGPKCRDLKVENPEKYGFEPKKLLDQLTDIYLQLDCARFAKAIADDQRSYSKELFEEVISKMRKAGIKSTIAIEKFKLLAEKVEEIVAKNARAEIDYSDAPDEFRGKWTHPLMDTLMTDPVRLPSGTIMDRSIILRHLLNSPTDPFNRQTLTESMLEPVPELKEQIQAWMREKQNSDH

SEQ ID NO: 69038 - protein, 170 aa, Homo sapiens
MPGEVQASYLKSQSKLSDEGRLEPRKFHCKGVKVPRNFRLLEELEEGQKGVGDGTVSWGLEDDEDMTLTRWTGMIIGPPRTIYENRIYSLKIECGPKYPEAPPFVRFVTKINMNGVNSSNGVVDPRAISVLAKWQNSYSIKVVLQELRRLMMSKENMKLPQPPEGQCYSN

SEQ ID NO: 69039 - protein, 103 aa, Homo sapiens [sequence omitted]

SEQ ID NO: 69040 - protein, 147 aa, Homo sapiens
MAATTGSGVKVPRNFRLLEELEEGQKGVGDGTVSWGLEDDEDMTLTRWTGMIIGPPRTIYENRIYSLKIECGPKYPEAPPFVRFVTKINMNGVNSSNGVVDPRAISVLAKWQNSYSIKVVLQELRRLMMSKENMKLPQPPEGQCYSN

SEQ ID NO: 69041 - protein, 170 aa, Homo sapiens; identical to SEQ ID NO: 69038

SEQ ID NO: 69042 - protein, 103 aa, Homo sapiens
MKEDLNLENFTAKTIYENRIYSLKIECGPKYPEAPPFVRFVTKINMNGVNSSNGVVDPRAISVLAKWQNSYSIKVVLQELRRLMMSKENMKLPQPPEGQCYSN

SEQ ID NO: 69043 - protein, 103 aa, Homo sapiens; identical to SEQ ID NO: 69042

SEQ ID NO: 69044 - protein, 105 aa, Homo sapiens
MAATTGSGVKVPRNFRLLEELEEGQKGVGDGTVSWGLEDDEDMTLTRWTGMIIGPPRVDPRAISVLAKWQNSYSIKVVLQELRRLMMSKENMKLPQPPEGQCYSN

SEQ ID NO: 69045 - protein, 122 aa, Homo sapiens
MSTPARRRLMRDFKRLQEDPPAGVSGAPSENNIMVWNAVIFGPEGTPFEDVYADGSICLDILQNRWSPTYDVSSILTSIQSLLDEPNPNSPANSQAAQLYQENKREYEKRVSAIVEQSWRDC

SEQ ID NO: 69046 - protein, 152 aa, Homo sapiens
MSTPARRRLMRDFKRLQEDPPAGVSGAPSENNIMVWNAVIFGPEGTPFEDGTFKLTIEFTEEYPNKPPTVRFVSKMFHPNVYADGSICLDILQNRWSPTYDVSSILTSIQSLLDEPNPNSPANSQAAQLYQENKREYEKRVSAIVEQSWRDC

SEQ ID NO: 69047 - protein, 77 aa, Homo sapiens
MFHPNVYADGSICLDILQNRWSPTYDVSSILTSIQSLLDEPNPNSPANSQAAQLYQENKREYEKRVSAIVEQSWRDC

SEQ ID NO: 69048 - protein, 152 aa, Homo sapiens
MSTPARRRLMRDFKRLQEDPPVGVSGAPSENNIMQWNAVIFGPEGTPFEDGTFKLVIEFSEEYPNKPPTVRFLSKMFHPNVYADGSICLDILQNRWSPTYDVSSILTSIQSLLDEPNPNSPANSQAAQLYQENKREYEKRVSAIVEQSWNDS

SEQ ID NO: 69049 - protein, 50 aa, Homo sapiens
MASQNRDPAATSVAAARKGAEPSGGAARGPVGKRLQQELMTLMNPTLIVP

SEQ ID NO: 69050 - protein, 161 aa, Homo sapiens
MASQNRDPAATSVAAARKGAEPSGGAARGPVGKRLQQELMTLMMSGDKGISAFPESDNLFKWVGTIHGAAGTAVGSIRTSSTVCLLSGPRETQDSSKPLVWGLGWDMRLLLELTLQLFLQMPEPNIDSPLNTHAAELWKNPTAFKKYLQETYSKQVTSQEP

SEQ ID NO: 69051 - protein, 150 aa, Homo sapiens
MASQNRDPAATSVAAARKGAEPSGGAARGPVGKRLQQELMTLMVYEDLRYKLSLEFPSGYPYNAPTVKFLTPCYHPNVDTQGNICLDILKEKWSALYDVRTILLSIQSLLGEPNIDSPLNTHAAELWKNPTAFKKYLQETYSKQVTSQEP

SEQ ID NO: 69052 - protein, 179 aa, Homo sapiens
MASQNRDPAATSVAAARKGAEPSGGAARGPVGKRLQQELMTLMMSGDKGISAFPESDNLFKWVGTIHGAAGTVYEDLRYKLSLEFPSGYPYNAPTVKFLTPCYHPNVDTQGNICLDILKEKWSALYDVRTILLSIQSLLGEPNIDSPLNTHAAELWKNPTAFKKYLQETYSKQVTSQEP

SEQ ID NO: 69053 - protein, 140 aa, Homo sapiens
MTLMMSGDKGISAFPESDNLFKWVGTIHGAAGTVYEDLRYKLSLEFPSGYPYNAPTVKFLTPCYHPNVDTQGNICLDILKEKWSALYDVRTILLSIQSLLGEPNIDSPLNTHAAELWKNPTAFKKYLQETYSKQVTSQEP

SEQ ID NO: 69054 - protein, 140 aa, Homo sapiens; identical to SEQ ID NO: 69053

SEQ ID NO: 69055 - protein, 37 aa, Homo sapiens
MAASAAETRVFLEVRGQLQSALLILGDRVSPYCPCWS

SEQ ID NO: 69056 - protein, 389 aa, Homo sapiens
MAASAAETRVFLEVRGQLQSALLILGEPKEGGMPMNISIMPSSLQMKTPEGCTEIQLPAEVRLVPSSCRGLQFVVGDGLHLRLQTQAKLGTKLISMFNQSSQTQECCTFYCQSCGEVIIKDRKLLRVLPLPSENWGALVGEWCCHPDPFANKSLHPQENDCFIGDSFFLVNLRTSLWQQRPELSPVEMCCVSSDNHCKLEPKANTKVICKRCKVMLGETVSSETTKFYMTEIIIQSSERSFPIIPRSWFVQSVIAQCLVQLSSARSTFRFTIQGQDDKVYILLWLLNSDSLVIESLRNSKYIKKFPLLENTFKADSSSAWSAVKVLYQPCIKSRNEKLVSLWESDISVHPLTLPSATCLELLLILSKSNANLPSSLRRVNSFQVAFLKM

SEQ ID NO: 69057 - protein, 147 aa, Homo sapiens
MALKRIQKELSDLQRDPPAHCSAGPVGDDLFHWQATIMGPPDSAYQGGVFFLTVHFPTDYPFKPPKIAFTTKIYHPNINSNGSICLDILRSQWSPALTVSKVLLSICSLLCDPNPDDPLVPDIAQIYKSDKEKYNRHAREWTQKYAM

SEQ ID NO: 69058 - protein, 201 aa, Homo sapiens
MSTEAQRVDDSPSTSGGSSDGDQRESVQQEPEREQVQPKKKEGKISSKTAAKLSTSAKRIQKELAEITLDPPPNCSAGPKGDNIYEWRSTILGPPGSVYEGGVFFLDITFSPDYPFKPPKVTFRTRIYHCNINSQGVICLDILKDNWSPALTISKVLLSICSLLTDCNPADPLVGSIATQYMTNRAEHDRMARQWTKRYAT

SEQ ID NO: 69059 - protein, 201 aa, Homo sapiens; identical to SEQ ID NO: 69058

SEQ ID NO: 69060 - protein, 207 aa, Homo sapiens
MSSDRQRSDDESPSTSSGSSDADQRDPAAPEPEEQEERKPSATQQKKNTKLSSKTTAKLSTSAKRIQKELAEITLDPPPNCSAGPKGDNIYEWRSTILGPPGSVYEGGVFFLDITFSSDYPFKPPKVTFRTRIYHCNINSQGVICLDILKDNWSPALTISKVLLSICSLLTDCNPADPLVGSIATQYLTNRAEHDRIARQWTKRYAT

SEQ ID NO: 69061 - protein, 207 aa, Homo sapiens; identical to SEQ ID NO: 69060

SEQ ID NO: 69062 - protein, 207 aa, Homo sapiens; identical to SEQ ID NO: 69060

SEQ ID NO: 69063 - protein, 207 aa, Homo sapiens; identical to SEQ ID NO: 69060

SEQ ID NO: 69064 - protein, 175 aa, Homo sapiens
MSSDRQRSDDESPSTSSGSSDADQRDPAAPEPEEQEERKPSATQQKKNTKLSSKTTAKLSTSAKRIQKELAEITLDPPPNCSAGPKGDNIYEWRSTILGPPGSVYEGGVFFLDITFSSDYPFKPPKVTFRTRIYHCNINSQGVICLDILKDNWSPALTISKVLLSICSLLTDCNP

SEQ ID NO: 69065 - protein, 175 aa, Homo sapiens; identical to SEQ ID NO: 69064

SEQ ID NO: 69066 - protein, 175 aa, Homo sapiens; identical to SEQ ID NO: 69064

SEQ ID NO: 69067 - protein, 137 aa, Homo sapiens
MNEENFFEWEALIMGPEDTCFEFGVFPAILSFPLDYPLSPPKMRFTCEMFHPNIYPDGRVCISILHAPGDDPMGYESSAERWSPVQSVEKILLSVVSMLAEPNDESGANVDASKMWRDDREQFYKIAKQIVQKSLGL

SEQ ID NO: 69068 - protein, 165 aa, Homo sapiens
MAGTALKRLMAEYKQLTLNPPEGIVAGPMNEENFFEWEALIMGPEDTCFEFGVFPAILSFPLDYPLSPPKMRFTCEMFHPNIYPDGRVCISILHAPGDDPMGYESSAERWSPVQSVEKILLSVVSMLAEPNDESGANVDASKMWRDDREQFYKIAKQIVQKSLGL

SEQ ID NO: 69069 - protein, 183 aa, Homo sapiens
MSSPSPGKRRMDTDVVKLIESKHEVTILGGLNEFVVKFYGPQGTPYEGGVWKVRVDLPDKYPFKSPSIGFMNKIFHPNIDEASGTVCLDVINQTWTALYDLTNIFESFLPQLLAYPNPIDPLNGDAAAMYLHRPEEYKQKIKEYIQKYATEEALKEQEEGTGDSSSESSMSDFSEDEAQDMEL

SEQ ID NO: 69070 - protein, 152 aa, Homo sapiens
MSSPSPGKRRMDTDVVKLIESKHEVTILGGLNEFVVKFYGPQGTPYEGGVWKVRVDLPDKYPFKSPSIDLTNIFESFLPQLLAYPNPIDPLNGDAAAMYLHRPEEYKQKIKEYIQKYATEEALKEQEEGTGDSSSESSMSDFSEDEAQDMEL

SEQ ID NO: 69071 - protein, 158 aa, Homo sapiens [sequence omitted]

SEQ ID NO: 69072 - protein, 158 aa, Homo sapiens [sequence omitted]

SEQ ID NO: 69073 - protein, 158 aa, Homo sapiens [sequence omitted]

SEQ ID NO: 69074 - protein, 158 aa, Homo sapiens [sequence omitted]

SEQ ID NO: 69075 - protein, 158 aa, Homo sapiens [sequence omitted]

SEQ ID NO: 69076 - protein, 158 aa, Homo sapiens [sequence omitted]

SEQ ID NO: 69077 - protein, 154 aa, Homo sapiens [sequence omitted]

SEQ ID NO: 69078 - protein, 212 aa, Homo sapiens
MQVAAGTRGDTRLQEVALLPQLFDLLVLGQRRARLLRQVPSALAGKDLAQLQAGATLAGYRRAHGPEELEEIRKCGMKNFRNIQVDEANLLTWQGLIVPDNPPYDKGAFRIEINFPAEYPFKPPKITFKTKIYHPNIDEKGQVCLPVISAENWKPATKTDQVIQSLIALVNDPQPEHPLRADLAEEYSKDRKKFCKNAEEFTKKYGEKRPVD

SEQ ID NO: 69079 - protein, 122 aa, Homo sapiens
MAASRRLMKDNPPYDKGAFRIEINFPAEYPFKPPKITFKTKIYHPNIDEKGQVCLPVISAENWKPATKTDQVIQSLIALVNDPQPEHPLRADLAEEYSKDRKKFCKNAEEFTKKYGEKRPVD

SEQ ID NO: 69080 - protein, 153 aa, Homo sapiens
MMASMRVVKELEDLQKKPPPYLRNLSSDDANVLVWHALLLPDQPPYHLKAFNLRISFPPEYPFKPPMIKFTTKIYHPNVDENGQICLPIISSENWKPCTKTCQVLEALNVLVNRPNIREPLRMDLADLLTQNPELFRKNAEEFTLRFGVDRPS

SEQ ID NO: 69081 - protein, 87 aa, Homo sapiens
MIKFTTKIYHPNVDENGQICLPIISSENWKPCTKTCQVLEALNVLVNRPNIREPLRMDLADLLTQNPELFRKNAEEFTLRFGVDRPS

SEQ ID NO: 69082 - protein, 65 aa, Homo sapiens
MIKFTTKIYHPNVDENGQICLPIISSENWKPCTKTCQVLEALNVLVNRPNIREPLRMDLADLLTQ

SEQ ID NO: 69083 - protein, 375 aa, Homo sapiens
MSVSGLKAELKFLASIFDKNHERFRIVSWKLDELHCQFLVPQQGSPHSLPPPLTLHCNITESYPSSSPIWFVDSEDPNLTSVLERLEDTKNNNLLRQQLKWLICELCSLYNLPKHLDVEMLDQPLPTGQNGTTEEVTSEEEEEEEEMAEDIEDLDHYEMKEEEPISGKKSEDEGIEKENLAILEKIRKTQRQDHLNGAVSGSVQASDRLMKELRDIYRSQSYKTGIYSVELINDSLYDWHVKLQKVDPDSPLHSDLQILKEKEGIEYILLNFSFKDNFPFDPPFVRVVLPVLSGGYVLGGGALCMELLTKQGWSSAYSIESVIMQINATLVKGKARVQFGANKNQYNLARAQQSYNSIVQIHEKNGWYTPPKEDG

SEQ ID NO: 69084 - protein, 314 aa, Homo sapiens
MSVSGLKAELKFLASIFDKNHERFRIVSWKLDELHCQFLVPQQGSPHSLPPPLTLHCNITESYPSSSPIWFVDSEDPNLTSVLERLEDTKNNNLLRQQLKWLICELCSLYNLPKHLDVEMLDQPLPTGQNGTTEEVTSEEEEEEEEMAEDIEDLDHYEMKEEEPISGKKSEDEGIEKENLAILEKIRKTQRQDHLNGAVSGSVQASDRLMKELRDIYRSQSYKTGIYSVELINDSLYDWHVKLQKVDPDSPLHSDLQILKEKEGIEYILLNFSFKDNFPFDPPFVRVVLPVLSGGLVHPSKGRWLNVLTVVCLD

SEQ ID NO: 69085 - protein, 359 aa, Homo sapiens
MRMDSLTEEKLECRLWCCLSDPSPPGLAARCCVLERSIVPSLRQESYPSSSPIWFVDSEDPNLTSVLERLEDTKNNNLLRQQLKWLICELCSLYNLPKHLDVEMLDQPLPTGQNGTTEEVTSEEEEEEEEMAEDIEDLDHYEMKEEEPISGKKSEDEGIEKENLAILEKIRKTQRQDHLNGAVSGSVQASDRLMKELRDIYRSQSYKTGIYSVELINDSLYDWHVKLQKVDPDSPLHSDLQILKEKEGIEYILLNFSFKDNFPFDPPFVRVVLPVLSGGYVLGGGALCMELLTKQGWSSAYSIESVIMQINATLVKGKARVQFGANKNQYNLARAQQSYNSIVQIHEKNGWYTPPKEDG

SEQ ID NO: 69086 - protein, 359 aa, Homo sapiens; identical to SEQ ID NO: 69085

SEQ ID NO: 69087 - protein, 238 aa, Homo sapiens
MAQQQMTSSQKALMLELKSLQEEPVEGFRITLVDESDLYNWEVAIFGPPNTLYEGGYFKAHIKFPIDYPYSPPTFRFLTKMWHPNIYENGDVCISILHPPVDDPQSGELPSERWNPTQNVRTILLSVISLLNEPNTFSPANVDASVMFRKWRDSKGKDKEYAEIIRKQVSATKAEAEKDGVKVPTTLAEYCIKTKVPSNDNSSDLLYDDLYDDDIDDEDEEEEDADCYDDDDSGNEES

SEQ ID NO: 69088 - protein, 222 aa, Homo sapiens
MNSNVENLPPHIIRLVYKEVTTLTADPPDGIKVFPNEEDLTDLQVTIEGPEGTPYAGGLFRMKLLLGKDFPASPPKGYFLTKIFHPNVGANGEICVNVLKRDWTAELGIRHVLLTIKCLLIHPNPESALNEEAGRLLLENYEEYAARARLLTEIHGGAGGPSGRAEAGRALASGTEASSTDPGAPGGPGGAEGPMAKKHAGERDKKLAAKKKTDKKRALRRL

SEQ ID NO: 69089 - protein, 197 aa, Homo sapiens
MQRASRLKRELHMLATEPPPGITCWQDKDQMDDLRAQILGGANTPYEKGVFKLEVIIPERYPFEPPQIRFLTPIYHPNIDSAGRICLDVLKLPPKGAWRPSLNIATVLTSIQLLMSEPNPDDPLMADISSEFKYNKPAFLKNARQWTEKHARQKQKADEEEMLDNLPEAGDSRVHNSTQKRKASQLVGIEKKFHPDV

SEQ ID NO: 69090 - protein, 162 aa, Homo sapiens
MASMQTTGRRVEVWFPKRLQKELLALQNDPPPGMTLNEKSVQNSITQWIVDMEGAPGTLYEGEKFQLLFKFSSRYPFDSPQVMFTGENIPVHPHVYSNGHICLSILTEDWSPALSVQSVCLSIISMLSSCKEKRRPPDNSFYVRTCNKNPKKTKWWYHDDTC

SEQ ID NO: 69091 - protein, 159 aa, Homo sapiens
MASMQKRLQKELLALQNDPPPGMTLNEKSVQNSITQWIVDMEGAPGTLYEGEKFQLLFKFSSRYPFDSPQVMFTGENIPVHPHVYSNGHICLSILTEDWSPALSVQSVCLSIISMLSSCKEKRRPPDNSFYVRTCNKNPKKTKWWYHELKSAFILSITD

SEQ ID NO: 69092 - protein, 151 aa, Homo sapiens
MASMQKRLQKELLALQNDPPPGMTLNEKSVQNSITQWIVDMEGAPGTLYEGEKFQLLFKFSSRYPFDSPQVMFTGENIPVHPHVYSNGHICLSILTEDWSPALSVQSVCLSIISMLSSCKEKRRPPDNSFYVRTCNKNPKKTKWWYHDDTC

SEQ ID NO: 69093 - protein, 117 aa, Homo sapiens
MSSNVPADMINLRLILVSGKTKEFLFSPNDSASDIAKHVYDNWPMDWEEEQVSSPNILRLIYQGRFLHGNVTLGALKLPFGKTTVMHLVARETLPEPNSQGQRNREKTGESNCCVIL

SEQ ID NO: 69094 - protein, 157 aa, Homo sapiens
MQLTVKALQGRECSLQVPEDELVSTLKQLVSEKLNVPVRQQRLLFKGKALADGKRLSDYSIGPNSKLNLVVKPLEKVLLEEGEAQRLADSPPPQVWQLISKVLARHFSAADASRVLEQLQRDYERSLSRLTLDDIERLASRFLHPEVTETMEKGFSK

SEQ ID NO: 69095 - protein, 174 aa, Homo sapiens
MFLTVKLLLGQRCSLKVSGQESVATLKRLVSRRLKVPEEQQHLLFRGQLLEDDKHLSDYCIGPNASINVIMQPLEKMALKEAHQPQTQPLWHQLGLVLAKHFEPQDAKAVLQLLRQEHEERLQKISLEHLEQLAQYLLAEEPHVEPAGERELEAKARPQSSCDMEEKEEAAADQ

SEQ ID NO: 69096 - protein, 73 aa, Homo sapiens
MIEVVCNDRLGKKVRVKCNTDDTIGDLKKLIAAQTGTRWNKIVLKKWYTIFKDHVSLGDYEIHDGMNLELYYQ

SEQ ID NO: 69097 - protein, 73 aa, Homo sapiens; identical to SEQ ID NO: 69096

SEQ ID NO: 69098 - protein, 380 aa, Homo sapiens
MSLSDWHLAVKLADQPLTPKSILRLPETELGEYSLGGYSISFLKQLIAGKLQESVPDPELIDLIYCGRKLKDDQTLDFYGIQPGSTVHVLRKSWPEPDQKPEPVDKVAAMREFRVLHTALHSSSSYREAVFKMLSNKESLDQIIVATPGLSSDPIALGVLQDKDLFSVFADPNMLDTLVPAHPALVNAIVLVLHSVAGSAPMPGTDSSSRSMPSSSYRDMPGGFLFEGLSDDEDDFHPNTRSTPSSSTPSSRPASLGYSGAAGPRPITQSELATALALASTPESSSHTPTPGTQGHSSGTSPMSSGVQSGTPITNDLFSQALQHALQASGQPSLQSQWQPQLQQLRDMGIQDDELSLRALQATGGDIQAALELIFAGGAP

SEQ ID NO: 69099 - protein, 380 aa, Homo sapiens; identical to SEQ ID NO: 69098

SEQ ID NO: 69100 - protein, 318 aa, Homo sapiens
MALPIIVKWGGQEYSVTTLSEDDTVLDLKQFLKTLTGVLPERQKLLGLKVKGKPAENDVKLGALKLKPNTKIMMMGTREESLEDVLGPPPDNDDVVNDFDIEDEVVEVENREENLLKISRRVKEYKVEILNPPREGKKLLVLDVDYTLFDHRSCAETGVELMRPYLHEFLTSAYEDYDIVIWSATNMKWIEAKMKELGVSTNANYKITFMLDSAAMITVHTPRRGLIDVKPLGVIWGKFSEFYSKKNTIMFDDIGRNFLMNPQNGLKIRPFMKAHLNRDKDKELLKLTQYLKEIAKLDDFLDLNHKYWERYLSKKQGQ

SEQ ID NO: 69101 - protein, 640 aa, Homo sapiens
MALSRGLPRELAEAVAGGRVLVVGAGGIGCELLKNLVLTGFSHIDLIDLDTIDVSNLNRQFLFQKKHVGRSKAQVAKESVLQFYPKANIVAYHDSIMNPDYNVEFFRQFILVMNALDNRAARNHVNRMCLAADVPLIESGTAGYLGQVTTIKKGVTECYECHPKPTQRTFPGCTIRNTPSEPIHCIVWAKYLFNQLFGEEDADQEVSPDRADPEAAWEPTEAEARARASNEDGDIKRISTKEWAKSTGYDPVKLFTKLFKDDIRYLLTMDKLWRKRKPPVPLDWAEVQSQGEETNASDQQNEPQLGLKDQQVLDVKSYARLFSKSIETLRVHLAEKGDGAELIWDKDDPSAMDFVTSAANLRMHIFSMNMKSRFDIKSMAGNIIPAIATTNAVIAGLIVLEGLKILSGKIDQCRTIFLNKQPNPRKKLLVPCALDPPNPNCYVCASKPEVTVRLNVHKVTVLTLQDKIVKEKFAMVAPDVQIEDGKGTILISSEEGETEANNHKKLSEFGIRNGSRLQADDFLQDYTLLINILHSEDLGKDVEFEVVGDAPEKVGPKQAEDAAKSITNGSDDGAQPSTSTAQEQDDVLIVDSDEEDSSNNADVSEEERSRKRKLDEKENLSAKRSRIEQKEELDDVIALD

SEQ ID NO: 69102 - protein, 544 aa, Homo sapiens
MNPDYNVEFFRQFILVMNALDNRAARNHVNRMCLAADVPLIESGTAGYLGQVTTIKKGVTECYECHPKPTQRTFPGCTIRNTPSEPIHCIVWAKYLFNQLFGEEDADQEVSPDRADPEAAWEPTEAEARARASNEDGDIKRISTKEWAKSTGYDPVKLFTKLFKDDIRYLLTMDKLWRKRKPPVPLDWAEVQSQGEETNASDQQNEPQLGLKDQQVLDVKSYARLFSKSIETLRVHLAEKGDGAELIWDKDDPSAMDFVTSAANLRMHIFSMNMKSRFDIKSMAGNIIPAIATTNAVIAGLIVLEGLKILSGKIDQCRTIFLNKQPNPRKKLLVPCALDPPNPNCYVCASKPEVTVRLNVHKVTVLTLQDKIVKEKFAMVAPDVQIEDGKGTILISSEEGETEANNHKKLSEFGIRNGSRLQADDFLQDYTLLINILHSEDLGKDVEFEVVGDAPEKVGPKQAEDAAKSITNGSDDGAQPSTSTAQEQDDVLIVDSDEEDSSNNADVSEEERSRKRKLDEKENLSAKRSRIEQKEELDDVIALD

SEQ ID NO: 69103 - protein, 292 aa, Homo sapiens
MCLAADVPLIESGTAGYLGQVTTIKKGVTECYECHPKPTQRTFPGCTIRNTPSEPIHCIVWAKYLFNQLFGEEDADQEVSPDRADPEAAWEPTEAEARARASNEDGDIKRISTKEWAKSTGYDPVKLFTKLFKDDIRYLLTMDKLWRKRKPPVPLDWAEVQSQGEETNASDQQNEPQLGLKDQQVLDVKSYARLFSKSIETLRVHLAEKGDGAELIWDKDDPSAMDFVTSAANLRMHIFSMNMKSRFDIKSMAGNIIPAIATTNAVIAGLIVLEGLKILSGKIDQCRTDFFE

SEQ ID NO: 69104 - protein, 348 aa, Homo sapiens
MALKRMGIVSDYEKIRTFAVAIVGVGGVGSVTAEMLTRCGIGKLLLFDYDKVELANMNRLFFQPHQAGLSKVQAAEHTLRNINPDVLFEVHNYNITTVENFQHFMDRISNGGLEEGKPVDLVLSCVDNFEARMTINTACNELGQTWMESGVSENAVSGHIQLIIPGESACFACAPPLVVAANIDEKTLKREGVCAASLPTTMGVVAGILVQNVLKFLLNFGTVSFYLGYNAMQDFFPTMSMKPNPQCDDRNCRKQQEEYKKKVAALPKQEVIQEEEEIIHEDNEWGIELVSEVSEEELKNFSGPVPDLPEGITVAYTIPKKQEDSVTELTVEDSGESLEDLMAKMKNM

SEQ ID NO: 69105 - protein, 404 aa, Homo sapiens
MAESVERLQQRVQELERELAQERSLQVPRSGDGGGGRVRIEKMSSEVVDSNPYSRLMALKRMGIVSDYEKIRTFAVAIVGVGGVGSVTAEMLTRCGIGKLLLFDYDKVELANMNRLFFQPHQAGLSKVQAAEHTLRNINPDVLFEVHNYNITTVENFQHFMDRISNGGLEEGKPVDLVLSCVDNFEARMTINTACNELGQTWMESGVSENAVSGHIQLIIPGESACFACAPPLVVAANIDEKTLKREGVCAASLPTTMGVVAGILVQNVLKFLLNFGTVSFYLGYNAMQDFFPTMSMKPNPQCDDRNCRKQQEEYKKKVAALPKQEVIQEEEEIIHEDNEWGIELVSEVSEEELKNFSGPVPDLPEGITVAYTIPKKQEDSVTELTVEDSGESLEDLMAKMKNM

SEQ ID NO: 69106 - protein, 792 aa, Homo sapiens
MWIQVRTMDGRQTHTVDSLSRLTKVEELRRKIQELFHVEPGLQRLFYRGKQMEDGHTLFDYEVRLNDTIQLLVRQSLVLPHSTKERDSELSDTDSGCCLGQSESDKSSTHGEAAAETDSRPADEDMWDETELGLYKVNEYVDARDTNMGAWFEAQVVRVTRKAPSRDEPCSSTSRPALEEDVIYHVKYDDYPENGVVQMNSRDVRARARTIIKWQDLEVGQVVMLNYNPDNPKERGFWYDAEISRKRETRTARELYANVVLGDDSLNDCRIIFVDEVFKIERPGEGSPMVDNPMRRKSGPSCKHCKDDVNRLCRVCACHLCGGRQDPDKQLMCDECDMAFHIYCLDPPLSSVPSEDEWYCPECRNDASEVVLAGERLRESKKKAKMASATSSSQRDWGKGMACVGRTKECTIVPSNHYGPIPGIPVGTMWRFRVQVSESGVHRPHVAGIHGRSNDGAYSLVLAGGYEDDVDHGNFFTYTGSGGRDLSGNKRTAEQSCDQKLTNTNRALALNCFAPINDQEGAEAKDWRSGKPVRVVRNVKGGKNSKYAPAEGNRYDGIYKVVKYWPEKGKSGFLVWRYLLRRDDDEPGPWTKEGKDRIKKLGLTMQYPEGYLEALANREREKENSKREEEEQQEGGFASPRTGKGKWKRKSAGGGPSRAGPRRTSKKTKVEPYSLTAQQSSLIREDKSNAKLWNEVLASLKDRPASGSPFQLFLSKVEETFQCICCQELVFRPITTVCQHNVCKDCLDRSFRAQVFSCPACRYDLGRSYAMQVNQPLQTVLNQLFPGYGNGR

SEQ ID NO: 69107 - protein, 407 aa, Homo sapiens
MASATSSSQRDWGKGMACVGRTKECTIVPSNHYGPIPGIPVGTMWRFRVQVSESGVHRPHVAGIHGRSNDGAYSLVLAGGYEDDVDHGNFFTYTGSGGRDLSGNKRTAEQSCDQKLTNTNRALALNCFAPINDQEGAEAKDWRSGKPVRVVRNVKGGKNSKYAPAEGNRYDGIYKVVKYWPEKGKSGFLVWRYLLRRDDDEPGPWTKEGKDRIKKLGLTMQYPEGYLEALANREREKENSKREEEEQQEGGFASPRTGKGKWKRKSAGGGPSRAGPRRTSKKTKVEPYSLTAQQSSLIREDKSNAKLWNEVLASLKDRPASGSPFQLFLSKVEETFQCICCQELVFRPITTVCQHNVCKDCLDRSFRAQVFSCPACRYDLGRSYAMQVNQPLQTVLNQLFPGYGNGR

SEQ ID NO: 69108 - protein, 805 aa, Homo sapiens
MGVFAVPPLSADTMWIQVRTMDGRQTHTVDSLSRLTKVEELRRKIQELFHVEPGLQRLFYRGKQMEDGHTLFDYEVRLNDTIQLLVRQSLVLPHSTKERDSELSDTDSGCCLGQSESDKSSTHGEAAAETDSRPADEDMWDETELGLYKVNEYVDARDTNMGAWFEAQVVRVTRKAPSRDEPCSSTSRPALEEDVIYHVKYDDYPENGVVQMNSRDVRARARTIIKWQDLEVGQVVMLNYNPDNPKERGFWYDAEISRKRETRTARELYANVVLGDDSLNDCRIIFVDEVFKIERPGEGSPMVDNPMRRKSGPSCKHCKDDVNRLCRVCACHLCGGRQDPDKQLMCDECDMAFHIYCLDPPLSSVPSEDEWYCPECRNDASEVVLAGERLRESKKKAKMASATSSSQRDWGKGMACVGRTKECTIVPSNHYGPIPGIPVGTMWRFRVQVSESGVHRPHVAGIHGRSNDGAYSLVLAGGYEDDVDHGNFFTYTGSGGRDLSGNKRTAEQSCDQKLTNTNRALALNCFAPINDQEGAEAKDWRSGKPVRVVRNVKGGKNSKYAPAEGNRYDGIYKVVKYWPEKGKSGFLVWRYLLRRDDDEPGPWTKEGKDRIKKLGLTMQYPEGYLEALANREREKENSKREEEEQQEGGFASPRTGKGKWKRKSAGGGPSRAGPRRTSKKTKVEPYSLTAQQSSLIREDKSNAKLWNEVLASLKDRPASGSPFQLFLSKVEETFQCICCQELVFRPITTVCQHNVCKDCLDRSFRAQVFSCPACRYDLGRSYAMQVNQPLQTVLNQLFPGYGNGR

SEQ ID NO: 69109 - protein, 792 aa, Homo sapiens; identical to SEQ ID NO: 69106

SEQ ID NO: 69110 - protein, 792 aa, Homo sapiens; identical to SEQ ID NO: 69106

SEQ ID NO: 69111 - protein, 1079 aa, Homo sapiens
MKSCAVSLTTAAVAFGDEAKKMAEGKASRESEEESVSLTVEEREALGGMDSRLFGFVRLHEDGARTKTLLGKAVRCYESLILKAEGKVESDFFCQLGHFNLLLEDYSKALSAYQRYYSLQADYWKNAAFLYGLGLVYFYYNAFHWAIKAFQDVLYVDPSFCRAKEIHLRLGLMFKVNTDYKSSLKHFQLALIDCNPCTLSNAEIQFHIAHLYETQRKYHSAKEAYEQLLQTENLPAQVKATVLQQLGWMHHNMDLVGDKATKESYAIQYLQKSLEADPNSGQSWYFLGRCYSSIGKVQDAFISYRQSIDKSEASADTWCSIGVLYQQQNQPMDALQAYICAVQLDHGHAAAWMDLGTLYESCNQPQDAIKCYLNAARSKRCSNTSTLAARIKFLQNGSDNWNGGQSLSHHPVQQVYSLCLTPQKLQHLEQLRANRDNLNPAQKHQLEQLESQFVLMQQMRHKEVAQVRTTGIHNGAITDSSLPTNSVSNRQPHGALTRVSSVSQPGVRPACVEKLLSSGAFSAGCIPCGTSKILGSTDTILLGSNCIAGSESNGNVPYLQQNTHTLPHNHTDLNSSTEEPWRKQLSNSAQGLHKSQSSCLSGPNEEQPLFSTGSAQYHQATSTGIKKANEHLTLPSNSVPQGDADSHLSCHTATSGGQQGIMFTKESKPSKNRSLVPETSRHTGDTSNGCADVKGLSNHVHQLIADAVSSPNHGDSPNLLIADNPQLSALLIGKANGNVGTGTCDKVNNIHPAVHTKTDHSVASSPSSAISTATPSPKSTEQRSINSVTSLNSPHSGLHTVNGEGLGKSQSSTKVDLPLASHRSTSQILPSMSVSICPSSTEVLKACRNPGKNGLSNSCILLDKCPPPRPPTSPYPPLPKDKLNPPTPSIYLENKRDAFFPPLHQFCTNPKNPVTVIRGLAGALKLDLGLFSTKTLVEANNEHMVEVRTQLLQPADENWDPTGTKKIWRCESNRSHTTIAKYAQYQASSFQESLRAGMQWCDLSSLQPPPPGFKRFSHLSLPNSWNYRHLPSCPTNFCIFVETGFHHVGQACLELLTSGGLLASASQSAGITGVSHHAR

SEQ ID NO: 69112 - protein, 1347 aa, Homo sapiens
MKSCAVSLTTAAVAFGDEAKKMAEGKASRESEEESVSLTVEEREALGGMDSRLFGFVRLHEDGARTKTLLGKAVRCYESLILKAEGKVESDFFCQLGHFNLLLEDYSKALSAYQRYYSLQADYWKNAAFLYGLGLVYFYYNAFHWAIKAFQDVLYVDPSFCRAKEIHLRLGLMFKVNTDYKSSLKHFQLALIDCNPCTLSNAEIQFHIAHLYETQRKYHSAKEAYEQLLQTENLPAQVKATVLQQLGWMHHNMDLVGDKATKESYAIQYLQKSLEADPNSGQSWYFLGRCYSSIGKVQDAFISYRQSIDKSEASADTWCSIGVLYQQQNQPMDALQAYICAVQLDHGHAAAWMDLGTLYESCNQPQDAIKCYLNAARSKRCSNTSTLAARIKFLQNGSDNWNGGQSLSHHPVQQVYSLCLTPQKLQHLEQLRANRDNLNPAQKHQLEQLESQFVLMQQMRHKEVAQVRTTGIHNGAITDSSLPTNSVSNRQPHGALTRVSSVSQPGVRPACVEKLLSSGAFSAGCIPCGTSKILGSTDTILLGSNCIAGSESNGNVPYLQQNTHTLPHNHTDLNSSTEEPWRKQLSNSAQGLHKSQSSCLSGPNEEQPLFSTGSAQYHQATSTGIKKANEHLTLPSNSVPQGDADSHLSCHTATSGGQQGIMFTKESKPSKNRSLVPETSRHTGDTSNGCADVKGLSNHVHQLIADAVSSPNHGDSPNLLIADNPQLSALLIGKANGNVGTGTCDKVNNIHPAVHTKTDHSVASSPSSAISTATPSPKSTEQRSINSVTSLNSPHSGLHTVNGEGLGKSQSSTKVDLPLASHRSTSQILPSMSVSICPSSTEVLKACRNPGKNGLSNSCILLDKCPPPRPPTSPYPPLPKDKLNPPTPSIYLENKRDAFFPPLHQFCTNPKNPVTVIRGLAGALKLDLGLFSTKTLVEANNEHMVEVRTQLLQPADENWDPTGTKKIWRCESNRSHTTIAKYAQYQASSFQESLREENEKRTQHKDHSDNESTSSENSGRRRKGPFKTIKFGTNIDLSDNKKWKLQLHELTKLPAFARVVSAGNLLTHVGHTILGMNTVQLYMKVPGSRTPGHQENNNFCSVNINIGPGDCEWFVVPEDYWGVLNDFCEKNNLNFLMSSWWPNLEDLYEANVPVYRFIQRPGDLVWINAGTVHWVQAVGWCNNIAWNVGPLTACQYKLAVERYEWNKLKSVKSPVPMVHLSWNMARNIKVSDPKLFEMIKYCLLKILKQYQTLREALVAAGKEVIWHGRTNDEPAHYCSICEVEVFNLLFVTNESNTQKTYIVHCHDCARKTSKSLENFVVLEQYKMEDLIQVYDQFTLALSLSSSS

SEQ ID NO: 69113 - protein, 1240 aa, Homo sapiens
MKSCAVSLTTAAVAFGDEAKKMAEGKASRESEEESVSLTVEEREALGGMDSRLFGFVRLHEDGARTKTLLGKAVRCYESLILKAEGKVESDFFCQLGHFNLLLEDYSKALSAYQRYYSLQADYWKNAAFLYGLGLVYFYYNAFHWAIKAFQDVLYVDPSFCRAKEIHLRLGLMFKVNTDYKSSLKHFQLALIDCNPCTLSNAEIQFHIAHLYETQRKYHSAKEAYEQLLQTENLPAQVKATVLQQLGWMHHNMDLVGDKATKESYAIQYLQKSLEADPNSGQSWYFLGRCYSSIGKVQDAFISYRQSIDKSEASADTWCSIGVLYQQQNQPMDALQAYICAVQLDHGHAAAWMDLGTLYESCNQPQDAIKCYLNAARSKRCSNTSTLAARIKFLQNGSDNWNGGQSLSHHPVQQVYSLCLTPQKLQHLEQLRANRDNLNPAQKHQLEQLESQFVLMQQMRHKEVAQVRTTGIHNGAITDSSLPTNSVSNRQPHGALTRVSSVSQPGVRPACVEKLLSSGAFSAGCIPCGTSKILGSTDTILLGSNCIAGSESNGNVPYLQQNTHTLPHNHTDLNSSTEEPWRKQLSNSAQGLHKSQSSCLSGPNEEQPLFSTGSAQYHQATSTGIKKANEHLTLPSNSVPQGDADSHLSCHTATSGGQQGIMFTKESKPSKNRSLVPETSRHTGDTSNGCADVKGLSNHVHQLIADAVSSPNHGDSPNLLIADNPQLSALLIGKANGNVGTGTCDKVNNIHPAVHTKTDHSVASSPSSAISTATPSPKSTEQRSINSVTSLNSPHSGLHTVNGEGLGKSQSSTKVDLPLASHRSTSQILPSMSVSICPSSTEVLKACRNPGKNGLSNSCILLDKCPPPRPPTSPYPPLPKDKLNPPTPSIYLENKRDAFFPPLHQFCTNPKNPVTVIRGLAGALKLDLGLFSTKTLVEANNEHMVEVRTQLLQPADENWDPTGTKKIWRCESNRSHTTIAKYAQYQASSFQESLREENEKRTQHKDHSDNESTSSENSGRRRKGPFKTIKFGTNIDLSDNKKWKLQLHELTKLPAFARVVSAGNLLTHVGHTILGMNTVQLYMKVPGSRTPGHQENNNFCSVNINIGPGDCEWFVVPEDYWGVLNDFCEKNNLNFLMSSWWPNLEDLYEANVPVYRFIQRPGDLVWINAGTVHWVQAVGWCNNIAWNVGPLTACQYKLAVERYEWNKLKSVKSPVPMVHLSWNMARNIKVSDPKLFEMIK

SEQ ID NO: 69114 - protein, 207 aa, Homo sapiens
MKSCAVSLTTAAVAFGDEAKKMAEGKASRESEEESVSLTVEEREALGGMDSRLFGFVRLHEDGARTKTLLGKAVRCYESLILKAEGKVESDFFCQLGHFNLLLEDYSKALSAYQRYYSLQADYWKNAAFLYGLGLVYFYYNAFHWAIKAFQDVLYVDPSFCRAKEIHLRLGLMFKVNTDYKSSLKHFQLALIDCNPCTLSNAESKYF

SEQ ID NO: 69115 - protein, 1392 aa, Homo sapiens
MKSCAVSLTTAAVAFGDEAKKMAEGKASRESEEESVSLTVEEREALGGMDSRLFGFVRLHEDGARTKTLLGKAVRCYESLILKAEGKVESDFFCQLGHFNLLLEDYSKALSAYQRYYSLQADYWKNAAFLYGLGLVYFYYNAFHWAIKAFQDVLYVDPSFCRAKEIHLRLGLMFKVNTDYKSSLKHFQLALIDCNPCTLSNAEIQFHIAHLYETQRKYHSAKEAYEQLLQTENLPAQVKATVLQQLGWMHHNMDLVGDKATKESYAIQYLQKSLEADPNSGQSWYFLGRCYSSIGKVQDAFISYRQSIDKSEASADTWCSIGVLYQQQNQPMDALQAYICAVQLDHGHAAAWMDLGTLYESCNQPQDAIKCYLNAARSKRCSNTSTLAARIKFLQAQLCNLPQSSLQNKTKLLPSIEEAWSLPIPAELTSRQGAMNTAQQNGSDNWNGGQSLSHHPVQQVYSLCLTPQKLQHLEQLRANRDNLNPAQKHQLEQLESQFVLMQQMRHKEVAQVRTTGIHNGAITDSSLPTNSVSNRQPHGALTRVSSVSQPGVRPACVEKLLSSGAFSAGCIPCGTSKILGSTDTILLGSNCIAGSESNGNVPYLQQNTHTLPHNHTDLNSSTEEPWRKQLSNSAQGLHKSQSSCLSGPNEEQPLFSTGSAQYHQATSTGIKKANEHLTLPSNSVPQGDADSHLSCHTATSGGQQGIMFTKESKPSKNRSLVPETSRHTGDTSNGCADVKGLSNHVHQLIADAVSSPNHGDSPNLLIADNPQLSALLIGKANGNVGTGTCDKVNNIHPAVHTKTDHSVASSPSSAISTATPSPKSTEQRSINSVTSLNSPHSGLHTVNGEGLGKSQSSTKVDLPLASHRSTSQILPSMSVSICPSSTEVLKACRNPGKNGLSNSCILLDKCPPPRPPTSPYPPLPKDKLNPPTPSIYLENKRDAFFPPLHQFCTNPKNPVTVIRGLAGALKLDLGLFSTKTLVEANNEHMVEVRTQLLQPADENWDPTGTKKIWRCESNRSHTTIAKYAQYQASSFQESLREENEKRTQHKDHSDNESTSSENSGRRRKGPFKTIKFGTNIDLSDNKKWKLQLHELTKLPAFARVVSAGNLLTHVGHTILGMNTVQLYMKVPGSRTPGHQENNNFCSVNINIGPGDCEWFVVPEDYWGVLNDFCEKNNLNFLMSSWWPNLEDLYEANVPVYRFIQRPGDLVWINAGTVHWVQAVGWCNNIAWNVGPLTACQYKLAVERYEWNKLKSVKSPVPMVHLSWNMARNIKVSDPKLFEMIKYCLLKILKQYQTLREALVAAGKEVIWHGRTNDEPAHYCSICEVEVFNLLFVTNESNTQKTYIVHCHDCARKTSKSLENFVVLEQYKMEDLIQVYDQFTLALSLSSSS

SEQ ID NO: 69116 - protein, 1211 aa, Homo sapiens
MKSCAVSLTTAAVAFGDEAKKMAEGKASRESEEESVSLTVEEREALGGMDSRLFGFVRLHEDGARTKTLLGKAVRCYESLILKAEGKVESDFFCQLGHFNLLLEDYSKALSAYQRYYSLQADYWKNAAFLYGLGLVYFYYNAFHWAIKAFQDVLYVDPSFCRAKEIHLRLGLMFKVNTDYKSSLKHFQLALIDCNPCTLSNAEIQFHIAHLYETQRKYHSAKEAYEQLLQTENLPAQVKATVLQQLGWMHHNMDLVGDKATKESYAIQYLQKSLEADPNSGQSWYFLGRCYSSIGKVQDAFISYRQSIDKSEASADTWCSIGVLYQQQNQPMDALQAYICAVQLDHGHAAAWMDLGTLYESCNQPQDAIKCYLNAARSKRCSNTSTLAARIKFLQAQLCNLPQSSLQNKTKLLPSIEEAWSLPIPAELTSRQGAMNTAQQNGSDNWNGGQSLSHHPVQQVYSLCLTPQKLQHLEQLRANRDNLNPAQKHQLEQLESQFVLMQQMRHKEVAQGLHKSQSSCLSGPNEEQPLFSTGSAQYHQATSTGIKKANEHLTLPSNSVPQGDADSHLSCHTATSGGQQGIMFTKESKPSKNRSLVPETSRHTGDTSNGCADVKGLSNHVHQLIADAVSSPNHGDSPNLLIADNPQLSALLIGKANGNVGTGTCDKVNNIHPAVHTKTDHSVASSPSSAISTATPSPKSTEQRSINSVTSLNSPHSGLHTVNGEGLGKSQSSTKVDLPLASHRSTSQILPSMSVSICPSSTEVLKACRNPGKNGLSNSCILLDKCPPPRPPTSPYPPLPKDKLNPPTPSIYLENKRDAFFPPLHQFCTNPKNPVTVIRGLAGALKLDLGLFSTKTLVEANNEHMVEVRTQLLQPADENWDPTGTKKIWRCESNRSHTTIAKYAQYQASSFQESLREENEKRTQHKDHSDNESTSSENSGRRRKGPFKTIKFGTNIDLSDNKKWKLQLHELTKLPAFARVVSAGNLLTHVGHTILGMNTVQLYMKVPGSRTPGHQENNNFCSVNINIGPGDCEWFVVPEDYWGVLNDFCEKNNLNFLMSSWWPNLEDLYEANVPVYRFIQRPGDLVWINAGTVHWVQAVGWCNNIAWNVGPLTACQYKLAVERYEWNKLKSVKSPVPMVHLSWNMARNIKVSDPKLFEMIKYCLLKILKQYQTLREALVAAGKEVIWHGRTNDEPAHYCSICEALSLSSSS

SEQ ID NO: 69117 - protein, 1046 aa, Homo sapiens
MKSCAVSLTTAAVAFGDEAKKMAEGKASRESEEESVSLTVEEREALGGMDSRLFGFVRLHEDGARTKTLLGKAVRCYESLILKAEGKVESDFFCQLGHFNLLLEDYSKALSAYQRYYSLQADYWKNAAFLYGLGLVYFYYNAFHWAIKAFQDVLYVDPSFCRAKEIHLRLGLMFKVNTDYKSSLKHFQLALIDCNPCTLSNAEIQFHIAHLYETQRKYHSAKEAYEQLLQTENLPAQVKATVLQQLGWMHHNMDLVGDKATKESYAIQYLQKSLEADPNSGQSWYFLGSVLYQQQNQPMDALQAYICAVQLDHGHAAAWMDLGTLYESCNQPQDAIKCYLNAARSKRCSNTSTLAARIKFLQNGSDNWNGGQSLSHHPVQQVYSLCLTPQKLQHLEQLRANRDNLNPAQKHQLEQLESQFVLMQQMRHKEVAQVRTTGIHNGAITDSSLPTNSVSNRQPHGALTRVSSVSQPGVRPACVEKLLSSGAFSAGCIPCGTSKILGSTDTILLGSNCIAGSESNGNVPYLQQNTHTLPHNHTDLNSSTEEPWRKQLSNSAQGLHKSQSSCLSGPNEEQPLFSTGSAQYHQATSTGIKKANEHLTLPSNSVPQGDADSHLSCHTATSGGQQGIMFTKESKPSKNRSLVPETSRHTGDTSNGCADVKGLSNHVHQLIADAVSSPNHGDSPNLLIADNPQLSALLIGKANGNVGTGTCDKVNNIHPAVHTKTDHSVASSPSSAISTATPSPKSTEQRSINSVTSLNSPHSGLHTVNGEGLGKSQSSTKVDLPLASHRSTSQILPSMSVSICPSSTEVLKACRNPGKNGLSNSCILLDKCPPPRPPTSPYPPLPKDKLNPPTPSIYLENKRDAFFPPLHQFCTNPKNPVTVIRGLAGALKLDLGLFSTKTLVEANNEHMVEVRTQLLQPADENWDPTGTKKIWRCESNRSHTTIAKYAQYQASSFQESLRAGMQWCDLSSLQPPPPGFKRFSHLSLPNSWNYRHLPSCPTNFCIFVETGFHHVGQACLELLTSGGLLASASQSAGITGVSHHAR

SEQ ID NO: 69118 - protein, 1005 aa, Homo sapiens
MKSCAVSLTTAAVAFGDEAKKMAEGKASRESEEESVSLTVEEREALGGMDSRLFGFVRLHEDGARTKTLLGKAVRCYESLILKAEGKVESDFFCQLGHFNLLLEDYSKALSAYQRYYSLQADYWKNAAFLYGLGLVYFYYNAFHWAIKAFQDVLYVDPSFCRAKEIHLRLGLMFKVNTDYKSSLKHFQLALIDCNPCTLSNAEIQFHIAHLYETQRKYHSAKEAYEQLLQTENLPAQVKATVLQQLGWMHHNMDLVGDKATKESYAIQYLQKSLEADPNSGQSWYFLGSVLYQQQNQPMDALQAYICAVQLDHGHAAAWMDLGTLYESCNQPQDAIKCYLNAARSKRCSNTSTLAARIKFLQQSLSLHMITSSQVEGLSSPAKKKRTSSPTKNGSDNWNGGQSLSHHPVQQVYSLCLTPQKLQHLEQLRANRDNLNPAQKHQLEQLESQFVLMQQMRHKEVAQVRTTGIHNGAITDSSLPTNSVSNRQPHGALTRVSSVSQPGVRPACVEKLLSSGAFSAGCIPCGTSKILGSTDTILLGSNCIAGSESNGNVPYLQQNTHTLPHNHTDLNSSTEEPWRKQLSNSAQGLHKSQSSCLSGPNEEQPLFSTGSAQYHQATSTGIKKANEHLTLPSNSVPQGDADSHLSCHTATSGGQQGIMFTKESKPSKNRSLVPETSRHTGDTSNGCADVKGLSNHVHQLIADAVSSPNHGDSPNLLIADNPQLSALLIGKANGNVGTGTCDKVNNIHPAVHTKTDHSVASSPSSAISTATPSPKSTEQRSINSVTSLNSPHSGLHTVNGEGLGKSQSSTKVDLPLASHRSTSQILPSMSVSICPSSTEVLKACRNPGKNGLSNSCILLDKCPPPRPPTSPYPPLPKDKLNPPTPSIYLENKRDAFFPPLHQFCTNPKNPVTVIRGLAGALKLDLGLFSTKTLVEANNEHMVEVRTQLLQPADENWDPTGTKKIWRCESNRSHTTIAKYAQYQASSFQESLRSLILSHPGWNAMV

SEQ ID NO: 69119 - protein, 1070 aa, Homo sapiens
MKSCAVSLTTAAVAFGDEAKKMAEGKASRESEEESVSLTVEEREALGGMDSRLFGFVRLHEDGARTKTLLGKAVRCYESLILKAEGKVESDFFCQLGHFNLLLEDYSKALSAYQRYYSLQADYWKNAAFLYGLGLVYFYYNAFHWAIKAFQDVLYVDPSFCRAKEIHLRLGLMFKVNTDYKSSLKHFQLALIDCNPCTLSNAEIQFHIAHLYETQRKYHSAKEAYEQLLQTENLPAQVKATVLQQLGWMHHNMDLVGDKATKESYAIQYLQKSLEADPNSGQSWYFLGRCYSSIGKVQDAFISYRQSIDKSEASADTWCSIGVLYQQQNQPMDALQAYICAVQLDHGHAAAWMDLGTLYESCNQPQDAIKCYLNAARSKRCSNTSTLAARIKFLQAQLCNLPQSSLQNKTKLLPSIEEAWSLPIPAELTSRQGAMNTAQQQSLSLHMITSSQVEGLSSPAKKKRTSSPTKNGSDNWNGGQSLSHHPVQQVYSLCLTPQKLQHLEQLRANRDNLNPAQKHQLEQLESQFVLMQQMRHKEVAQVRTTGIHNGAITDSSLPTNSVSNRQPHGALTRVSSVSQPGVRPACVEKLLSSGAFSAGCIPCGTSKILGSTDTILLGSNCIAGSESNGNVPYLQQNTHTLPHNHTDLNSSTEEPWRKQLSNSAQGLHKSQSSCLSGPNEEQPLFSTGSAQYHQATSTGIKKANEHLTLPSNSVPQGDADSHLSCHTATSGGQQGIMFTKESKPSKNRSLVPETSRHTGDTSNGCADVKGLSNHVHQLIADAVSSPNHGDSPNLLIADNPQLSALLIGKANGNVGTGTCDKVNNIHPAVHTKTDHSVASSPSSAISTATPSPKSTEQRSINSVTSLNSPHSGLHTVNGEGLGKSQSSTKVDLPLASHRSTSQILPSMSVSICPSSTEVLKACRNPGKNGLSNSCILLDKCPPPRPPTSPYPPLPKDKLNPPTPSIYLENKRDAFFPPLHQFCTNPKNPVTVIRGLAGALKLDLGLFSTKTLVEANNEHMVEVRTQLLQPADENWDPTGTKKIWRCESNRSHTTIAKYAQYQASSFQESLR

SEQ ID NO: 69120 - protein, 265 aa, Homo sapiens
MPNMVFIGGINCKKRKDLSQEFEAYINASGEHGIVVFSLGSMVSEIPEKKAMAIADALGKIPQTVLWRYTGTRPSNLANNTILVKWLPQNDLLGHPMTRAFITHAGSHGVYESICNGVPMVMMPLFGDQMDNAKRMETKGAGVTLNVLEMTSEDLENALKAVINDKSYKENIMRLSSLHKDRPVEPLDLAVFWVEFVMRHKGAPHLRPAAHDLTWYQYHSLDVIGFLLAVVLTVAFITFKCCAYGYRKCLGKKGRVKKAHKSKTH

SEQ ID NO: 69121 - protein, 534 aa, Homo sapiens
MATGLQVPLPQLATGLLLLLSVQPWAESGKVLVVPTDGSHWLSMREALRDLHARGHQVVVLTLEVNMYIKEENFFTLTTYAISWTQDEFDRLLLGHTQSFFETEHLLMKFSRRMAIMNNMSLIIHRSCVELLHNEALIRHLHATSFDVVLTDPFHLCAAVLAKYLSIPAVFFLRNIPCDLDFKGTQCPNPSSYIPRLLTTNSDHMTFLQRVKNMLYPLALSYLCHAVSAPYASLASELFQREVSVVDLVSHASVWLFRGDFVMDYPRPIMPNMVFIGGINCANGKPLSQEFEAYINASGEHGIVVFSLGSMVSEIPEKKAMAIADALGKIPQTVLWRYTGTRPSNLANNTILVKWLPQNDLLGHPMTRAFITHAGSHGVYESICNGVPMVMMPLFGDQMDNAKRMETKGAGVTLNVLEMTSEDLENALKAVINDKSYKENIMRLSSLHKDRPVEPLDLAVFWVEFVMRHKGAPHLRPAAHDLTWYQYHSLDVIGFLLAVVLTVAFITFKCCAYGYRKCLGKKGRVKKAHKSKTH

SEQ ID NO: 69122 - protein, 532 aa, Homo sapiens
MACLLRSFQRISAGVFFLALWGMVVGDKLLVVPQDGSHWLSMKDIVEVLSDRGHEIVVVVPEVNLLLKESKYYTRKIYPVPYDQEELKNRYQSFGNNHFAERSFLTAPQTEYRNNMIVIGLYFINCQSLLQDRDTLNFFKESKFDALFTDPALPCGVILAEYLGLPSVYLFRGFPCSLEHTFSRSPDPVSYIPRCYTKFSDHMTFSQRVANFLVNLLEPYLFYCLFSKYEELASAVLKRDVDIITLYQKVSVWLLRYDFVLEYPRPVMPNMVFIGGINCKKRKDLSQEFEAYINASGEHGIVVFSLGSMVSEIPEKKAMAIADALGKIPQTVLWRYTGTRPSNLANNTILVKWLPQNDLLGHPMTRAFITHAGSHGVYESICNGVPMVMMPLFGDQMDNAKRMETKGAGVTLNVLEMTSEDLENALKAVINDKSYKENIMRLSSLHKDRPVEPLDLAVFWVEFVMRHKGAPHLRPAAHDLTWYQYHSLDVIGFLLAVVLTVAFITFKCCAYGYRKCLGKKGRVKKAHKSKTH

SEQ ID NO: 69123 - protein, 189 aa, Homo sapiens
MACLLRSFQRISAGVFFLALWGMVVGDKLLVVPQDGSHWLSMKDIVEVLSDRGHEIVVVVPEVNLLLKESKYYTRKIYPVPYDQEELKNRYQSFGNNHFAERSFLTAPQTEYRNNMIVIGLYFINCQSLLQDRDTLNFFKESKFDALFTDPALPCGVILAEYLGLPSVYLFRGFPCSLEHTFSRSPDPV

SEQ ID NO: 69124 - protein, 530 aa, Homo sapiens
MARAGWTGLLPLYVCLLLTCGFAKAGKLLVVPMDGSHWFTMQSVVEKLILRGHEVVVVMPEVSWQLGRSLNCTVKTYSTSYTLEDQDREFMVFADARWTAPLRSAFSLLTSSSNGIFDLFFSNCRSLFNDRKLVEYLKESCFDAVFLDPFDACGLIVAKYFSLPSVVFARGIFCHYLEEGAQCPAPLSYVPRLLLGFSDAMTFKERVWNHIMHLEEHLFCPYFFKNVLEIASEILQTPVTAYDLYSHTSIWLLRTDFVLEYPKPVMPNMIFIGGINCHQGKPVPMEFEAYINASGEHGIVVFSLGSMVSEIPEKKAMAIADALGKIPQTVLWRYTGTRPSNLANNTILVKWLPQNDLLGHPMTRAFITHAGSHGVYESICNGVPMVMMPLFGDQMDNAKRMETKGAGVTLNVLEMTSEDLENALKAVINDKSYKENIMRLSSLHKDRPVEPLDLAVFWVEFVMRHKGAPHLRPAAHDLTWYQYHSLDVIGFLLAVVLTVAFITFKCCAYGYRKCLGKKGRVKKAHKSKTH

SEQ ID NO: 69125 - protein, 530 aa, Homo sapiens
MARTGWTSPIPLCVSLLLTCGFAEAGKLLVVPMDGSHWFTMQSVVEKLILRGHEVVVVMPEVSWQLGKSLNCTVKTYSTSYTLEDLDREFMDFADAQWKAQVRSLFSLFLSSSNGFFNLFFSHCRSLFNDRKLVEYLKESSFDAVFLDPFDACGLIVAKYFSLPSVVFARGIACHYLEEGAQCPAPLSYVPRILLGFSDAMTFKERVRNHIMHLEEHLFCQYFSKNALEIASEILQTPVTAYDLYSHTSIWLLRTDFVLDYPKPVMPNMIFIGGINCHQGKPLPMEFEAYINASGEHGIVVFSLGSMVSEIPEKKAMAIADALGKIPQTVLWRYTGTRPSNLANNTILVKWLPQNDLLGHPMTRAFITHAGSHGVYESICNGVPMVMMPLFGDQMDNAKRMETKGAGVTLNVLEMTSEDLENALKAVINDKSYKENIMRLSSLHKDRPVEPLDLAVFWVEFVMRHKGAPHLRPAAHDLTWYQYHSLDVIGFLLAVVLTVAFITFKCCAYGYRKCLGKKGRVKKAHKSKTH

SEQ ID NO: 69126 - protein, 530 aa, Homo sapiens
MACTGWTSPLPLCVCLLLTCGFAEAGKLLVVPMDGSHWFTMRSVVEKLILRGHEVVVVMPEVSWQLGRSLNCTVKTYSTSYTLEDLDREFKAFAHAQWKAQVRSIYSLLMGSYNDIFDLFFSNCRSLFKDKKLVEYLKESSFDAVFLDPFDNCGLIVAKYFSLPSVVFARGILCHYLEEGAQCPAPLSYVPRILLGFSDAMTFKERVRNHIMHLEEHLLCHRFFKNALEIASEILQTPVTEYDLYSHTSIWLLRTDFVLDYPKPVMPNMIFIGGINCHQGKPLPMEFEAYINASGEHGIVVFSLGSMVSEIPEKKAMAIADALGKIPQTVLWRYTGTRPSNLANNTILVKWLPQNDLLGHPMTRAFITHAGSHGVYESICNGVPMVMMPLFGDQMDNAKRMETKGAGVTLNVLEMTSEDLENALKAVINDKSYKENIMRLSSLHKDRPVEPLDLAVFWVEFVMRHKGAPHLRPAAHDLTWYQYHSLDVIGFLLAVVLTVAFITFKCCAYGYRKCLGKKGRVKKAHKSKTH

SEQ ID NO: 69127 - protein, 527 aa, Homo sapiens
MLNNLLLFSLQISLIGTTLGGNVLIWPMEGSHWLNVKIIIDELIKKEHNVTVLVASGALFITPTSNPSLTFEIYRVPFGKERIEGVIKDFVLTWLENRPSPSTIWRFYQEMAKVIKDFHMVSQEICDGVLKNQQLMAKLKKSKFEVLVSDPVFPCGDIVALKLGIPFMYSLRFSPASTVEKHCGKVPYPPSYVPAVLSELTDQMSFTDRIRNFISYHLQDYMFETLWKSWDSYYSKALGGLLLCCPGWSAVADLGSLQPLLPGFKRFSRLSLHCSWDYRLPAGRPTTLCETMGKAEIWLIRTYWDFEFPRPYLPNFEFVGGLHCKPAKPLPKVLWRYKGKKPATLGNNTQLFDWIPQNDLLGHPKTKAFITHGGTNGIYEAIYHGVPMVGVPMFADQPDNIAHMKAKGAAVEVNLNTMTSVDLLSALRTVINEPSYKENAMRLSRIHHDQPVKPLDRAVFWIEFVMRHKGAKHLRVAAHDLTWFQYHSLDVIGFLLVCVTTAIFLVIQCCLFSCQKFGKIGKKKKRE

SEQ ID NO: 69128 - protein, 693 aa, Homo sapiens
MLNNLLLFSLQISLIGTTLGGNVLIWPMEGSHWLNVKIIIDELIKKEHNVTVLVASGALFITPTSNPSLTFEIYRVPFGKERIEGVIKDFVLTWLENRPSPSTIWRFYQEMAKVIKDFHMVSQEICDGVLKNQQLMAKLKKSKFEVLVSDPVFPCGDIVALKLGIPFMYSLRFSPASTVEKHCGKVPYPPSYVPAVLSELTDQMSFTDRIRNFISYHLQDYMFETLWKSWDSYYSKALDGSHWLNIKIILEELIQRNHNVTVLASSATLFINSNPDSPVNFEVIPVSYKKSNIDSLIEHMIMLWIDHRPTPLTIWAFYKELGKLLDTFFQINIQLCDGVLKNPKLMARLQKGGFDVLVADPVTICGDLVALKLGIPFMYTLRFSPASTVERHCGKIPAPVSYVPAALSELTDQMTFGERIKNTISYSLQDYIFQSYWGEWNSYYSKILGRPTTLCETMGKAEIWLIRTYWDFEFPRPYLPNFEFVGGLHCKPAKPLPKVLWRYKGKKPATLGNNTQLFDWIPQNDLLGHPKTKAFITHGGTNGIYEAIYHGVPMVGVPMFADQPDNIAHMKAKGAAVEVNLNTMTSVDLLSALRTVINEPSYKENAMRLSRIHHDQPVKPLDRAVFWIEFVMRHKGAKHLRVAAHDLTWFQYHSLDVIGFLLVCVTTAIFLVIQCCLFSCQKFGKIGKKKKRE

SEQ ID NO: 69129 - protein, 536 aa, Homo sapiens
MVSIRDFTMPKKFVQMLVFNLTLTEVVLSGNVLIWPTDGSHWLNIKIILEELIQRNHNVTVLASSATLFINSNPDSPVNFEVIPVSYKKSNIDSLIEHMIMLWIDHRPTPLTIWAFYKELGKLLDTFFQINIQLCDGVLKNPKLMARLQKGGFDVLVADPVTICGDLVALKLGIPFMYTLRFSPASTVERHCGKIPAPVSYVPAALSELTDQMTFGERIKNTISYSLQDYIFQSYWGEWNSYYSKILGRPTTLCETMGKAEIWLIRTYWDFEFPRPYLPNFEFVGGLHCKPAKPLPKEMEEFIQSSGKNGVVVFSLGSMVKNLTEEKANLIASALAQIPQKVLWRYKGKKPATLGNNTQLFDWIPQNDLLGHPKTKAFITHGGTNGIYEAIYHGVPMVGVPMFADQPDNIAHMKAKGAAVEVNLNTMTSVDLLSALRTVINEPSYKENAMRLSRIHHDQPVKPLDRAVFWIEFVMRHKGAKHLRVAAHDLTWFQYHSLDVIGFLLVCVTTAIFLVIQCCLFSCQKFGKIGKKKKRE

SEQ ID NO: 69130 - protein, 527 aa, Homo sapiens
MLNNLLLFSLQISLIGTTLGGNVLIWPMEGSHWLNVKIIIDELIKKEHNVTVLVASGALFITPTSNPSLTFEIYRVPFGKERIEGVIKDFVLTWLENRPSPSTIWRFYQEMAKVIKDFHMVSQEICDGVLKNQQLMAKLKKSKFEVLVSDPVFPCGDIVALKLGIPFMYSLRFSPASTVEKHCGKVPYPPSYVPAVLSELTDQMSFTDRIRNFISYHLQDYMFETLWKSWDSYYSKALGRPTTLCETMGKAEIWLIRTYWDFEFPRPYLPNFEFVGGLHCKPAKPLPKEMEEFIQSSGKNGVVVFSLGSMVKNLTEEKANLIASALAQIPQKVLWRYKGKKPATLGNNTQLFDWIPQNDLLGHPKTKAFITHGGTNGIYEAIYHGVPMVGVPMFADQPDNIAHMKAKGAAVEVNLNTMTSVDLLSALRTVINEPSYKENAMRLSRIHHDQPVKPLDRAVFWIEFVMRHKGAKHLRVAAHDLTWFQYHSLDVIGFLLVCVTTAIFLVIQCCLFSCQKFGKIGKKKKRE

SEQ ID NO: 69131 - protein, 158 aa, Homo sapiens
MLNNLLLFSLQISLIGTTLGGNVLIWPMEGSHWLNVKIIIDELIKKEHNVTVLVASGALFITPTSNPSLTFEIYRVPFGKERIEGVIKDFVLTWLENRPSPSTIWRFYQEMAKVIKDFHMVSQEICDGVLKNQQLMAKLKKSKFEVLVSDPVFPCGDI

SEQ ID NO: 69132 - protein, 529 aa, Homo sapiens
MTLKWTSVLLLIHLSCYFSSGSCGKVLVWAAEYSHWMNMKTILKELVQRGHEVTVLASSASILFDPNDASTLKFEVYPTSLTKTEFENIIMQQVKRWSDIRKDSFWLYFSQEQEILWELYDIFRNFCKDVVSNKKVMKKLQESRFDIVFADAVFPCGELLAALLNIRFVYSLRFTPGYTIERHSGGLIFPPSYIPIVMSKLSDQMTFMERVKNMIYVLYFDFWFQMSDMKKWDQFYSEVLGRPTTLFETMGKADIWLMRNSWSFQFPHPFLPNVDFVGGFHCKPAKPLPKEMEEFVQSSGENGVVVFSLGSVISNMTAERANVIATALAKIPQKVLWRFDGNKPDALGLNTRLYKWIPQNDLLGHPKTRAFITHGGANGIYEAIYHGIPMVGIPLFFDQPDNIAHMKAKGAAVRLDFNTMSSTDLLNALKTVINDPLYKENIMKLSRIQHDQPVKPLDRAVFWIEFVMPHKGAKHLRVAAHDLTWFQYHSLDVIGFLLACVATVIFIITKFCLFCFWKFARKGKKGKRD

SEQ ID NO: 69133 - protein, 530 aa, Homo sapiens
MSLKWTSVFLLIQLSCYFSSGSCGKVLVWPTEYSHWINMKTILEELVQRGHEVTVLTSSASTLVNASKSSAIKLEVYPTSLTKNYLEDSLLKILDRWIYGVSKNTFWSYFSQLQELCWEYYDYSNKLCKDAVLNKKLMMKLQESKFDVILADALNPCGELLAELFNIPFLYSLRFSVGYTFEKNGGGFLFPPSYVPVVMSELSDQMIFMERIKNMIHMLYFDFWFQIYDLKKWDQFYSEVLGRPTTLFETMGKAEMWLIRTYWDFEFPRPFLPNVDFVGGLHCKPAKPLPKEMEEFVQSSGENGIVVFSLGSMISNMSEESANMIASALAQIPQKVLWRFDGKKPNTLGSNTRLYKWLPQNDLLGHPKTKAFITHGGTNGIYEAIYHGIPMVGIPLFADQHDNIAHMKAKGAALSVDIRTMSSRDLLNALKSVINDPVYKENVMKLSRIHHDQPMKPLDRAVFWIEFVMRHKGAKHLRVAAHNLTWIQYHSLDVIAFLLACVATVIFIITKFCLFCFRKLAKKGKKKKRD

SEQ ID NO: 69134 - protein, 530 aa, Homo sapiens
MSLKWMSVFLLMQLSCYFSSGSCGKVLVWPTEYSHWINMKTILEELVQRGHEVIVLTSSASILVNASKSSAIKLEVYPTSLTKNDLEDFFMKMFDRWTYSISKNTFWSYFSQLQELCWEYSDYNIKLCEDAVLNKKLMRKLQESKFDVLLADAVNPCGELLAELLNIPFLYSLRFSVGYTVEKNGGGFLFPPSYVPVVMSELSDQMIFMERIKNMIYMLYFDFWFQAYDLKKWDQFYSEVLGRPTTLFETMGKAEMWLIRTYWDFEFPRPFLPNVDFVGGLHCKPAKPLPKEMEEFVQSSGENGIVVFSLGSMISNMSEESANMIASALAQIPQKVLWRFDGKKPNTLGSNTRLYKWLPQNDLLGHPKTKAFITHGGTNGIYEAIYHGIPMVGIPLFADQHDNIAHMKAKGAALSVDIRTMSSRDLLNALKSVINDPIYKENIMKLSRIHHDQPVKPLDRAVFWIEFVMRHKGAKHLRVAAHNLTWIQYHSLDVIAFLLACVATMIFMITKCCLFCFRKLAKTGKKKKRD

SEQ ID NO: 69135 - protein, 529 aa, Homo sapiens
MALKWTSVLLLIHLGCYFSSGSCGKVLVWTGEYSHWMNMKTILKELVQRGHEVTVLASSASILFDPNDAFTLKLEVYPTSLTKTEFENIIMQQVKRWSDIQKDSFWLYFSQEQEILWEFHDIFRNFCKDVVSNKKVMKKLQESRFDIIFADAFFPCGELLAALLNIPFVYSLCFTPGYTIERHSGGLIFPPSYIPVVMSKLSDQMTFMERVKNMIYVLYFDFWFQMCDMKKWDQFYSEVLGRPTTLFETMGKADIWLMRNSWSFQFPHPFLPNIDFVGGLHCKPAKPLPKEMEEFVQSSGENGVVVFSLGSVISNMTAERANVIATALAKIPQKVLWRFDGNKPDALGLNTRLYKWIPQNDLLGLPKTRAFITHGGANGIYEAIYHGIPMVGIPLFWDQPDNIAHMKAKGAAVRLDFHTMSSTDLLNALKTVINDPSYKENVMKLSIIQHDQPVKPLHRAVFWIEFVMCHKGAKHLRVAARDLTWFQYHSLDVIGFLLACVATVIFVVTKFCLFCFWKFARKGKKGKRD

SEQ ID NO: 69136 - protein, 335 aa, Homo sapiens
MALKWTSVLLLIHLGCYFSSGSCGKVLVWTGEYSHWMNMKTILKELVQRGHEVTVLASSASILFDPNDAFTLKLEVYPTSLTKTEFENIIMQQVKRWSDIQKDSFWLYFSQEQEILWEFHDIFRNFCKDVVSNKKVMKKLQESRFDIIFADAFFPCGELLAALLNIPFVYSLCFTPGYTIERHSGGLIFPPSYIPVVMSKLSDQMTFMERVKNMIYVLYFDFWFQMCDMKKWDQFYSEVLGRPTTLFETMGKADIWLMRNSWSFQFPHPFLPNIDFVGGLHCKPAKPLPKEMEEFVQSSGENGVVVFSLGSVISNMTAERANVIATALAKIPQKI

SEQ ID NO: 69137 - protein, 528 aa, Homo sapiens
MSMKWTSALLLIQLSCYFSSGSCGKVLVWPTEFSHWMNIKTILDELVQRGHEVTVLASSASISFDPNSPSTLKFEVYPVSLTKTEFEDIIKQLVKRWAELPKDTFWSYFSQVQEIMWTFNDILRKFCKDIVSNKKLMKKLQESRFDVVLADAVFPFGELLAELLKIPFVYSLRFSPGYAIEKHSGGLLFPPSYVPVVMSELSDQMTFIERVKNMIYVLYFEFWFQIFDMKKWDQFYSEVLGRPTTLSETMAKADIWLIRNYWDFQFPHPLLPNVEFVGGLHCKPAKPLPKEMEEFVQSSGENGVVVFSLGSMVSNTSEERANVIASALAKIPQKVLWRFDGNKPDTLGLNTRLYKWIPQNDLLGHPKTRAFITHGGANGIYEAIYHGIPMVGVPLFADQPDNIAHMKAKGAAVSLDFHTMSSTDLLNALKTVINDPLYKENAMKLSRIHHDQPVKPLDRAVFWIEFVMRHKGAKHLRVAAHDLTWFQYHSLDVTGFLLACVATVIFIITKCLFCVWKFVRTGKKGKRD

SEQ ID NO: 69138 - protein, 392 aa, Homo sapiens
MFFALLHVSSTNGLDAVFPFGELLAELLKIPFVYSLRFSPGYAIEKHSGGLLFPPSYVPVVMSELSDQMTFIERVKNMIYVLYFEFWFQIFDMKKWDQFYSEVLGRPTTLSETMAKADIWLIRNYWDFQFPHPLLPNVEFVGGLHCKPAKPLPKEMEEFVQSSGENGVVVFSLGSMVSNTSEERANVIASALAKIPQKVLWRFDGNKPDTLGLNTRLYKWIPQNDLLGHPKTRAFITHGGANGIYEAIYHGIPMVGVPLFADQPDNIAHMKAKGAAVSLDFHTMSSTDLLNALKTVINDPLYKENAMKLSRIHHDQPVKPLDRAVFWIEFVMRHKGAKHLRVAAHDLTWFQYHSLDVTGFLLACVATVIFIITKCLFCVWKFVRTGKKGKRD

SEQ ID NO: 69139 - protein, 54 aa, Homo sapiens
MSMKWTSALLLIQLSCYFSSGSCGKVLVWPTEFSHWMNIKTILDELVQRGHEVT

SEQ ID NO: 69140 - protein, 529 aa, Homo sapiens
MSVKWTSVILLIQLSFCFSSGNCGKVLVWAAEYSHWMNIKTILDELIQRGHEVTVLASSASILFDPNNSSALKIEIYPTSLTKTELENFIMQQIKRWSDLPKDTFWLYFSQVQEIMSIFGDITRKFCKDVVSNKKFMKKVQESRFDVIFADAIFPCSELLAELFNIPFVYSLSFSPGYTFEKHSGGFIFPPSYVPVVMSELTDQMTFMERVKNMIYVLYFDFWFEIFDMKKWDQFYSEVLGRPTTLSETMGKADVWLIRNSWNFQFPYPLLPNVDFVGGLHCKPAKPLPKEMEDFVQSSGENGVVVFSLGSMVSNMTEERANVIASALAQIPQKVLWRFDGNKPDTLGLNTRLYKWIPQNDLLGHPKTRAFITHGGANGIYEAIYHGIPMVGIPLFADQPDNIAHMKARGAAVRVDFNTMSSTDLLNALKRVINDPSYKENVMKLSRIQHDQPVKPLDRAVFWIEFVMRHKGAKHLRVAAHDLTWFQYHSLDVIGFLLVCVATVIFIVTKCCLFCFWKFARKAKKGKND

SEQ ID NO: 69141 - protein, 422 aa, Homo sapiens
MLQWRRRHCCFAKMTWNAKRSLFRTHLIGVLSLVFLFAMFLFFNHHDWLPGRAGFKENPVTYTFRGFRSTKSETNHSSLRNIWKETVPQTLRPQTATNSNNTDLSPQGVTGLENTLSANGSIYNEKGTGHPNSYHFKYIINEPEKCQEKSPFLILLIAAEPGQIEARRAIRQTWGNESLAPGIQITRIFLLGLSIKLNGYLQRAILEESRQYHDIIQQEYLDTYYNLTIKTLMGMNWVATYCPHIPYVMKTDSDMFVNTEYLINKLLKPDLPPRHNYFTGYLMRGYAPNRNKDSKWYMPPDLYPSERYPVFCSGTGYVFSGDLAEKIFKVSLGIRRLHLEDVYVGICLAKLRIDPVPPPNEFVFNHWRVSYSSCKYSHLITSHQFQPSELIKYWNHLQQNKHNACANAAKEKAGRYRHRKLH

SEQ ID NO: 69142 - protein, 378 aa, Homo sapiens
MQLRLFRRLLLAALLLVIVWTLFGPSGLGEELLSLSLASLLPAPASPGPPLALPRLLIPNQEACSGPGAPPFLLILVCTAPENLNQRNAIRASWGGLREARGLRVQTLFLLGEPNAQHPVWGSQGSDLASESAAQGDILQAAFQDSYRNLTLKTLSGLNWAEKHCPMARYVLKTDDDVYVNVPELVSELVLRGGRWGQWERSTEPQREAEQEGGQVLHSEEVPLLYLGRVHWRVNPSRTPGGRHRVSEEQWPHTWGPFPPYASGTGYVLSASAVQLILKVASRAPLLPLEDVFVGVSARRGGLAPTQCVKLAGATHYPLDRCCYGKFLLTSHRLDPWKMQEAWKLVGGSDGERTAPFCSWFQGVLGILRCRAIAWLQS

SEQ ID NO: 69143 - protein, 378 aa, Homo sapiens; identical to SEQ ID NO: 69142

SEQ ID NO: 69144 - protein, 378 aa, Homo sapiens; identical to SEQ ID NO: 69142

SEQ ID NO: 69145 - protein, 378 aa, Homo sapiens; identical to SEQ ID NO: 69142

SEQ ID NO: 69146 - protein, 378 aa, Homo sapiens; identical to SEQ ID NO: 69142

SEQ ID NO: 69147 - protein, 310 aa, Homo sapiens
MAFPKMRLMYICLLVLGALCLYFSMYSLNPFKEQSFVYKKDGNFLKLPDTDCRQTPPFLVLLVTSSHKQLAERMAIRQTWGKERMVKGKQLKTFFLLGTTSSAAETKEVDQESQRHGDIIQKDFLDVYYNLTLKTMMGIEWVHRFCPQAAFVMKTDSDMFINVDYLTELLLKKNRTTRFFTGFLKLNEFPIRQPFSKWFVSKSEYPWDRYPPFCSGTGYVFSGDVASQVYNVSKSVPYIKLEDVFVGLCLERLNIRLEELHSQPTFFPGGLRFSVCLFRRIVACHFIKPRTLLDYWQALENSRGEDCPPV

SEQ ID NO: 69148 - protein, 310 aa, Homo sapiens; identical to SEQ ID NO: 69147

SEQ ID NO: 69149 - protein, 310 aa, Homo sapiens; identical to SEQ ID NO: 69147

SEQ ID NO: 69150 - protein, 310 aa, Homo sapiens; identical to SEQ ID NO: 69147

SEQ ID NO: 69151 - protein, 398 aa, Homo sapiens
MRLREPLLSGSAAMPGASLQRACRLLVAVCALHLGVTLVYYLAGRDLSRLPQLVGVSTPLQGGSNSAAAIGQSSGELRTGGARPPPPLGASSQPRPGGDSSPVVDSGPGPASNLTSVPVPHTTALSLPACPEESPLLVGPMLIEFNMPVDLELVAKQNPNVKMGGRYAPRDCVSPHKVAIIIPFRNRQEHLKYWLYYLHPVLQRQQLDYGIYVINQAGDTIFNRAKLLNVGFQEALKDYDYTCFVFSDVDLIPMNDHNAYRCFSQPRHISVAMDKFGFSLPYVQYFGGVSALSKQQFLTINGFPNNYWGWGGEDDDIFNRLVFRGMSISRPNAVVGRCRMIRHSRDKKNEPNPQRFDRIAHTKETMLSDGLNSLTYQVLDVQRYPLYTQITVDIGTPS

SEQ ID NO: 69152 - protein, 225 aa, Homo sapiens
MRLREPLLSGSAAMPGASLQRACRLLVAVCALHLGVTLVYYLAGRDLSRLPQLVGVSTPLQGGSNSAAAIGQSSGELRTGGARPPPPLGASSQPRPGGDSSPVVDSGPGPASNLTSVPVPHTTALSLPACPEESPLLVGPMLIEFNMPVDLELVAKQNPNVKMGGRYAPRDCVSPHKVAIIIPFRNRQEHLKYWLYYLHPVLQRQQLDYGIYVINQYEKIRRLLW

SEQ ID NO: 69153 - protein, 355 aa, Homo sapiens
MRLREPLLSGSAAMPGASLQRACRLLVAVCALHLGVTLVYYLAGRDLSRLPQLVGVSTPVVDSGPGPASNLTSVPVPHTTALSLPACPEESPLLVGPMLIEFNMPVDLELVAKQNPNVKMGGRYAPRDCVSPHKVAIIIPFRNRQEHLKYWLYYLHPVLQRQQLDYGIYVINQAGDTIFNRAKLLNVGFQEALKDYDYTCFVFSDVDLIPMNDHNAYRCFSQPRHISVAMDKFGFSLPYVQYFGGVSALSKQQFLTINGFPNNYWGWGGEDDDIFNRLVFRGMSISRPNAVVGRCRMIRHSRDKKNEPNPQRFDRIAHTKETMLSDGLNSLTYQVLDVQRYPLYTQITVDIGTPS

SEQ ID NO: 69154 - protein, 145 aa, Homo sapiens
MNDHNAYRCFSQPRHISVAMDKFGFSLPYVQYFGGVSALSKQQFLTINGFPNNYWGWGGEDDDIFNRLVFRGMSISRPNAVVGRCRMIRHSRDKKNEPNPQRFDRIAHTKETMLSDGLNSLTYQVLDVQRYPLYTQITVDIGTPS

SEQ ID NO: 69155 - protein, 401 aa, Homo sapiens
MAVEVQEQWPCLPAAGCPGPLGGPVAACGMSRLLGGTLERVCKAVLLLCLLHFLVAVILYFDVYAQHLAFFSRFSARGPAHALHPAASSSSSSSNCSRPNATASSSGLPEVPSALPGPTAPTLPPCPDSPPGLVGRLLIEFTSPMPLERVQRENPGVLMGGRYTPPDCTPAQTVAVIIPFRHREHHLRYWLHYLHPILRRQRLRYGVYVINQHGEDTFNRAKLLNVGFLEALKEDAAYDCFIFSDVDLVPMDDRNLYRCGDQPRHFAIAMDKFGFRLPYAGYFGGVSGLSKAQFLRINGFPNEYWGWGGEDDDIFNRISLTGMKISRPDIRIGRYRMIKHDRDKHNEPNPQRFTKIQNTKLTMKRDGIGSVRYQVLEVSRQPLFTNITVDIGRPPSWPPRG

SEQ ID NO: 69156 - protein, 372 aa, Homo sapiens
MSRLLGGTLERVCKAVLLLCLLHFLVAVILYFDVYAQHLAFFSRFSARGPAHALHPAASSSSSSSNCSRPNATASSSGLPEVPSALPGPTAPTLPPCPDSPPGLVGRLLIEFTSPMPLERVQRENPGVLMGGRYTPPDCTPAQTVAVIIPFRHREHHLRYWLHYLHPILRRQRLRYGVYVINQHGEDTFNRAKLLNVGFLEALKEDAAYDCFIFSDVDLVPMDDRNLYRCGDQPRHFAIAMDKFGFRLPYAGYFGGVSGLSKAQFLRINGFPNEYWGWGGEDDDIFNRISLTGMKISRPDIRIGRYRMIKHDRDKHNEPNPQRFTKIQNTKLTMKRDGIGSVRYQVLEVSRQPLFTNITVDIGRPPSWPPRG

SEQ ID NO: 69157 - protein, 372 aa, Homo sapiens; identical to SEQ ID NO: 69156

SEQ ID NO: 69158 - protein, 306 aa, Homo sapiens
MPSTQLLAAAAAAATAPGPTPPPLAPGSLRSPVPCPVPRLPRCHPVLTRHLVLRVQRENPGVLMGGRYTPPDCTPAQTVAVIIPFRHREHHLRYWLHYLHPILRRQRLRYGVYVINQHGEDTFNRAKLLNVGFLEALKEDAAYDCFIFSDVDLVPMDDRNLYRCGDQPRHFAIAMDKFGFRLPYAGYFGGVSGLSKAQFLRINGFPNEYWGWGGEDDDIFNRISLTGMKISRPDIRIGRYRMIKHDRDKHNEPNPQRFTKIQNTKLTMKRDGIGSVRYQVLEVSRQPLFTNITVDIGRPPSWPPRG

SEQ ID NO: 69159 - protein, 146 aa, Homo sapiens
MLRRLLERPCTLALLVGSQLAVMMYLSLGGFRSLSALFGRDQGPTFDYSHPRDVYSNLSHLPGAPGGPPAPQGLPYCPERSPLLVGPVSVSFSPVPSLAEIVERNPRVEPGGRYRPPAALPPAPLLAAPAACLWHLCHPPGWKWNI

SEQ ID NO: 69160 - protein, 393 aa, Homo sapiens
MLRRLLERPCTLALLVGSQLAVMMYLSLGGFRSLSALFGRDQGPTFDYSHPRDVYSNLSHLPGAPGGPPAPQGLPYCPERSPLLVGPVSVSFSPVPSLAEIVERNPRVEPGGRYRPAGCEPRSRTAIIVPHRAREHHLRLLLYHLHPFLQRQQLAYGIYVIHQAGNGTFNRAKLLNVGVREALRDEEWDCLFLHDVDLLPENDHNLYVCDPRGPRHVAVAMNKFGYSLPYPQYFGGVSALTPDQYLKMNGFPNEYWGWGGEDDDIATRVRLAGMKISRPPTSVGHYKMVKHRGDKGNEENPHRFDLLVRTQNSWTQDGMNSLTYQLLARELGPLYTNITADIGTDPRGPRAPSGPRYPPGSSQAFRQEMLQRRPPARPGPLSTANHTALRGSH

SEQ ID NO: 69161 - protein, 393 aa, Homo sapiens
MLRRLLERPCTLALLVGSQLAVMMYLSLGGFRSLSALFGRDQGPTFDYSHPRDVYSNLSHLPGAPGGPPAPQGLPYCPERSPLLVGPVSVSFSPVPSLAEIVERNPRVEPGGRYRPAGCEPRSRTAIIVPHRAREHHLRLLLYHLHPFLQRQQLAYGIYVIHQAGNGTFNRAKLLNVGVREALRDEEWDCLFLHDVDLLPENDHNLYVCDPRGPRHVAVAMNKFGYSLPYPQYFGGVSALTPDQYLKMNGFPNEYWGWGGEDDDIATRVRLAGMKISRPPTSVGHYKMVKHRGDKGNEENPHRFDLLVRTQNSWTQDGMNSLTYQLLARELGPLYTNITADIGTDPRGPRAPSGPRYPPGSSQAFRQEMLQRRPPARPGPLSTANHTPSEVHT

SEQ ID NO: 69162 - protein, 393 aa, Homo sapiens; identical to SEQ ID NO: 69160

SEQ ID NO: 69163 - protein, 370 aa, Homo sapiens
MLRRLLERPCTLALFGRDQGPTFDYSHPRDVYSNLSHLPGAPGGPPAPQGLPYCPERSPLLVGPVSVSFSPVPSLAEIVERNPRVEPGGRYRPAGCEPRSRTAIIVPHRAREHHLRLLLYHLHPFLQRQQLAYGIYVIHQAGNGTFNRAKLLNVGVREALRDEEWDCLFLHDVDLLPENDHNLYVCDPRGPRHVAVAMNKFGYSLPYPQYFGGVSALTPDQYLKMNGFPNEYWGWGGEDDDIATRVRLAGMKISRPPTSVGHYKMVKHRGDKGNEENPHRFDLLVRTQNSWTQDGMNSLTYQLLARELGPLYTNITADIGTDPRGPRAPSGPRYPPGSSQAFRQEMLQRRPPARPGPLSTANHTALRGSH

SEQ ID NO: 69164 - protein, 227 aa, Homo sapiens
MLRRLLERPCTLALLVGSQLAVMMYLSLGGFRSLSALFGRDQGPTFDYSHPRDVYSNLSHLPGAPGGPPAPQGLPYCPERSPLLVGPVSVSFSPVPSLAEIVERNPRVEPGGRYRPAGCEPRSRTAIIVPHRAREHHLRLLLYHLHPFLQRQQLAYGIYVIHQAGNGTFNRAKLLNVGVREALRDEEWDCLFLHDVDLLPENDHNLYVCDPRGPRHVAVAMNKFGYR

SEQ ID NO: 69165 - protein, 344 aa, Homo sapiens
MGFNLTFHLSYKFRLLLLLTLCLTVVGWATSNYFVGAIQEIPKAKEFMANFHKTLILGKGKTLTNEASTKKVELDNCPSVSPYLRGQSKLIFKPDLTLEEVQAENPKVSRGRYRPQECKALQRVAILVPHRNREKHLMYLLEHLHPFLQRQQLDYGIYVIHQAEGKKFNRAKLLNVGYLEALKEENWDCFIFHDVDLVPENDFNLYKCEEHPKHLVVGRNSTGYRLRYSGYFGGVTALSREQFFKVNGFSNNYWGWGGEDDDLRLRVELQRMKISRPLPEVGKYTMVFHTRDKGNEVNAERMKLLHQVSRVWRTDGLSSCSYKLVSVEHNPLYINITVDFWFGA

SEQ ID NO: 69166 - protein, 344 aa, Homo sapiens; identical to SEQ ID NO: 69165

SEQ ID NO: 69167 - protein, 6 aa, Homo sapiens
MGFNLT

SEQ ID NO: 69168 - skipped

SEQ ID NO: 69169 - protein, 55 aa, Homo sapiens
MGFNLTFHLSYKFRLLLLLTLCLTVVGWATSNYFVGAIQEIPKAKEFMANFHKTL

SEQ ID NO: 69170 - protein, 21 aa, Homo sapiens
MGFNLTFHLSYKFRLLLLLTL

SEQ ID NO: 69171 - protein, 136 aa, Homo sapiens
MGFNLTFHLSYKFRLLLLLTLCLTVVGWATSNYFVGAIQEIPKAKEFMANFHKTLILGKGKTLTNEASTKKVELDNCPSVSPYLRGQSKLIFKPDLTLEEVQAENPKVSRGRYRPQECKALQRVAILVPHRNREKH

SEQ ID NO: 69172 - protein, 118 aa, Homo sapiens
MGFNLTFHLSYKFRLLLLLTLCLTVVGWATSNYFVGAIQEIPKAKEFMANFHKTLILGKGKTLTNEASTKKVELDNCPSVSPYLRGQSKLIFKPDLTLEEVQAENPKVSRGRYRPQEC

SEQ ID NO: 69173 - protein, 344 aa, Homo sapiens; identical to SEQ ID NO: 69165

SEQ ID NO: 69174 - protein, 42 aa, Homo sapiens
MGFNLTFHLSYKFRLLLLLTLCLTVVGWATSNYFVGAIQEIP

SEQ ID NO: 69175 - protein, 388 aa, Homo sapiens
MRARRGLLRLPRRSLLAALFFFSLSSSLLYFVYVAPGIVNTYLFMMQAQGILIRDNVRTIGAQVYEQVLRSAYAKRNSSVNDSDYPLDLNHSETFLQTTTFLPEDFTYFANHTCPERLPSMKGPIDINMSEIGMDYIHELFSKDPTIKLGGHWKPSDCMPRWKVAILIPFRNRHEHLPVLFRHLLPMLQRQRLQFAFYVVEQVGTQPFNRAMLFNVGFQEAMKDLDWDCLIFHDVDHIPESDRNYYGCGQMPRHFATKLDKYMYLLPYTEFFGGVSGLTVEQFRKINGFPNAFWGWGGEDDDLWNRVQNAGYSVSRPEGDTGKYKSIPHHHRGEVQFLGRYALLRKSKERQGLDGLNNLNYFANITYDALYKNITVNLTPELAQVNEY

SEQ ID NO: 69176 - protein, 343 aa, Homo sapiens
MSVLRRMMRVSNRSLLAFIFFFSLSSSCLYFIYVAPGIDYPEGNNSSDYLVQTTTYLPENFTYSPYLPCPEKLPYMRGFLNVNVSEVSFDEIHQLFSKDLDIEPGGHWRPKDCKPRWKVAVLIPFRNRHEHLPIFFLHLIPMLQKQRLEFAFYVIEQTGTQPFNRAMLFNVGFKEAMKDSVWDCVIFHDVDHLPENDRNYYGCGEMPRHFAAKLDKYMYILPYKEFFGGVSGLTVEQFRKINGFPNAFWGWGGEDDDLWNRVHYAGYNVTRPEGDLGKYKSIPHHHRGEVQFLGRYKLLRYSKERQYIDGLNNLIYRPKILVDRLYTNISVNLMPELAPIEDY

SEQ ID NO: 69177 - protein, 382 aa, Homo sapiens
MSVLRRMMRVSNRSLLAFIFFFSLSSSCLYFIYVAPGIANTYLFMVQARGIMLRENVKTIGHMIRLYTNKNSTLNGTDYPEGNNSSDYLVQTTTYLPENFTYSPYLPCPEKLPYMRGFLNVNVSEVSFDEIHQLFSKDLDIEPGGHWRPKDCKPRWKVAVLIPFRNRHEHLPIFFLHLIPMLQKQRLEFAFYVIEQTGTQPFNRAMLFNVGFKEAMKDSVWDCVIFHDVDHLPENDRNYYGCGEMPRHFAAKLDKYMYILPYKEFFGGVSGLTVEQFRKINGFPNAFWGWGGEDDDLWNRVHYAGYNVTRPEGDLGKYKSIPHHHRGEVQFLGRYKLLRYSKERQYIDGLNNLIYRPKILVDRLYTNISVNLMPELAPIEDY

SEQ ID NO: 69178 - protein, 343 aa, Homo sapiens
MSVLRRMMRVSNRSLLAFIFFFSLSSSCLYFIYVAPGIANTYLFMVQARGIMLRENVKTIGHMIRLYTNKNSTLNGTDYPEGNNSSDYLVQTTTYLPENFTYSPYLPCPEKLPYMRGFLNVNVSEVSFDEIHQLFSKDLDIEPGGHWRPKDCKPRWKTGTQPFNRAMLFNVGFKEAMKDSVWDCVIFHDVDHLPENDRNYYGCGEMPRHFAAKLDKYMYILPYKEFFGGVSGLTVEQFRKINGFPNAFWGWGGEDDDLWNRVHYAGYNVTRPEGDLGKYKSIPHHHRGEVQFLGRYKLLRYSKERQYIDGLNNLIYRPKILVDRLYTNISVNLMPELAPIEDY

SEQ ID NO: 69179 - protein, 348 aa, Homo sapiens
MAEKVLVTGGAGYIGSHTVLELLEAGYLPVVIDNFHNAFRGGGSLPESLRRVQELTGRSVEFEEMDILDQGALQRLFKKYSFMAVIHFAGLKAVGESVQKPLDYYRVNLTGTIQLLEIMKAHGVKNLVFSSSATVYGNPQYLPLDEAHPTGGCTNPYGKSKFFIEEMIRDLCQADKTWNAVLLRYFNPTGAHASGCIGEDPQGIPNNLMPYVSQVAIGRREALNVFGNDYDTEDGTGVRDYIHVVDLAKGHIAALRKLKEQCGCRIYNLGTGTGYSVLQMVQAMEKASGKKIPYKVVARREGDVAACYANPSLAQEELGWTAALGLDRMCEDLWRWQKQNPSGFGTQA

SEQ ID NO: 69180 - protein, 258 aa, Homo sapiens
MDILDQGALQRLFKKYSFMAVIHFAGLKAVGESVQKPLDYYRVNLTGTIQLLEIMKAHGVKNLVFSSSATVYGNPQYLPLDEAHPTGGCTNPYGKSKFFIEEMIRDLCQADKTWNAVLLRYFNPTGAHASGCIGEDPQGIPNNLMPYVSQVAIGRREALNVFGNDYDTEDGTGVRDYIHVVDLAKGHIAALRKLKEQCGCRIPYKVVARREGDVAACYANPSLAQEELGWTAALGLDRMCEDLWRWQKQNPSGFGTQA

SEQ ID NO: 69181 - protein, 227 aa, Homo sapiens
MDILDQGALQRLFKKYSFMAVIHFAGLKAVGESVQKPLDYYRVNLTGTIQLLEIMKAHGVKNLVFSSSATVYGNPQYLPLDEAHPTGGCTNPYGKSKFFIEEMIRDLCQADKTWNAVLLRYFNPTGAHASGCIGEDPQGIPNNLMPYVSQVAIGRREALNVFGNDYDTEDGTGVRDYIHVVDLAKGHIAALRKLKEQCGCRIYNLGTGTGYSVLQMVQAMEKASGKK

SEQ ID NO: 69182 - protein, 195 aa, Homo sapiens
MAEKVLVTGGAGYIGSHTVLELLEAGYLPVVIDNFHNAFRGGGSLPESLRRVQELTGRSVEFEEMDILDQGALQRLFKKYSFMAVIHFAGLKAVGESVQKPLDYYRVNLTGTIQLLEIMKAHGVKNLVFSSSATVYGNPQYLPLDEAHPTGGCTNPYGKSKFFIEEMIRDLCQADKTWNAVLLRYFNPTGAHASG

SEQ ID NO: 69183 - protein, 239 aa, Homo sapiens
MDILDQGALQRLFKKYSFMAVIHFAGLKAVGESVQKPLDYYRVNLTGTIQLLEIMKAHGVKNLVFSSSATVYGNPQYLPLDEAHPTGGCTNPYGKSKFFIEEMIRDLCQADKTWNAVLLRYFNPTGAHASGCIGEDPQGIPNNLMPYVSQVAIGRREALNVFGNDYDTEDGTGVRDYIHVVDLAKGHIAALRKLKEQCGCRIPYKVVARREGDVAACYANPSLAQEELGWTAALGLDRM

SEQ ID NO: 69184 - protein, 194 aa, Homo sapiens
MAEKVLVTGGAGYIGSHTVLELLEAGYLPVVIDNFHNAFRGGGSLPESLRRVQELTGRSVEFEEMDILDQGALQRLFKKYSFMAVIHFAGLKAVGESVQKPLDYYRVNLTGTIQLLEIMKAHGVKNLVFSSSATVYGNPQYLPLDEAHPTGGCTNPYGKSKFFIEEMIRDLCQADKTWNAVLLRYFNPTGAHAS

SEQ ID NO: 69185 - protein, 108 aa, Homo sapiens
VAIGRREALNVFGNDYDTEDGTGVRDYIHVVDLAKGHIAALRKLKEQCGCRIPYKVVARREGDVAACYANPSLAQEELGWTAALGLDRMCEDLWRWQKQNPSGFGTQA

SEQ ID NO: 69186 - protein, 372 aa, Homo sapiens
MKYLRHRRPNATLILAIGAFTLLLFSLLVSPPTCKVQEQPPAIPEALAWPTPPTRPAPAPCHANTSMVTHPDFATQPQHVQNFLLYRHCRHFPLLQDVPPSKCAQPVFLLLVIKSSPSNYVRRELLRRTWGRERKVRGLQLRLLFLVGTASNPHEARKVNRLLELEAQTHGDILQWDFHDSFFNLTLKQVLFLQWQETRCANASFVLNGDDDVFAHTDNMVFYLQDHDPGRHLFVGQLIQNVGPIRAFWSKYYVPEVVTQNERYPPYCGGGGFLLSRFTAAALRRAAHVLDIFPIDDVFLGMCLELEGLKPASHSGIRTSGVRAPSQRLSSFDPCFYRDLLLVHRFLPYEMLLMWDALNQPNLTCGNQTQIY

SEQ ID NO: 69187 - protein, 378 aa, Homo sapiens
MLPPQPSAAHQGRGGRSGLLPKGPAMLCRLCWLVSYSLAVLLLGCLLFLRKAAKPAGDPTAHQPFWAPPTPRHSRCPPNHTVSSASLSLPSRHRLFLTYRHCRNFSILLEPSGCSKDTFLLLAIKSQPGHVERRAAIRSTWGRVGGWARGRQLKLVFLLGVAGSAPPAQLLAYESREFDDILQWDFTEDFFNLTLKELHLQRWVVAACPQAHFMLKGDDDVFVHVPNVLEFLDGWDPAQDLLVGDVIRQALPNRNTKVKYFIPPSMYRATHYPPYAGGGGYVMSRATVRRLQAIMEDAELFPIDDVFVGMCLRRLGLSPMHHAGFKTFGIRRPLDPLDPCLYRGLLLVHRLSPLEMWTMWALVTDEGLKCAAGPIPQR

SEQ ID NO: 69188 - protein, 353 aa, Homo sapiens
MLCRLCWLVSYSLAVLLLGCLLFLRKAAKPAGDPTAHQPFWAPPTPRHSRCPPNHTVSSASLSLPSRHRLFLTYRHCRNFSILLEPSGCSKDTFLLLAIKSQPGHVERRAAIRSTWGRVGGWARGRQLKLVFLLGVAGSAPPAQLLAYESREFDDILQWDFTEDFFNLTLKELHLQRWVVAACPQAHFMLKGDDDVFVHVPNVLEFLDGWDPAQDLLVGDVIRQALPNRNTKVKYFIPPSMYRATHYPPYAGGGGYVMSRATVRRLQAIMEDAELFPIDDVFVGMCLRRLGLSPMHHAGFKTFGIRRPLDPLDPCLYRGLLLVHRLSPLEMWTMWALVTDEGLKCAAGPIPQR

SEQ ID NO: 69189 - protein, 353 aa, Homo sapiens; identical to SEQ ID NO: 69188

SEQ ID NO: 69190 - protein, 494 aa, Homo sapiens
MFEIKKICCIGAGYVGGPTCSVIAHMCPEIRVTVVDVNESRINAWNSPTLPIYEPGLKEVVESCRGKNLFFSTNIDDAIKEADLVFISVNTPTKTYGMGKGRAADLKYIEACARRIVQNSNGYKIVTEKSTVPVRAAESIRRIFDANTKPNLNLQVLSNPEFLAEGTAIKDLKNPDRVLIGGDETPEGQRAVQALCAVYEHWVPREKILTTNTWSSELSKLAANAFLAQRISSINSISALCEATGADVEEVATAIGMDQRIGNKFLKASVGFGGSCFQKDVLNLVYLCEALNLPEVARYWQQVIDMNDYQRRRFASRIIDSLFNTVTDKKIAILGFAFKKDTGDTRESSSIYISKYLMDEGAHLHIYDPKVPREQIVVDLSHPGVSEDDQVSRLVTISKDPYEACDGAHAVVICTEWDMFKELDYERIHKKMLKPAFIFDGRRVLDGLHNELQTIGFQIETIGKKVSSKRIPYAPSGEIPKFSLQDPPNKKPKV

SEQ ID NO: 69191 - protein, 427 aa, Homo sapiens
MFEIKKICCIGAGYVGGPTCSVIAHMCPEIRVTVVDVNESRINAWNSPTLPIYEPGLKEVVESCRGKNLFFSTNIDDAIKEADLVFISVLSNPEFLAEGTAIKDLKNPDRVLIGGDETPEGQRAVQALCAVYEHWVPREKILTTNTWSSELSKLAANAFLAQRISSINSISALCEATGADVEEVATAIGMDQRIGNKFLKASVGFGGSCFQKDVLNLVYLCEALNLPEVARYWQQVIDMNDYQRRRFASRIIDSLFNTVTDKKIAILGFAFKKDTGDTRESSSIYISKYLMDEGAHLHIYDPKVPREQIVVDLSHPGVSEDDQVSRLVTISKDPYEACDGAHAVVICTEWDMFKELDYERIHKKMLKPAFIFDGRRVLDGLHNELQTIGFQIETIGKKVSSKRIPYAPSGEIPKFSLQDPPNKKPKV

SEQ ID NO: 69192 - protein, 55 aa, Homo sapiens
MFEIKKICCIGAGYVGGPTCSVIAHMCPEIRVTVVDVNESRINAWNSPTLPIYED

SEQ ID NO: 69193 - protein, 85 aa, Homo sapiens
MFEIKKICCIGAGYVGGPTCSVIAHMCPEIRVTVVDVNESRINAWNSPTLPIYEPGLKEVVESCRGKNLFFSTNIDDAIKEADLV

SEQ ID NO: 69194 - protein, 494 aa, Homo sapiens; identical to SEQ ID NO: 69190

SEQ ID NO: 69195 - protein, 397 aa, Homo sapiens
MGKGRAADLKYIEACARRIVQNSNGYKIVTEKSTVPVRAAESIRRIFDANTKPNLNLQVLSNPEFLAEGTAIKDLKNPDRVLIGGDETPEGQRAVQALCAVYEHWVPREKILTTNTWSSELSKLAANAFLAQRISSINSISALCEATGADVEEVATAIGMDQRIGNKFLKASVGFGGSCFQKDVLNLVYLCEALNLPEVARYWQQVIDMNDYQRRRFASRIIDSLFNTVTDKKIAILGFAFKKDTGDTRESSSIYISKYLMDEGAHLHIYDPKVPREQIVVDLSHPGVSEDDQVSRLVTISKDPYEACDGAHAVVICTEWDMFKELDYERIHKKMLKPAFIFDGRRVLDGLHNELQTIGFQIETIGKKVSSKRIPYAPSGEIPKFSLQDPPNKKPKV

SEQ ID NO: 69196 - protein, 130 aa, Homo sapiens
MFEIKKICCIGAGYVGGPTCSVIAHMCPEIRVTVVDVNESRINAWNSPTLPIYEPGLKEVVESCRGKNLFFSTNIDDAIKEADLVFISVNTPTKTYGMGKGRAADLKYIEACARRIVQNSNGYKIVTEKS

SEQ ID NO: 69197 - protein, 53 aa, Homo sapiens
MFEIKKICCIGAGYVGGPTCSVIAHMCPEIRVTVVDVNESRINAWNSPTLPIY

SEQ ID NO: 69198 - protein, 55 aa, Homo sapiens; identical to SEQ ID NO: 69192

SEQ ID NO: 69199 - protein, 153 aa, Homo sapiens
MFEIKKICCIGAGYVGGPTCSVIAHMCPEIRVTVVDVNESRINAWNSPTLPIYEPGLKEVVESCRGKNLFFSTNIDDAIKEADLVFISVNTPTKTYGMGKGRAADLKYIEACARRIVQNSNGYKIVTEKSTVPVRAAESIRRIFDANTKPNLN

SEQ ID NO: 69200 - protein, 181 aa, Homo sapiens
MWSSGLLIQDSTIMFEIKKICCIGAGYVGGPTCSVIAHMCPEIRVTVVDVNESRINAWNSPTLPIYEPGLKEVVESCRGKNLFFSTNIDDAIKEADLVFISVNTPTKTYGMGKGRAADLKYIEACARRIVQNSNGYKIVTEKSTVPVRAAESIRRIFDANTKPNLNLQVLSNPEFLAEGTA

SEQ ID NO: 69201 - protein, 394 aa, Homo sapiens
MALLDLALEGMAVFGFVLFLVLWLMHFMAIIYTRLHLNKKATDKQPYSKLPGVSLLKPLKGVDPNLINNLETFFELDYPKYEVLLCVQDHDDPAIDVCKKLLGKYPNVDARLFIGGKKVGINPKINNLMPGYEVAKYDLIWICDSGIRVIPDTLTDMVNQMTEKVGLVHGLPYVADRQGFAATLEQVYFGTSHPRYYISANVTGFKCVTGMSCLMRKDVLDQAGGLIAFAQYIAEDYFMAKAIADRGWRFAMSTQVAMQNSGSYSISQFQSRMIRWTKLRINMLPATIICEPISECFVASLIIGWAAHHVFRWDIMVFFMCHCLAWFIFDYIQLRGVQGGTLCFSKLDYAVAWFIRESMTIYIFLSALWDPTISWRTGRYRLRCGGTAEEILDV

SEQ ID NO: 69202 - protein, 1555 aa, Homo sapiens
MGCKGDASGACAAGALPVTGVCYKMGVLVVLTVLWLFSSVKADSKAITTSLTTKWFSTPLLLEASEFLAEDSQEKFWNFVEASQNIGSSDHDGTDYSYYHAILEAAFQFLSPLQQNLFKFCLSLRSYSATIQAFQQIAADEPPPEGCNSFFSVHGKKTCESDTLEALLLTASERPKPLLFKGDHRYPSSNPESPVVIFYSEIGSEEFSNFHRQLISKSNAGKINYVFRHYIFNPRKEPVYLSGYGVELAIKSTEYKAKDDTQVKGTEVNTTVIGENDPIDEVQGFLFGKLRDLHPDLEGQLKELRKHLVESTNEMAPLKVWQLQDLSFQTAARILASPVELALVVMKDLSQNFPTKARAITKTAVSSELRTEVEENQKYFKGTLGLQPGDSALFINGLHMDLDTQDIFSLFDVLRNEARVMEGLHRLGIEGLSLHNVLKLNIQPSEADYAVDIRSPAISWVNNLEVDSRYNSWPSSLQELLRPTFPGVIRQIRKNLHNMVFIVDPAHETTAELMNTAEMFLSNHIPLRIGFIFVVNDSEDVDGMQDAGVAVLRAYNYVAQEVDDYHAFQTLTHIYNKVRTGEKVKVEHVVSVLEKKYPYVEVNSILGIDSAYDRNRKEARGYYEQTGVGPLPVVLFNGMPFEREQLDPDELETITMHKILETTTFFQRAVYLGELPHDQDVVEYIMNQPNVVPRINSRILTAERDYLDLTASNNFFVDDYARFTILDSQGKTAAVANSMNYLTKKGMSSKEIYDDSFIRPVTFWIVGDFDSPSGRQLLYDAIKHQKSSNNVRISMINNPAKEISYENTQISRAIWAALQTQTSNAAKNFITKMAKEGAAEALAAGADIAEFSVGGMDFSLFKEVFESSKMDFILSHAVYCRDVLKLKKGQRAVISNGRIIGPLEDSELFNQDDFHLLENIILKTSGQKIKSHIQQLRVEEDVASDLVMKVDALLSAQPKGDPRIEYQFFEDRHSAIKLRPKEGETYFDVVAVVDPVTREAQRLAPLLLVLAQLINMNLRVFMNCQSKLSDMPLKSFYRYVLEPEISFTSDNSFAKGPIAKFLDMPQSPLFTLNLNTPESWMVESVRTPYDLDNIYLEEVDSVVAAEYELEYLLLEGHCYDITTGQPPRGLQFTLGTSANPVIVDTIVMANLGYFQLKANPGAWILRLRKGRSEDIYRIYSHDGTDSPPDADEVVIVLNNFKSKIIKVKVQKKADMVNEDLLSDGTSENESGFWDSFKWGFTGQKTEEVKQDKDDIINIFSVASGHLYERFLRIMMLSVLKNTKTPVKFWFLKNYLSPTFKEFIPYMANEYNFQYELVQYKWPRWLHQQTEKQRIIWGYKILFLDVLFPLVVDKFLFVDADQIVRTDLKELRDFNLDGAPYGYTPFCDSRREMDGYRFWKSGYWASHLAGRKYHISALYVVDLKKFRKIAAGDRLRGQYQGLSQDPNSLSNLDQDLPNNMIHQVPIKSLPQEWLWCETWCDDASKKRAKTIDLCNNPMTKEPKLEAAVRIVPEWQDYDQEIKQLQIRFQKEKETGALYKEKTKEPSREGPQKREEL

SEQ ID NO: 69203 - protein, 1531 aa, Homo sapiens
MGVLVVLTVLWLFSSVKADSKAITTSLTTKWFSTPLLLEASEFLAEDSQEKFWNFVEASQNIGSSDHDGTDYSYYHAILEAAFQFLSPLQQNLFKFCLSLRSYSATIQAFQQIAADEPPPEGCNSFFSVHGKKTCESDTLEALLLTASERPKPLLFKGDHRYPSSNPESPVVIFYSEIGSEEFSNFHRQLISKSNAGKINYVFRHYIFNPRKEPVYLSGYGVELAIKSTEYKAKDDTQVKGTEVNTTVIGENDPIDEVQGFLFGKLRDLHPDLEGQLKELRKHLVESTNEMAPLKVWQLQDLSFQTAARILASPVELALVVMKDLSQNFPTKARAITKTAVSSELRTEVEENQKYFKGTLGLQPGDSALFINGLHMDLDTQDIFSLFDVLRNEARVMEGLHRLGIEGLSLHNVLKLNIQPSEADYAVDIRSPAISWVNNLEVDSRYNSWPSSLQELLRPTFPGVIRQIRKNLHNMVFIVDPAHETTAELMNTAEMFLSNHIPLRIGFIFVVNDSEDVDGMQDAGVAVLRAYNYVAQEVDDYHAFQTLTHIYNKVRTGEKVKVEHVVSVLEKKYPYVEVNSILGIDSAYDRNRKEARGYYEQTGVGPLPVVLFNGMPFEREQLDPDELETITMHKILETTTFFQRAVYLGELPHDQDVVEYIMNQPNVVPRINSRILTAERDYLDLTASNNFFVDDYARFTILDSQGKTAAVANSMNYLTKKGMSSKEIYDDSFIRPVTFWIVGDFDSPSGRQLLYDAIKHQKSSNNVRISMINNPAKEISYENTQISRAIWAALQTQTSNAAKNFITKMAKEGAAEALAAGADIAEFSVGGMDFSLFKEVFESSKMDFILSHAVYCRDVLKLKKGQRAVISNGRIIGPLEDSELFNQDDFHLLENIILKTSGQKIKSHIQQLRVEEDVASDLVMKVDALLSAQPKGDPRIEYQFFEDRHSAIKLRPKEGETYFDVVAVVDPVTREAQRLAPLLLVLAQLINMNLRVFMNCQSKLSDMPLKSFYRYVLEPEISFTSDNSFAKGPIAKFLDMPQSPLFTLNLNTPESWMVESVRTPYDLDNIYLEEVDSVVAAEYELEYLLLEGHCYDITTGQPPRGLQFTLGTSANPVIVDTIVMANLGYFQLKANPGAWILRLRKGRSEDIYRIYSHDGTDSPPDADEVVIVLNNFKSKIIKVKVQKKADMVNEDLLSDGTSENESGFWDSFKWGFTGQKTEEVKQDKDDIINIFSVASGHLYERFLRIMMLSVLKNTKTPVKFWFLKNYLSPTFKEFIPYMANEYNFQYELVQYKWPRWLHQQTEKQRIIWGYKILFLDVLFPLVVDKFLFVDADQIVRTDLKELRDFNLDGAPYGYTPFCDSRREMDGYRFWKSGYWASHLAGRKYHISALYVVDLKKFRKIAAGDRLRGQYQGLSQDPNSLSNLDQDLPNNMIHQVPIKSLPQEWLWCETWCDDASKKRAKTIDLCNNPMTKEPKLEAAVRIVPEWQDYDQEIKQLQIRFQKEKETGALYKEKTKEPSREGPQKREEL

SEQ ID NO: 69204 - protein, 280 aa, Homo sapiens
MAPAKATNVVRLLLGSTALWLSQLGSGTVAASKSVTAHLAAKWPETPLLLEASEFMAEESNEKFWQFLETVQELAIYKQTESDYSYYNLILKKAGQFLDNLHINLLKFAFSIRAYSPAIQMFQQIAADEPPPDGCNAFVVIHKKHTCKINEIKKLLKKAASRTRPYLFKGDHKFPTNKENLPVVILYAEMGTRTFSAFHKVLSEKAQNEEILYVLRHYIQKPSSRKMYLSGYGVELAIKSTEYKALDDTQVKTVTNTTVEDETETNEVQGFLFGKLKLVY

SEQ ID NO: 69205 - protein, 278 aa, Homo sapiens
MAPAKATNVVRLLLGSTALWLSQLGSGTVAASKSVTAHLAAKWPETPLLLEASEFMAEESNEKFWQFLETVQELAIYKQTESDYSYYNLILKKAGQFLDNLHINLLKFAFSIRAYSPAIQMFQQIAADEPPPDGCNAFVVIHKKHTCKINEIKKLLKKAASRTRPYLFKGDHKFPTNKENLPVVILYAEMGTRTFSAFHKVLSEKAQNEEILYVLRHYIQKPSSRKMYLSGYGVELAIKSTEYKALDDTQVKTVTNTTVEDETETNEVQGFLFGKLKS

SEQ ID NO: 69206 - protein, 261 aa, Homo sapiens [sequence omitted]

SEQ ID NO: 69207 - protein, 1516 aa, Homo sapiens
MAPAKATNVVRLLLGSTALWLSQLGSGTVAASKSVTAHLAAKWPETPLLLEASEFMAEESNEKFWQFLETVQELAIYKQTESDYSYYNLILKKAGQFLDNLHINLLKFAFSIRAYSPAIQMFQQIAADEPPPDGCNAFVVIHKKHTCKINEIKKLLKKAASRTRPYLFKGDHKFPTNKENLPVVILYAEMGTRTFSAFHKVLSEKAQNEEILYVLRHYIQKPSSRKMYLSGYGVELAIKSTEYKALDDTQVKTVTNTTVEDETETNEVQGFLFGKLKEIYSDLRDNLTAFQKYLIESNKQMMPLKVWELQDLSFQAASQIMSAPVYDSIKLMKDISQNFPIKARSLTRIAVNQHMREEIKENQKDLQVRFKIQPGDARLFINGLRVDMDVYDAFSILDMLKLEGKMMNGLRNLGINGEDMSKFLKLNSHIWEYTYVLDIRHSSIMWINDLENDDLYITWPTSCQKLLKPVFPGSVPSIRRNFHNLVLFIDPAQEYTLDFIKLADVFYSHEVPLRIGFVFILNTDDEVDGANDAGVALWRAFNYIAEEFDISEAFISIVHMYQKVKKDQNILTVDNVKSVLQNTFPHANIWDILGIHSKYDEERKAGASFYKMTGLGPLPQALYNGEPFKHEEMNIKELKMAVLQRMMDASVYLQREVFLGTLNDRTNAIDFLMDRNNVVPRINTLILRTNQQYLNLISTSVTADVEDFSTFFFLDSQDKSAVIAKNMYYLTQDDESIISAVTLWIIADFDKPSGRKLLFNALKHMKTSVHSRLGIIYNPTSKINEENTAISRGILAAFLTQKNMFLRSFLGQLAKEEIATAIYSGDKIKTFLIEGMDKNAFEKKYNTVGVNIFRTHQLFCQDVLKLRPGEMGIVSNGRFLGPLDEDFYAEDFYLLEKITFSNLGEKIKGIVENMGINANNMSDFIMKVDALMSSVPKRASRYDVTFLRENHSVIKTNPQENDMFFNVIAIVDPLTREAQKMAQLLVVLGKIINMKIKLFMNCRGRLSEAPLESFYRFVLEPELMSGANDVSSLGPVAKFLDIPESPLLILNMITPEGWLVETVHSNCDLDNIHLKDTEKTVTAEYELEYLLLEGQCFDKVTEQPPRGLQFTLGTKNKPAVVDTIVMAHHGYFQLKANPGAWILRLHQGKSEDIYQIVGHEGTDSQADLEDIIVVLNSFKSKILKVKVKKETDKIKEDILTDEDEKTKGLWDSIKSFTVSLHKENKKEKDVLNIFSVASGHLYERFLRIMMLSVLRNTKTPVKFWLLKNYLSPTFKEVIPHMAKEYGFRYELVQYRWPRWLRQQTERQRIIWGYKILFLDVLFPLAVDKIIFVDADQIVRHDLKELRDFDLDGAPYGYTPFCDSRREMDGYRFWKTGYWASHLLRRKYHISALYVVDLKKFRRIGAGDRLRSQYQALSQDPNSLSNLDQDLPNNMIYQVAIKSLPQDWLWCETWCDDESKQRAKTIDLCNNPKTKESKLKAAARIVPEWVEYDAEIRQLLDHLENKKQDTILTHDEL

SEQ ID NO: 69208 - protein, 372 aa, Homo sapiens
MAPAKATNVVRLLLGSTALWLSQLGSGTVAASKSVTAHLAAKWPETPLLLEASEFMAEESNEKFWQFLETVQELAIYKQTESDYSYYNLILKKAGQFLDNLHINLLKFAFSIRAYSPAIQMFQQIAADEPPPDGCNAFVVIHKKHTCKINEIKKLLKKAASRTRPYLFKGDHKFPTNKENLPVVILYAEMGTRTFSAFHKVLSEKAQNEEILYVLRHYIQKPSSRKMYLSGYGVELAIKSTEYKALDDTQVKTVTNTTVEDETETNEVQGFLFGKLKEIYSDLRDNLTAFQKYLIESNKQMMPLKVWELQDLSFQAASQIMSAPVYDSIKLMKDISQNFPIKARLRMNILICLFQSTLNVKNLRSRHLYNKT

SEQ ID NO: 69209 - protein, 508 aa, Homo sapiens
MSRFVQDLSKAMSQDGASQFQEVIRQELELSVKKELEKILTTASSHEFEHTKKDLDGFRKLFHRFLQEKGPSVDWGKIQRPPEDSIQPYEKIKARGLPDNISSVLNKLVVVKLNGGLGTSMGCKGPKSLIGVRNENTFLDLTVQQIEHLNKTYNTDVPLVLMNSFNTDEDTKKILQKYNHCRVKIYTFNQSRYPRINKESLLPVAKDVSYSGENTEAWYPPGHGDIYASFYNSGLLDTFIGEGKEYIFVSNIDNLGATVDLYILNHLMNPPNGKRCEFVMEVTNKTRADVKGGTLTQYEGKLRLVEIAQVPKAHVDEFKSVSKFKIFNTNNLWISLAAVKRLQEQNAIDMEIIVNAKTLDGGLNVIQLETAVGAAIKSFENSLGINVPRSRFLPVKTTSDLLLVMSNLYSLNAGSLTMSEKREFPTVPLVKLGSSFTKVQDYLRRFESIPDMLELDHLTVSGDVTFGKNVSLKGTVIIIANHGDRIDIPPGAVLENKIVSGNLRILDH

SEQ ID NO: 69210 - protein, 497 aa, Homo sapiens
MSQDGASQFQEVIRQELELSVKKELEKILTTASSHEFEHTKKDLDGFRKLFHRFLQEKGPSVDWGKIQRPPEDSIQPYEKIKARGLPDNISSVLNKLVVVKLNGGLGTSMGCKGPKSLIGVRNENTFLDLTVQQIEHLNKTYNTDVPLVLMNSFNTDEDTKKILQKYNHCRVKIYTFNQSRYPRINKESLLPVAKDVSYSGENTEAWYPPGHGDIYASFYNSGLLDTFIGEGKEYIFVSNIDNLGATVDLYILNHLMNPPNGKRCEFVMEVTNKTRADVKGGTLTQYEGKLRLVEIAQVPKAHVDEFKSVSKFKIFNTNNLWISLAAVKRLQEQNAIDMEIIVNAKTLDGGLNVIQLETAVGAAIKSFENSLGINVPRSRFLPVKTTSDLLLVMSNLYSLNAGSLTMSEKREFPTVPLVKLGSSFTKVQDYLRRFESIPDMLELDHLTVSGDVTFGKNVSLKGTVIIIANHGDRIDIPPGAVLENKIVSGNLRILDH

SEQ ID NO: 69211 - protein, 517 aa, Homo sapiens
MLLYPAGFSFASLKSDLSKAMSQDGASQFQEVIRQELELSVKKELEKILTTASSHEFEHTKKDLDGFRKLFHRFLQEKGPSVDWGKIQRPPEDSIQPYEKIKARGLPDNISSVLNKLVVVKLNGGLGTSMGCKGPKSLIGVRNENTFLDLTVQQIEHLNKTYNTDVPLVLMNSFNTDEDTKKILQKYNHCRVKIYTFNQSRYPRINKESLLPVAKDVSYSGENTEAWYPPGHGDIYASFYNSGLLDTFIGEGKEYIFVSNIDNLGATVDLYILNHLMNPPNGKRCEFVMEVTNKTRADVKGGTLTQYEGKLRLVEIAQVPKAHVDEFKSVSKFKIFNTNNLWISLAAVKRLQEQNAIDMEIIVNAKTLDGGLNVIQLETAVGAAIKSFENSLGINVPRSRFLPVKTTSDLLLVMSNLYSLNAGSLTMSEKREFPTVPLVKLGSSFTKVQDYLRRFESIPDMLELDHLTVSGDVTFGKNVSLKGTVIIIANHGDRIDIPPGAVLENKIVSGNLRILDH

SEQ ID NO: 69212 - protein, 497 aa, Homo sapiens; identical to SEQ ID NO: 69210

SEQ ID NO: 69213 - protein, 150 aa, Homo sapiens
MSQDGASQFQEVIRQELELSVKKELEKILTTASSHEFEHTKKDLDGFRKLFHRFLQEKGPSVDWGKIQRPPEDSIQPYEKIKARGLPDNISSVLNKLVVVKLNGGLGTSMGCKGPKSLIGVRNENTFLDLTVQQIEHLNKTYNTDVPLVL

SEQ ID NO: 69214 - protein, 171 aa, Homo sapiens
MSQDGASQFQEVIRQELELSVKKELEKILTTASSHEFEHTKKDLDGFRKLFHRFLQEKGPSVDWGKIQRPPEDSIQPYEKIKARGLPDNISSVLNKLVVVKLNGGLGTSMGCKGPKSLIGVRNENTFLDLTVQQIEHLNKTYNTDVPLVLMNSFNTDEDTKKILQKYNHCR

SEQ ID NO: 69215 - protein, 38 aa, Homo sapiens
MSQDGASQFQEVIRQELELSVKKELEKILTTASSHEFE

SEQ ID NO: 69216 - protein, 105 aa, Homo sapiens
MSQDGASQFQEVIRQELELSVKKELEKILTTASSHEFEHTKKDLDGFRKLFHRFLQEKGPSVDWGKIQRPPEDSIQPYEKIKARGLPDNISSVLNKLVVVKLNGG

SEQ ID NO: 69217 - protein, 49 aa, Homo sapiens
MSRFVQDLSKAMSQDGASQFQEVIRQELELSVKKELEKILTTASSHEFE

SEQ ID NO: 69218 - protein, 135 aa, Homo sapiens
MSQDGASQFQEVIRQELELSVKKELEKILTTASSHEFEHTKKDLDGFRKLFHRFLQEKGPSVDWGKIQRPPEDSIQPYEKIKARGLPDNISSVLNKLVVVKLNGGLGTSMGCKGPKSLIGVRNENTFLDLTVQQI

SEQ ID NO: 69219 - protein, 213 aa, Homo sapiens
MSQDGASQFQEVIRQELELSVKKELEKILTTASSHEFEHTKKDLDGFRKLFHRFLQEKGPSVDWGKIQRPPEDSIQPYEKIKARGLPDNISSVLNKLVVVKLNGGLGTSMGCKGPKSLIGVRNENTFLDLTVQQIEHLNKTYNTDVPLVLMNSFNTDEDTKKILQKYNHCRVKIYTFNQSRYPRINKESLLPVAKDVSYSGENTEAWYPPGHG

SEQ ID NO: 69220 - protein, 425 aa, Homo sapiens
MVSKALLRLVSAVNRRRMKLLLGIALLAYVASVWGNFVNMSFLLNRSIQENGELKIESKIEEMVEPLREKIRDLEKSFTQKYPPVKFLSEKDRKRILITGGAGFVGSHLTDKLMMDGHEVTVVDNFFTGRKRNVEHWIGHENFELINHDVVEPLYIEVDQIYHLASPASPPNYMYNPIKTLKTNTIGTLNMLGLAKRVGARLLLASTSEVYGDPEVHPQSEDYWGHVNPIGPRACYDEGKRVAETMCYAYMKQEGVEVRVARIFNTFGPRMHMNDGRVVSNFILQALQGEPLTVYGSGSQTRAFQYVSDLVNGLVALMNSNVSSPVNLGNPEEHTILEFAQLIKNLVGSGSEIQFLSEAQDDPQKRKPDIKKAKLMLGWEPVVPLEEGLNKAIHYFRKELEYQANNQYIPKPKPARIKKGRTRHS

SEQ ID NO: 69221 - protein, 252 aa, Homo sapiens
MYNPIKTLKTNTIGTLNMLGLAKRVGARLLLASTSEVYGDPEVHPQSEDYWGHVNPIGPRACYDEGKRVAETMCYAYMKQEGVEVRVARIFNTFGPRMHMNDGRVVSNFILQALQGEPLTVYGSGSQTRAFQYVSDLVNGLVALMNSNVSSPVNLGNPEEHTILEFAQLIKNLVGSGSEIQFLSEAQDDPQKRKPDIKKAKLMLGWEPVVPLEEGLNKAIHYFRKELEYQANNQYIPKPKPARIKKGRTRHS

SEQ ID NO: 69222 - protein, 420 aa, Homo sapiens
MVSKALLRLVSAVNRRRMKLLLGIALLAYVASVWGNFVNMRSIQENGELKIESKIEEMVEPLREKIRDLEKSFTQKYPPVKFLSEKDRKRILITGGAGFVGSHLTDKLMMDGHEVTVVDNFFTGRKRNVEHWIGHENFELINHDVVEPLYIEVDQIYHLASPASPPNYMYNPIKTLKTNTIGTLNMLGLAKRVGARLLLASTSEVYGDPEVHPQSEDYWGHVNPIGPRACYDEGKRVAETMCYAYMKQEGVEVRVARIFNTFGPRMHMNDGRVVSNFILQALQGEPLTVYGSGSQTRAFQYVSDLVNGLVALMNSNVSSPVNLGNPEEHTILEFAQLIKNLVGSGSEIQFLSEAQDDPQKRKPDIKKAKLMLGWEPVVPLEEGLNKAIHYFRKELEYQANNQYIPKPKPARIKKGRTRHS

SEQ ID NO: 69223 - protein, 134 aa, Homo sapiens
MYNPIKTLKTNTIGTLNMLGLAKRVGARLLLASTSEVYGDPEVHPQSEDYWGHVNPIGPRACYDEGKRVAETMCYAYMKQEGVEVRVARIFNTFGPRMHMNDGRVVSNFILQALQGEPLTVYGSGSQTRAFQYV

SEQ ID NO: 69224 - protein, 185 aa, Homo sapiens
MVSKALLRLVSAVNRRRMKLLLGIALLAYVAWLAKRVGARLLLASTSEVYGDPEVHPQSEDYWGHVNPIGPRACYDEGKRVAETMCYAYMKQEGVEVRVARIFNTFGPRMHMNDGRVVSNFILQALQGEPLTVYGSGSQTRAFQYVSDLVNGLVALMNSNVSSPVNLVSAPLPPLCRTAQTFVHL

SEQ ID NO: 69225 - protein, 52 aa, Homo sapiens
MYNPIKTLKTNTIGTLNMLGLAKRVGARLLLASTSEVYGDPEVHPQSEDYWG

SEQ ID NO: 69226 - protein, 121 aa, Homo sapiens
MYNPIKTLKTNTIGTLNMLGLAKRVGARLLLASTSEVYGDPEVHPQSEDYWGHVNPIGPRACYDEGKRVAETMCYAYMKQEGVEVRVARIFNTFGPRMHMNDGRVVSNFILQALQGEPLTV

SEQ ID NO: 69227 - protein, 363 aa, Homo sapiens
MVEPLREKIRDLEKSFTQKYPPVKFLSEKDRKRILITGGAGFVGSHLTDKLMMDGHEVTVVDNFFTGRKRNVEHWIGHENFELINHDVVEPLYIEVDQIYHLASPASPPNYMYNPIKTLKTNTIGTLNMLGLAKRVGARLLLASTSEVYGDPEVHPQSEDYWGHVNPIGPRACYDEGKRVAETMCYAYMKQEGVEVRVARIFNTFGPRMHMNDGRVVSNFILQALQGEPLTVYGSGSQTRAFQYVSDLVNGLVALMNSNVSSPVNLGNPEEHTILEFAQLIKNLVGSGSEIQFLSEAQDDPQKRKPDIKKAKLMLGWEPVVPLEEGLNKAIHYFRKELEYQANNQYIPKPKPARIKKGRTRHS

SEQ ID NO: 69228 - protein, 559 aa, Homo sapiens
MRKFAYCKVVLATSLIWVLLDMFLLLYFSECNKCDEKKERGLPAGDVLEPVQKPHEGPGEMGKPVVIPKEDQEKMKEMFKINQFNLMASEMIALNRSLPDVRLEGCKTKVYPDNLPTTSVVIVFHNEAWSTLLRTVHSVINRSPRHMIEEIVLVDDASERDFLKRPLESYVKKLKVPVHVIRMEQRSGLIRARLKGAAVSKGQVITFLDAHCECTVGWLEPLLARIKHDRRTVVCPIIDVISDDTFEYMAGSDMTYGGFNWKLNFRWYPVPQREMDRRKGDRTLPVRTPTMAGGLFSIDRDYFQEIGTYDAGMDIWGGENLEISFRIWQCGGTLEIVTCSHVGHVFRKATPYTFPGGTGQIINKNNRRLAEVWMDEFKNFFYIISPGVTKVDYGDISSRVGLRHKLQCKPFSWYLENIYPDSQIPRHYFSLGEIRNVETNQCLDNMARKENEKVGIFNCHGMGGNQVFSYTANKEIRTDDLCLDVSKLNGPVTMLKCHHLKGNQLWEYDPVKLTLQHVNSNQCLDKATEEDSQVPSIRDCNGSRSQQWLLRNVTLPEIF

SEQ ID NO: 69229 - protein, 499 aa, Homo sapiens [sequence omitted]

SEQ ID NO: 69230 - protein, 559 aa, Homo sapiens; identical to SEQ ID NO: 69228

SEQ ID NO: 69231 - protein, 603 aa, Homo sapiens
MRRKEKRLLQAVALVLAALVLLPNVGLWALYRERQPDGTPGGSGAAVAPAAGQGSHSRQKKTFFLGDGQKLKDWHDKEAIRRDAQRVGNGEQGRPYPMTDAERVDQAYRENGFNIYVSDKISLNRSLPDIRHPNCNSKRYLETLPNTSIIIPFHNEGWSSLLRTVHSVLNRSPPELVAEIVLVDDFSDREHLKKPLEDYMALFPSVRILRTKKREGLIRTRMLGASVATGDVITFLDSHCEANVNWLPPLLDRIARNRKTIVCPMIDVIDHDDFRYETQAGDAMRGAFDWEMYYKRIPIPPELQKADPSDPFESPVMAGGLFAVDRKWFWELGGYDPGLEIWGGEQYEISFKVWMCGGRMEDIPCSRVGHIYRKYVPYKVPAGVSLARNLKRVAEVWMDEYAEYIYQRRPEYRHLSAGDVAVQKKLRSSLNCKSFKWFMTKIAWDLPKFYPPVEPPAAAWGEIRNVGTGLCADTKHGALGSPLRLEGCVRGRGEAAWNNMQVFTFTWREDIRPGDPQHTKKFCFDAISHTSPVTLYDCHSMKGNQLWKYRKDKTLYHPVSGSCMDCSESDHRIFMNTCNPSSLTQQWLFEHTNSTVLEKFNRN

SEQ ID NO: 69232 - protein, 276 aa, Homo sapiens
MLAWRDGELEAETSSSLFLLAMQVWMCGGRMEDIPCSRVGHIYRKYVPYKVPAGVSLARVRNLKRVAEVWMDEYAEYIYQRRPEYRHLSAGDVAVQKKLRSSLNCKSFKWFMTKIAWDLPKFYPPVEPPAAAWGEIRNVGTGLCADTKHGALGSPLRLEGCVRGRGEAAWNNMQVFTFTWREDIRPGDPQHTKKFCFDAISHTSPVTLYDCHSMKGNQLWKYRKDKTLYHPVSGSCMDCSESDHRIFMNTCNPSSLTQQWLFEHTNSTVLEKFNRN

SEQ ID NO: 69233 - protein, 541 aa, Homo sapiens
MRRKEKRLLQAVALVLAALVLLPNVGLWALYRERQPDGTPGGSGAAVAPAAGQGSHSRQKKTFFLGDGQKLKDWHDKEAIRRDAQRVGNGEQGRPYPMTDAERVDQAYRENGFNIYVSDKISLNRSLPDIRHPNCNSKRYLETLPNTSIIIPFHNEGWSSLLRTVHSVLNRSPPELVAEIVLVDDFSDRDRIARNRKTIVCPMIDVIDHDDFRYETQAGDAMRGAFDWEMYYKRIPIPPELQKADPSDPFESPVMAGGLFAVDRKWFWELGGYDPGLEIWGGEQYEISFKVWMCGGRMEDIPCSRVGHIYRKYVPYKVPAGVSLARNLKRVAEVWMDEYAEYIYQRRPEYRHLSAGDVAVQKKLRSSLNCKSFKWFMTKIAWDLPKFYPPVEPPAAAWGEIRNVGTGLCADTKHGALGSPLRLEGCVRGRGEAAWNNMQVFTFTWREDIRPGDPQHTKKFCFDAISHTSPVTLYDCHSMKGNQLWKYRKDKTLYHPVSGSCMDCSESDHRIFMNTCNPSSLTQQWLFEHTNSTVLEKFNRN

SEQ ID NO: 69234 - protein, 366 aa, Homo sapiens
MRRKEKRLLQAVALVLAALVLLPNVGLWALYRERQPDGTPGGSGAAVAPAAGQGSHSRQKKTFFLGDGQKLKDWHDKEAIRRDAQRVGNGEQGRPYPMTDAERVDQAYRENGFNIYVSDKISLNRSLPDIRHPNCNSKRYLETLPNTSIIIPFHNEGWSSLLRTVHSVLNRSPPELVAEIVLVDDFSDREHLKKPLEDYMALFPSVRILRTKKREGLIRTRMLGASVATGDVITFLDSHCEANVNWLPPLLDRIARNRKTIVCPMIDVIDHDDFRYETQAGDAMRGAFDWEMYYKRIPIPPELQKADPSDPFESPVMAGGLFAVDRKWFWELGGYDPGLEIWGGEQYEISFKVSQLSRRPVLGTAS

SEQ ID NO: 69235 - protein, 581 aa, Homo sapiens [sequence omitted]

SEQ ID NO: 69236 - protein, 556 aa, Homo sapiens
MRRFVYCKVVLATSLMWVLVDVFLLLYFSECNKCDDKKERSLLPALRAVISRNQEGPGEMGKAVLIPKDDQEKMKELFKINQFNLMASDLIALNRSLPDVRLEGCKTKVYPDELPNTSVVIVFHNEAWSTLLRTVYSVINRSPHYLLSEVILVDDASERDFLKLTLENYVKNLEVPVKIIRMEERSGLIRARLRGAAASKGQVITFLDAHCECTLGWLEPLLARIKEDRKTVVCPIIDVISDDTFEYMAGSDMTYGGFNWKLNFRWYPVPQREMDRRKGDRTLPVRTPTMAGGLFSIDRNYFEEIGTYDAGMDIWGGENLEMSFRIWQCGGSLEIVTCSHVGHVFRKATPYTFPGGTGHVINKNNRRLAEVWMDEFKDFFYIISPGVVKVDYGDVSVRKTLRENLKCKPFSWYLENIYPDSQIPRRYYSLGEIRNVETNQCLDNMGRKENEKVGIFNCHGMGGNQVFSYTADKEIRTDDLCLDVSRLNGPVIMLKCHHMRGNQLWEYDAERLTLRHVNSNQCLDEPSEEDKMVPTMQDCSGSRSQQWLLRNMTLGT

SEQ ID NO: 69237 - protein, 561 aa, Homo sapiens
MRRFVYCKVVLATSLMWVLVDVFLLLYFSECNKCDDKKERSLLPALRAVISRNQEGPGEMGKAVLIPKDDQEKMKELFKINQFNLMASDLIALNRSLPDVRLEGCKTKVYPDELPNTSVVIVFHNEAWSTLLRTVYSVINRSPHYLLSEVILVDDASERDFLKLTLENYVKNLEVPVKIIRMEERSGLIRARLRGAAASKGQVITFLDAHCECTLGWLEPLLARIKEDRKTVVCPIIDVISDDTFEYMAGSDMTYGGFNWKLNFRWYPVPQREMDRRKGDRTLPVRTPTMAGGLFSIDRNYFEEIGTYDAGMDIWGGENLEMSFRIWQCGGSLEIVTCSHVGHVFRKATPYTFPGGTGHVINKNNRRLAEVWMDEFKDFFYIISPGVVKVDYGDVSVRKTLRENLKCKPFSWYLENIYPDSQIPRRYYSLGEIRNVETNQCLDNMGRKENEKVGIFNCHGMGGNQVFSYTADKEIRTDDLCLDVSRLNGPVIMLKCHHMRGNQLWEYDAESCLSVNKVADGSQHPTVETCNDSTLQKWLLRNYTRMEIFRNIFGNSTDYIL

SEQ ID NO: 69238 - protein, 19 aa, Homo sapiens
MRRFVYCKVVLATSLMWVL

SEQ ID NO: 69239 - protein, 552 aa, Homo sapiens
MRRLTRRLVLPVFGVLWITVLLFFWVTKRKLEVPTGPEVQTPKPSDADWDDLWDQFDERRYLNAKKWRVGDDPYKLYAFNQRESERISSNRAIPDTRHLRCTLLVYCTDLPPTSIIITFHNEARSTLLRTIRSVLNRTPTHLIREIILVDDFSNDPDDCKQLIKLPKVKCLRNNERQGLVRSRIRGADIAQGTTLTFLDSHCEVNRDWLQPLLHRVKEDYTRVVCPVIDIINLDTFTYIESASELRGGFDWSLHFQWEQLSPEQKARRLDPTEPIRTPIIAGGLFVIDKAWFDYLGKYDMDMDIWGGENFEISFRVWMCGGSLEIVPCSRVGHVFRKKHPYVFPDGNANTYIKNTKRTAEVWMDEYKQYYYAARPFALERPFGNVESRLDLRKNLRCQSFKWYLENIYPELSIPKESSIQKGNIRQRQKCLESQRQNNQETPNLKLSPCAKVKGEDAKSQVWAFTYTQQILQEELCLSVITLFPGAPVVLVLCKNGDDRQQWTKTGSHIEHIASHLCLDTDMFGDGTENGKEIVVNPCESSLMSQHWDMVSS

SEQ ID NO: 69240 - protein, 519 aa, Homo sapiens
MRRLTRRLVLPVFGVLWITVLLFFWVTKRKLEVPTGPEVQTPKPSDADWDDLWDQFDERRYLNAKKWRVGDDPYKLYAFNQRESERISSNRAIPDTRHLSVLNRTPTHLIREIILVDDFSNDPDDCKQLIKLPKVKCLRNNERQGLVRSRIRGADIAQGTTLTFLDSHCEVNRDWLQPLLHRVKEDYTRVVCPVIDIINLDTFTYIESASELRGGFDWSLHFQWEQLSPEQKARRLDPTEPIRTPIIAGGLFVIDKAWFDYLGKYDMDMDIWGGENFEISFRVWMCGGSLEIVPCSRVGHVFRKKHPYVFPDGNANTYIKNTKRTAEVWMDEYKQYYYAARPFALERPFGNVESRLDLRKNLRCQSFKWYLENIYPELSIPKESSIQKGNIRQRQKCLESQRQNNQETPNLKLSPCAKVKGEDAKSQVWAFTYTQQILQEELCLSVITLFPGAPVVLVLCKNGDDRQQWTKTGSHIEHIASHLCLDTDMFGDGTENGKEIVVNPCESSLMSQHWDMVSS

SEQ ID NO: 69241 - protein, 532 aa, Homo sapiens
MSFPMSLARSSVPFADSGLSSSQPSDADWDDLWDQFDERRYLNAKKWRVGDDPYKLYAFNQRESERISSNRAIPDTRHLRCTLLVYCTDLPPTSIIITFHNEARSTLLRTIRSVLNRTPTHLIREIILVDDFSNDPDDCKQLIKLPKVKCLRNNERQGLVRSRIRGADIAQGTTLTFLDSHCEVNRDWLQPLLHRVKEDYTRVVCPVIDIINLDTFTYIESASELRGGFDWSLHFQWEQLSPEQKARRLDPTEPIRTPIIAGGLFVIDKAWFDYLGKYDMDMDIWGGENFEISFRVWMCGGSLEIVPCSRVGHVFRKKHPYVFPDGNANTYIKNTKRTAEVWMDEYKQYYYAARPFALERPFGNVESRLDLRKNLRCQSFKWYLENIYPELSIPKESSIQKGNIRQRQKCLESQRQNNQETPNLKLSPCAKVKGEDAKSQVWAFTYTQQILQEELCLSVITLFPGAPVVLVLCKNGDDRQQWTKTGSHIEHIASHLCLDTDMFGDGTENGKEIVVNPCESSLMSQHWDMVSS

SEQ ID NO: 69242 - protein, 517 aa, Homo sapiens
MAQDESCPPSDADWDDLWDQFDERRYLNAKKWRVGDDPYKLYAFNQRESERISSNRAIPDTRHLRCTLLVYCTDLPPTSIIITFHNEARSTLLRTIRSVLNRTPTHLIREIILVDDFSNDPDDCKQLIKLPKVKCLRNNERQGLVRSRIRGADIAQGTTLTFLDSHCEVNRDWLQPLLHRVKEDYTRVVCPVIDIINLDTFTYIESASELRGGFDWSLHFQWEQLSPEQKARRLDPTEPIRTPIIAGGLFVIDKAWFDYLGKYDMDMDIWGGENFEISFRVWMCGGSLEIVPCSRVGHVFRKKHPYVFPDGNANTYIKNTKRTAEVWMDEYKQYYYAARPFALERPFGNVESRLDLRKNLRCQSFKWYLENIYPELSIPKESSIQKGNIRQRQKCLESQRQNNQETPNLKLSPCAKVKGEDAKSQVWAFTYTQQILQEELCLSVITLFPGAPVVLVLCKNGDDRQQWTKTGSHIEHIASHLCLDTDMFGDGTENGKEIVVNPCESSLMSQHWDMVSS

SEQ ID NO: 69243 - protein, 557 aa, Homo sapiens
MRRLTRRLVLPVFGVLWITVLLFFWVTKRKLEVPTGPEVQTPKVWSLFFKVAGMSPWAPQVPVSPTPPYQRGHLPTGGHLAVCHFPCLLQEAQFHLQTQVFLQVRCTLLVYCTDLPPTSIIITFHNEARSTLLRTIRSVLNRTPTHLIREIILVDDFSNDPDDCKQLIKLPKVKCLRNNERQGLVRSRIRGADIAQGTTLTFLDSHCEVNRDWLQPLLHRVKEDYTRVVCPVIDIINLDTFTYIESASELRGGFDWSLHFQWEQLSPEQKARRLDPTEPIRTPIIAGGLFVIDKAWFDYLGKYDMDMDIWGGENFEISFRVWMCGGSLEIVPCSRVGHVFRKKHPYVFPDGNANTYIKNTKRTAEVWMDEYKQYYYAARPFALERPFGNVESRLDLRKNLRCQSFKWYLENIYPELSIPKESSIQKGNIRQRQKCLESQRQNNQETPNLKLSPCAKVKGEDAKSQVWAFTYTQQILQEELCLSVITLFPGAPVVLVLCKNGDDRQQWTKTGSHIEHIASHLCLDTDMFGDGTENGKEIVVNPCESSLMSQHWDMVSS

SEQ ID NO: 69244 - protein, 571 aa, Homo sapiens
MRRRSRMLLCFAFLWVLGIAYYMYSGGGSALAGGAGGGAGRKEDWNEIDPIKKKDLHHSNGEEKAQSMETLPPGKVRWPDFNQEAYVGGTMVRSGQDPYARNKFNQVESDKLRMDRAIPDTRHDQCQRKQWRVDLPATSVVITFHNEARSALLRTVVSVLKKSPPHLIKEIILVDDYSNDPEDGALLGKIEKVRVLRNDRREGLMRSRVRGADAAQAKVLTFLDSHCECNEHWLEPLLERVAEDRTRVVSPIIDVINMDNFQYVGASADLKGGFDWNLVFKWDYMTPEQRRSRQGNPVAPIKTPMIAGGLFVMDKFYFEELGKYDMMMDVWGGENLEISFRVWQCGGSLEIIPCSRVGHVFRKQHPYTFPGGSGTVFARNTRRAAEVWMDEYKNFYYAAVPSARNVPYGNIQSRLELRKKLSCKPFKWYLENVYPELRVPDHQDIAFGALQQGTNCLDTLGHFADGVVGVYECHNAGGNQEWALTKEKSVKHMDLCLTVVDRAPGSLIKLQGCRENDSRQKWEQIEGNSKLRHVGSNLCLDSRTAKSGGLSVEVCGPALSQQWKFTLNLQQ

SEQ ID NO: 69245 - protein, 265 aa, Homo sapiens
MVRSGQDPYARNKFNQVESDKLRMDRAIPDTRHDQCQRKQWRVDLPATSVVITFHNEARSALLRTVVSVLKKSPPHLIKEIILVDDYSNDPEDGALLGKIEKVRVLRNDRREGLMRSRVRGADAAQAKVLTFLDSHCECNEHWLEPLLERVAEDRTRVVSPIIDVINMDNFQYVGASADLKGGFDWNLVFKWDYMTPEQRRSRQGNPVAPIKDLVPRVAVWWQPGDHPVQPCGTRVPEAAPLHVPGWQWHCLCPKHPPGSRGLDG

SEQ ID NO: 69246 - protein, 361 aa, Homo sapiens
MRRRSRMLLCFAFLWVLGIAYYMYSGGGSALAGGAGGGAGRKEDWNEIDPIKKKDLHHSNGAEDGALLGKIEKVRVLRNDRREGLMRSRVRGADAAQAKVLTFLDSHCECNEHWLEPLLERVAEDRTRVVSPIIDVINMDNFQYVGASADLKGGFDWNLVFKWDYMTPEQRRSRQGNPVAPIKTPMIAGGLFVMDKFYFEELGKYDMMMDVWGGENLEISFRVWQCGGSLEIIPCSRVGHVFRKQHPYTFPGGSGTVFARNTRRAAEVWMDEYKNFYYAAVPSARNVPYGNIQSRLELRKKLSCKPFKWYLENVYPELRVPDHQDIAFGALQQGTNCLDTLGHFADGVVGVYECHVAGLRQ

SEQ ID NO: 69247 - protein, 533 aa, Homo sapiens
MADREDWNEIDPIKKKDLHHSNGEEKAQSMETLPPGKVRWPDFNQEAYVGGTMVRSGQDPYARNKFNQVESDKLRMDRAIPDTRHDQCQRKQWRVDLPATSVVITFHNEARSALLRTVVSVLKKSPPHLIKEIILVDDYSNDPEDGALLGKIEKVRVLRNDRREGLMRSRVRGADAAQAKVLTFLDSHCECNEHWLEPLLERVAEDRTRVVSPIIDVINMDNFQYVGASADLKGGFDWNLVFKWDYMTPEQRRSRQGNPVAPIKTPMIAGGLFVMDKFYFEELGKYDMMMDVWGGENLEISFRVWQCGGSLEIIPCSRVGHVFRKQHPYTFPGGSGTVFARNTRRAAEVWMDEYKNFYYAAVPSARNVPYGNIQSRLELRKKLSCKPFKWYLENVYPELRVPDHQDIAFGALQQGTNCLDTLGHFADGVVGVYECHNAGGNQEWALTKEKSVKHMDLCLTVVDRAPGSLIKLQGCRENDSRQKWEQIEGNSKLRHVGSNLCLDSRTAKSGGLSVEVCGPALSQQWKFTLNLQQ

SEQ ID NO: 69248 - protein, 633 aa, Homo sapiens
MAHLKRLVKLHIKRHYHKKFWKLGAVIFFFIIVLVLMQREVSVQYSKEESRMERNMKNKNKMLDLMLEAVNNIKDAMPKMQIGAPVRQNIDAGERPCLQGYYTAAELKPVLDRPPQDSNAPGASGKAFKTTNLSVEEQKEKERGEAKHCFNAFASDRISLHRDLGPDTRPPECIEQKFKRCPPLPTTSVIIVFHNEAWSTLLRTVHSVLYSSPAILLKEIILVDDASVDEYLHDKLDEYVKQFSIVKIVRQRERKGLITARLLGATVATAETLTFLDAHCECFYGWLEPLLARIAENYTAVVSPDIASIDLNTFEFNKPSPYGSNHNRGNFDWSLSFGWESLPDHEKQRRKDETYPIKTPTFAGGLFSISKEYFEYIGSYDEEMEIWGGENIEMSFRVWQCGGQLEIMPCSVVGHVFRSKSPHSFPKGTQVIARNQVRLAEVWMDEYKEIFYRRNTDAAKIVKQKAFGDLSKRFEIKHRLQCKNFTWYLNNIYPEVYVPDLNPVISGYIKSVGQPLCLDVGENNQGGKPLIMYTCHGLGGNQYFEYSAQHEIRHNIQKELCLHAAQGLVQLKACTYKGHKTVVTGEQIWEIQKDQLLYNPFLKMCLSANGEHPSLVSCNPSDPLQKWILSQND

SEQ ID NO: 69249 - protein, 464 aa, Homo sapiens
MAHLKRLVKLHIKRHYHKKFWKLGAVIFFFIIVLVLMQREVSVQYSKEESRMERNMKNKNKMLDLMLEAVNNIKDAMPKMQIGAPVRQNIDAGERPCLQGYYTAAELKPVLDRPPQDSNAPGASGKAFKTTNLSVEEQKEKERGEAKHCFNAFASDRISLHRDLGPDTRPPECIEQKFKRCPPLPTTSVIIVFHNEAWSTLLRTVHSVLYSSPAILLKEIILVDDASVDEYLHDKLDEYVKQFSIVKIVRQRERKGLITARLLGATVATAETLTFLDAHCECFYGWLEPLLARIAENYTAVVSPDIASIDLNTFEFNKPSPYGSNHNRGNFDWSLSFGWESLPDHEKQRRKDETYPIKTPTFAGGLFSISKEYFEYIGSYDEEMEIWGGENIEMSFRVWQCGGQLEIMPCSVVGHVFRSKSPHSFPKGTQVIARNQVRLAEVWMDEYKEIFYRRNTDAAKIVKQ

SEQ ID NO: 69250 - protein, 57 aa, Homo sapiens
MAHLKRLVKLHIKRHYHKKFWKLGAVIFFFIIVLVLMQREVSVQYSKEESRMERNMK

SEQ ID NO: 69251 - protein, 25 aa, Homo sapiens
MAHLKRLVKLHIKRHYHKKFWKLGA

SEQ ID NO: 69252 - protein, 90 aa, Homo sapiens
MAHLKRLVKLHIKRHYHKKFWKLGAVIFFFIIVLVLMQREVSVQYSKEESRMERNMKNKNKMLDLMLEAVNNIKDAMPKMQIGAPVRQNI

SEQ ID NO: 69253 - protein, 11 aa, Homo sapiens
MAHLKRLVKLH

SEQ ID NO: 69254 - protein, 578 aa, Homo sapiens
MAVRWTWAGKSCLLLAFLTVAYIFVELLVSTFHASAGAGRARELGSRRLSDLQKNTEDLSRPLYKKPPADSRALGEWGKASKLQLNEDELKQQEELIERYAINIYLSDRISLHRHIEDKRMYECKSQKFNYRTLPTTSVIIAFYNEAWSTLLRTIHSVLETSPAVLLKEIILVDDLSDRVYLKTQLETYISNLDRVRLIRTNKREGLVRARLIGATFATGDVLTFLDCHCECNSGWLEPLLERIGRDETAVVCPVIDTIDWNTFEFYMQIGEPMIGGFDWRLTFQWHSVPKQERDRRISRIDPIRSPTMAGGLFAVSKKYFQYLGTYDTGMEVWGGENLELSFRVWQCGGKLEIHPCSHVGHVFPKRAPYARPNFLQNTARAAEVWMDEYKEHFYNRNPPARKEAYGDISERKLLRERLRCKSFDWYLKNVFPNLHVPEDRPGWHGAIRSRGISSECLDYNSPDNNPTGANLSLFGCHGQGGNQFFEYTSNKEIRFNSVTELCAEVPEQKNYVGMQNCPKDGFPVPANIIWHFKEDGTIFHPHSGLCLSAYRTPEGRPDVQMRTCDALDKNQIWSFEK

SEQ ID NO: 69255 - protein, 622 aa, Homo sapiens
MRLLRRRHMPLRLAMVGCAFVLFLFLLHRDVSSREEATEKPWLKSLVSRKDHVLDLMLEAMNNLRDSMPKLQIRAPEAQQTLFSINQSCLPGFYTPAELKPFWERPPQDPNAPGADGKAFQKSKWTPLETQEKEEGYKKHCFNAFASDRISLQRSLGPDTRPPECVDQKFRRCPPLATTSVIIVFHNEAWSTLLRTVYSVLHTTPAILLKEIILVDDASTEEHLKEKLEQYVKQLQVVRVVRQEERKGLITARLLGASVAQAEVLTFLDAHCECFHGWLEPLLARIAEDKTVVVSPDIVTIDLNTFEFAKPVQRGRVHSRGNFDWSLTFGWETLPPHEKQRRKDETYPIKSPTFAGGLFSISKSYFEHIGTYDNQMEIWGGENVEMSFRVWQCGGQLEIIPCSVVGHVFRTKSPHTFPKGTSVIARNQVRLAEVWMDSYKKIFYRRNLQAAKMAQEKSFGDISERLQLREQLHCHNFSWYLHNVYPEMFVPDLTPTFYGAIKNLGTNQCLDVGENNRGGKPLIMYSCHGLGGNQYFEYTTQRDLRHNIAKQLCLHVSKGALGLGSCHFTGKNSQVPKDEEWELAQDQLIRNSGSGTCLTSQDKKPAMAPCNPSDPHQLWLFV

SEQ ID NO: 69256 - protein, 622 aa, Homo sapiens; identical to SEQ ID NO: 69255

SEQ ID NO: 69257 - protein, 603 aa, Homo sapiens
MRLLRRRHMPLRLAMVGCAFVLFLFLLVSRKDHVLDLMLEAMNNLRDSMPKLQIRAPEAQQTLFSINQSCLPGFYTPAELKPFWERPPQDPNAPGADGKAFQKSKWTPLETQEKEEGYKKHCFNAFASDRISLQRSLGPDTRPPECVDQKFRRCPPLATTSVIIVFHNEAWSTLLRTVYSVLHTTPAILLKEIILVDDASTEEHLKEKLEQYVKQLQVVRVVRQEERKGLITARLLGASVAQAEVLTFLDAHCECFHGWLEPLLARIAEDKTVVVSPDIVTIDLNTFEFAKPVQRGRVHSRGNFDWSLTFGWETLPPHEKQRRKDETYPIKSPTFAGGLFSISKSYFEHIGTYDNQMEIWGGENVEMSFRVWQCGGQLEIIPCSVVGHVFRTKSPHTFPKGTSVIARNQVRLAEVWMDSYKKIFYRRNLQAAKMAQEKSFGDISERLQLREQLHCHNFSWYLHNVYPEMFVPDLTPTFYGAIKNLGTNQCLDVGENNRGGKPLIMYSCHGLGGNQYFEYTTQRDLRHNIAKQLCLHVSKGALGLGSCHFTGKNSQVPKDEEWELAQDQLIRNSGSGTCLTSQDKKPAMAPCNPSDPHQLWLFV

SEQ ID NO: 69258 - protein, 657 aa, Homo sapiens
MRLKIGFILRSLLVVGSFLGLVVLWSSLTPRPDDPSPLSRMREDRDVNDPMPNRGGNGLAPGEDRFKPVVPWPHVEGVEVDLESIRRINKAKNEQEHHAGGDSQKDIMQRQYLTFKPQTFTYHDPVLRPGILGNFEPKEPEPPGVVGGPGEKAKPLVLGPEFKQAIQASIKEFGFNMVASDMISLDRSVNDLRQEECKYWHYDENLLTSSVVIVFHNEGWSTLMRTVHSVIKRTPRKYLAEIVLIDDFSNKEHLKEKLDEYIKLWNGLVKVFRNERREGLIQARSIGAQKAKLGQVLIYLDAHCEVAVNWYAPLVAPISKDRTICTVPLIDVINGNTYEIIPQGGGDEDGYARGAWDWSMLWKRVPLTPQEKRLRKTKTEPYRSPAMAGGLFAIEREFFFELGLYDPGLQIWGGENFEISYKIWQCGGKLLFVPCSRVGHIYRLEGWQGNPPPIYVGSSPTLKNYVRVVEVWWDEYKDYFYASRPESQALPYGDISELKKFREDHNCKSFKWFMEEIAYDITSHYPLPPKNVDWGEIRGFETAYCIDSMGKTNGGFVELGPCHRMGGNQLFRINEANQLMQYDQCLTKGADGSKVMITHCNLNEFKEWQYFKNLHRFTHIPSGKCLDRSEVLHQVFISNCDSSKTTQKWEMNNIHSV

SEQ ID NO: 69259 - protein, 238 aa, Homo sapiens
MRTVHSVIKRTPRKYLAEIVLIDDFSNKEHLKEKLDEYIKLWNGLVKVFRNERREGLIQARSIGAQKAKLGQVLIYLDAHCEVAVNWYAPLVAPISKDRTTCTVPLIDYIDGNDYSIEPQQGGDEDGFARGAWDWSLLWKRIPLSHKEKAKRKHKTEPYRSPAMAGGLFAIEREFFFELGLYDPGLQIWGGKTLRSHTRYGSVVANYYLFLVLVLDISTVLRAGKEILRPFMLGLLQL

SEQ ID NO: 69260 - protein, 637 aa, Homo sapiens
MMFWRKLPKALFIGLTLAIAVNLLLVFSSKGTLQNLFTGGLHRELPLHLNKRYGAVIKRLSHLEVELQDLKESMKLALRQQENVNSTLKRAKDEVRPLLKAMETKVNETKKHKTQMKLFPHSQLFRQWGEDLSEAQQKAAQDLFRKFGYNAYLSNQLPLNRTIPDTRDYRCLRKTYPSQLPSLSVILIFVNEALSIIQRAITSIINRTPSRLLKEIILVDDFSSNGELKVHLDEKIKLYNQKYPGLLKIIRHPERKGLAQARNTGWEAATADVVAILDAHIEVNVGWAEPILARIQEDRTVIVSPVFDNIRFDTFKLDKYELAVDGFNWELWCRYDALPQAWIDLHDVTAPVKSPSIMGILAANRHFLGEIGSLDGGMLIYGGENVELSLRVWQCGGKVEILPCSRIAHLERHHKPYALDLTAALKRNALRVAEIWMDEHKHMVYLAWNIPLQNSGIDFGDVSSRMALREKLKCKTFDWYLKNVYPLLKPLHTIVGYGRMKNLLDENVCLDQGPVPGNTPIMYYCHEFSSQNVYYHLTGELYVGQLIAEASASDRCLTDPGKAEKPTLEPCSKAAKNRLHIYWDFKPGGAVINRDTKRCLEMKKDLLGSHVLVLQTCSTQVWEIQHTVRDWGQTNSQ

SEQ ID NO: 69261 - protein, 215 aa, Homo sapiens
MEFDCEGLRRLLGKYKFRDLTVEELRNVNVFFPHFKYSMDTYVFKDSSQKDLLNFTGTIPVMYQGNTYNIPIRFWILDSHPFAPPICFLKPTANMGILVGKHVDAQGRIYLPYLQNWSHPKSVIVGLIKEMIAKFQEELPMYSLSSSDEARQVDLLAYIAKITEGVSDTNSKSWANHENKTVNKITVVGGGELGIACTLAISAKVESRSVTQAGV

SEQ ID NO: 69262 - protein, 471 aa, Homo sapiens
MEFDCEGLRRLLGKYKFRDLTVEELRNVNVFFPHFKYSMDTYVFKDSSQKDLLNFTGTIPVMYQGNTYNIPIRFWILDSHPFAPPICFLKPTANMGILVGKHVDAQGRIYLPYLQNWSHPKSVIVGLIKEMIAKFQEELPMYSLSSSDEARQVDLLAYIAKITEGVSDTNSKSWANHENKTVNKITVVGGGELGIACTLAISAKGIADRLVLLDLSEGTKGATMDLEIFNLPNVEISKDLSASAHSKVVIFTVNSLGSSQSYLDVVQSNVDMFRALVPALGHYSQHSVLLVASQPVEIMTYVTWKLSTFPANRVIGIGCNLDSQRLQYIITNVLKAQTSGKEVWVIGEQGEDKVLTWSGQEEVVSHTSQVQLSNRAMELLRVKGQRSWSVGLSVADMVDSIVNNKKKVHSVSALAKGYYDINSEVFLSLPCILGTNGVSEVIKTTLKEDTVTEKLQSSASSIHSLQQQLKL

SEQ ID NO: 69263 - protein, 248 aa, Homo sapiens
MDLEIFNLPNVEISKDLSASAHSKVVIFTVNSLGSSQSYLDVVQSNVDMFRALVPALGHYSQHSVLLVASQPVEIMTYVTWKLSTFPANRVIGIGCNLDSQRLQYIITNVLKAQTSGKEVWVIGEQGEDKVLTWSGQEEVVSHTSQVQLSNRAMELLRVKGQRSWSVGLSVADMVDSIVNNKKKVHSVSALAKGYYDINSEVFLSLPCILGTNGVSEVIKTTLKEDTVTEKLQSSASSIHSLQQQLKL

SEQ ID NO: 69264 - protein, 379 aa, Homo sapiens
MEFDCEGLRRLLGKYKFRDLTVEELRNVNVFFPHFKYSMDTYVFKDSSQKDLLNFTGTIPVMYQGNTYNIPIRFWILDSHPFAPPICFLKPTANMGILVGKHVDAQGRIYLPYLQNWSHPKSVIVGLIKEMIAKFQEELPMYSLSSSDEARQVDLLAYIAKITEGVSDTNSKSWANHENKTVNKITVVGGGELGIACTLAISAKGIADRLVLLDLSEGTKGATMDLEIFNLPNVEISKDLSASAHSKVVIFTVNSLGSSQSYLDVVQSNVDMFRALVPALGHYSQHSVLLVASQPVEIMTYVTWKLSTFPANRVIGIGCNLDSQRLQYIITNVLKAQTSGKEVWVIGEQGEDKVLTWSGQEEVVSHTSQVQLSNRDIMI

SEQ ID NO: 69265 - protein, 449 aa, Homo sapiens
MEFDCEGLRRLLGKYKFRDLTVEELRNVNVFFPHFKYSMDTYGNTYNIPIRFWILDSHPFAPPICFLKPTANMGILVGKHVDAQGRIYLPYLQNWSHPKSVIVGLIKEMIAKFQEELPMYSLSSSDEARQVDLLAYIAKITEGVSDTNSKSWANHENKTVNKITVVGGGELGIACTLAISAKGIADRLVLLDLSEGTKGATMDLEIFNLPNVEISKDLSASAHSKVVIFTVNSLGSSQSYLDVVQSNVDMFRALVPALGHYSQHSVLLVASQPVEIMTYVTWKLSTFPANRVIGIGCNLDSQRLQYIITNVLKAQTSGKEVWVIGEQGEDKVLTWSGQEEVVSHTSQVQLSNRAMELLRVKGQRSWSVGLSVADMVDSIVNNKKKVHSVSALAKGYYDINSEVFLSLPCILGTNGVSEVIKTTLKEDTVTEKLQSSASSIHSLQQQLKL

SEQ ID NO: 69266 - protein, 142 aa, Homo sapiens
MGDKPPGFRGSRDWIGCVEASLCLAHFGGPQGRLCHVPRGVGLHGELERLYSHFAGGGGPVMVGGDADARSKALLGVCVGSGTEAYVLVLDPHYWGTPKSPSELQAAGWVGWQEVSAAFDPNSFYNLCLTSLSSQQQQRTLD

SEQ ID NO: 69267 - protein, 469 aa, Homo sapiens
MVISESMDILFRIRGGLDLAFQLATPNEIFLKKALKHVLSDLSTKLSSNALVFRICHSSVYIWPSSDINTIPGELTDASACKNILRFIQFEPEEDIKRKFMRKKDKKLSDMHQIVNIDLMLEMSTSLAAVTPIIERESGGHHYVNMTLPVDAVISVAPEETWGKVRKLLVDAIHNQLTDMEKCILKYMKGTSIVVPEPLHFLLPGKKNLVTISYPSGIPDGQLQAYRKELHDLFNLPHDRPYFKRSNAYHFPDEPYKDGYIRNPHTYLNPPNMETGMIYVVQGIYGYHHYMQDRIDDNGWGCAYRSLQTICSWFKHQGYTERSIPTHREIQQALVDAGDKPATFVGSRQWIGSIEVQLVLNQLIGITSKILFVSQGSEIASQGRELANHFQSEGTPVMIGGGVLAHTILGVAWNEITGQIKFLILDPHYTGAEDLQVILEKGWCGWKGPDFWNKDAYYNLCLPQRPNMI

SEQ ID NO: 69268 - protein, 244 aa, Homo sapiens
MAAAASPAFLLCLPLLHLLSGWSRAGWVDTHCLCYDFIITPKSRPEPQWCEVQGLVDERPFLHYDCVNHKAKAFASLGKKVNVTKTWEEQTETLRDVVDFLKGQLLDIQVENLIPIEPLTLQARMSCEHEAHGHGRGSWQFLFNGQKFLLFDSNNRKWTALHPGAKKMTEKWEKNRDVTMFFQKISLGDCKMWLEEFLMYWEQMLDPTKPPSLAPGTTQPKAMATTLSPWSLLIIFLCFILAGR

SEQ ID NO: 69269 - protein, 244 aa, Homo sapiens; identical to SEQ ID NO: 69268

SEQ ID NO: 69270 - protein, 246 aa, Homo sapiens
MAAAAATKILLCLPLLLLLSGWSRAGRADPHSLCYDITVIPKFRPGPRWCAVQGQVDEKTFLHYDCGNKTVTPVSPLGKKLNVTTAWKAQNPVLREVVDILTEQLRDIQLENYTPKEPLTLQARMSCEQKAEGHSSGSWQFSFDGQIFLLFDSEKRMWTTVHPGARKMKEKWENDKVVAMSFHYFSMGDCIGWLEDFLMGMDSTLEPSAGAPLAMSSGTTQLRATATTLILCCLLIILPCFILPGI

SEQ ID NO: 69271 - protein, 169 aa, Homo sapiens
MAAAASPAILPRLAILPYLLFDWSGTGRADAHSLWYNFTIIHLPRHGQQWCEVQSQVDQKNFLSYDCGSDKVLSMGHLEEQLYATDAWGKQLEMLREVGQRLRLELADTELEDFTPSGPLTLQVRMSCECEADGYIRGSWQFSFDGRKFLLFDSNNRKWTVVHAGLGTS

SEQ ID NO: 69272 - protein, 244 aa, Homo sapiens
MAAAASPAILPRLAILPYLLFDWSGTGRADAHSLWYNFTIIHLPRHGQQWCEVQSQVDQKNFLSYDCGSDKVLSMGHLEEQLYATDAWGKQLEMLREVGQRLRLELADTELEDFTPSGPLTLQVRMSCECEADGYIRGSWQFSFDGRKFLLFDSNNRKWTVVHAGARRMKEKWEKDSGLTTFFKMVSMRDCKSWLRDFLMHRKKRLEPTAPPTMAPGLAQPKAIATTLSPWSFLIILCFILPGI

SEQ ID NO: 69273 - protein, 130 aa, Homo sapiens [sequence omitted]

SEQ ID NO: 69274 - protein, 244 aa, Homo sapiens; identical to SEQ ID NO: 69272

SEQ ID NO: 69275 - protein, 220 aa, Homo sapiens
MKVKKGGGGAGTATESAPGPSGQSVAPIPQPPAESESGSESEPDAGPGPRPGPLQRKQPIGPEDVLGLQRITGDYLCSPEENIYKIDFVRFKIRDMDSGTVLFEIKKPPVSERLPINRRDLDPNAGRFVRYQFTPAFLRLRQVGATVEFTVGDKPVNNFRMIERHYFRNQLLKSFDFHFGFCIPSSKNTCEHIYDFPPLSEELSARAGSSGSGEVGASRD

SEQ ID NO: 69276 - protein, 240 aa, Homo sapiens
MKVKKGGGGAGTATESAPGPSGQSVAPIPQPPAESESGSESEPDAGPGPRPGPLQRKQPIGPEDVLGLQRITGDYLCSPEENIYKIDFVRFKIRDMDSGTVLFEIKKPPVSERLPINRRDLDPNAGRFVRYQFTPAFLRLRQVGATVEFTVGDKPVNNFRMIERHYFRNQLLKSFDFHFGFCIPSSKNTCEHIYDFPPLSEELISEMIRHPYETQSDSFYFVDDRLVMHNKADYSYSGTP

SEQ ID NO: 69277 - protein, 208 aa, Homo sapiens
MKVKKGGGGAGTATESAPGPSGQSVAPIPQPPAESESGSESEPDAGPGPRPGPLQRKQPIGPEDVLGLQRITGGARPLFPAWRFKIRDMDSGTVLFEIKKPPVSERLPINRRDLDPNAGRFVRYQFTPAFLRLRQVGATVEFTVGDKPVNNFRMIERHYFRNQLLKSFDFHFGFCIPSSKNTCEHIYDFPPLSEELSARAGSSGSGEV

SEQ ID NO: 69278 - protein, 1703 aa, Homo sapiens
LSLLCVSLKKAKFDGAQEKFNTYVTLKVQNVKSTTIAVRGSQPSWEQDFMFEINRLDLGLTVEVWNKGLIWDTMVGTVWIPLRTIRQSNEEGPGEWLTLDSQVIMADSEICGTKDPTFHRILLDTRFELPLDIPEEEARYWAKKLEQLNAMRDQDEYSFQDEQDKPLPVPSNQCCNWNYFGWGEQHNDDPDSAVDDRDSDYRSETSNSIPPPYYTTSQPNASVHQYSVRPPPLGSRESYSDSMHSYEEFSEPQALSPTGSSRYASSGELSQGSSQLSEDFDPDEHSLQGSDMEDERDRDSYHSCHSSVSYHKDSPRWDQDEEELEEDLEDFLEEEELPEDEEELEEEEEEVPDDLGSYAQREDVAVAEPKDFKRISLPPAAPGKEDKAPVAPTEAPDMAKVAPKPATPDKVPAAEQIPEAEPPKDEESFRPREDEEGQEGQDSMSRAKANWLRAFNKVRMQLQEARGEGEMSKSLWFKGGPGGGLIIIDSMPDIRKRKPIPLVSDLAMSLVQSRKAGITSALASSTLNNEELKNHVYKKTLQALIYPISCTTPHNFEVWTATTPTYCYECEGLLWGIARQGMRCTECGVKCHEKCQDLLNADCLQRAAEKSSKHGAEDRTQNIIMVLKDRMKIRERNKPEIFELIQEIFAVTKTAHTQQMKAVKQSVLDGTSKWSAKISITVVCAQGLQAKDKTGSSDPYVTVQVGKTKKRTKTIYGNLNPVWEENFHFECHNSSDRIKVRVWDEDDDIKSRVKQRFKRESDDFLGQTIIEVRTLSGEMDVWYNLDKRTDKSAVSGAIRLHISVEIKGEEKVAPYHVQYTCLHENLFHFVTDVQNNGVVKIPDAKGDDAWKVYYDETAQEIVDEFAMRYGVESIYQAMTHFACLSSKYMCPGVPAVMSTLLANINAYYAHTTASTNVSASDRFAASNFGKERFVKLLDQLHNSLRIDLSMYRNNFPASSPERLQDLKSTVDLLTSITFFRMKVQELQSPPRASQVVKDCVKACLNSTYEYIFNNCHELYSREYQTDPAKKGEVLPEEQGPSIKNLDFWSKLITLIVSIIEEDKNSYTPCLNQFPQELNVGKISAEVMWNLFAQDMKYAMEEHDKHRLCKSADYMNLHFKVKWLYNEYVTELPAFKDRVPEYPAWFEPFVIQWLDENEEVSRDFLHGALERDKKDGFQQTSEHALFSCSVVDVFSQLNQSFEIIKKLECPDPQIVGHYMRRFAKTISNVLLQYADIISKDFASYCSKEKEKVPCILMNNTQQLRVQLEKMFEAMGGKELDAEASDILKELQVKLNNVLDELSRVFATSFQPHIEECVKQMGDILSQVKGTGNVPASACSSVAQDADNVLQPIMDLLDSNLTLFAKICEKTVLKRVLKELWKLVMNTMEKTIVLPPLTDQTLQGNLLRKHGKGLEKGRVKLPSHSDGTQMIFNAAKELGQLSKLKDHMVREEAKSLTPKQCAVVELALDTIKQYFHAGGVGLKKTFLEKSPDLQSLRYALSLYTQATDLLIKTFVQTQSAQGLGVEDPVGEVSVHVELFTHPGTGEHKVTVKVVAANDLKWQTSGIFRPFIEVNIIGPQLSDKKRKFATKSKNNSWAPKYNESFQFTLSADAGPECYELQVCVKDYCFAREDRTVGLAVLQLRELAQRGSAACWLPLGRRIHMDDTGLTVLRILSQRSNDEVAKEFVKLKSDTRSAEEGGAAPAP

SEQ ID NO: 69279 - protein, 1791 aa, Homo sapiens
MGGGGTCTISVQVRVCTGGNLLGGRRRPLSPCNEEVWGEAPLPGARPFNAPPARSAPAPSGVPGLRLPAPHQRHSRPGRLRPTCELGDMSLLCVGVKKAKFDGAQEKFNTYVTLKVQNVKSTTIAVRGSQPSWEQDFMFEINRLDLGLTVEVWNKGLIWDTMVGTVWIPLRTIRQSNEEGPGEWLTLDSQVIMADSEICGTKDPTFHRILLDTRFELPLDIPEEEARYWAKKLEQLNAMRDQDEYSFQDEQDKPLPVPSNQCCNWNYFGWGEQHNDDPDSAVDDRDSDYRSETSNSIPPPYYTTSQPNASVHQYSVRPPPLGSRESYSDSMHSYEEFSEPQALSPTGSSRYASSGELSQGSSQLSEDFDPDEHSLQGSDMEDERDRDSYHSCHSSVSYHKDSPRWDQDEEELEEDLEDFLEEEELPEDEEELEEEEEEVPDDLGSYAQREDVAVAEPKDFKRISLPPAAPGKEDKAPVAPTEAPDMAKVAPKPATPDKVPAAEQIPEAEPPKDEESFRPREDEEGQEGQDSMSRAKANWLRAFNKVRMQLQEARGEGEMSKSLWFKGGPGGGLIIIDSMPDIRKRKPIPLVSDLAMSLVQSRKAGITSALASSTLNNEELKNHVYKKTLQALIYPISCTTPHNFEVWTATTPTYCYECEGLLWGIARQGMRCTECGVKCHEKCQDLLNADCLQRAAEKSSKHGAEDRTQNIIMVLKDRMKIRERNKPEIFELIQEIFAVTKTAHTQQMKAVKQSVLDGTSKWSAKISITVVCAQGLQAKDKTGSSDPYVTVQVGKTKKRTKTIYGNLNPVWEENFHFECHNSSDRIKVRVWDEDDDIKSRVKQRFKRESDDFLGQTIIEVRTLSGEMDVWYNLDKRTDKSAVSGAIRLHISVEIKGEEKVAPYHVQYTCLHENLFHFVTDVQNNGVVKIPDAKGDDAWKVYYDETAQEIVDEFAMRYGVESIYQAMTHFACLSSKYMCPGVPAVMSTLLANINAYYAHTTASTNVSASDRFAASNFGKERFVKLLDQLHNSLRIDLSMYRNNFPASSPERLQDLKSTVDLLTSITFFRMKVQELQSPPRASQVVKDCVKACLNSTYEYIFNNCHELYSREYQTDPAKKGEVLPEEQGPSIKNLDFWSKLITLIVSIIEEDKNSYTPCLNQFPQELNVGKISAEVMWNLFAQDMKYAMEEHDKHRLCKSADYMNLHFKVKWLYNEYVTELPAFKDRVPEYPAWFEPFVIQWLDENEEVSRDFLHGALERDKKDGFQQTSEHALFSCSVVDVFSQLNQSFEIIKKLECPDPQIVGHYMRRFAKTISNVLLQYADIISKDFASYCSKEKEKVPCILMNNTQQLRVQLEKMFEAMGGKELDAEASDILKELQVKLNNVLDELSRVFATSFQPHIEECVKQMGDILSQVKGTGNVPASACSSVAQDADNVLQPIMDLLDSNLTLFAKICEKTVLKRVLKELWKLVMNTMEKTIVLPPLTDQTMIGNLLRKHGKGLEKGRVKLPSHSDGTQMIFNAAKELGQLSKLKDHMVREEAKSLTPKQCAVVELALDTIKQYFHAGGVGLKKTFLEKSPDLQSLRYALSLYTQATDLLIKTFVQTQSAQGLGVEDPVGEVSVHVELFTHPGTGEHKVTVKVVAANDLKWQTSGIFRPFIEVNIIGPQLSDKKRKFATKSKNNSWAPKYNESFQFTLSADAGPECYELQVCVKDYCFAREDRTVGLAVLQLRELAQRGSAACWLPLGRRIHMDDTGLTVLRILSQRSNDEVAKEFVKLKSDTRSAEEGGAAPAP

SEQ ID NO: 69280 - protein, 1703 aa, Homo sapiens
MSLLCVGVKKAKFDGAQEKFNTYVTLKVQNVKSTTIAVRGSQPSWEQDFMFEINRLDLGLTVEVWNKGLIWDTMVGTVWIPLRTIRQSNEEGPGEWLTLDSQVIMADSEICGTKDPTFHRILLDTRFELPLDIPEEEARYWAKKLEQLNAMRDQDEYSFQDEQDKPLPVPSNQCCNWNYFGWGEQHNDDPDSAVDDRDSDYRSETSNSIPPPYYTTSQPNASVHQYSVRPPPLGSRESYSDSMHSYEEFSEPQALSPTGSSRYASSGELSQGSSQLSEDFDPDEHSLQGSDMEDERDRDSYHSCHSSVSYHKDSPRWDQDEEELEEDLEDFLEEEELPEDEEELEEEEEEVPDDLGSYAQREDVAVAEPKDFKRISLPPAAPGKEDKAPVAPTEAPDMAKVAPKPATPDKVPAAEQIPEAEPPKDEESFRPREDEEGQEGQDSMSRAKANWLRAFNKVRMQLQEARGEGEMSKSLWFKGGPGGGLIIIDSMPDIRKRKPIPLVSDLAMSLVQSRKAGITSALASSTLNNEELKNHVYKKTLQALIYPISCTTPHNFEVWTATTPTYCYECEGLLWGIARQGMRCTECGVKCHEKCQDLLNADCLQRAAEKSSKHGAEDRTQNIIMVLKDRMKIRERNKPEIFELIQEIFAVTKTAHTQQMKAVKQSVLDGTSKWSAKISITVVCAQGLQAKDKTGSSDPYVTVQVGKTKKRTKTIYGNLNPVWEENFHFECHNSSDRIKVRVWDEDDDIKSRVKQRFKRESDDFLGQTIIEVRTLSGEMDVWYNLDKRTDKSAVSGAIRLHISVEIKGEEKVAPYHVQYTCLHENLFHFVTDVQNNGVVKIPDAKGDDAWKVYYDETAQEIVDEFAMRYGVESIYQAMTHFACLSSKYMCPGVPAVMSTLLANINAYYAHTTASTNVSASDRFAASNFGKERFVKLLDQLHNSLRIDLSMYRNNFPASSPERLQDLKSTVDLLTSITFFRMKVQELQSPPRASQVVKDCVKACLNSTYEYIFNNCHELYSREYQTDPAKKGEVLPEEQGPSIKNLDFWSKLITLIVSIIEEDKNSYTPCLNQFPQELNVGKISAEVMWNLFAQDMKYAMEEHDKHRLCKSADYMNLHFKVKWLYNEYVTELPAFKDRVPEYPAWFEPFVIQWLDENEEVSRDFLHGALERDKKDGFQQTSEHALFSCSVVDVFSQLNQSFEIIKKLECPDPQIVGHYMRRFAKTISNVLLQYADIISKDFASYCSKEKEKVPCILMNNTQQLRVQLEKMFEAMGGKELDAEASDILKELQVKLNNVLDELSRVFATSFQPHIEECVKQMGDILSQVKGTGNVPASACSSVAQDADNVLQPIMDLLDSNLTLFAKICEKTVLKRVLKELWKLVMNTMEKTIVLPPLTDQTMIGNLLRKHGKGLEKGRVKLPSHSDGTQMIFNAAKELGQLSKLKDHMVREEAKSLTPKQCAVVELALDTIKQYFHAGGVGLKKTFLEKSPDLQSLRYALSLYTQATDLLIKTFVQTQSAQGLGVEDPVGEVSVHVELFTHPGTGEHKVTVKVVAANDLKWQTSGIFRPFIEVNIIGPQLSDKKRKFATKSKNNSWAPKYNESFQFTLSADAGPECYELQVCVKDYCFAREDRTVGLAVLQLRELAQRGSAACWLPLGRRIHMDDTGLTVLRILSQRSNDEVAKEFVKLKSDTRSAEEGGAAPAP

SEQ ID NO: 69281 - protein, 1090 aa, Homo sapiens
MATLLSHPQQRPPFLRQAIKIRRRRVRDLQDPPPQMAPEIQPPSHHFSPEQRALLYEDALYTVLHRLGHPEPNHVTEASELLRYLQEAFHVEPEEHQQTLQRVRELEKPIFCLKATVKQAKGILGKDVSGFSDPYCLLGIEQGVGVPGGSPGSRHRQKAVVRHTIPEEETHRTQVITQTLNPVWDETFILEFEDITNASFHLDMWDLDTVESVRQKLGELTDLHGLRRIFKEARKDKGQDDFLGNVVLRLQDLRCREDQWYPLEPRTETYPDRGQCHLQFQLIHKRRATSASRSQPSYTVHLHLLQQLVSHEVTQHEAGSTSWDGSLSPQAATVLFLHATQKDLSDFHQSMAQWLAYSRLYQSLEFPSSCLLHPITSIEYQWIQGRLKAEQQEELAASFSSLLTYGLSLIRRFRSVFPLSVSDSPARLQSLLRVLVQMCKMKAFGELCPNTAPLPQLVTEALQTGTTEWFHLKQQHHQPMVQGIPEAGKALLGLVQDVIGDLHQCQRTWDKIFHNTLKIHLFSMAFRELQWLVAKRVQDHTTVVGDVVSPEMGESLFQLYISLKELCQLRMSSSERDGVLALDNFHRWFQPAIPSWLQKTYNEALARVQRAVQMDELVPLGELTKHSTSAVDLSTCFAQISHTARQLDWPDPEEAFMITVKFVEDTCRLALVYCSLIKARARELSSGQKDQGQAANMLCVVVNDMEQLRLVIGKLPAQLAWEALEQRVGAVLEQGQLQNTLHAQLQSALAGLGHEIRTGVRTLAEQLEVGIAKHIQKLVGVRESVLPEDAILPLMKFLEVELCYMNTNLVQENFSSLLTLLWTHTLTVLVEAAASQRSSSLASNRLKIALQNLEICFHAEGCGLPPKALHTATFQALQRDLELQAASSRELIRKYFCSRIQQQAETTSEELGAVTVKASYRASEQKLRVELLSASSLLPLDSNGSSDPFVQLTLEPRHEFPELAARETQKHKKDLHPLFDETFEFLVPAEPCRKAGACLLLTVLDYDTLGADDLEGEAFLPLREVPGLSGSEEPGEVPQTRLPLTYPAPNGDPILQLLEGRKGDREAQVFVRLRRHRAKQASQHALRPAP

SEQ ID NO: 69282 - protein, 1142 aa, Homo sapiens
MATLLSHPQQRPPFLRQAIKIRRRRVRDLQDPPPQMAPEIQPPSHHFSPEQRALLYEDALYTVLHRLGHPEPNHVTEASELLRYLQEAFHVEPEEHQQTLQRVRELEKPIFCLKATVKQAKGILGKDVSGFSDPYCLLGIEQGVGVPGGSPGSRHRQKAVVRHTIPEEETHRTQVITQTLNPVWDETFILEFEDITNASFHLDMWDLDTVESVRQKLGELTDLHGLRRIFKEARKDKGQDDFLGNVVLRLQDLRCREDQWYPLEPRTETYPDRGQCHLQFQLIHKRRATSASRSQPSYTVHLHLLQQLVSHEVTQHEAGSTSWDGSLSPQAATVLFLHATQKDLSDFHQSMAQWLAYSRLYQSLEFPSSCLLHPITSIEYQWIQGRLKAEQQEELAASFSSLLTYGLSLIRRFRSVFPLSVSDSPARLQSLLRVLVQMCKMKAFGELCPNTAPLPQLVTEALQTGTTEWFHLKQQHHQPMVQGIPEAGKALLGLVQDVIGDLHQCQRTWDKIFHNTLKIHLFSMAFRELQWLVAKRVQDHTTVVGDVVSPEMGESLFQLYISLKELCQLRMSSSERDGVLALDNFHRWFQPAIPSWLQKTYNEALARVQRAVQMDELVPLGELTKHSTSAVDLSTCFAQISHTARQLDWPDPEEAFMITVKFVEDTCRLALVYCSLIKARARELSSGQKDQGQAANMLCVVVNDMEQLRLVIGKLPAQLAWEALEQRVGAVLEQGQLQNTLHAQLQSALAGLGHEIRTGVRTLAEQLEVGIAKHIQKLVGVRESVLPEDAILPLMKFLEVELCYMNTNLVQENFSSLLTLLWTHTLTVLVEAAASQRSSSLASNRLKIALQNLEICFHAEGCGLPPKALHTATFQALQRDLELQAASSRELIRKYFCSRIQQQAETTSEELGAVTVKASYRASEQKLRVELLSASSLLPLDSNGSSDPFVQLTLEPRHEFPELAARETQKHKKDLHPLFDETFEFLVPAEPCRKAGACLLLTVLDYDTLGADDLEGEAFLPLREVPGLSGSEEPGEVPQTRLPLTYPAPNGDPILQLLEGRKGDREAQVFVRLRRHRAKQGIGPSVSWPWPICLLAFLFQPLGWGPGSLGPGLQAQSLLEKGEGTLPKMRLQLPWGEGGGHY

SEQ ID NO: 69283 - protein, 944 aa, Homo sapiens
MATLLSHPQQRPPFLRQAIKIRRRRVRDLQDPPPQMAPEIQPPSHHFSPEQRALLYEDALYTVLHRLGHPEPNHVTEASELLRYLQEAFHVEPEEHQQTLQRVRELEKPIFCLKATVKQAKGILGKDVSGFSDPYCLLGIEQGVGVPGGSPGSRHRQKAVVRHTIPEEETHRTQVITQTLNPVWDETFILEFEDITNASFHLDMWDLDTVESVRQKLGELTDLHGLRRIFKEARKDKGQDDFLGNVVLRLQDLRCREDQWYPLEPRTETYPDRGQCHLQFQLIHKRRATSASRSQPSYTVHLHLLQQLVSHEVTQHEAGSTSWDGSLSPQAATVLFLHATQKDLSDFHQSMAQWLAYSRLYQSLEFPSSCLLHPITSIEYQWIQGRLKAEQQEELAASFSSLLTYGLSLIRRFRSVFPLSVSDSPARLQSLLRVLVQMCKMKAFGELCPNTAPLPQLVTEALQTGTTEWFHLKQQHHQPMVQGIPEAGKALLGLVQDVIGDLHQCQRTWDKIFHNTLKIHLFSMAFRELQWLVAKRVQDHTTVVGDVVSPEMGESLFQLYISLKELCQLRMSSSERDGVLALDNFHRWFQPAIPSWLQKTYNEALARVQRAVQMDELVPLGELTKHSTSAVDLSTCFAQISHTARQLDWPDPEEAFMITVKFVEDTCRLALVYCSLIKARARELSSGQKDQGQAANMLCVVVNDMEQLRLVIGKLPAQLAWEALEQRVGAVLEQGQLQNTLHAQLQSALAGLGHEIRTGVRTLAEQLEVGIAKHIQKLVGVRESVLPEDAILPLMKFLEVELCYMNTNLVQENFSSLLTLLWTHTLTVLVEAAASQRSSSLASNRLKIALQNLEICFHAEGCGLPPKTLPLPASQKSCCGGQGIGPSVSWPWPICLLAFLFQPLGWGPGSLGPGLQAQSLLEKGEGTLPKMRLQLPWGEGGGHY

SEQ ID NO: 69284 - protein, 929 aa, Homo sapiens
MTASSVEQLRKEGNELFKCGDYGGALAAYTQALGLDATPQDQAVLHRNRAACHLKLEDYDKAETEASKAIEKDGGDVKALYRRSQALEKLGRLDQAVLDLQRCVSLEPKNKVFQEALRNIGGQIQEKVRYMSSTDAKVEQMFQILLDPEEKGTEKKQKASQNLVVLAREDAGAEKIFRSNGVQLLQRLLDMGETDLMLAALRTLVGICSEHQSRTVATLSILGTRRVVSILGVESQAVSLAACHLLQVMFDALKEGVKKGFRGKEGAIIVDPARELKVLISNLLDLLTEVGVSGQGRDNALTLLIKAVPRKSLKDPNNSLTLWVIDQGLKKILEVGGSLQDPPGELAVTANSRMSASILLSKLFDDLKCDAERENFHRLCENYIKSWFEGQGLAGKLRAIQTVSCLLQGPCDAGNRALELSGVMESVIALCASEQEEEQLVAVEALIHAAGKAKRASFITANGVSLLKDLYKCSEKDSIRIRALVGLCKLGSAGGTDFSMKQFAEGSTLKLAKQCRKWLCNDQIDAGTRRWAVEGLAYLTFDADVKEEFVEDAAALKALFQLSRLEERSVLFAVASALVNCTNSYDYEEPDPKMVELAKYAKQHVPEQHPKDKPSFVRARVKKLLAAGVVSAMVCMVKTESPVLTSSCRELLSRVFLALVEEVEDRGTVVAQGGGRALIPLALEGTDVGQTKAAQALAKLTITSNPEMTFPGERIYEVVRPLVSLLHLNCSGLQNFEALMALTNLAGISERLRQKILKEKAVPMIEGYMFEEHEMIRRAATECMCNLAMSKEVQDLFEAQGNDRLKLLVLYSGEDDELLQRAAAGGLAMLTSMRPTLCSRIPQVTTHWLEILQALLLSSNQELQHRGAVVVLNMVEASREIASTLMESEMMEILSVLAKGDHSPVTRAAAACLDKAVEYGLIQPNQDGE

SEQ ID NO: 69285 - protein, 944 aa, Homo sapiens
MTVSGPGTPEPRPATPGASSVEQLRKEGNELFKCGDYGGALAAYTQALGLDATPQDQAVLHRNRAACHLKLEDYDKAETEASKAIEKDGGDVKALYRRSQALEKLGRLDQAVLDLQRCVSLEPKNKVFQEALRNIGGQIQEKVRYMSSTDAKVEQMFQILLDPEEKGTEKKQKASQNLVVLAREDAGAEKIFRSNGVQLLQRLLDMGETDLMLAALRTLVGICSEHQSRTVATLSILGTRRVVSILGVESQAVSLAACHLLQVMFDALKEGVKKGFRGKEGAIIVDPARELKVLISNLLDLLTEVGVSGQGRDNALTLLIKAVPRKSLKDPNNSLTLWVIDQGLKKILEVGGSLQDPPGELAVTANSRMSASILLSKLFDDLKCDAERENFHRLCENYIKSWFEGQGLAGKLRAIQTVSCLLQGPCDAGNRALELSGVMESVIALCASEQEEEQLVAVEALIHAAGKAKRASFITANGVSLLKDLYKCSEKDSIRIRALVGLCKLGSAGGTDFSMKQFAEGSTLKLAKQCRKWLCNDQIDAGTRRWAVEGLAYLTFDADVKEEFVEDAAALKALFQLSRLEERSVLFAVASALVNCTNSYDYEEPDPKMVELAKYAKQHVPEQHPKDKPSFVRARVKKLLAAGVVSAMVCMVKTESPVLTSSCRELLSRVFLALVEEVEDRGTVVAQGGGRALIPLALEGTDVGQTKAAQALAKLTITSNPEMTFPGERIYEVVRPLVSLLHLNCSGLQNFEALMALTNLAGISERLRQKILKEKAVPMIEGYMFEEHEMIRRAATECMCNLAMSKEVQDLFEAQGNDRLKLLVLYSGEDDELLQRAAAGGLAMLTSMRPTLCSRIPQVTTHWLEILQALLLSSNQELQHRGAVVVLNMVEASREIASTLMESEMMEILSVLAKGDHSPVTRAAAACLDKAVEYGLIQPNQDGE

SEQ ID NO: 69286 - protein, 802 aa, Homo sapiens
MAGTSERSLISSISQPKAIECFEVKKKAFLTHGRYHGSGATPPKTKDPKPETFCGQTGLPTMEVRINVSRQQVEKVFGLEEYWCQCVAWSSSGTTKSQKAYIRIAYLRKNFEQEPLAKEVSLEQGIVLPCRPPEGIPPAEVEWLRNEDLVDPSLDPNVYITREHSLVVRQARLADTANYTCVAKNIVARRRSASAAVIVYVDGSWSPWSKWSACGLDCTHWRSRECSDPAPRNGGEECQGTDLDTRNCTSDLCVHTASGPEDVALYVGLIAVAVCLVLLLLVLILVYCRKKEGLDSDVADSSILTSGFQPVSIKPSKADNPHLLTIQPDLSTTTTTYQGSLCPRQDGPSPKFQLTNGHLLSPLGGGRHTLHHSSPTSEAEEFVSRLSTQNYFRSLPRGTSNMTYGTFNFLGGRLMIPNTGISLLIPPDAIPRGKIYEIYLTLHKPEDVRLPLAGCQTLLSPIVSCGPPGVLLTRPVILAMDHCGEPSPDSWSLRLKKQSCEGSWEDVLHLGEEAPSHLYYCQLEASACYVFTEQLGRFALVGEALSVAAAKRLKLLLFAPVACTSLEYNIRVYCLHDTHDALKEVVQLEKQLGGQLIQEPRVLHFKDSYHNLRLSIHDVPSSLWKSKLLVSYQEIPFYHIWNGTQRYLHCTFTLERVSPSTSDLACKLWVWQVEGDGQSFSINFNITKDTRFAELLALESEAGVPALVGPSAFKIPFLIRQKIISSLDPPCRRGADWRTLAQKLHLDSHLSFFASKPSPTAMILNLWEARHFPNGNLSQLAAAVAGLGQPDAGLFTVSEAEC

SEQ ID NO: 69287 - protein, 842 aa, Homo sapiens
MAVRPGLWPALLGIVLAAWLRGSGAQQSATVANPVPGANPDLLPHFLVEPEDVYIVKNKPVLLVCKAVPATQIFFKCNGEWVRQVDHVIERSTDGSSGLPTMEVRINVSRQQVEKVFGLEEYWCQCVAWSSSGTTKSQKAYIRIAYLRKNFEQEPLAKEVSLEQGIVLPCRPPEGIPPAEVEWLRNEDLVDPSLDPNVYITREHSLVVRQARLADTANYTCVAKNIVARRRSASAAVIVYVDGSWSPWSKWSACGLDCTHWRSRECSDPAPRNGGEECQGTDLDTRNCTSDLCVHTASGPEDVALYVGLIAVAVCLVLLLLVLILVYCRKKEGLDSDVADSSILTSGFQPVSIKPSKADNPHLLTIQPDLSTTTTTYQGSLCPRQDGPSPKFQLTNGHLLSPLGGGRHTLHHSSPTSEAEEFVSRLSTQNYFRSLPRGTSNMTYGTFNFLGGRLMIPNTGISLLIPPDAIPRGKIYEIYLTLHKPEDVRLPLAGCQTLLSPIVSCGPPGVLLTRPVILAMDHCGEPSPDSWSLRLKKQSCEGSWEDVLHLGEEAPSHLYYCQLEASACYVFTEQLGRFALVGEALSVAAAKRLKLLLFAPVACTSLEYNIRVYCLHDTHDALKEVVQLEKQLGGQLIQEPRVLHFKDSYHNLRLSIHDVPSSLWKSKLLVSYQEIPFYHIWNGTQRYLHCTFTLERVSPSTSDLACKLWVWQVEGDGQSFSINFNITKDTRFAELLALESEAGVPALVGPSAFKIPFLIRQKIISSLDPPCRRGADWRTLAQKLHLDSHLSFFASKPSPTAMILNLWEARHFPNGNLSQLAAAVAGLGQPDAGLFTVSEAEC

SEQ ID NO: 69288 - protein, 945 aa, Homo sapiens
MGARSGARGALLLALLLCWDPRLSQAGTDSGSEVLPDSFPSAPAEPLPYFLQEPQDAYIVKNKPVELRCRAFPATQIYFKCNGEWVSQNDHVTQEGLDEATGLRVREVQIEVSRQQVEELFGLEDYWCQCVAWSSAGTTKSRRAYVRIAYLRKNFDQEPLGKEVPLDHEVLLQCRPPEGVPVAEVEWLKNEDVIDPTQDTNFLLTIDHNLIIRQARLSDTANYTCVAKNIVAKRRSTTATVIVYVNGGWSSWAEWSPCSNRCGRGWQKRTRTCTNPAPLNGGAFCEGQAFQKTACTTICPVDGAWTEWSKWSACSTECAHWRSRECMAPPPQNGGRDCSGTLLDSKNCTDGLCMQNKKTLSDPNSHLLEASGDAALYAGLVVAIFVVVAILMAVGVVVYRRNCRDFDTDITDSSAALTGGFHPVNFKTARPSNPQLLHPSVPPDLTASAGIYRGPVYALQDSTDKIPMTNSPLLDPLPSLKVKVYSSSTTGSGPGLADGADLLGVLPPGTYPSDFARDTHFLHLRSASLGSQQLLGLPRDPGSSVSGTFGCLGGRLSIPGTGVSLLVPNGAIPQGKFYEMYLLINKAESTLPLSEGTQTVLSPSVTCGPTGLLLCRPVILTMPHCAEVSARDWIFQLKTQAHQGHWEEVVTLDEETLNTPCYCQLEPRACHILLDQLGTYVFTGESYSRSAVKRLQLAVFAPALCTSLEYSLRVYCLEDTPVALKEVLELERTLGGYLVEEPKPLMFKDSYHNLRLSLHDLPHAHWRSKLLAKYQEIPFYHIWSGSQKALHCTFTLERHSLASTELTCKICVRQVEGEGQIFQLHTTLAETPAGSLDTLCSAPGSTVTTQLGPYAFKIPLSIRQKICNSLDAPNSRGNDWRMLAQKLSMDRYLNYFATKASPTGVILDLWEALQQDDGDLNSLASALEEMGKSEMLVAVATDGDC

SEQ ID NO: 69289 - protein, 934 aa, Homo sapiens
MGARSGARGALLLALLLCWDPRLSQAGTDSGSEVLPDSFPSAPAEPLPYFLQEPQDAYIVKNKPVELRCRAFPATQIYFKCNGEWVSQNDHVTQEGLDEATGLRVREVQIEVSRQQVEELFGLEDYWCQCVAWSSAGTTKSRRAYVRIAYLRKNFDQEPLGKEVPLDHEVLLQCRPPEGVPVAEVEWLKNEDVIDPTQDTNFLLTIDHNLIIRQARLSDTANYTCVAKNIVAKRRSTTATVIVYVNGGWSSWAEWSPCSNRCGRGWQKRTRTCTNPAPLNGGAFCEGQAFQKTACTTICPVDGAWTEWSKWSACSTECAHWRSRECMAPPPQNGGRDCSGTLLDSKNCTDGLCMQMLEASGDAALYAGLVVAIFVVVAILMAVGVVVYRRNCRDFDTDITDSSAALTGGFHPVNFKTARPSNPQLLHPSVPPDLTASAGIYRGPVYALQDSTDKIPMTNSPLLDPLPSLKVKVYSSSTTGSGPGLADGADLLGVLPPGTYPSDFARDTHFLHLRSASLGSQQLLGLPRDPGSSVSGTFGCLGGRLSIPGTGVSLLVPNGAIPQGKFYEMYLLINKAESTLPLSEGTQTVLSPSVTCGPTGLLLCRPVILTMPHCAEVSARDWIFQLKTQAHQGHWEEVVTLDEETLNTPCYCQLEPRACHILLDQLGTYVFTGESYSRSAVKRLQLAVFAPALCTSLEYSLRVYCLEDTPVALKEVLELERTLGGYLVEEPKPLMFKDSYHNLRLSLHDLPHAHWRSKLLAKYQEIPFYHIWSGSQKALHCTFTLERHSLASTELTCKICVRQVEGEGQIFQLHTTLAETPAGSLDTLCSAPGSTVTTQLGPYAFKIPLSIRQKICNSLDAPNSRGNDWRMLAQKLSMDRYLNYFATKASPTGVILDLWEALQQDDGDLNSLASALEEMGKSEMLVAVATDGDC

SEQ ID NO: 69290 - protein, 890 aa, Homo sapiens
DDDFFHELPETFPSDPPEPLPHFLIEPEEAYIVKNKPVNLYCKASPATQIYFKCNSEWVHQKDHIVDERVDETSGLIVREVSIEISRQQVEELFGPEDYWCQCVAWSSAGTTKSRKAYVRIAYLRKTFEQEPLGKEVSLEQEVLLQCRPPEGIPVAEVEWLKNEDIIDPVEDRNFYITIDHNLIIKQARLSDTANYTCVAKNIVAKRKSTTATVIVYVNGGWSTWTEWSVCNSRCGRGYQKRTRTCTNPAPLNGGAFCEGQSVQKIACTTLCPVDGRWTPWSKWSTCGTECTHWRRRECTAPAPKNGGKDCDGLVLQSKNCTDGLCMQTAPDSDDVALYVGIVIAVIVCLAISVVVALFVYRKNHRDFESDIIDSSALNGGFQPVNIKAARQDLLAVPPDLTSAAAMYRGPVYALHDVSDKIPMTNSPILDPLPNLKIKVYNTSGAVTPQDDLSEFTSKLSPQMTQSLLENEALSLKNQSLARQTDPSCTAFGSFNSLGGHLIVPNSGVSLLIPAGAIPQGRVYEMYVTVHRKETMRPPMDDSQTLLTPVVSCGPPGALLTRPVVLTMHHCADPNTEDWKILLKNQAAQGQWEDVVVVGEENFTTPCYIQLDAEACHILTENLSTYALVGHSTTKAAAKRLKLAIFGPLCCSSLEYSIRVYCLDDTQDALKEILHLERQMGGQLLEEPKALHFKGSTHNLRLSIHDIAHSLWKSKLLAKYQEIPFYHVWSGSQRNLHCTFTLERFSLNTVELVCKLCVRQVEGEGQIFQLNCTVSEEPTGIDLPLLDPANTITTVTGPSAFSIPLPIRQKLCSSLDAPQTRGHDWRMLAHKLNLDRYLNYFATKSSPTGVILDLWEAQNFPDGNLSMLAAVLEEMGRHETVVSLAAEGQY

SEQ ID NO: 69291 - protein, 931 aa, Homo sapiens
MRKGLRATAARCGLGLGYLLQMLVLPALALLSASGTGSAAQDDDFFHELPETFPSDPPEPLPHFLIEPEEAYIVKNKPVNLYCKASPATQIYFKCNSEWVHQKDHIVDERVDETSGLIVREVSIEISRQQVEELFGPEDYWCQCVAWSSAGTTKSRKAYVRIAYLRKTFEQEPLGKEVSLEQEVLLQCRPPEGIPVAEVEWLKNEDIIDPVEDRNFYITIDHNLIIKQARLSDTANYTCVAKNIVAKRKSTTATVIVYVNGGWSTWTEWSVCNSRCGRGYQKRTRTCTNPAPLNGGAFCEGQSVQKIACTTLCPVDGRWTPWSKWSTCGTECTHWRRRECTAPAPKNGGKDCDGLVLQSKNCTDGLCMQTAPDSDDVALYVGIVIAVIVCLAISVVVALFVYRKNHRDFESDIIDSSALNGGFQPVNIKAARQDLLAVPPDLTSAAAMYRGPVYALHDVSDKIPMTNSPILDPLPNLKIKVYNTSGAVTPQDDLSEFTSKLSPQMTQSLLENEALSLKNQSLARQTDPSCTAFGSFNSLGGHLIVPNSGVSLLIPAGAIPQGRVYEMYVTVHRKETMRPPMDDSQTLLTPVVSCGPPGALLTRPVVLTMHHCADPNTEDWKILLKNQAAQGQWEDVVVVGEENFTTPCYIQLDAEACHILTENLSTYALVGHSTTKAAAKRLKLAIFGPLCCSSLEYSIRVYCLDDTQDALKEILHLERQMGGQLLEEPKALHFKGSTHNLRLSIHDIAHSLWKSKLLAKYQEIPFYHVWSGSQRNLHCTFTLERFSLNTVELVCKLCVRQVEGEGQIFQLNCTVSEEPTGIDLPLLDPANTITTVTGPSAFSIPLPIRQKLCSSLDAPQTRGHDWRMLAHKLNLDRYLNYFATKSSPTGVILDLWEAQNFPDGNLSMLAAVLEEMGRHETVVSLAAEGQY

SEQ ID NO: 69292 - protein, 1050 aa, Homo sapiens
MEPGRGGTETVGKFEFSRKDLIGHGAFAVVFKGRHREKHDLEVAVKCINKKNLAKSQTLLGKEIKILKELKHENIVALYDFQEMANSVYLVMEYCNGGDLADYLHAMRTLSEDTIRLFLQQIAGAMRLLHSKGIIHRDLKPQNILLSNPAGRRANPNSIRVKIADFGFARYLQSNMMAATLCGSPMYMAPEVIMSQHYDGKADLWSIGTIVYQCLTGKAPFQASSPQDLRLFYEKNKTLVPTIPRETSAPLRQLLLALLQRNHKDRMDFDEFFHHPFLDASPSVRKSPPVPVPSYPSSGSGSSSSSSSTSHLASPPSLGEMQQLQKTLASPADTAGFLHSSRDSGGSKDSSCDTDDFVMVPAQFPGDLVAEAPSAKPPPDSLMCSGSSLVASAGLESHGRTPSPSPPCSSSPSPSGRAGPFSSSRCGASVPIPVPTQVQNYQRIERNLQSPTQFQTPRSSAIRRSGSTSPLGFARASPSPPAHAEHGGVLARKMSLGGGRPYTPSPQVGTIPERPGWSGTPSPQGAEMRGGRSPRPGSSAPEHSPRTSGLGCRLHSAPNLSDLHVVRPKLPKPPTDPLGAVFSPPQASPPQPSHGLQSCRNLRGSPKLPDFLQRNPLPPILGSPTKAVPSFDFPKTPSSQNLLALLARQGVVMTPPRNRTLPDLSEVGPFHGQPLGPGLRPGEDPKGPFGRSFSTSRLTDLLLKAAFGTQAPDPGSTESLQEKPMEIAPSAGFGGSLHPGARAGGTSSPSPVVFTVGSPPSGSTPPQGPRTRMFSAGPTGSASSSARHLVPGPCSEAPAPELPAPGHGCSFADPITANLEGAVTFEAPDLPEETLMEQEHTEILRGLRFTLLFVQHVLEIAALKGSASEAAGGPEYQLQESVVADQISLLSREWGFAEQLVLYLKVAELLSSGLQSAIDQIRAGKLCLSSTVKQVVRRLNELYKASVVSCQGLSLRLQRFFLDKQRLLDRIHSITAERLIFSHAVQMVQSAALDEMFQHREGCVPRYHKALLLLEGLQHMLSDQADIENVTKCKLCIERRLSALLTGICA

SEQ ID NO: 69293 - protein, 483 aa, Homo sapiens
MQRNGSASRGLEKTRLRLCREARIPESAFLTGLTRESWEARCWCAKDTREVVAIKCVAKKSLNKASVENLLTEIEILKGIRHPHIVQLKDFQWDSDNIYLIMEFCAGGDLSRFIHTRRILPEKVARVFMQQLASALQFLHERNISHLDLKPQNILLSSLEKPHLKLADFGFAQHMSPWDEKHVLRGSPLYMAPEMVCQRQYDARVDLWSMGVILYEALFGQPPFASRSFSELEEKIRSNRVIELPLRPLLSRDCRDLLQRLLERDPSRRISFQDFFAHPWVDLEHMPSGESLGRATALVVQAVKKDQEGDSAAALSLYCKALDFFVPALHYEVDAQRKEAIKAKVGQYVSRAEELKAIVSSSNQALLRQGTSARDLLREMARDKPRLLAALEVASAAMAKEEAAGGEQDALDLYQHSLGELLLLLAAEPPGRRRELLHTEVQNLMARAEYLKEQVKMRESRWEADTLDKEGLSESVRSSCTLQ

SEQ ID NO: 69294 - protein, 472 aa, Homo sapiens
MAGPGWGPPRLDGFILTERLGSGTYATVYKAYAKKDTREVVAIKCVAKKSLNKASVENLLTEIEILKGIRHPHIVQLKDFQWDSDNIYLIMEFCAGGDLSRFIHTRRILPEKVARVFMQQLASALQFLHERNISHLDLKPQNILLSSLEKPHLKLADFGFAQHMSPWDEKHVLRGSPLYMAPEMVCQRQYDARVDLWSMGVILYEALFGQPPFASRSFSELEEKIRSNRVIELPLRPLLSRDCRDLLQRLLERDPSRRISFQDFFAHPWVDLEHMPSGESLGRATALVVQAVKKDQEGDSAAALSLYCKALDFFVPALHYEVDAQRKEAIKAKVGQYVSRAEELKAIVSSSNQALLRQGTSARDLLREMARDKPRLLAALEVASAAMAKEEAAGGEQDALDLYQHSLGELLLLLAAEPPGRRRELLHTEVQNLMARAEYLKEQVKMRESRWEADTLDKEGLSESVRSSCTLQ

SEQ ID NO: 69295 - protein, 3234 aa, Homo sapiens
MVKRKSSEGQEQDGGRGIPLPIQTFLWRQTSAFLRPKLGKQYEASCVSFERVLVENKLHGLSPALSEAIQSISRWELVQAALPHVLHCTATLLSNRNKLGHQDKLGVAETKLLHTLHWMLLEAPQDCNNERFGGTDRGSSWGGSSSAFIHQVENQGSPGQPCQSSSNDEEENNRRKIFQNSMATVELFVFLFAPLVHRIKESDLTFRLASGLVIWQPMWEHRQPGVSGFTALVKPIRNIITAKRSSPINSQSRTCESPNQDARHLEGLQVVCETFQSDSISPKATISGCHRGNSFDGSLSSQTSQERGPSHSRASLVIPPCQRSRYATYFDVAVLRCLLQPHWSEEGTQWSLMYYLQRLRHMLEEKPEKPPEPDIPLLPRPRSSSMVAAAPSLVNTHKTQDLTMKCNEEEKSLSSEAFSKVSLTNLRRSAVPDLSSDLGMNIFKKFKSRKEDRERKGSIPFHHTGKRRPRRMGVPFLLHEDHLDVSPTRSTFSFGSFSGLGEDRRGIEKGGWQTTILGKLTRRGSSDAATEMESLSARHSHSHHTLVSDLPDPSNSHGENTVKEVRSQISTITVATFNTTLASFNVGYADFFNEHMRKLCNQVPIPEMPHEPLACANLPRSLTDSCINYSYLEDTEHIDGTNNFVHKNGMLDLSVVLKAVYLVLNHDISSRICDVALNIVECLLQLGVVPCVEKNRKKSENKENETLEKRPSEGAFQFKGVSGSSTCGFGGPAVSGAGDGGGEEGGGGDGGGGGGDGGGGGGGGGGPYEKNDKNQEKDESTPVSNHRLALTMLIKIVKSLGCAYGCGEGHRGLSGDRLRHQAQNCLTKLYKLDKMQFRQTMRDYVNKDSLNNVVDFLHALLGFCMEPVTDNKAGFGNNFTTVDNKSTAQNVEGIIVSAMFKSLITRCASTTHELHSPENLGLYCDIRQLVQFIKEAHGNVFRRVALSALLDSAEKLAPGKKVEENEQESKPAGSKRSEAGSIVDKGQVSSAPEECRSFMSGRPSQTPEHDEQMQGANLGRKDFWRKMFKSQSAASDTSSQSEQDTSECTTAHSGTTSDRRARSRSRRISLRKKLKLPIGKRNWLKRSSLSGLADGVEDLLDISSVDRLSFIRQSSKVKFTSAVKLSEGGPGSGMENGRDEEENFFKRLGCHSFDDHLSPNQDGGKSKNVVNLGAIRQGMKRFQFLLNCCEPGTIPDASILAAALDLEAPVVARAALFLECARFVHRCNRGNWPEWMKGHHVNITKKGLSRGRSPIVGNKRNQKLQWNAAKLFYQWGDAIGVRLNELCHGESESPANLLGLIYDEETKRRLRKEDEEEDFLDDSTVNPSKCGCPFALKMAACQLLLEITTFLRETFSCLPRPRTEPLVDLESCRLRLDPELDRHRYERKISFAGVLDENEDSKDSLHSSSHTLKSDAGVEEKKEGSPWSASEPSIEPEGMSNAGAEENYHRNMSWLHVMILLCNQQSFICTHVDYCHPHCYLHHSRSCARLVRAIKLLYGDSVDSLRESSNISSVALRGKKQKECSDKSCLRTPSLKKRVSDANLEGKKDSGMLKYIRLQVMSLSPAPLSLLIKAAPILTEEMYGDIQPAAWELLLSMDEHMAGAAAAMFLLCAVKVPEAVSDMLMSEFHHPETVQRLNAVLKFHTLWRFRYQVWPRMEEGAQQIFKIPPPSINFTLPSPVLGMPSVPMFDPPWVPQCSGSVQDPINEDQSKSFSARAVSRSHQRAEHILKNLQQEEEKKRLGREASLITAIPITQEACYEPTCTPNSEPEEEVEEVTNLASRRLSVSPSCTSSTSHRNYSFRRGSVWSVRSAVSAEDEEHTTEHTPNHHVPQPPQAVFPACICAAVLPIVHLMEDGEVREDGVAVSAVAQQVLWNCLIEDPSTVLRHFLEKLTISNRQDELMYMLRKLLLNIGDFPAQTSHILFNYLVGLIMYFVRTPCEWGMDAISATLTFLWEVVGYVEGLFFKDLKQTMKKEQCEVKLLVTASMPGTKTLVVHGQNECDIPTQLPVHEDTQFEALLKECLEFFNIPESQSTHYFLMDKRWNLIHYNKTYVRDIYPFRRSVSPQLNLVHMHPEKGQELIQKQVFTRKLEEVGRVLFLISLTQKIPTAHKQSHVSMLQEDLLRLPSFPRSAIDAEFSLFSDPQAGKELFGLDTLQKSLWIQLLEEMFLGMPSEFPWGDEIMLFLNVFNGALILHPEDSALLRQYAATVINTAVHFNHLFSLSGYQWILPTMLQVYSDYESNPQLRQAIEFACHQFYILHRKPFVLQLFASVAPLLEFPDAANNGPSKGVSAQCLFDLLQSLEGETTDILDILELVKAEKPLKSLDFCYGNEDLTFSISEAIKLCVTVVAYAPESFRSLQMLMVLEALVPCYLQKLKRQTSQVETVPAAREEIAATAALATSLQALLYSVEVLTRPMTAPQMSRCDQGHKGTTTANHTMSSGVNTRYQEQGAKLHFIRENLHLLEEGQGIPREELDERIAREEFRRPRESLLNICTEFYKHCGPRLKILQNLAGEPRVIALELLDVKSHMRLAEIAHSLLKLAPYDTQTMESRGLRRYIMEMLPITDWTAEAVRPALILILKRLDRMFNKIHKMPTLRRQVEWEPASNLIEGVCLTLQRQPIISFLPHLRSLINVCVNLVMGVVGPSSVADGLPLLHLSPYLSPPLPFSTAVVRLVALQIQALKEDFPLSHVISPFTNQERREGMLLNLLIPFVLTVGSGSKDSPWLEQPEVQLLLQTVINVLLPPRIISTSRSKNFMLESSPAHCSTPGDAGKDLRREGLAESTSQAAYLALKVILVCFERQLGSQWYWLSLQVKEMALRKVGGLALWDFLDFIVRTRIPIFVLLRPFIQCKLLAQPAENHEELSARQHIADQLERRFIPRPLCKSSLIAEFNSELKILKEAVHSGSAYQGKTSISTVGTSTSAYRLSLATMSRSNTGTGTVWEQDSEPSQQASQDTLSRTDEEDEENDSISMPSVVSEQEAYLLSAIGRRRFSSHVSSMSVPQAEVGMLPSQRVASIQSEPGQQNLLVQQPLGRKRGLRQLRRPLLSRQKTQTEPRNRQGARLSTTRRSIQPKTKPSADQKRSVTFIEAQPEPAAAPTDALPATGQLQGCSPAPSRKPEAMDEPVLTSSPAIVVADLHSVSPKQSENFPTEEGEKEEDTEAQGATAHSPLSAQLSDPDDFTGLETSSLLQHGDTVLHISEENGMENPLLSSQFTFTPTELGKTDAVLDESHV

SEQ ID NO: 69296 - protein, 3258 aa, Homo sapiens
MVKRKSSEGQEQDGGRGIPLPIQTFLWRQTSAFLRPKLGKQYEASCVSFERVLVENKLHGLSPALSEAIQSISRWELVQAALPHVLHCTATLLSNRNKLGHQDKLGVAETKLLHTLHWMLLEAPQDCNNERFGGTDRGSSWGGSSSAFIHQVENQGSPGQPCQSSSNDEEENNRRKIFQNSMATVELFVFLFAPLVHRIKESDLTFRLASGLVIWQPMWEHRQPGVSGFTALVKPIRNIITAKRSSPINSQSRTCESPNQDARHLEGLQVVCETFQSDSISPKATISGCHRGNSFDGSLSSQTSQERGPSHSRASLVIPPCQRSRYATYFDVAVLRCLLQPHWSEEGTQWSLMYYLQRLRHMLEEKPEKPPEPDIPLLPRPRSSSMVAAAPSLVNTHKTQDLTMKCNEEEKSLSSEAFSKVSLTNLRRSAVPDLSSDLGMNIFKKFKSRKEDRERKGSIPFHHTGKRRPRRMGVPFLLHEDHLDVSPTRSTFSFGSFSGLGEDRRGIEKGGWQTTILGKLTRRGSSDAATEMESLSARHSHSHHTLVSDLPDPSNSHGENTVKEVRSQISTITVATFNTTLASFNVGYADFFNEHMRKLCNQVPIPEMPHEPLACANLPRSLTDSCINYSYLEDTEHIDGTNNFVHKNGMLDLSVVLKAVYLVLNHDISSRICDVALNIVECLLQLGVVPCVEKNRKKSENKENETLEKRPSEGAFQFKGVSGSSTCGFGGPAVSGAGDGGGEEGGGGDGGGGGGDGGGGGGGGGGPYEKNDKNQEKDESTPVSNHRLALTMLIKIVKSLGCAYGCGEGHRGLSGDRLRHQVFRENAQNCLTKLYKLDKMQFRQTMRDYVNKDSLNNVVDFLHALLGFCMEPVTDNKAGFGNNFTTVDNKSTAQNVEGIIVSAMFKSLITRCASTTHELHSPENLGLYCDIRQLVQFIKEAHGNVFRRVALSALLDSAEKLAPGKKVEENEQESKPAGSKRSEAGSIVDKGQVSSAPEECRSFMSGRPSQTPEHDEQMQGANLGRKDFWRKMFKSQSAASDTSSQSEQDTSECTTAHSGTTSDRRARSRSRRISLRKKLKLPIGKRNWLKRSSLSGLADGVEDLLDISSVDRLSFIRQSSKVKFTSAVKLSEGGPGSGMENGRDEEENFFKRLGCHSFDDHLSPNQDGGKSKNVVNLGAIRQGMKRFQFLLNCCEPGTIPDASILAAALDLEAPVVARAALFLECARFVHRCNRGNWPEWMKGHHVNITKKGLSRGRSPIVGNKRNQKLQWNAAKLFYQWGDAIGVRLNELCHGESESPANLLGLIYDEETKRRLRKEDEEEDFLDDSTVNPSKCGCPFALKMAACQLLLEITTFLRETFSCLPRPRTEPLVDLESCRLRLDPELDRHRYERKISFAGVLDENEDSKDSLHSSSHTLKSDAGVEEKKEGSPWSASEPSIEPEGMSNAGAEENYHRNMSWLHVMILLCNQQSFICTHVDYCHPHCYLHHSRSCARLVRAIKLLYGDSVDSLRESSNISSVALRGKKQKECSDKSCLRTPSLKKRVSDANLEGKKDSGMLKYIRLQVMSLSPAPLSLLIKAAPILTEEMYGDIQPAAWELLLSMDEHMAGAAAAMFLLCAVKVPEAVSDMLMSEFHHPETVQRLNAVLKFHTLWRFRYQVWPRMEEGAQQIFKIPPPSINFTLPSPVLGMPSVPMFDPPWVPQCSGSVQDPINEDQSKSFSARAVSRSHQRAEHILKNLQQEEEKKRLGREASLITAIPITQEACYEPTCTPNSEPEEEVEEVTNLASRRLSVSPSCTSSTSHRNYSFRRGSVWSVRSAVSAEDEEHTTEHTPNHHVPQPPQAVFPACICAAVLPIVHLMEDGEVREDGVAVSAVAQQVLWNCLIEDPSTVLRHFLEKLTISNRQDELMYMLRKLLLNIGDFPAQTSHILFNYLVGLIMYFVRTPCEWGMDAISATLTFLWEVVGYVEGLFFKDLKQTMKKEQCEVKLLVTASMPGTKTLVVHGQNECDIPTQLPVHEDTQFEALLKECLEFFNIPESQSTHYFLMDKRWNLIHYNKTYVRDIYPFRRSVSPQLNLVHMHPEKGQELIQKQVFTRKLEEVGRVLFLISLTQKIPTAHKQSHVSMLQEDLLRLPSFPRSAIDAEFSLFSDPQAGKELFGLDTLQKSLWIQLLEEMFLGMPSEFPWGDEIMLFLNVFNGALILHPEDSALLRQYAATVINTAVHFNHLFSLSGYQWILPTMLQVYSDYESNPQLRQAIEFACHQFYILHRKPFVLQLFASVAPLLEFPDAANNGPSKGVSAQCLFDLLQSLEGETTDILDILELVKAEKPLKSLDFCYGNEDLTFSISEAIKLCVTVVAYAPESFRSLQMLMVLEALVPCYLQKLKRQTSQVETVPAAREEIAATAALATSLQALLYSVEVLTRPMTAPQMSRCDQGHKGTTTANHTMSSGVNTRYQEQGAKLHFIRENLHLLEEGQGIPREELDERIAREEFRRPRESLLNICTEFYKHCGPRLKILQNLAGEPRVIALELLDVKSHMRLAEIAHSLLKLAPYDTQTMESRGLRRYIMEMLPITDWTAEAVRPALILILKRLDRMFNKIHKMPTLRRQVEWEPASNLIEGVCLTLQRQPIISFLPHLRSLINVCVNLVMGVVGPSSVADGLPLLHLSPYLSPPLPFSTAVVRLVALQIQALKEDFPLSHVISPFTNQERREGMLLNLLIPFVLTVGSGSKDSPWLEQPEVQLLLQTVINVLLPPRIISTSRSKNFMLESSPAHCSTPGDAGKDLRREGLAESTSQAAYLALKVILVCFERQLGSQWYWLSLQVKEMALRKVGGLALWDFLDFIVRTRIPIFVLLRPFIQCKLLAQPAENHEELSARQHIADQLERRFIPRPLCKSSLIAEFNSELKILKEAVHSGSAYQGKTSISTVGTSTSAYRLSLATMSRSNTGTGTVWEQDSEPSQQASQDTLSRTDEEDEENDSISMPSVVSEQEAYLLSAIGRRRFSSHVSSMSVPQAEVGMLPSQSEPNVLDDSQGLAAEGSLSRVASIQSEPGQQNLLVQQPLGRKRGLRQLRRPLLSRQKTQTEPRNRQGARLSTTRRSIQPKTKPSADQKRSVTFIEAQPEPAAAPTDALPATGQLQGCSPAPSRKPEAMDEPVLTSSPAIVVADLHSVSPKQSENFPTEEGEKEEDTEAQGATAHSPLSAQLSDPDDFTGLETSSLLQHGDTVLHISEENGMENPLLSSQFTFTPTELGKTDAVLDESHV

SEQ ID NO: 69297 - protein, 466 aa, Homo sapiens
MESRGLRRYIMEMLPITDWTAEAVRPALILILKRLDRMFNKIHKMPTLRRQVEWEPASNLIEGVCLTLQRQPIISFLPHLRSLINVCVNLVMGVVGPSSVADGLPLLHLSPYLSPPLPFSTAVVRLVALQIQALKEDFPLSHVISPFTNQERREGMLLNLLIPFVLTVGSGSKDSPWLEQPEVQLLLQTVINVLLPPRIISTSRSKNFMLESSPAHCSTPGDAGKDLRREGLAESTSQAAYLALKVILVCFERQLGSQWYWLSLQVKEMALRKVGGLALWDFLDFIVRTRIPIFVLLRPFIQCKLLAQPAENHEELSARQHIADQLERRFIPRPLCKSSLIAEFNSELKILKEAVHSGSAYQGKTSISTVGTSTSAYRLSLATMSRSNTGTGTVWEQDSEPSQQASQDTLSRTDEEDEENDSISMPSVVSEQEAYLLSAIGRRRFSSHVSSMSVPQAEVGMLPSQR

SEQ ID NO: 69298 - protein, 457 aa, Homo sapiens
MDRSLRNVLVVSFGFLLLFTAYGGLQSLQSSLYSEEGLGVTALSTLYGGMLLSSMFLPPLLIERLGCKGTIILSMCGYVAFSVGNFFASWYTLIPTSILLGLGAAPLWSAQCTYLTITGNTHAEKAGKRGKDMVNQYFGIFFLIFQSSGVWGNLISSLVFGQTPSQETLPEEQLTSCGASDCLMATTTTNSTQRPSQQLVYTLLGIYTGSGVLAVLMIAAFLQPIRDVQRESEGEKKSVPFWSTLLSTFKLYRDKRLCLLILLPLYSGLQQGFLSSEYTRSYVTCTLGIQFVGYVMICFSATDALCSVLYGKVSQYTGRAVLYVLGAVTHVSCMIALLLWRPRADHLAVFFVFSGLWGVADAVWQTQNNALYGVLFEKSKEAAFANYRLWEALGFVIAFGYSMFLCVHVKLYILLGVLSLTMVAYGLVECVESKNPIRPHAPGQVNQAEDEEIQTKM

SEQ ID NO: 69299 - protein, 415 aa, Homo sapiens
MDRSLRNVLVVSFGFLLLFTAYGGLQSLQSSLYSEEGLGVTALSTLYGGMLLSSMFLPPLLIERLGCKGTIILSMCGYVAFSVGNFFASWYTLIPTSILLGLGAAPLWSAQCTYLTITGNTHAEKAGKRGKDMVNQYFGIFFLIFQSSGVWGNLISSLVFGQTPSQGSGVLAVLMIAAFLQPIRDVQRESEGEKKSVPFWSTLLSTFKLYRDKRLCLLILLPLYSGLQQGFLSSEYTRSYVTCTLGIQFVGYVMICFSATDALCSVLYGKVSQYTGRAVLYVLGAVTHVSCMIALLLWRPRADHLAVFFVFSGLWGVADAVWQTQNNALYGVLFEKSKEAAFANYRLWEALGFVIAFGYSMFLCVHVKLYILLGVLSLTMVAYGLVECVESKNPIRPHAPGQVNQAEDEEIQTKM

SEQ ID NO: 69300 - protein, 144 aa, Homo sapiens
MDRSLRNVLVVSFGFLLLFTAYGGLQSLQSSLYSEEGLGVTALSTLYGGMLLSSMFLPPLLIERLGCKGTIILSMCGYVAFSVGNFFASWYTLIPTSILLGLGAAPLWSAQCTYLTITGNTHAEKAGKRGKDMVNQYFGIFFLI

SEQ ID NO: 69301 - protein, 596 aa, Homo sapiens
MEAEPPLYPMAGAAGPQGDEDLLGVPDGPEAPLDELVGAYPNYNEEEEERRYYRRKRLGVLKNVLAASAGGMLTYGVYLGLLQMQLILHYDETYREVKYGNMGLPDIDSKMLMGINVTPIAALLYTPVLIRFFGTKWMMFLAVGIYALFVSTNYWERYYTLVPSAVALGMAIVPLWASMGNYITRMAQKYHEYSHYKEQDGQGMKQRPPRGSHAPYLLVFQAIFYSFFHLSFACAQLPMIYFLNHYLYDLNHTLYNVQSCGTNSHGILSGFNKTVLRTLPRSGNLIVVESVLMAVFLAMLLVLGLCGAAYRPTEEIDLRSVGWGNIFQLPFKHVRDYRLRHLVPFFIYSGFEVLFACTGIALGYGVCSVGLERLAYLLVAYSLGASAASLLGLLGLWLPRPVPLVAGAGVHLLLTFILFFWAPVPRVLQHSWILYVAAALWGVGSALNKTGLSTLLGILYEDKERQDFIFTIYHWWQAVAIFTVYLGSSLHMKAKLAVLLVTLVAAAVSYLRMEQKLRRGVAPRQPRIPRPQHKVRGYRYLEEDNSDESDAEGEHGDGAEEEAPPAGPRPGPEPAGLGRRPCPYEQAQGGDGPEEQ

SEQ ID NO: 69302 - protein, 307 aa, Homo sapiens
MGGLTASDVHPTLGVQLFSAGIAACLADVITFPLDTAKVRLQVQGECPTSSVIRYKGVLGTITAVVKTEGRMKLYSGLPAGLQRQISSASLRIGLYDTVQEFLTAGKETAPSLGSKILAGLTTGGVAVFIGQPTEVVKVRLQAQSHLHGIKPRYTGTYNAYRIIATTEGLTGLWKGTTPNLMRSVIINCTELVTYDLMKEAFVKNNILADDVPCHLVSALIAGFCATAMSSPVDVVKTRFINSPPGQYKSVPNCAMKVFTNEGPTAFFKGLVPSFLRLGSWNVIMFVCFEQLKRELSKSRQTMDCAT

SEQ ID NO: 69303 - protein, 309 aa, Homo sapiens
MVGFKATDVPPTATVKFLGAGTAACIADLITFPLDTAKVRLQIQGESQGPVRATASAQYRGVMGTILTMVRTEGPRSLYNGLVAGLQRQMSFASVRIGLYDSVKQFYTKGSEHASIGSRLLAGSTTGALAVAVAQPTDVVKVRFQAQARAGGGRRYQSTVNAYKTIAREEGFRGLWKGTSPNVARNAIVNCAELVTYDLIKDALLKANLMTDDLPCHFTSAFGAGFCTTVIASPVDVVKTRYMNSALGQYSSAGHCALTMLQKEGPRAFYKGFMPSFLRLGSWNVVMFVTYEQLKRALMAACTSREAPF

SEQ ID NO: 69304 - protein, 33 aa, Homo sapiens
MVGFKATDVPPTATVKFLGAGTAACIADLITFP

SEQ ID NO: 69305 - protein, 312 aa, Homo sapiens
MVGLKPSDVPPTMAVKFLGAGTAACFADLVTFPLDTAKVRLQIQGENQAVQTARLVQYRGVLGTILTMVRTEGPCSPYNGLVAGLQRQMSFASIRIGLYDSVKQVYTPKGADNSSLTTRILAGCTTGAMAVTCAQPTDVVKVRFQASIHLGPSRSDRKYSGTMDAYRTIAREEGVRGLWKGTLPNIMRNAIVNCAEVVTYDILKEKLLDYHLLTDNFPCHFVSAFGAGFCATVVASPVDVVKTRYMNSPPGQYFSPLDCMIKMVAQEGPTAFYKGFTPSFLRLGSWNVVMFVTYEQLKRALMKVQMLRESPF

SEQ ID NO: 69306 - protein, 210 aa, Homo sapiens
MVGLKPSDVPPTMAVKFLGAGTAACFADLVTFPLDTAKVRLQIQGENQAVQTARLVQYRGVLGTILTMVRTEGPCSPYNGLVAGLQRQMSFASIRIGLYDSVKQVYTPKGADNNFPCHFVSAFGAGFCATVVASPVDVVKTRYMNSPPGQYFSPLDCMIKMVAQEGPTAFYKGFTPSFLRLGSWNVVMFVTYEQLKRALMKVQMLRESPF

SEQ ID NO: 69307 - protein, 275 aa, Homo sapiens
MVGLKPSDVPPTMAVKFLGAGTAACFADLVTFPLDTAKVRLQIQGENQAVQTARLVQYRGVLGTILTMVRTEGPCSPYNGLVAGLQRQMSFASIRIGLYDSVKQVYTPKGADNSSLTTRILAGCTTGAMAVTCAQPTDVVKVRFQASIHLGPSRSDRKYSGTMDAYRTIAREEGVRGLWKGTLPNIMRNAIVNCAEVVTYDILKEKLLDYHLLTDNFPCHFVSAFGAGFCATVVASPVDVVKTRYMNSPPGQYFSPLDCMIKMVAQEGPTAFYKG

SEQ ID NO: 69308 - protein, 96 aa, Homo sapiens
MVGLKPSDVPPTMAVKFLGAGTAACFADLVTFPLDTAKVRLQIQGENQAVQTARLVQYRGVLGTILTMVRTEGPCSPYNGLVAGLQRQMSFASIRI

SEQ ID NO: 69309 - protein, 341 aa, Homo sapiens
MLLRPRRPPPLAPPAPPSPASPDPEPRTPGDAPGTPPRRPASPSALGELGLPVSPGSAQRTPWSARETELLLGTLLQPAVWRALLLDRRQALPTYRRVSAALAQQQVRRTPAQCRRRYKFLKDKFREAHGQPPGPFDEQIRKLMGLLGDNGRKRPRRRSPGSGRPQRARRPVPNAHAPAPSEPDATPLPTARDRDADPTWTLRFSPSPPKSADASPAPGSPPAPAPTALATCIPEDRAPVRGPGSPPPPPAREDPDSPPGRPEDCAPPPAAPPSLNTALLQTLGHLGDIANILGPLRDQLLTLNQHVEQLRGAFDQTVSLAVGFILGSAAAERGVLRDPCQ

SEQ ID NO: 69310 - protein, 1118 aa, Homo sapiens
MSVEAYGPSSQTLTFLDTEEAELLGADTQGSEFEFTDFTLPSQTQTPPGGPGGPGGGGAGGPGGAGAGAAAGQLDAQVGPEGILQNGAVDDSVAKTSQLLAELNFEEDEEDTYYTKDLPIHACSYCGIHDPACVVYCNTSKKWFCNGRGNTSGSHIVNHLVRAKCKEVTLHKDGPLGETVLECYNCGCRNVFLLGFIPAKADSVVVLLCRQPCASQSSLKDINWDSSQWQPLIQDRCFLSWLVKIPSEQEQLRARQITAQQINKLEELWKENPSATLEDLEKPGVDEEPQHVLLRYEDAYQYQNIFGPLVKLEADYDKKLKESQTQDNITVRWDLGLNKKRIAYFTLPKTDSDMRLMQGDEICLRYKGDLAPLWKGIGHVIKVPDNYGDEIAIELRSSVGAPVEVTHNFQVDFVWKSTSFDRMQSALKTFAVDETSVSGYIYHKLLGHEVEDVIIKCQLPKRFTAQGLPDLNHSQVYAVKTVLQRPLSLIQGPPGTGKTVTSATIVYHLARQGNGPVLVCAPSNIAVDQLTEKIHQTGLKVVRLCAKSREAIDSPVSFLALHNQIRNMDSMPELQKLQQLKDETGELSSADEKRYRALKRTAERELLMNADVICCTCVGAGDPRLAKMQFRSILIDESTQATEPECMVPVVLGAKQLILVGDHCQLGPVVMCKKAAKAGLSQSLFERLVVLGIRPIRLQVQYRMHPALSAFPSNIFYEGSLQNGVTAADRVKKGFDFQWPQPDKPMFFYVTQGQEEIASSGTSYLNRTEAANVEKITTKLLKAGAKPDQIGIITPYEGQRSYLVQYMQFSGSLHTKLYQEVEIASVDAFQGREKDFIILSCVRANEHQGIGFLNDPRRLNVALTRARYGVIIVGNPKALSKQPLWNHLLNYYKEQKVLVEGPLNNLRESLMQFSKPRKLVNTINPGARFMTTAMYDAREAIIPGSVYDRSSQGRPSSMYFQTHDQIGMISAGPSHVAAMNIPIPFNLVMPPMPPPGYFGQANGPAAGRGTPKGKTGRGGRQKNRFGLPGPSQTNLPNSQASQDVASQPFSQGALTQGYISMSQPSQMSQPGLSQPELSQDSYLGDEFKSQIDVALSQDSTYQGERAYQHGGVTGLSQY

SEQ ID NO: 69311 - protein, 579 aa, Homo sapiens
MPAERKKPASMEEKDSLPNNKEKDCSERRTVSSKERPKDDIKLTAKKEVSKAPEESKKKEEEEKKKHQEEERKKQEEQAKRQQEEEAAAQMKEKEESIQLHQEAWERHHLRKELRSKNQNAPDSRPEENFFSRLDSSLKKNTAFVKKLKTITEQQRDSLSHDFNGLNLSKYIAEAVASIVEAKLKISDVNCAVHLCSLFHQRYADFAPSLLQVWKKHFEARKEEKTPNITKLRTDLRFIAELTIVGIFTDKEGLSLIYEQLKNIINADRESHTHVSVVISFCRHCGDDIAGLVPRKVKSAAEKFNLSFPPSEIISPEKQQPFQNLLKEYFTSLTKHLKRDHRELQNTERQNRRILHSKGELSEDRHKQYEEFAMSYQKLLANSQSLADLLDENMPDLPQDKPTPEEHGPGIDIFTPGKPGEYDLEGGIWEDEDARNFYENLIDLKAFVPAILFKDNEKSCQNKESNKDDTKEAKESKENKEVSSPDDLELELENLEINDDTLELEGGDEAEDLTKKLLDEQEQEDEEASTGSHLKLIVDAFLQQLPNCVNRDLIDKAEKAFCNGNLARVNLLLRMAVKK

SEQ ID NO: 69312 - protein, 1272 aa, Homo sapiens
MPAERKKPASMEEKDSLPNNKEKDCSERRTVSSKERPKDDIKLTAKKEVSKAPEDKKKRLEDDKRKKEDKERKKKDEEKVKAEEESKKKEEEEKKKHQEEERKKQEEQAKRQQEEEAAAQMKEKEESIQLHQEAWERHHLRKELRSKNQNAPDSRPEENFFSRLDSSLKKNTAFVKKLKTITEQQRDSLSHDFNGLNLSKYIAEAVASIVEAKLKISDVNCAVHLCSLFHQRYADFAPSLLQVWKKHFEARKEEKTPNITKLRTDLRFIAELTIVGIFTDKEGLSLIYEQLKNIINADRESHTHVSVVISFCRHCGDDIAGLVPRKVKSAAEKFNLSFPPSEIISPEKQQPFQNLLKEYFTSLTKHLKRDHRELQNTERQNRRILHSKGELSEDRHKQYEEFAMSYQKLLANSQSLADLLDENMPDLPQDKPTPEEHGPGIDIFTPGKPGEYDLEGGIWEDEDARNFYENLIDLKAFVPAILFKDNEKSCQNKESNKDDTKEAKESKENKEVSSPDDLELELENLEINDDTLELEGGDEAEDLTKKLLDEQEQEDEEASTGSHLKLIVDAFLQQLPNCVNRDLIDKAAMDFCMNMNTKANRKKLVRALFIVPRQRLDLLPFYARLVATLHPCMSDVAEDLCSMLRGDFRFHVRKKDQINIETKNKTVRFIGELTKFKMFTKNDTLHCLKMLLSDFSHHHIEMACTLLETCGRFLFRSPESHLRTSVLLEQMMRKKQAMHLDARYVTMVENAYYYCNPPPAEKTVKKKRPPLQEYVRKLLYKDLSKVTTEKVLRQMRKLPWQDQEVKDYVICCMINIWNVKYNSIHCVANLLAGLVLYQEDVGIHVVDGVLEDIRLGMEVNQPKFNQRRISSAKFLGELYNYRMVESAVIFRTLYSFTSFGVNPDGSPSSLDPPEHLFRIRLVCTILDTCGQYFDRGSSKRKLDCFLVYFQRYVWWKKSLEVWTKDHPFPIDIDYMISDTLELLRPKIKLCNSLEESIRQVQDLEREFLIKLGLVNDKDSKDSMTEGENLEEDEEEEEGGAETEEQSGNESEVNEPEEEEGSDNDDDEGEEEEEENTDYLTDSNKENETDEENTEVMIKGGGLKHVPCVEDEDFIQALDKMMLENLQQRSGESVKVHQLDVAIPLHLKSQLRKGPPLGGGEGEAESADTMPFVMLTRKGNKQQFKILNVPMSSQLAANHWNQQQAEQEERMRMKKLTLDINERQEQEDYQEMLQSLAQRPAPANTNRERRPRYQHPKGAPNADLIFKTGGRRR

SEQ ID NO: 69313 - protein, 1272 aa, Homo sapiens; identical to SEQ ID NO: 69312

SEQ ID NO: 69314 - protein, 124 aa, Homo sapiens
MIKGGGLKHVPCVEDEDFIQALDKMMLENLQQRSGESVKVHQLDVAIPLHLKSQLRKGPPLGGGEGEAESADTMPFVMLTRKGNKQQFKILNVPMSSQLAANHWNQQQAERREDENEKAHTRYQ

SEQ ID NO: 69315 - protein, 579 aa, Homo sapiens; identical to SEQ ID NO: 69311

SEQ ID NO: 69316 - protein, 1272 aa, Homo sapiens; identical to SEQ ID NO: 69312

SEQ ID NO: 69317 - protein, 443 aa, Homo sapiens
MRSEKEGAGGLRAAVAARGPSGREKLSALEVQFHRDSQQQEAETPPTSSSGCGGGAGKPREEKRTALSKVVIRRLPPGLTKEQLEEQLRPLPAHDYFEFFAADLSLYPHLYSRAYINFRNPDDILLFRDRFDGYIFLDSKDPEYKKFLETYCVEEEKTSANPETLLGEMEAKTRELIARRTTPLLEYIKNRKLEKQRIREEKREERRRRELEKKRLREEEKRRRREEERCKKKETDKQKKIAEKEVRIKLLKKPEKGEEPTTEKPKERGEEIDTGGGKQESCAPGAVVKARPMEGSLEEPQETSHSGSDKEHRDVERSQEQESEAQRYHVDDGRRHRAHHEPERLSRRSEDEQRWGKGPGQDRGKKGSQDSGAPGEAMERLGRAQRCDDSPAPRKERLANKDRPALQLYDPGARFRARECGGNRRICKAEGSGTGPEKREEAE

SEQ ID NO: 69318 - protein, 476 aa, Homo sapiens
MRSEKEGAGGLRAAVAARGPSGREKLSALEVQFHRDSQQQEAETPPTSSSGCGGGAGKPREEKRTALSKVVIRRLPPGLTKEQLEEQLRPLPAHDYFEFFAADLSLYPHLYSRAYINFRNPDDILLFRDRFDGYIFLDSKGLEYPAVVEFAPFQKIAKKKLRKKDAKTGSIEDDPEYKKFLETYCVEEEKTSANPETLLGEMEAKTRELIARRTTPLLEYIKNRKLEKQRIREEKREERRRRELEKKRLREEEKRRRREEERCKKKETDKQKKIAEKEVRIKLLKKPEKGEEPTTEKPKERGEEIDTGGGKQESCAPGAVVKARPMEGSLEEPQETSHSGSDKEHRDVERSQEQESEAQRYHVDDGRRHRAHHEPERLSRRSEDEQRWGKGPGQDRGKKGSQDSGAPGEAMERLGRAQRCDDSPAPRKERLANKDRPALQLYDPGARFRARECGGNRRICKAEGSGTGPEKREEAE

SEQ ID NO: 69319 - protein, 208 aa, Homo sapiens
MEAKTRELIARRTTPLLEYIKNRKLEKQRIREEKREERRRRELEKKRLREEEKRRRREEERCKKKETDKQKKIAEKEVRIKLLKKPEKGEEPTTEKPKERGEEIDTGGGKQESCAPGAVVKARPMEGSLEEPQETSHSGSDKEHRDVERSQEQESEAPRKERLANKDRPALQLYDPGARFRARECGGNRRICKAEGSGTGPEKREEAE

SEQ ID NO: 69320 - protein, 483 aa, Homo sapiens
MKEEKEHRPKEKRVTLLTPAGATGSGGGTSGDSSKGEDKQDRNKEKKEALSKVVIRRLPPTLTKEQLQEHLQPMPEHDYFEFFSNDTSLYPHMYARAYINFKNQEDIILFRDRFDGYVFLDNKGQEYPAIVEFAPFQKAAKKKTKKRDTKVGTIDDDPEYRKFLESYATDNEKMTSTPETLLEEIEAKNRELIAKKTTPLLSFLKNKQRMREEKREERRRREIERKRQREEERRKWKEEEKRKRKDIEKLKKIDRIPERDKLKDEPKIKVHRFLLQAVNQKNLLKKPEKGDEKELDKREKAKKLDKENLSDERASGQSCTLPKRSDSELKDEKPKRPEDESGRDYREREREYERDQERILRERERLKRQEEERRRQKERYEKEKTFKRKEEEMKKEKDTLRDKGKKAESTESIGSSEKTEKKEEVVKRDRIRNKDRPAMQLYQPGARSRNRLCPPDDSTKSGDSAAERKQESGISHRKEGGEE

SEQ ID NO: 69321 - protein, 470 aa, Homo sapiens
MKEEKEHRPKEKRVTLLTPAGATGSGGGTSGDSSKGEDKQDRNKEKKEALSKVVIRRLPPTLTKEQLQEHLQPMPEHDYFEFFSNDTSLYPHMYARAYINFKNQEDIILFRDRFDGYVFLDNKGQEYPAIVEFAPFQKAAKKKTKKRDTKVGTIDDDPEYRKFLESYATDNEKMTSTPETLLEEIEAKNRELIAKKTTPLLSFLKNKQRMREEKREERRRREIERKRQREEERRKWKEEEKRKRKDIEKLKKIDRIPERDKLKDEPKIKLLKKPEKGDEKELDKREKAKKLDKENLSDERASGQSCTLPKRSDSELKDEKPKRPEDESGRDYREREREYERDQERILRERERLKRQEEERRRQKERYEKEKTFKRKEEEMKKEKDTLRDKGKKAESTESIGSSEKTEKKEEVVKRDRIRNKDRPAMQLYQPGARSRNRLCPPDDSTKSGDSAAERKQESGISHRKEGGEE

SEQ ID NO: 69322 - protein, 218 aa, Homo sapiens [sequence omitted]

SEQ ID NO: 69323 - protein, 888 aa, Homo sapiens
MEGDDCEFRYGDGTNEAQDNDFPTVERSRLQEMLSLLGLETYQVQKLSLQDSLQISFDSMKNWAPQVPKDLPWNFLRKLQALNADARNTTMVLDVLPDARPVEKESQMEEEIIYWDPADDLAADIYSFSELPTPDTPVNPLDLLCALLLSSDSFLQQEIALKMALCQFALPLVLPDSENHYHTFLLWAMRGIVRTWWSQPPRGMGSFREDSVVLSRAPAFAFVRMDVSSNSKSQLLNAVLSPGHRQWDCFWHRDLNLGTNAREISDGLVEISWFFPSGREDLDIFPEPVAFLNLRGDIGSHWLQFKLLTEISSAVFILTDNISKKEYKLLYSMKESTTKYYFILSPYRGKRNTNLRFLNKLIPVLKIDHSHVLVKVSSTDSDSFVKRIRAIVGNVLRAPCRRVSVEDMAHAARKLGLKVDEDCEECQKAKDRMERITRKIKDSDAYRRDELRLQGDPWRKAAQVEKEFCQLQWAVDPPEKHRAELRRRLLELRMQQNGHDPSSGVQEFISGISSPSLSEKQYFLRWMEWGLARVAQPRLRQPPETLLTLRPKHGGTTDVGEPLWPEPLGVEHFLREMGQFYEAESCLVEAGRLPAGQRRFAHFPGLASELLLTGLPLELIDGSTLSMPVRWVTGLLKELHVRLERRSRLVVLSTVGVPGTGKSTLLNTMFGLRFATGKSCGPRGAFMQLITVAEGFSQDLGCDHILVIDSGGLIGGALTSAGDRFELEASLATLLMGLSNVTVISLAETKDIPAAILHAFLRLEKTGHMPNYQFVYQNLHDVSVPGPRPRDKRQLLDPPGDLSRAAAQMEKQGDGFRALAGLAFCDPEKQHIWHIPGLWHGAPPMAAVSLAYSEAIFELKRCLLENIRNGLSNQNKNIQQLIELVRRL

SEQ ID NO: 69324 - protein, 888 aa, Homo sapiens; identical to SEQ ID NO: 69323

SEQ ID NO: 69325 - protein, 922 aa, Homo sapiens
MASPGHSDLGEVAPEIKASERRTAVAIADLEWREMEGDDCEFRYGDGTNEAQDNDFPTVERSRLQEMLSLLGLETYQVQKLSLQDSLQISFDSMKNWAPQVPKDLPWNFLRKLQALNADARNTTMVLDVLPDARPVEKESQMEEEIIYWDPADDLAADIYSFSELPTPDTPVNPLDLLCALLLSSDSFLQQEIALKMALCQFALPLVLPDSENHYHTFLLWAMRGIVRTWWSQPPRGMGSFREDSVVLSRAPAFAFVRMDVSSNSKSQLLNAVLSPGHRQWDCFWHRDLNLGTNAREISDGLVEISWFFPSGREDLDIFPEPVAFLNLRGDIGSHWLQFKLLTEISSAVFILTDNISKKEYKLLYSMKESTTKYYFILSPYRGKRNTNLRFLNKLIPVLKIDHSHVLVKVSSTDSDSFVKRIRAIVGNVLRAPCRRVSVEDMAHAARKLGLKVDEDCEECQKAKDRMERITRKIKDSDAYRRDELRLQGDPWRKAAQVEKEFCQLQWAVDPPEKHRAELRRRLLELRMQQNGHDPSSGVQEFISGISSPSLSEKQYFLRWMEWGLARVAQPRLRQPPETLLTLRPKHGGTTDVGEPLWPEPLGVEHFLREMGQFYEAESCLVEAGRLPAGQRRFAHFPGLASELLLTGLPLELIDGSTLSMPVRWVTGLLKELHVRLERRSRLVVLSTVGVPGTGKSTLLNTMFGLRFATGKSCGPRGAFMQLITVAEGFSQDLGCDHILVIDSGGLIGGALTSAGDRFELEASLATLLMGLSNVTVISLAETKDIPAAILHAFLRLEKTGHMPNYQFVYQNLHDVSVPGPRPRDKRQLLDPPGDLSRAAAQMEKQGDGFRALAGLAFCDPEKQHIWHIPGLWHGAPPMAAVSLAYSEAIFELKRCLLENIRNGLSNQNKNIQQLIELVRRL

SEQ ID NO: 69326 - protein, 163 aa, Homo sapiens
MEGDDCEFRYGDGTNEAQDNDFPTVERSRLQEMLSLLGLETYQVQKLSLQDSLQISFDSMKNWAPQVPKDLPWNFLRKLQALNADARNTTMVLDVLPDARPVEKESQMEEEIIYWDPADDLAADIYSFSELPTPDTPVNPLDLLCALLLSSDSFLQQEIALKM

SEQ ID NO: 69327 - protein, 888 aa, Homo sapiens; identical to SEQ ID NO: 69323

SEQ ID NO: 69328 - protein, 888 aa, Homo sapiens; identical to SEQ ID NO: 69323

SEQ ID NO: 69329 - protein, 931 aa, Homo sapiens
MASPGIEVELLGKGHSDLGEVAPEIKASERRTAVAIADLEWREMEGDDCEFRYGDGTNEAQDNDFPTVERSRLQEMLSLLGLETYQVQKLSLQDSLQISFDSMKNWAPQVPKDLPWNFLRKLQALNADARNTTMVLDVLPDARPVEKESQMEEEIIYWDPADDLAADIYSFSELPTPDTPVNPLDLLCALLLSSDSFLQQEIALKMALCQFALPLVLPDSENHYHTFLLWAMRGIVRTWWSQPPRGMGSFREDSVVLSRAPAFAFVRMDVSSNSKSQLLNAVLSPGHRQWDCFWHRDLNLGTNAREISDGLVEISWFFPSGREDLDIFPEPVAFLNLRGDIGSHWLQFKLLTEISSAVFILTDNISKKEYKLLYSMKESTTKYYFILSPYRGKRNTNLRFLNKLIPVLKIDHSHVLVKVSSTDSDSFVKRIRAIVGNVLRAPCRRVSVEDMAHAARKLGLKVDEDCEECQKAKDRMERITRKIKDSDAYRRDELRLQGDPWRKAAQVEKEFCQLQWAVDPPEKHRAELRRRLLELRMQQNGHDPSSGVQEFISGISSPSLSEKQYFLRWMEWGLARVAQPRLRQPPETLLTLRPKHGGTTDVGEPLWPEPLGVEHFLREMGQFYEAESCLVEAGRLPAGQRRFAHFPGLASELLLTGLPLELIDGSTLSMPVRWVTGLLKELHVRLERRSRLVVLSTVGVPGTGKSTLLNTMFGLRFATGKSCGPRGAFMQLITVAEGFSQDLGCDHILVIDSGGLIGGALTSAGDRFELEASLATLLMGLSNVTVISLAETKDIPAAILHAFLRLEKTGHMPNYQFVYQNLHDVSVPGPRPRDKRQLLDPPGDLSRAAAQMEKQGDGFRALAGLAFCDPEKQHIWHIPGLWHGAPPMAAVSLAYSEAIFELKRCLLENIRNGLSNQNKNIQQLIELVRRL

SEQ ID NO: 69330 - protein, 122 aa, Homo sapiens
MEGDDCEFRYGDGTNEAQDNDFPTVERSRLQEMLSLLGLETYQVQKLSLQDSLQISFDSMKNWAPQVPKDLPWNFLRKLQALNADARNTTMVLDVLPDARPVEKESQMEEEIIYWDPADDLA

SEQ ID NO: 69331 - protein, 540 aa, Homo sapiens
MAWVLKMDEVIESGLVHDFDASLSGIGQELGAGAYSMSDVLALPIFKQEDSSLPLDGETEHPPFQYVMCAATSPAVKLHDETLTYLNQGQSYEIRMLDNRKMGDMPEINGKLVKSIIRVVFHDRRLQYTEHQQLEGWKWNRPGDRLLDLDIPMSVGIIDTRTNPSQLNAVEFLWDPAKRTSAFIQVHCISTEFTPRKHGGEKGVPFRIQVDTFKQNENGEYTDHLHSASCQIKVFKPKGADRKQKTDREKMEKRTAHEKEKYQPSYDTTILTEMRLEPIIEDAVEHEQKKSSKRTLPADYGDSLAKRGSCSPWPDAPTAYVNNSPSPAPTFTSPQQSTCSVPDSNSSSPNHQGDGASQTSGEQIQPSATIQETQQWLLKNRFSSYTRLFSNFSGADLLKLTKEDLVQICGAADGIRLYNSLKSRSVRPRLTIYVCREQPSSTVLQGQQQAASSASENGSGAPYVYHAIYLEEMIASEVARKLALVFNIPLHQINQVYRQGPTGIHILVSDQMVQNFQDESCFLFSTVKAESSDGIHIILK

SEQ ID NO: 69332 - protein, 540 aa, Homo sapiens; identical to SEQ ID NO: 69331

SEQ ID NO: 69333 - protein, 504 aa, Homo sapiens
MAWVLKMDEVIESGLVHDFDASLSGIGQELGAGAYSMSDVLALPIFKQEDSSLPLDGETEHPPFQYVMCAATSPAVKLHDETLTYLNQGQSYEIRMLDNRKMGDMPEINGKLVKSIIRVVFHDRRLQYTEHQQLEGWKWNRPGDRLLDLDIPMSVGIIDTRTNPSQLNAVEFLWDPAKRTSAFIQVHCISTEFTPRKHGGEKGVPFRIQVDTFKQNENGEYTDHLHSASCQIKVFKPKGADRKQKTDREKMEKRTAHEKEKYQPSYDTTILTECSPWPDAPTAYVNNSPSPAPTFTSPQQSTCSVPDSNSSSPNHQGDGASQTSGEQIQPSATIQETQQWLLKNRFSSYTRLFSNFSGADLLKLTKEDLVQICGAADGIRLYNSLKSRSVRPRLTIYVCREQPSSTVLQGQQQAASSASENGSGAPYVYHAIYLEEMIASEVARKLALVFNIPLHQINQVYRQGPTGIHILVSDQMVQNFQDESCFLFSTVKAESSDGIHIILK

SEQ ID NO: 69334 - protein, 148 aa, Homo sapiens
MAWVLKMDEVIESGLVHDFDASLSGIGQELGAGAYSMSDVLALPIFKQEDSSLPLDGETEHPPFQYVMCAATSPAVKLHDETLTYLNQGQSYEIRMLDNRKMGDMPEINGKLVKSIIRVVFHDRRLQYTEHQQLEGWKWNRPGDRLLD

SEQ ID NO: 69335 - protein, 764 aa, Homo sapiens
MNGEADCPTDLEMAAPKGQDRWSQEDMLTLLECMKNNLPSNDSSKFKTTESHMDWEKVAFKDFSGDMCKLKWVEISNEVRKFRTLTELILDAQEHVKNPYKGKKLKKHPDFPKKPLTPYFRFFMEKRAKYAKLHPEMSNLDLTKILSKKYKELPEKKKMKYIQDFQREKQEFERNLARFREDHPDLIQNAKKSDIPEKPKTPQQLWYTHEKKVYLKVRPDATTKEVKDSLGKQWSQLSDKKRLKWIHKALEQRKEYEEIMRDYIQKHPELNISEEGITKSTLTKAERQLKDKFDGRPTKPPPNSYSLYCAELMANMKDVPSTERMVLCSQQWKLLSQKEKDAYHKKCDQKKKDYEVELLRFLESLPEEEQQRVLGEEKMLNINKKQATSPASKKPAQEGGKGGSEKPKRPVSAMFIFSEEKRRQLQEERPELSESELTRLLARMWNDLSEKKKAKYKAREAALKAQSERKPGGEREERGKLPESPKRAEEIWQQSVIGDYLARFKNDRVKALKAMEMTWNNMEKKEKLMWIKKAAEDQKRYERELSEMRAPPAATNSSKKMKFQGEPKKPPMNGYQKFSQELLSNGELNHLPLKERMVEIGSRWQRISQSQKEHYKKLAEEQQKQYKVHLDLWVKSLSPQDRAAYKEYISNKRKSMTKLRGPNPKSSRTTLQSKSESEEDDEEDEDDEDEDEEEEDDENGDSSEDGGDSSESSSEDESEDGDENEEDDEDEDDDEDDDEDEDNESEGSSSSSSSSGDSSDSDSN

SEQ ID NO: 69336 - protein, 727 aa, Homo sapiens
MNGEADCPTDLEMAAPKGQDRWSQEDMLTLLECMKNNLPSNDSSKFKTTESHMDWEKVAFKDFSGDMCKLKWVEISNEVRKFRTLTELILDAQEHVKNPYKGKKLKKHPDFPKKPLTPYFRFFMEKRAKYAKLHPEMSNLDLTKILSKKYKELPEKKKMKYIQDFQREKQEFERNLARFREDHPDLIQNAKKSDIPEKPKTPQQLWYTHEKKVYLKVRPDEIMRDYIQKHPELNISEEGITKSTLTKAERQLKDKFDGRPTKPPPNSYSLYCAELMANMKDVPSTERMVLCSQQWKLLSQKEKDAYHKKCDQKKKDYEVELLRFLESLPEEEQQRVLGEEKMLNINKKQATSPASKKPAQEGGKGGSEKPKRPVSAMFIFSEEKRRQLQEERPELSESELTRLLARMWNDLSEKKKAKYKAREAALKAQSERKPGGEREERGKLPESPKRAEEIWQQSVIGDYLARFKNDRVKALKAMEMTWNNMEKKEKLMWIKKAAEDQKRYERELSEMRAPPAATNSSKKMKFQGEPKKPPMNGYQKFSQELLSNGELNHLPLKERMVEIGSRWQRISQSQKEHYKKLAEEQQKQYKVHLDLWVKSLSPQDRAAYKEYISNKRKSMTKLRGPNPKSSRTTLQSKSESEEDDEEDEDDEDEDEEEEDDENGDSSEDGGDSSESSSEDESEDGDENEEDDEDEDDDEDDDEDEDNESEGSSSSSSSSGDSSDSDSN

SEQ ID NO: 69337 - protein, 727 aa, Homo sapiens; identical to SEQ ID NO: 69336

SEQ ID NO: 69338 - protein, 764 aa, Homo sapiens; identical to SEQ ID NO: 69335

SEQ ID NO: 69339 - protein, 727 aa, Homo sapiens; identical to SEQ ID NO: 69336

SEQ ID NO: 69340 - protein, 764 aa, Homo sapiens; identical to SEQ ID NO: 69335

SEQ ID NO: 69341 - protein, 727 aa, Homo sapiens; identical to SEQ ID NO: 69336

SEQ ID NO: 69342 - protein, 282 aa, Homo sapiens
MKGQQKTAETEEGTVQIQEGAVATGEDPTSVAIASIQSAATFPDPNVKYVFRTENGGQVMYRVIQVSEGQLDGQTEGTGAISGYPATQSMTQAVIQGAFTSDDAVDTEGTAAETHYTYFPSTAVGDGAGGQFFVMMSPQEVLQGGSQRSIAPRTHPYSPKSEAPRTTRDEKRRAQHNEVERRRRDKINNWIVQLSKIIPDCSMESTKSGQSKGGILSKACDYIQELRQSNHRLSEELQGLDQLQLDNDVLRQQVEDLKNKNLLLRAQLRHHGLEVVIKNDSN

SEQ ID NO: 69343 - protein, 310 aa, Homo sapiens
MKGQQKTAETEEGTVQIQEGAVATGEDPTSVAIASIQSAATFPDPNVKYVFRTENGGQVMYRVIQVSEGQLDGQTEGTGAISGYPATQSMTQAVIQGAFTSDDAVDTEGTAAETHYTYFPSTAVGDGAGGTTSGSTAAVVTTQGSEALLGQATPPGTGQFFVMMSPQEVLQGGSQRSIAPRTHPYSPKSEAPRTTRDEKRRAQHNEVERRRRDKINNWIVQLSKIIPDCSMESTKSGQSKGGILSKACDYIQELRQSNHRLSEELQGLDQLQLDNDVLRQQVEDLKNKNLLLRAQLRHHGLEVVIKNDSN

SEQ ID NO: 69344 - protein, 310 aa, Homo sapiens; identical to SEQ ID NO: 69343

SEQ ID NO: 69345 - protein, 251 aa, Homo sapiens
MYRVIQVSEGQLDGQTEGTGAISGYPATQSMTQAVIQGAFTSDDAVDTEGTAAETHYTYFPSTAVGDGAGGTTSGSTAAVVTTQGSEALLGQATPPGTGQFFVMMSPQEVLQGGSQRSIAPRTHPYSPKSEAPRTTRDEKRRAQHNEVERRRRDKINNWIVQLSKIIPDCSMESTKSGQSKGGILSKACDYIQELRQSNHRLSEELQGLDQLQLDNDVLRQQVEDLKNKNLLLRAQLRHHGLEVVIKNDSN

SEQ ID NO: 69346 - protein, 384 aa, Homo sapiens
MAGAEWKSLEECLEKHLPLPDLQEVKRVLYGKELRKLDLPREAFEAASREDFELQGYAFEAAEEQLRRPRIVHVGLVQNRIPLPANAPVAEQVSALHRRIKAIVEVAAMCGVNIICFQEAWTMPFAFCTREKLPWTEFAESAEDGPTTRFCQKLAKNHDMVVVSPILERDSEHGDVLWNTAVVISNSGAVLGKTRKNHIPRVGDFNESTYYMEGNLGHPVFQTQFGRIAVNICYGRHHPLNWLMYSINGAEIIFNPSATIGALSESLWPIEARNAAIANHCFTCAINRVGTEHFPNEFTSGDGKKAHQDFGYFYGSSYVAAPDSSRTPGLSRSRDGLLVAKLDLNLCQQVNDVWNFKMTGRYEMYARELAEAVKSNYSPTIVKE

SEQ ID NO: 69347 - protein, 316 aa, Homo sapiens
MLGEAPAAPRLAGSEARSLWQGTQVSALHRRIKAIVEVAAMCGVNIICFQEAWTMPFAFCTREKLPWTEFAESAEDGPTTRFCQKLAKNHDMVVVSPILERDSEHGDVLWNTAVVISNSGAVLGKTRKNHIPRVGDFNESTYYMEGNLGHPVFQTQFGRIAVNICYGRHHPLNWLMYSINGAEIIFNPSATIGALSESLWPIEARNAAIANHCFTCAINRVGTEHFPNEFTSGDGKKAHQDFGYFYGSSYVAAPDSSRTPGLSRSRDGLLVAKLDLNLCQQVNDVWNFKMTGRYEMYARELAEAVKSNYSPTIVKE

SEQ ID NO: 69348 - protein, 186 aa, Homo sapiens
MAGAEWKSLEECLEKHLPLPDLQEVKRVLYGKELRKLDLPREAFEAASREDFELQGYAFEAAEEQLRRPRIVHVGLVQNRIPLPANAPVAEQVSALHRRIKAIVEVAAMCGVNIICFQEAWILRPHHQEPRPPCCYAPSCCLIPSVFPHRSESIRSSPSLYHHLVQAPGSSPLAFVIPSSWSPVPS

SEQ ID NO: 69349 - protein, 480 aa, Homo sapiens
MAVARAALGPLVTGLYDVQAFKFGDFVLKSGLSSPIYIDLRGIVSRPRLLSQVADILFQTAQNAGISFDTVCGVPYTALPLATVICSTNQIPMLIRRKETKDYGTKRLVEGTINPGETCLIIEDVVTSGSSVLETVEVLQKEGLKVTDAIVLLDREQGGKDKLQAHGIRLHSVCTLSKMLEILEQQKKVDAETVGRVKRFIQENVFVAANHNGSPLSIKEAPKELSFGARAELPRIHPVASKLLRLMQKKETNLCLSADVSLARELLQLADALGPSICMLKTHVDILNDFTLDVMKELITLAKCHEFLIFEDRKFADIGNTVKKQYEGGIFKIASWADLVNAHVVPGSGVVKGLQEVGLPLHRGCLLIAEMSSTGSLATGDYTRAAVRMAEEHSEFVVGFISGSRVSMKPEFLHLTPGVQLEAGGDNLGQQYNSPQEVIGKRGSDIIIVGRGIISAADRLEAAEMYRKAAWEAYLSRLGV

SEQ ID NO: 69350 - protein, 205 aa, Homo sapiens
MLEILEQQKKVDAETVGRVKRFIQENVFVAANHNGSPLSIKEAPKELSFGARAELPRIHPVASKLLRLMQKKETNLCLSADVSLARELLQLADALGPSICMLKTHVDILNDFTLDVMKELITLAKCHEFLIFEDRKFADIGNTVKKQYEGDNLGQQYNSPQEVIGKRGSDIIIVGRGIISAADRLEAAEMYRKAAWEAYLSRLGV

SEQ ID NO: 69351 - protein, 388 aa, Homo sapiens
MLIRRKETKDYGTKRLVEGTINPGETCLIIEDVVTSGSSVLETVEVLQKEGLKVTDAIVLLDREQGGKDKLQAHGIRLHSVCTLSKMLEILEQQKKVDAETVGRVKRFIQENVFVAANHNGSPLSIKEAPKELSFGARAELPRIHPVASKLLRLMQKKETNLCLSADVSLARELLQLADALGPSICMLKTHVDILNDFTLDVMKELITLAKCHEFLIFEDRKFADIGNTVKKQYEGGIFKIASWADLVNAHVVPGSGVVKGLQEVGLPLHRGCLLIAEMSSTGSLATGDYTRAAVRMAEEHSEFVVGFISGSRVSMKPEFLHLTPGVQLEAGGDNLGQQYNSPQEVIGKRGSDIIIVGRGIISAADRLEAAEMYRKAAWEAYLSRLGV

SEQ ID NO: 69352 - protein, 302 aa, Homo sapiens
MLEILEQQKKVDAETVGRVKRFIQENVFVAANHNGSPLSIKEAPKELSFGARAELPRIHPVASKLLRLMQKKETNLCLSADVSLARELLQLADALGPSICMLKTHVDILNDFTLDVMKELITLAKCHEFLIFEDRKFADIGNTVKKQYEGGIFKIASWADLVNAHVVPGSGVVKGLQEVGLPLHRGCLLIAEMSSTGSLATGDYTRAAVRMAEEHSEFVVGFISGSRVSMKPEFLHLTPGVQLEAGGDNLGQQYNSPQEVIGKRGSDIIIVGRGIISAADRLEAAEMYRKAAWEAYLSRLGV

SEQ ID NO: 69353 - protein, 310 aa, Homo sapiens
MAATGANAEKAESHNDCPVRLLNPNIAKMKEDILYHFNLTTSRHNFPALFGDVKFVCVGGSPSRMKAFIRCVGAELGLDCPGRDYPNICAGTDRYAMYKVGPVLSVSHGMGIPSISIMLHELIKLLYYARCSNVTIIRIGTSGGIGLEPGTVVITEQAVDTCFKAEFEQIVLGKRVIRKTDLNKKLVQELLLCSAELSEFTTVVGNTMCTLDFYEGQGRLDGALCSYTEKDKQAYLEAAYAAGVRNIEMESSVFAAMCSACGLQAAVVCVTLLNRLEGDQISSPRNVLSEYQQRPQRLVSYFIKKKLSKA

SEQ ID NO: 69354 - protein, 310 aa, Homo sapiens; identical to SEQ ID NO: 69353

SEQ ID NO: 69355 - protein, 310 aa, Homo sapiens; identical to SEQ ID NO: 69353

SEQ ID NO: 69356 - protein, 144 aa, Homo sapiens
MAATGANAEKAESHNDCPVRLLNPNIAKMKEDILYHFNLTTSRHNFPALFGDVKFVCVGGSPSRMKAFIRCVGAELGLDCPGRDYPNICAGTDRYAMYKVGPVLSVSHGMGIPSISIMLHELIKLLYYARCSNVTIIRIGTSGG

SEQ ID NO: 69357 - protein, 171 aa, Homo sapiens
MAATGANAEKAESHNDCPVRLLNPNIAKMKEDILYHFNLTTSRHNFPALFGDVKFVCVGGSPSRMKAFIRCVGAELGLDCPGRDYPNICAGTDRYAMYKVGPVLSVSHGMGIPSISIMLHELIKLLYYARCSNVTIIRIGTSGGIGILKHLRRKDTGKSKGGRERRSTKLR

SEQ ID NO: 69358 - protein, 173 aa, Homo sapiens
MQRKLKVTSLEPGTVVITEQAVDTCFKAEFEQIVLGKRVIRKTDLNKKLVQELLLCSAELSEFTTVVGNTMCTLDFYEGQGRLDGALCSYTEKDKQAYLEAAYAAGVRNIEMESSVFAAMCSACGLQAAVVCVTLLNRLEGDQISSPRNVLSEYQQRPQRLVSYFIKKKLSKA

SEQ ID NO: 69359 - protein, 29 aa, Homo sapiens
MAATGANAEKAESHNDCPVRLLNPNIAKM

SEQ ID NO: 69360 - protein, 146 aa, Homo sapiens
MAATGANAEKAESHNDCPVRLLNPNIAKMKEDILYHFNLTTSRHNFPALFGDVKFVCVGGSPSRMKAFIRCVGAELGLDCPGRDYPNICAGTDRYAMYKVGPVLSVSHGMGIPSISIMLHELIKLLYYARCSNVTIIRIGTSGGIG

SEQ ID NO: 69361 - protein, 201 aa, Homo sapiens
MASAGGEDCESPAPEADRPHQRPFLIGVSGGTASGKSTVCEKIMELLGQNEVEQRQRKVVILSQDRFYKVLTAEQKAKALKGQYNFDHPDAFDNDLMHRTLKNIVEGKTVEVPTYDFVTHSRLPETTVVYPADVVLFEGILVFYSQEIRDMFHLRLFVDTDSDVRLSRRDKEVCRCDHPARSGQYGCHQPDRAAHPGHSEW

SEQ ID NO: 69362 - protein, 268 aa, Homo sapiens
MASAGGEDCESPAPEADRPHQRPFLIGSTVCEKIMELLGQNEVEQRQRKVVILSQDRFYKVLTAEQKAKALKGQYNFDHPDAFDNDLMHRTLKNIVEGKTVEVPTYDFVTHSRLPETTVVYPADVVLFEGILVFYSQEIRDMFHLRLFVDTDSDVRLSRRVLRDVRRGRDLEQILTQYTTFVKPAFEEFCLPTKKYADVIIPRGVDNMVAINLIVQHIQDILNGDICKWHRGGSNGRSYKRTFSEPGDHPGMLTSGKRSHLESSSRPH

SEQ ID NO: 69363 - protein, 282 aa, Homo sapiens
MASAGGEDCESPAPEADRPHQRPFLIGDERFQAGIPLLCLQSTVCEKIMELLGQNEVEQRQRKVVILSQDRFYKVLTAEQKAKALKGQYNFDHPDAFDNDLMHRTLKNIVEGKTVEVPTYDFVTHSRLPETTVVYPADVVLFEGILVFYSQEIRDMFHLRLFVDTDSDVRLSRRVLRDVRRGRDLEQILTQYTTFVKPAFEEFCLPTKKYADVIIPRGVDNMVAINLIVQHIQDILNGDICKWHRGGSNGRSYKRTFSEPGDHPGMLTSGKRSHLESSSRPH

SEQ ID NO: 69364 - protein, 277 aa, Homo sapiens
MASAGGEDCESPAPEADRPHQRPFLIGVSGGTASGKSTVCEKIMELLGQNEVEQRQRKVVILSQDRFYKVLTAEQKAKALKGQYNFDHPDAFDNDLMHRTLKNIVEGKTVEVPTYDFVTHSRLPETTVVYPADVVLFEGILVFYSQEIRDMFHLRLFVDTDSDVRLSRRVLRDVRRGRDLEQILTQYTTFVKPAFEEFCLPTKKYADVIIPRGVDNMVAINLIVQHIQDILNGDICKWHRGGSNGRSYKRTFSEPGDHPGMLTSGKRSHLESSSRPH

SEQ ID NO: 69365 - protein, 548 aa, Homo sapiens
MAAPPARADADPSPTSPPTARDTPGRQAEKSETACEDRSNAESLDRLLPPVGTGRSPRKRTTSQCKSEPPLLRTSKRTIYTAGRPPWYNEHGTQSKEAFAIGLGGGSASGKTTVARMIIEALDVPWVVLLSMDSFYKVLTEQQQEQAAHNNFNFDHPDAFDFDLIISTLKKLKQGKSVKVPIYDFTTHSRKKDWKTLYGANVIIFEGIMAFADKTLLELLDMKIFVDTDSDIRLVRRLRRDISERGRDIEGVIKQYNKFVKPSFDQYIQPTMRLADIVVPRGSGNTVAIDLIVQHVHSQLEERELSVRAALASAHQCHPLPRTLSVLKSTPQVRGMHTIIRDKETSRDEFIFYSKRLMRLLIEHALSFLPFQDCVVQTPQGQDYAGKCYAGKQITGVSILRAGETMEPALRAVCKDVRIGTILIQTNQLTGEPELHYLRLPKDISDDHVILMDCTVSTGAAAMMAVRVLLDHDVPEDKIFLLSLLMAEMGVHSVAYAFPRVRIITTAVDKRVNDLFRIIPGIGNFGDRYFGTDAVPDGSDEEEVAYTG

SEQ ID NO: 69366 - protein, 419 aa, Homo sapiens
MAAPPARADADPSPTSPPTARDTPGRQAEKSETACEDRSNAESLDRLLPPVGTGRSPRKRTTSQCKSEPPLLRTSKRTIYTAGRPPWYNEHGTQSKEAFAIGLGGGSASGKTTVARMIIEALDVPWVVLLSMDSFYKVLTEQQQEQAAHNNFNFDHPDAFDFDLIISTLKKLKQGKSVKVPIYDFTTHSRKKDWKTLYGANVIIFEGIMAFADKTLLELLDMKIFVDTDSDIRLVRRLRRDISERGRDIEGVIKQYNKFVKPSFDQYIQPTMRLADIVVPRGSGNTVAIDLIVQHVHSQLEEGCAGLGTPVPPAAPDAERPEEHAAGTGHAHHHQVRAHLGTGRPRARAPAQLLAPQGQGDQSRRVHLLLQETDAAAHRARALLPALSGLRRTDPAGAGLCGQVLCGEADHRCVHSARR

SEQ ID NO: 69367 - protein, 548 aa, Homo sapiens
MAAPPARADADPSPTSPPTARDTPGRQAEKSETACEDRSNAESLDRLLPPVGTGRSPRKRTTSQCKSEPPLLRTSKRTIYTAGRPPWYNEHGTQSKEAFAIGLGGGSASGKTTVARMIIEALDVPWVVLLSMDSFYKVLTEQQQEQAAHNNFNFDHPDAFDFDLIISTLKKLKQGKSVKVPIYDFTTHSRKKDWKTLYGANVIIFEGIMAFADKTLLELLDMKIFVDTDSDIRLVRRLRRDISERGRDIEGVIKQYNKFVKPSFDQYIQPTMRLADIVVPRGSGNTVAIDLIVQHVHSQLEELRFVPRAALASAHQCHPLPRTLSVLKSTPQVRGMHTIIRDKETSRDEFIFYSKRLMRLLIEHALSFLPFQDCVVQTPQGQDYAGKCYAGKQITGVSILRAGETMEPALRAVCKDVRIGTILIQTNQLTGEPELHYLRLPKDISDDHVILMDCTVSTGAAAMMAVRVLLDHDVPEDKIFLLSLLMAEMGVHSVAYAFPRVRIITTAVDKRVNDLFRIIPGIGNFGDRYFGTDAVPDGSDEEEVAYTG

SEQ ID NO: 69368 - protein, 533 aa, Homo sapiens
MSSPPAYPGIRISGCRALGAEGSSNAESLDRLLPPVGTGRSPRKRTTSQCKSEPPLLRTSKRTIYTAGRPPWYNEHGTQSKEAFAIGLGGGSASGKTTVARMIIEALDVPWVVLLSMDSFYKVLTEQQQEQAAHNNFNFDHPDAFDFDLIISTLKKLKQGKSVKVPIYDFTTHSRKKDWKTLYGANVIIFEGIMAFADKTLLELLDMKIFVDTDSDIRLVRRLRRDISERGRDIEGVIKQYNKFVKPSFDQYIQPTMRLADIVVPRGSGNTVAIDLIVQHVHSQLEERELSVRAALASAHQCHPLPRTLSVLKSTPQVRGMHTIIRDKETSRDEFIFYSKRLMRLLIEHALSFLPFQDCVVQTPQGQDYAGKCYAGKQITGVSILRAGETMEPALRAVCKDVRIGTILIQTNQLTGEPELHYLRLPKDISDDHVILMDCTVSTGAAAMMAVRVLLDHDVPEDKIFLLSLLMAEMGVHSVAYAFPRVRIITTAVDKRVNDLFRIIPGIGNFGDRYFGTDAVPDGSDEEEVAYTG

SEQ ID NO: 69369 - protein, 86 aa, Homo sapiens
MSSPPAYPGIRISGCRALGAEGSSNAESLDRLLPPVGTGRSPRKRTTSQCKSEPPLLRTSKRTIYTAGRPPWYNEHGTQSKEAFAI

SEQ ID NO: 69370 - protein, 135 aa, Homo sapiens
MHTIIRDKETSRDEFIFYSKRLMRLLIEHALSFLPFQDCVVQTPQGQDYAGKCYAGKQITGVSILRAGETMEPALRAVCKDVRIGTILIQTNQLTGEPELHYLRLPKDISDDHVILMDCTVSTGAAAMMAVRVLL

SEQ ID NO: 69371 - protein, 261 aa, Homo sapiens
MAGDSEQTLQNHQQPNGGEPFLIGVSGGTASGKSSVCAKIVQLLGQNEVDYRQKQVVILSQDSFYRVLTSEQKAKALKGQFNFDHPDAFDNELILKTLKEITEGKTVQIPVYDFVSHSRKEETVTVYPADVVLFEGILAFYSQEVRDLFQMKLFVDTDADTRLSRRVLRDISERGRDLEQILSQYITFVKPAFEEFCLPTKKYADVIIPRGADNLVAINLIVQHIQDILNGGPSKRQTNGCLNGYTPSRKRQASESSSRPH

SEQ ID NO: 69372 - protein, 130 aa, Homo sapiens
MAGDSEQTLQNHQQPNGGEPFLIGVSGGTASGKSSVCAKIVQLLGQNEVDYRQKQVVILSQDSFYRVLTSEQKAKALKGQFNFDHPDAFDNELILKTLKEITEGKTVQIPVYDFVSHSRIKGHQRERQGS

SEQ ID NO: 69373 - protein, 676 aa, Homo sapiens
MSSLQALCSGLPLRPLPENRGRQAGVPHAPVRTPSLSPVEKQLALRNALRYFPPDVQELLAPEFAQELQLYGHIYMYRFCPDIEMRAYPIEQYPCQTKVAAAIMHMIMNNLDPAVAQFPQELVTYGGNGQVFSNWAQFWLTMFYLSKMTEEQTLVMYSGHPLGLFPSSRSAPRLVITNGMVIPNYSSRTEYEKLFALGVTMYGQMTAGSYCYIGPQGIVHGTVLTVLNAARRYLGIEDLAGKVFVTSGLGGMSGAQAKAAVIVGCIGVIAEVDKAALEKRHRQGWLMEVTDSLDRCIQRLREARKKKEVLSLGYHGNVVALWERLVHELDTTGECLVDLGSDQTSCHNPFNGGYYPVQLSFTEAQSLMASNPAVFKDLVQESLRRQVSAINRLAEEKFFFWDYGNAFLLEAQRAGADVEKKGAGRTEFRYPSYVQHIMGDIFSQGFGPFRWVCTSGDPQDLAVTDELATSVLEEAIADGVKVSVKLQYMDNIRWIREAARHRLVVGSQARILYSDQKGRVAIAVAINQAIACRRIKAPVVLSRDHHDVSGTDSPFRETSNIYDGSAFCADMAVQNFVGDACRGATWVALHNGGGVGWGEVINGGFGLVLDGTPEAEGRARLMLSWDVSNGVARRCWSGNQKAYEIICQTMQENSTLVVTLPHKVEDERVLQQALQL

SEQ ID NO: 69374 - protein, 736 aa, Homo sapiens
MSSLQALCSGLPLRPLPENRGRQAGVPHAPVRTPSLSPVEKQLALRNALRYFPPDVQELLAPEFAQELQLYGHIYMYRFCPDIEMRAYPIEQYPCQTKVAAAIMHMIMNNLDPAVAQFPQELVTYGGNGQVFSNWAQFWLTMFYLSKMTEEQTLVMYSGHPLGLFPSSRSAPRLVITNGMVIPNYSSRTEYEKLFALGVTMYGQMTAGSYCYIGPQGIVHGTVLTVLNAARRYLGIEDLAGKVFVTSGLGGMSGAQAKAAVIVGCIGVIAEVDKAALEKRHRQGWLMEVTDSLDRCIQRLRVLQLGLQQALGWAGLPAALGLCVLSCFVNLAPLGEGRCLAPSGFSRPLLGAPVLLLCPSREARKKKEVLSLGYHGNVVALWERLVHELDTTGECLVDLGSDQTSCHNPFNGGYYPVQLSFTEAQSLMASNPAVFKDLVQESLRRQVSAINRLAEEKFFFWDYGNAFLLEAQRAGADVEKKGAGRTEFRYPSYVQHIMGDIFSQGFGPFRWVCTSGDPQDLAVTDELATSVLEEAIADGVKVSVKLQYMDNIRWIREAARHRLVVGSQARILYSDQKGRVAIAVAINQAIACRRIKAPVVLSRDHHDVSGTDSPFRETSNIYDGSAFCADMAVQNFVGDACRGATWVALHNGGGVGWGEVINGGFGLVLDGTPEAEGRARLMLSWDVSNGVARRCWSGNQKAYEIICQTMQENSTLVVTLPHKVEDERVLQQALQL

SEQ ID NO: 69375 - protein, 124 aa, Homo sapiens
MRQAGRAALLAALLLLVQLCPGSSQRSPEAAGVQDPSLRWSPGARNQGGGARALLLLLAERFPRRAGPGRLGLGTAGERPRRDNPSLSIDLTFHLLRTLLELARTQSQRERAEQNRIIFDSVGK

SEQ ID NO: 69376 - protein, 112 aa, Homo sapiens
MTRCALLLLMVLMLGRVLVVPVTPIPTFQLRPQNSPQTTPRPAASESPSAAPTWPWAAQSHCSPTRHPGSRIVLSLDVPIGLLQILLEQARARAAREQATTNARILARVGHC

SEQ ID NO: 69377 - protein, 640 aa, Homo sapiens
MGQPSLTWMLMVVVASWFITTAATDTSEARWCSECHSNATCTEDEAVTTCTCQEGFTGDGLTCVDLDECAIPGAHNCSANSSCVNTPGSFSCVCPEGFRLSPGLGCTDVDECAEPGLSHCHALATCVNVVGSYLCVCPAGYRGDGWHCECSPGSCGPGLDCVPEGDALVCADPCQAHRTLDEYWRSTEYGEGYACDTDLRGWYRFVGQGGARMAETCVPVLRCNTAAPMWLNGTHPSSDEGIVSRKACAHWSGHCCLWDASVQVKACAGGYYVYNLTAPPECHLAYCTDPSSVEGTCEECSIDEDCKSNNGRWHCQCKQDFNITDISLLEHRLECGANDMKVSLGKCQLKSLGFDKVFMYLSDSRCSGFNDRDNRDWVSVVTPARDGPCGTVLTRNETHATYSNTLYLADEIIIRDLNIKINFACSYPLDMKVSLKTALQPMVSALNIRVGGTGMFTVRMALFQTPSYTQPYQGSSVTLSTEAFLYVGTMLDGGDLSRFALLMTNCYATPSSNATDPLKYFIIQDRCPHTRDSTIQVVENGESSQGRFSVQMFRFAGNYDLVYLHCEVYLCDTMNEKCKPTCSGTRFRSGSVIDQSRVLNLGPITRKGVQATVSRAFSSLGLLKVWLPLLLSATLTLTFQ

SEQ ID NO: 69378 - protein, 673 aa, Homo sapiens
MGQPSLTWMLMVVVASWFITTAATDTSEARTKYNCPARWSWRTPQRGGDTEQGPDEDFTSQGRWCSECHSNATCTEDEAVTTCTCQEGFTGDGLTCVDLDECAIPGAHNCSANSSCVNTPGSFSCVCPEGFRLSPGLGCTDVDECAEPGLSHCHALATCVNVVGSYLCVCPAGYRGDGWHCECSPGSCGPGLDCVPEGDALVCADPCQAHRTLDEYWRSTEYGEGYACDTDLRGWYRFVGQGGARMAETCVPVLRCNTAAPMWLNGTHPSSDEGIVSRKACAHWSGHCCLWDASVQVKACAGGYYVYNLTAPPECHLAYCTDPSSVEGTCEECSIDEDCKSNNGRWHCQCKQDFNITDISLLEHRLECGANDMKVSLGKCQLKSLGFDKVFMYLSDSRCSGFNDRDNRDWVSVVTPARDGPCGTVLTRNETHATYSNTLYLADEIIIRDLNIKINFACSYPLDMKVSLKTALQPMVSALNIRVGGTGMFTVRMALFQTPSYTQPYQGSSVTLSTEAFLYVGTMLDGGDLSRFALLMTNCYATPSSNATDPLKYFIIQDRCPHTRDSTIQVVENGESSQGRFSVQMFRFAGNYDLVYLHCEVYLCDTMNEKCKPTCSGTRFRSGSVIDQSRVLNLGPITRKGVQATVSRAFSSLGLLKVWLPLLLSATLTLTFQ

SEQ ID NO: 69379 - protein, 640 aa, Homo sapiens; identical to SEQ ID NO: 69377

SEQ ID NO: 69380 - protein, 640 aa, Homo sapiens; identical to SEQ ID NO: 69377

SEQ ID NO: 69381 - protein, 673 aa, Homo sapiens; identical to SEQ ID NO: 69378

SEQ ID NO: 69382 - protein, 618 aa, Homo sapiens
MGQPSLTWMLMVVVASWFITTAATDTSEARWCSECHSNATCTEDEAVTTCTCQEGFTGDGLTCVDLDECAIPGAHNCSANSSCVNTPGSFSCVCPEGFRLSPGLGCTDVDECAEPGLSHCHALATCVNVVGSCGPGLDCVPEGDALVCADPCQAHRTLDEYWRSTEYGEGYACDTDLRGWYRFVGQGGARMAETCVPVLRCNTAAPMWLNGTHPSSDEGIVSRKACAHWSGHCCLWDASVQVKACAGGYYVYNLTAPPECHLAYCTDPSSVEGTCEECSIDEDCKSNNGRWHCQCKQDFNITDISLLEHRLECGANDMKVSLGKCQLKSLGFDKVFMYLSDSRCSGFNDRDNRDWVSVVTPARDGPCGTVLTRNETHATYSNTLYLADEIIIRDLNIKINFACSYPLDMKVSLKTALQPMVSALNIRVGGTGMFTVRMALFQTPSYTQPYQGSSVTLSTEAFLYVGTMLDGGDLSRFALLMTNCYATPSSNATDPLKYFIIQDRCPHTRDSTIQVVENGESSQGRFSVQMFRFAGNYDLVYLHCEVYLCDTMNEKCKPTCSGTRFRSGSVIDQSRVLNLGPITRKGVQATVSRAFSSLGLLKVWLPLLLSATLTLTFQ

SEQ ID NO: 69383 - protein, 252 aa, Homo sapiens
MAPAPQAPERDPVGSWYNVTILVKMDFKELQQVDPRLLNHMRLLHSLVTSALQPMASTVHHLHSAPGNASTTVSRLLLGLPRPLPVADVSTLLGDIAKRVYEVISVQVQDVNECFYEELNACSGRELCANLEGSYWCVCHQEAPATSPRKLNLEWEDCPPVSDYVVLNVTSDSFQVSWRLNSTQNHTFHVRVYRGMELLRSARTQSQALAVAGLEAGVLYRVKTSYQGCGADVSTTLTIKTKYVLEKLDFQS

SEQ ID NO: 69384 - protein, 184 aa, Homo sapiens
MAPAPQAPERDPVGSWYNVTILVKMDFKELQQVDPRLLNHMRLLHSLVTSALQPMASTVHHLHSAPGNASTTVSRLLLGLPRPLPVADVSTLLGDIAKRVYEVISVQVQDVNECFYEELNACSGRELCANLEGSYWCVCHQEAPATSPRKLNLEWEARGLEIHLELRATSTSHGTPLSSAENCL

SEQ ID NO: 69385 - protein, 1246 aa, Homo sapiens
MVYRTQYLVVEVPESRNVTDCCEGYEQLGLYCVLPLNQSGQFTSRPGACPAEGPEPSTSPCSLDIDCPGLEKCCPWSGGRYCMAPAPQAPERDPVGSWYNVTILVKMDFKELQQVDPRLLNHMRLLHSLVTSALQPMASTVHHLHSAPGNASTTVSRLLLGLPRPLPVADVSTLLGDIAKRVYEVISVQVQDVNECFYEELNACSGRELCANLEGSYWCVCHQEAPATSPRKLNLEWEDCPPVSDYVVLNVTSDSFQVSWRLNSTQNHTFHVRVYRGMELLRSARTQSQALAVAGLEAGVLYRVKTSYQGCGADVSTTLTIKTNAQVFEVTIKIVNHNLTEKLLNRSSVEYQDFSRQLLHEVESSFPPVVSDLYRSGKLRMQIVSLQAGSVVVRLKLTVQDPGFPMGISTLAPILQPLLASTVFQIDRQGTRVQDWDECVDSAEHDCSPAAWCINLEGSYTCQCRTTRDATPSRAGRACEGDLVSPMGGGLSAATGVTVPGLGTGTAALGLENFTLSPSPGYPQGTPAAGQAWTPEPSPRRGGSNVVGYDRNNTGKGVEQELQGNSIMEPPSWPSPTEDPTGHFLWHATRSTRETLLNPTWLRNEDSGPSGSVDLPLTSTLTALKTPACVPVSIGRIMVSNVTSTGFHLAWEADLAMDSTFQLTLTSMWSPAVVLETWNTSVTLSGLEPGVLHLVEIMAKACGKEGARAHLKVRTAARKLIGKVRIKNVRYSESFRNASSQEYRDFLELFFRMVRGSLPATMCQHMDAGGVRMEVVSVTNGSIVVEFHLLIIADVDVQEVSAAFLTAFQTVPLLEVIRGDTFIQDYDECERKEDDCVPGTSCRNTLGSFTCSCEGGAPDFPVEYSERPCEGDSPGNETWATSPERPLTTAGTKAAFVQGTSPTPQGLPQRLNLTGAVRVLCEIEKVVVAIQKRFLQQESIPESSLYLSHPSCNVSHSNGTHVLLEAGWSECGTLMQSNMTNTVVRTTLRNDLSQEGIIHHLKILSPIYCAFQNDLLTSSGFTLEWGVYTIIEDLHGAGNFVTEMQLFIGDSPIPQNYSVSASDDVRIEVGLYRQKSNLKVVLTECWATPSSNARDPITFSFINNSCPVPNTYTNVIENGNSNKAQFKLRIFSFINDSIVYLHCKLRVCMESPGATCKINCNNFRLLQNSETSATHQMSWGPLIRSEGEPPHAEAGLGAGYVVLIVVAIFVLVAGTATLLIVRYQRMNGRYNFKIQSNNFSYQVFYE

SEQ ID NO: 69386 - protein, 1374 aa, Homo sapiens
MVYRTQYLVVEVPESRNVTDCCEGYEQLGLYCVLPLNQSGQFTSRPGACPAEGPEPSTSPCSLDIDCPGLEKCCPWSGGRYCMAPAPQAPERDPVGSWYNVTILVKMDFKELQQVDPRLLNHMRLLHSLVTSALQPMASTVHHLHSAPGNASTTVSRLLLGLPRPLPVADVSTLLGDIAKRVYEVISVQVQDVNECFYEELNACSGRELCANLEGSYWCVCHQEAPATSPRKLNLEWEDCPPVSDYVVLNVTSDSFQVSWRLNSTQNHTFHVRVYRGMELLRSARTQSQALAVAGLEAGVLYRVKTSYQGCGADVSTTLTIKTNAQVFEVTIKIVNHNLTEKLLNRSSVEYQDFSRQLLHEVESSFPPVVSDLYRSGKLRMQIVSLQAGSVVVRLKLTVQDPGFPMGISTLAPILQPLLASTVFQIDRQGTRVQDWDECVDSAEHDCSPAAWCINLEGSYTCQCRTTRDATPSRAGRACEGDLVSPMGGGLSAATGVTVPGLGTGTAALGLENFTLSPSPGYPQGTPAAGQAWTPEPSPRRGGSNVVGYDRNNTGKGVEQEVPSTAPGLGMDQGSPSQVNPSQGSPSQGSLRQESTSQASPSQRSTSQGSPSQVNPSQRSTSHANSSQGSPSQGSPSQESPSQGSTSQASPSHRNTIGVIGTTSSPKATGSTHSFPPGATDGPLALPGQLQGNSIMEPPSWPSPTEDPTGHFLWHATRSTRETLLNPTWLRNEDSGPSGSVDLPLTSTLTALKTPACVPVSIGRIMVSNVTSTGFHLAWEADLAMDSTFQLTLTSMWSPAVVLETWNTSVTLSGLEPGVLHLVEIMAKACGKEGARAHLKVRTAARKLIGKVRIKNVRYSESFRNASSQEYRDFLELFFRMVRGSLPATMCQHMDAGGVRMEVVSVTNGSIVVEFHLLIIADVDVQEVSAAFLTAFQTVPLLEVIRGDTFIQDYDECERKEDDCVPGTSCRNTLGSFTCSCEGGAPDFPVEYSERPCEGDSPGNETWATSPERPLTTAGTKAAFVQGTSPTPQGLPQRLNLTGAVRVLCEIEKVVVAIQKRFLQQESIPESSLYLSHPSCNVSHSNGTHVLLEAGWSECGTLMQSNMTNTVVRTTLRNDLSQEGIIHHLKILSPIYCAFQNDLLTSSGFTLEWGVYTIIEDLHGAGNFVTEMQLFIGDSPIPQNYSVSASDDVRIEVGLYRQKSNLKVVLTECWATPSSNARDPITFSFINNSCPVPNTYTNVIENGNSNKAQFKLRIFSFINDSIVYLHCKLRVCMESPGATCKINCNNFRLLQNSETSATHQMSWGPLIRSEGEPPHAEAGLGAGYVVLIVVAIFVLVAGTATLLIVRYQRMNGRYNFKIQSNNFSYQVFYE

SEQ ID NO: 69387 - protein, 1318 aa, Homo sapiens
MLRTSGLALLALVSAVGPSQASGFTEKGLSLLGYQLCSHRVTHTVQKVEAVQTSYTSYVSCGGWIPWRRCPKMVYRTQYLVVEVPESRNVTDCCEGYEQLGLYCVLPLNQSGQFTSRPGACPAEGPEPSTSPCSLDIDCPGLEKCCPWSGGRYCMAPAPQAPERDPVGSWYNVTILVKMDFKELQQVDPRLLNHMRLLHSLVTSALQPMASTVHHLHSAPGNASTTVSRLLLGLPRPLPVADVSTLLGDIAKRVYEVISVQVQDVNECFYEELNACSGRELCANLEGSYWCVCHQEAPATSPRKLNLEWEDCPPVSDYVVLNVTSDSFQVSWRLNSTQNHTFHVRVYRGMELLRSARTQSQALAVAGLEAGVLYRVKTSYQGCGADVSTTLTIKTNAQVFEVTIKIVNHNLTEKLLNRSSVEYQDFSRQLLHEVESSFPPVVSDLYRSGKLRMQIVSLQAGSVVVRLKLTVQDPGFPMGISTLAPILQPLLASTVFQIDRQGTRVQDWDECVDSAEHDCSPAAWCINLEGSYTCQCRTTRDATPSRAGRACEGDLVSPMGGGLSAATGVTVPGLGTGTAALGLENFTLSPSPGYPQGTPAAGQAWTPEPSPRRGGSNVVGYDRNNTGKGVEQELQGNSIMEPPSWPSPTEDPTGHFLWHATRSTRETLLNPTWLRNEDSGPSGSVDLPLTSTLTALKTPACVPVSIGRIMVSNVTSTGFHLAWEADLAMDSTFQLTLTSMWSPAVVLETWNTSVTLSGLEPGVLHLVEIMAKACGKEGARAHLKVRTAARKLIGKVRIKNVRYSESFRNASSQEYRDFLELFFRMVRGSLPATMCQHMDAGGVRMEVVSVTNGSIVVEFHLLIIADVDVQEVSAAFLTAFQTVPLLEVIRGDTFIQDYDECERKEDDCVPGTSCRNTLGSFTCSCEGGAPDFPVEYSERPCEGDSPGNETWATSPERPLTTAGTKAAFVQGTSPTPQGLPQRLNLTGAVRVLCEIEKVVVAIQKRFLQQESIPESSLYLSHPSCNVSHSNGTHVLLEAGWSECGTLMQSNMTNTVVRTTLRNDLSQEGIIHHLKILSPIYCAFQNDLLTSSGFTLEWGVYTIIEDLHGAGNFVTEMQLFIGDSPIPQNYSVSASDDVRIEVGLYRQKSNLKVVLTECWATPSSNARDPITFSFINNSCPVPNTYTNVIENGNSNKAQFKLRIFSFINDSIVYLHCKLRVCMESPGATCKINCNNFRLLQNSETSATHQMSWGPLIRSEGEPPHAEAGLGAGYVVLIVVAIFVLVAGTATLLIVRYQRMNGRYNFKIQSNNFSYQVFYE

SEQ ID NO: 69388 - protein, 1446 aa, Homo sapiens
MLRTSGLALLALVSAVGPSQASGFTEKGLSLLGYQLCSHRVTHTVQKVEAVQTSYTSYVSCGGWIPWRRCPKMVYRTQYLVVEVPESRNVTDCCEGYEQLGLYCVLPLNQSGQFTSRPGACPAEGPEPSTSPCSLDIDCPGLEKCCPWSGGRYCMAPAPQAPERDPVGSWYNVTILVKMDFKELQQVDPRLLNHMRLLHSLVTSALQPMASTVHHLHSAPGNASTTVSRLLLGLPRPLPVADVSTLLGDIAKRVYEVISVQVQDVNECFYEELNACSGRELCANLEGSYWCVCHQEAPATSPRKLNLEWEDCPPVSDYVVLNVTSDSFQVSWRLNSTQNHTFHVRVYRGMELLRSARTQSQALAVAGLEAGVLYRVKTSYQGCGADVSTTLTIKTNAQVFEVTIKIVNHNLTEKLLNRSSVEYQDFSRQLLHEVESSFPPVVSDLYRSGKLRMQIVSLQAGSVVVRLKLTVQDPGFPMGISTLAPILQPLLASTVFQIDRQGTRVQDWDECVDSAEHDCSPAAWCINLEGSYTCQCRTTRDATPSRAGRACEGDLVSPMGGGLSAATGVTVPGLGTGTAALGLENFTLSPSPGYPQGTPAAGQAWTPEPSPRRGGSNVVGYDRNNTGKGVEQEVPSTAPGLGMDQGSPSQVNPSQGSPSQGSLRQESTSQASPSQRSTSQGSPSQVNPSQRSTSHANSSQGSPSQGSPSQESPSQGSTSQASPSHRNTIGVIGTTSSPKATGSTHSFPPGATDGPLALPGQLQGNSIMEPPSWPSPTEDPTGHFLWHATRSTRETLLNPTWLRNEDSGPSGSVDLPLTSTLTALKTPACVPVSIGRIMVSNVTSTGFHLAWEADLAMDSTFQLTLTSMWSPAVVLETWNTSVTLSGLEPGVLHLVEIMAKACGKEGARAHLKVRTAARKLIGKVRIKNVRYSESFRNASSQEYRDFLELFFRMVRGSLPATMCQHMDAGGVRMEVVSVTNGSIVVEFHLLIIADVDVQEVSAAFLTAFQTVPLLEVIRGDTFIQDYDECERKEDDCVPGTSCRNTLGSFTCSCEGGAPDFPVEYSERPCEGDSPGNETWATSPERPLTTAGTKAAFVQGTSPTPQGLPQRLNLTGAVRVLCEIEKVVVAIQKRFLQQESIPESSLYLSHPSCNVSHSNGTHVLLEAGWSECGTLMQSNMTNTVVRTTLRNDLSQEGIIHHLKILSPIYCAFQNDLLTSSGFTLEWGVYTIIEDLHGAGNFVTEMQLFIGDSPIPQNYSVSASDDVRIEVGLYRQKSNLKVVLTECWATPSSNARDPITFSFINNSCPVPNTYTNVIENGNSNKAQFKLRIFSFINDSIVYLHCKLRVCMESPGATCKINCNNFRLLQNSETSATHQMSWGPLIRSEGEPPHAEAGLGAGYVVLIVVAIFVLVAGTATLLIVRYQRMNGRYNFKIQSNNFSYQVFYE

SEQ ID NO: 69389 - protein, 77 aa, Homo sapiens
PVGSWYNVTILVKMDFKELQQVDPRLLNHMRLLHSLMSMSVSMRSSMPALEGNCAQTWRARTGASVTRKLQPRLHGS

SEQ ID NO: 69390 - protein, 136 aa, Homo sapiens
MQLFIGDSPIPQNYSVSASDDVRIEVGLYRQKSNLKVVLTECWATPSSNARDPITFSFINNSCPVPNTYTNVIENGNSNKAQFKLRIFSFINDSIVYLHCKLRVCMESPGATCKIAALGRRTHVDWWAFPISQWLS

SEQ ID NO: 69391 - protein, 406 aa, Homo sapiens
MKKKQQHPGGGADPWPHGAPMGGAPPGLGSWKRRVPLLPFLRFSLRDYGFCMATLLVFCLGSLLYQLSGGPPRFLLDLRQYLGNSTYLDDHGPPPSKVLPFPSQVVYNRVGKCGSRTVVLLLRILSEKHGFNLVTSDIHNKTRLTKNEQMELIKNISTAEQPYLFTRHVHFLNFSRFGGDQPVYINIIRDPVNRFLSNYFFRRFGDWRGEQNHMIRTPSMRQEERYLDINECILENYPECSNPRLFYIIPYFCGQHPRCREPGEWALERAKLNVNENFLLVGILEELEDVLLLLERFLPHYFKGVLSIYKDPEHRKLGNMTVTVKKTVPSPEAVQILYQRMRYEYEFYHYVKEQFHLLKRKFGLKSHVSKPPLRPHFFIPTPLETEEPIDDEEQDDEKWLEDIYKR

SEQ ID NO: 69392 - protein, 258 aa, Homo sapiens
MASAAAAEAEKGSPVVVGLLVVGNIIILLSGLSLFAETIWVTADQYRVYPLMGVSGKDDVFAGAWIAIFCGFSFFMVASFGVGAALCRRRSMVLTYLVLMLIVYIFECASCITSYTHRDYMVSNPSLITKQMLTFYSADTDQGQELTRLWDRVMIEQECCGTSGPMDWVNFTSAFRAATPEVVFPWPPLCCRRTGNFIPLNEEGCRLGHMDYLFTKGCFEHIGHAIDSYTWGISWFGFAILMWTLPVMLIAMYFYTML

SEQ ID NO: 69393 - protein, 273 aa, Homo sapiens
MASAAAAEAEKGSPVVVGLLVVGNIIILLSGLSLFAETIWVTADQYRVYPLMGVSGKDDVFAGAWIAIFCGFSFFMVASFGVGAALCRRRSMVLTYLVLMLIVYIFECASCITSYTHRDYMVSNPSLITKQMLTFYSADTDQGQELTRLWDRVMIEQECCGTSGPMDWVNFTSAFRAATPEVVFPWPPLCCRRTGNFIPLNEEGCRLGHMDYLFTKAGVQWHNLSSLQRLPPGFKGFSHLSFQSSWDYRAASNTSATPSTATRGVSRGLGLPS

SEQ ID NO: 69394 - protein, 260 aa, Homo sapiens
MAKDNSTVRCFQGLLIFGNVIIGCCGIALTAECIFFVSDQHSLYPLLEATDNDDIYGAAWIGIFVGICLFCLSVLGIVGIMKSSRKILLAYFILMFIVYAFEVASCITAATQQDFFTPNLFLKQMLERYQNNSPPNNDDQWKNNGVTKTWDRLMLQDNCCGVNGPSDWQKYTSAFRTENNDADYPWPRQCCVMNNLKEPLNLEACKLGVPGFYHNQGCYELISGPMNRHAWGVAWFGFAILCWTFWVLLGTMFYWSRIEY

SEQ ID NO: 69395 - protein, 169 aa, Homo sapiens
MAKDNSTVRCFQGLLIFGNVIIGCCGIALTAECIFFVSDQHSLYPLLEATDNDDIYGAAWIGIFVGICLFCLSVLGIVGIMKSSRKILLAYFILMFIVYAFEVASCITAATQQDFFTPNLFLKQMLERYQNNSPPNNDDQWKNNGVTKTWDRLMLQDNCCGVNGPSDWQ

SEQ ID NO: 69396 - protein, 189 aa, Homo sapiens
MAKDNSTVRCFQGLLIFGNVIIGCCGIALTAECIFFVSDQHSLYPLLEATDNDDIYGAAWIGIFVGICLFCLSVLGIVGIMKSSRKILLAYFILMFIVYAFEVASCITAATQQDFFTPNLFLKQMLERYQNNSPPNNDDQWKNNGVTKTWDRLMLQDNCCGVNGPSDWQKYTSAFRTENNDADYPWPRQ

SEQ ID NO: 69397 - protein, 184 aa, Homo sapiens
MAPLLPIRTLPLILILLALLSPGAADFNISSLSGLLSPALTESLLVALPPCHLTGGNATLMVRRANDSKVVTSSFVVPPCRGRRELVSVVDSGAGFTVTRLSAYQVTNLVPGTKFYISYLVKKGTATESSREIPMSTLPRRNMESIGLGMARTGGMVVITVLLSVAMFLLVLGFIIALALGSRK

SEQ ID NO: 69398 - protein, 287 aa, Homo sapiens
MPPLWALLALGCLRFGSAVNLQPQLASVTFATNNPTLTTVALEKPLCMFDSKEALTGTHEVYLYVLVDSAISRNASVQDSTNTPLGSTFLQTEGGRTGPYKAVAFDLIPCSDLPSLDAIGDVSKASQILNAYLVRVGANGTCLWDPNFQGLCNAPLSAATEYRFKYVLVNMSTGLVEDQTLWSDPIRTNQLTPYSTIDTWPGRRSGGMIVITSILGSLPFFLLVGFAGAIALSLVDMGSSDGETTHDSQITQEAVPKSLGASESSYTSVNRGPPLDRAEVYSSKLQD

SEQ ID NO: 69399 - protein, 166 aa, Homo sapiens
MPPLWALLALGCLRFGSAVNLQPQLASVTFATNNPTLTTVALEKPLCMFDSKEALTGTHEVYLYVLVDSVTPYSTIDTWPGRRSGGMIVITSILGSLPFFLLVGFAGAIALSLVDMGSSDGETTHDSQITQEAVPKSLGASESSYTSVNRGPPLDRAEVYSSKLQD

SEQ ID NO: 69400 - protein, 320 aa, Homo sapiens
MGLPWGQPHLGLQMLLLALNCLRPSLSLGEWGSWMDASSQTQGAGGPAGVIGPWAPAPLRLGEAAPGTPTPVSVAHLLSPVATELVPYTPQITAWDLEGKVTATTFSLEQPRCVFDGLASASDTVWLVVAFSNASRGFQNPETLADIPASPQLLTDGHYMTLPLSPDQLPCGDPMAGSGGAPVLRVGHDHGCHQQPFCNAPLPGPGPYREDPRIHRHLARAAKWQHDRHYLHPLFSGRPPTLGLLGSLYHALLQPVVAGGGPGAAADRLLHGQALHDPPHPTQRGRHTAGGLQAWPGPPPQPQPLAWPLCMGLGEMGRWE

SEQ ID NO: 69401 - protein, 276 aa, Homo sapiens
MGLPWGQPHLGLQMLLLALNCLRPSLSLELVPYTPQITAWDLEGKVTATTFSLEQPRCVFDGLASASDTVWLVVAFSNASRGFQNPETLADIPASPQLLTDGHYMTLPLSPDQLPCGDPMAGSGGAPVLRVGHDHGCHQQPFCNAPLPGPGPYRVKFLLMDTRGSPRAETKWSDPITLHQGKTPGSIDTWPGRRSGSMIVITSILSSLAGLLLLAFLAASTMRFSSLWWPEEAPEQLRIGSFMGKRYMTHHIPPREAATLPVGCKPGLDPLPSLSP

SEQ ID NO: 69402 - protein, 320 aa, Homo sapiens; identical to SEQ ID NO: 69400

SEQ ID NO: 69403 - protein, 276 aa, Homo sapiens; identical to SEQ ID NO: 69401

SEQ ID NO: 69404 - protein, 320 aa, Homo sapiens; identical to SEQ ID NO: 69400

SEQ ID NO: 69405 - protein, 367 aa, Homo sapiens
MEANGLGPQGFPELKNDTFLRAAWGEETDYTPVWCMRQAGRYLPEFRETRAAQDFFSTCRSPEACCELTLQPLRRFPLDAAIIFSDILVVPQALGMEVTMVPGKGPSFPEPLREEQDLERLRDPEVVASELGYVFQAITLTRQRLAGRVPLIGFAGAPWTLMTYMVEGGGSSTMAQAKRWLYQRPQASHQLLRILTDALVPYLVGQVVAGAQALQLFESHAGHLGPQLFNKFALPYIRDVAKQVKARLREAGLAPVPMIIFAKDGHFALEELAQAGYEVVGLDWTVAPKKARECVGKTVTLQGNLDPCALYASEEEIGQLVKQMLDDFGPHRYIANLGHGLYPDMDPEHVGAFVDAVHKHSRLLRQN

SEQ ID NO: 69406 - protein, 193 aa, Homo sapiens
MEANGLGPQGFPELKNDTFLRAAWGEETDYTPVWCMRQAGRYLPEFRETRAAQDFFSTCRSPEACCELTLQALGMEVTMVPGKGPSFPEPLREEQDLERLRDPEVVASELGYVFQAITLTRQRLAGRVPLIGFAGAPWTLMTYMVEGGGSSTMAQAKRWLYQRPQASHQLLRILTDALVPYLVGQVVAGAQAL

SEQ ID NO: 69407 - protein, 227 aa, Homo sapiens
PQGFPELKNDTFLRAAWGEETDYTPVWCMRQAGRYLPEFRETRAAQDFFSTCRSPEACCELTLQPLRRFPLDAAIIFSDILVVPQALGMEVTMVPGKGPSFPEPLREEQDLERLRDPEVVASELGYVFQAITLTRQRLAGRVPLIGFAGAPALQLFESHAGHLGPQLFNKFALPYIRDVAKQVKARLREAGLAPVPMIIFAKDGHFALEELAQAGYEVVGLDWTVAP

SEQ ID NO: 69408 - protein, 228 aa, Homo sapiens
  VARIANT 1: note = MOD_RES - Any amino acid
XPQGFPELKNDTFLRAAWGEETDYTPVWCMRQAGRYLPEFRETRAAQDFFSTCRSPEACCELTLQPLRRFPLDAAIIFSDILVVPQALGMEVTMVPGKGPSFPEPLREEQDLERLRDPEVVASELGYVFQAITLTRQRLAGRVPLIGFAGAPALQLFESHAGHLGPQLFNKFALPYIRDVAKQVKARLREAGLAPVPMIIFAKDGHFALEELAQAGYEVVGLDWTVAP

SEQ ID NO: 69409 - protein, 193 aa, Homo sapiens; identical to SEQ ID NO: 69406

SEQ ID NO: 69410 - protein, 133 aa, Homo sapiens
MKVLLLKDAKEDDCGQDPYIRELGLYGLEATLIPVLSFEFLSLPSFSEKLSHPEDYGGLIFTSPRAVEAAELCLEQNNKTEVWERSLKEKWNAKSVYVVGNATASLVSKIGLDTEGETCGNAEKLAEYICSSK

SEQ ID NO: 69411 - protein, 139 aa, Homo sapiens
MKVLLLKDAKEDDCGQDPYIRELGLYGLEATLIPVLSFEFLSLPSFSEKLSHPEDYGGLIFTSPRAVEAAELCLEQNNKTEVWERSLKEKWNAKSVYVVGNATASLVSKIGLDTEGETCGNAEKLAEYICSSEEVKGIF

SEQ ID NO: 69412 - protein, 265 aa, Homo sapiens
MKVLLLKDAKEDDCGQDPYIRELGLYGLEATLIPVLSFEFLSLPSFSEKLSHPEDYGGLIFTSPRAVEAAELCLEQNNKTEVWERSLKEKWNAKSVYVVGNATASLVSKIGLDTEGETCGNAEKLAEYICSRESSALPLLFPCGNLKREILPKALKDKGIAMESITVYQTVAHPGIQGNLNSYYSQQGVPASITFFSPSGLTYSLKHIQELSGDNIDQIKFAAIGPTTARALAAQGLPVSCTAESPTPQALATGIRKALQPHGCC

SEQ ID NO: 69413 - protein, 265 aa, Homo sapiens; identical to SEQ ID NO: 69412

SEQ ID NO: 69414 - protein, 185 aa, Homo sapiens
MKVLLLKDAKEDDCGQDPYIRLSHPEDYGGLIFTSPRAVEAAELCLEQNNKTEVWERSLKEKWNAKSVYVVGNATASLVSKIGLDTEGETCGNAEKLAEYICSRESSALPLLFPCGNLKREILPKALKDKGIAMESITVYQTVAHPGIQGNLNSYYSQQGVPASITFFSPSGLTYSLKHIQELSG

SEQ ID NO: 69415 - protein, 899 aa, Homo sapiens
MDRKVAREFRHKVDFLIENDAEKDYLYDVLRMYHQTMDVAVLVGDLKLVINEPSRLPLFDAIRPLIPLKHQVEYDQLTPRRSRKLKEVRLDRLHPEGLGLSVRGGLEFGCGLFISHLIKGGQADSVGLQVGDEIVRINGYSISSCTHEEVINLIRTKKTVSIKVRHIGLIPVKSSPDEPLTWQYVDQFVSESGGVRGSLGSPGNRENKEKKVFISLVGSRGLGCSISSGPIQKPGIFISHVKPGSLSAEVGLEIGDQIVEVNGVDFSNLDHKEAVNVLKSSRSLTISIVAAAGRELFMTDRERLAEARQRELQRQELLMQKRLAMESNKILQEQQEMERQRRKEIAQKAAEENERYRKEMEQIVEEEEKFKKQWEEDWGSKEQLLLPKTITAEVHPVPLRKPKSFGWFYRYDGKFPTIRKKGKDKKKAKYGSLQDLRKNKKELEFEQKLYKEKEEMLEKEKQLKINRLAQEVSETEREDLEESEKIQYWVERLCQTRLEQISSADNEISEMTTGPPPPPPSVSPLAPPLRRFAGGLHLHTTDLDDIPLDMFYYPPKTPSALPVMPHPPPSNPPHKVPAPPVLPLSGHVSASSSPWVQRTPPPIPIPPPPSVPTQDLTPTRPLPSALEEALSNHPFRTGDTGNPVEDWEAKNHSGKPTNSPVPEQSFPPTPKTFCPSPQPPRGPGVSTISKPVMVHQEPNFIYRPAVKSEVLPQEMLKRMVVYQTAFRQDFRKYEEGFDPYSMFTPEQIMGKDVRLLRIKKEGSLDLALEGGVDSPIGKVVVSAVYERGAAERHGGIVKGDEIMAINGKIVTDYTLAEAEAALQKAWNQGGDWIDLVVAVCPPKEYDDELASLPSSVAESPQPVRKLLEDRAAVHRHGFLLQLEPTDLLLKSKRGNQIHR

SEQ ID NO: 69416 - protein, 552 aa, Homo sapiens
MDRKVAREFRHKVDFLIENDAEKDYLYDVLRMYHQTMDVAVLVGDLKLVINEPSRLPLFDAIRPLIPLKHQVEYDQLTPRRSRKLKEVRLDRLHPEGLGLSVRGGLEFGCGLFISHLIKGGQADSVGLQVGDEIVRINGYSISSCTHEEVINLIRTKKTVSIKVRHIGLIPVKSSPDEPLTWQYVDQFVSESGGVRGSLGSPGNRENKEKKVFISLVGSRGLGCSISSGPIQKPGIFISHVKPGSLSAEVGLEIGDQIVEVNGVDFSNLDHKEAVNVLKSSRSLTISIVAAAGRELFMTDRERLAEARQRELQRQELLMQKRLAMESNKILQEQQEMERQRRKEIAQKAAEENERYRKEMEQIVEEEEKFKKQWEEDWGSKEQLLLPKTITAEVHPVPLRKPKYDQGVEPELEPADDLDGGTEEQGEQDFRKYEEGFDPYSMFTPEQIMGKDVRLLRIKKEGSLDLALEGGVDSPIGKVVVSAVYERGAAERHGGIVKGDEIMAINGKIVTDYTLAEAEAALQKAWNQGGDWIDLVVAVCPPKEYDDELTFF

SEQ ID NO: 69417 - protein, 533 aa, Homo sapiens
MDRKVAREFRHKVDFLIENDAEKDYLYDVLRMYHQTMDVAVLVGDLKLVINEPSRLPLFDAIRPLIPLKHQVEYDQLTPRRSRKLKEVRLDRLHPEGLGLSVRGGLEFGCGLFISHLIKGGQADSVGLQVGDEIVRINGYSISSCTHEEVINLIRTKKTVSIKVRHIGLIPVKSSPDEPLTWQYVDQFVSESGGVRGSLGSPGNRENKEKKVFISLVGSRGLGCSISSGPIQKPGIFISHVKPGSLSAEVGLEIGDQIVEVNGVDFSNLDHKEGRELFMTDRERLAEARQRELQRQELLMQKRLAMESNKILQEQQEMERQRRKEIAQKAAEENERYRKEMEQIVEEEEKFKKQWEEDWGSKEQLLLPKTITAEVHPVPLRKPKYDQGVEPELEPADDLDGGTEEQGEQDFRKYEEGFDPYSMFTPEQIMGKDVRLLRIKKEGSLDLALEGGVDSPIGKVVVSAVYERGAAERHGGIVKGDEIMAINGKIVTDYTLAEAEAALQKAWNQGGDWIDLVVAVCPPKEYDDELTFF

SEQ ID NO: 69418 - protein, 521 aa, Homo sapiens
MYHQTMDVAVLVGDLKLVINEPSRLPLFDAIRPLIPLKHQVEYDQLTPRRSRKLKEVRLDRLHPEGLGLSVRGGLEFGCGLFISHLIKGGQADSVGLQVGDEIVRINGYSISSCTHEEVINLIRTKKTVSIKVRHIGLIPVKSSPDEPLTWQYVDQFVSESGGVRGSLGSPGNRENKEKKVFISLVGSRGLGCSISSGPIQKPGIFISHVKPGSLSAEVGLEIGDQIVEVNGVDFSNLDHKEAVNVLKSSRSLTISIVAAAGRELFMTDRERLAEARQRELQRQELLMQKRLAMESNKILQEQQEMERQRRKEIAQKAAEENERYRKEMEQIVEEEEKFKKQWEEDWGSKEQLLLPKTITAEVHPVPLRKPKYDQGVEPELEPADDLDGGTEEQGEQDFRKYEEGFDPYSMFTPEQIMGKDVRLLRIKKEGSLDLALEGGVDSPIGKVVVSAVYERGAAERHGGIVKGDEIMAINGKIVTDYTLAEAEAALQKAWNQGGDWIDLVVAVCPPKEYDDELTFF

SEQ ID NO: 69419 - protein, 703 aa, Homo sapiens
MSARATRPRSRRGRHAPPGELDPVAESSEEVEAASGSSKPSFAPPPVSSGLEQLGPMEEVSGQGLGSRTDKKMDGGSGRELASAPEVPHKPAVEAHQAPEAALQYKETVPPGNGAPDVFQTLQHTLSSLEAAAAAWRHQPPSHSGPMEFEGTSEGGAGSLGKQEGAGSCQREAARLAERNAWLRLALSSREDELVRTQASLEAIRAEKETLQKEVQELQDSLLRLEPCPHLSHNQAGGSGSGSSSSEADREPWETQDSFSLAHPLLRRLRSHSSTQILGSLPNQPLSPEMHIMEAQMEQLRGSIEKLKCFNRLLSAVLQGYKGRCEGLSMQLGQREAEATALHLALQYSEHCEEAYRVLLALREADSGAGDEAPMSDLQAAEKEAWRLLAQEEAAMDAGAQQNPQPSPEGSSVDKPTPQEVAFQLRSYVQRLQERRSLMKILSEPGPTLAPMPTVPRAEAMVQAILGTQAGPALPRLEKTQIQQDLVAAREALADLMLRLQLVRREKRGLELREAALRALGPAHVLLLEQLRWERAELQAGGANSSGGHSSGGGSSGDEEEWYQGLPAVPGGTSGIDGGQVGRAWDPEKLAQELAASLTRTLDLQEQLQSLRRELEQVAQKGRARRSQSAELNRDLCKAHSALVLAFRGAHRKQEEQRRKLEQQMALMEAQQAEEVAVLEATARALGKPRPPLPPPQLGDTFL

SEQ ID NO: 69420 - protein, 383 aa, Homo sapiens
MSARATRPRSRRGRHAPPGELDPVAESSEEVEAASGSSKPSFAPPPVSSGLEQLGPMEEVSGQGLGSRTDKKMDGGSGRELASAPEVPHKPAVEAHQAPEAALQYKETVPPGNGAPDVFQTLQHTLSSLEAAAAAWRHQPPSHSGPMEFEGTSEGGAGSLGKQEGAGSCQREAARLAERNAWLRLALSSREDELVRTQASLEAIRAEKETLQKEVQELQDSLLRLEPCPHLSHNQAGGSGSGSSSSEADREPWETQDSFSLAHPLLRRLRSHSSTQILGSLPNQPLSPEMHIMEAQMEQLRGSIEKLKCFNRLLSAVLQGYKGRCEGLSMQLGQREAEATALHLALQYRVLLCHPGWSAVVPSWLTATSASPVQVILLPQPPE

SEQ ID NO: 69421 - protein, 639 aa, Homo sapiens
MLHPTDKKMDGGSGRELASAPEVPHKPAVEAHQAPEAALQYKETVPPGNGAPDVFQTLQHTLSSLEAAAAAWRHQPPSHSGPMEFEGTSEGGAGSLGKQEGAGSCQREAARLAERNAWLRLALSSREDELVRTQASLEAIRAEKETLQKEVQELQDSLLRLEPCPHLSHNQAGGSGSGSSSSEADREPWETQDSFSLAHPLLRRLRSHSSTQILGSLPNQPLSPEMHIMEAQMEQLRGSIEKLKCFNRLLSAVLQGYKGRCEGLSMQLGQREAEATALHLALQYSEHCEEAYRVLLALREADSGAGDEAPMSDLQAAEKEAWRLLAQEEAAMDAGAQQNPQPSPEGSSVDKPTPQEVAFQLRSYVQRLQERRSLMKILSEPGPTLAPMPTVPRAEAMVQAILGTQAGPALPRLEKTQIQQDLVAAREALADLMLRLQLVRREKRGLELREAALRALGPAHVLLLEQLRWERAELQAGGANSSGGHSSGGGSSGDEEEWYQGLPAVPGGTSGIDGGQVGRAWDPEKLAQELAASLTRTLDLQEQLQSLRRELEQVAQKGRARRSQSAELNRDLCKAHSALVLAFRGAHRKQEEQRRKLEQQMALMEAQQAEEVAVLEATARALGKPRPPLPPPQLGDTFL

SEQ ID NO: 69422 - protein, 461 aa, Homo sapiens
MNDQYHRAARDGYLELLKEATRKELNAPDEDGMTPTLWAAYHGNLESLRLIVSRGGDPDKCDIWGNTPLHLAASNGHLHCLSFLVSFGANIWCLDNDYHTPLDMAAMKGHMECVRYLDSIAAKQSSLNPKLVGKLKDKAFREAERRIRECAKLQRRHHERMERRYRRELAERSDTLSFSSLTSSTLSRRLQHLALGSHLPYSQATLHGTARGKTKMQKKLERRKQGGEGTFKVSEDGRKSARSLSGLQLGSDVMFVRQGTYANPKEWGRAPLRDMFLSDEDSVSRATLAAEPAHSEVSTDSGHDSLFTRPGLGTMVFRRNYLSSGLHGLGREDGGLDGVGAPRGRLQSSPSLDDDSLGSANSLQDRSCGEELPWDELDLGLDEDLEPETSPLETFLASLHMEDFAALLRQEKIDLEALMLCSDLDLRSISVPLGPRKKILGAVRRRRQAMERPPALEDTEL

SEQ ID NO: 69423 - protein, 5202 aa, Homo sapiens
MNCPVLSLGSGFLFQVIEMLIFAYFASISLTESRGLFPRLENVGAFKKVSIVPTQAVCGLPDRSTFCHSSAAAESIQFCTQRFCIQDCPYRSSHPTYTALFSAGLSSCITPDKNDLHPNAHSNSASFIFGNHKSCFSSPPSPKLMASFTLAVWLKPEQQGVMCVIEKTVDGQIVFKLTISEKETMFYYRTVNGLQPPIKVMTLGRILVKKWIHLSVQVHQTKISFFINGVEKDHTPFNARTLSGSITDFASGTVQIGQSLNGLEQFVGRMQDFRLYQVALTNREILEVFSGDLLRLHAQSHCRCPGSHPRVHPLAQRYCIPNDAGDTADNRVSRLNPEAHPLSFVNDNDVGTSWVSNVFTNITQLNQGVTISVDLENGQYQVFYIIIQFFSPQPTEIRIQRKKENSLDWEDWQYFARNCGAFGMKNNGDLEKPDSVNCLQLSNFTPYSRGNVTFSILTPGPNYRPGYNNFYNTPSLQEFVKATQIRFHFHGQYYTTETAVNLRHRYYAVDEITISGRCQCHGHADNCDTTSQPYRCLCSQESFTEGLHCDRCLPLYNDKPFRQGDQVYAFNCKPCQCNSHSKSCHYNISVDPFPFEHFRGGGGVCDDCEHNTTGRNCELCKDYFFRQVGADPSAIDVCKPCDCDTVGTRNGSILCDQIGGQCNCKRHVSGRQCNQCQNGFYNLQELDPDGCSPCNCNTSGTVDGDITCHQNSGQCKCKANVIGLRCDHCNFGFKFLRSFNDVGCEPCQCNLHGSVNKFCNPHSGQCECKKEAKGLQCDTCRENFYGLDVTNCKACDCDTAGSLPGTVCNAKTGQCICKPNVEGRQCNKCLEGNFYLRQNNSFLCLPCNCDKTGTINGSLLCNKSTGQCPCKLGVTGLRCNQCEPHRYNLTIDNFQHCQMCECDSLGTLPGTICDPISGQCLCVPNRQGRRCNQCQPGFYISPGNATGCLPCSCHTTGAVNHICNSLTGQCVCQDASIAGQRCDQCKDHYFGFDPQTGRCQPCNCHLSGALNETCHLVTGQCFCKQFVTGSKCDACVPSASHLDVNNLLGCSKTPFQQPPPRGQVQSSSAINLSWSPPDSPNAHWLTYSLLRDGFEIYTTEDQYPYSIQYFLDTDLLPYTKYSYYIETTNVHGSTRSVAVTYKTKPGVPEGNLTLSYIIPIGSDSVTLTWTTLSNQSGPIEKYILSCAPLAGGQPCVSYEGHETSATIWNLVPFAKYDFSVQACTSGGCLHSLPITVTTAQAPPQRLSPPKMQKISSTELHVEWSPPAELNGIIIRYELYMRRLRSTKETTSEESRVFQSSGWLSPHSFVESANENALKPPQTMTTITGLEPYTKYEFRVLAVNMAGSVSSAWVSERTGESAPVFMIPPSVFPLSSYSLNISWEKPADNVTRGKVVGYDINMLSEQSPQQSIPMAFSQLLHTAKSQELSYTVEGLKPYRIYEFTITLCNSVGCVTSASGAGQTLAAAPAQLRPPLVKGINSTTIHLRWFPPEELNGPSPIYQLERRESSLPALMTTMMKGIRFIGNGYCKFPSSTHPVNTDFTGIKASFRTKVPEGLIVFAASPGNQEEYFALQLKKGRLYFLFDPQGSPVEVTTTNDHGKQYSDGKWHEIIAIRHQAFGQITLDGIYTGSSAILNGSTVIGDNTGVFLGGLPRSYTILRKDPEIIQKGFVGCLKDVHFMKNYNPSAIWEPLDWQSSEEQINVYNSWEGCPASLNEGAQFLGAGFLELHPYMFHGGMNFEISFKFRTDQLNGLLLFVYNKDGPDFLAMELKSGILTFRLNTSLAFTQVDLLLGLSYCNGKWNKVIIKKEGSFISASVNGLMKHASESGDQPLVVNSPVYVGGIPQELLNSYQHLCLEQGFGGCMKDVKFTRGAVVNLASVSSGAVRVNLDGCLSTDSAVNCRGNDSILVYQGKEQSVYEGGLQPFTEYLYRVIASHEGGSVYSDWSRGRTTGAAPQSVPTPSRVRSLNGYSIEVTWDEPVVRGVIEKYILKAYSEDSTRPPRMPSASAEFVNTSNLTGILTGLLPFKNYAVTLTACTLAGCTESSHALNISTPQEAPQEVQPPVAKSLPSSLLLSWNPPKKANGIITQYCLYMDGRLIYSGSEENYIVTDLAVFTPHQFLLSACTHVGCTNSSWVLLYTAQLPPEHVDSPVLTVLDSRTIHIQWKQPRKISGILERYVLYMSNHTHDFTIWSVIYNSTELFQDHMLQYVLPGNKYLIKLGACTGGGCTVSEASEALTDEDIPEGVPAPKAHSYSPDSFNVSWTEPEYPNGVITSYGLYLDGILIHNSSELSYRAYGFAPWSLHSFRVQACTAKGCALGPLVENRTLEAPPEGTVNVFVKTQGSRKAHVRWEAPFRPNGLLTHSVLFTGIFYVDPVGNNYTLLNVTKVMYSGEETNLWVLIDGLVPFTNYTVQVNISNSQGSLITDPITIAMPPGAPDGVLPPRLSSATPTSLQVVWSTPARNNAPGSPRYQLQMRSGDSTHGFLELFSNPSASLSYEVSDLQPYTEYMFRLVASNGFGSAHSSWIPFMTAEDKPGPVVPPILLDVKSRMMLVTWQHPRKSNGVITHYNIYLHGRLYLRTPGNVTNCTVMHLHPYTAYKFQVEACTSKGCSLSPESQTVWTLPGAPEGIPSPELFSDTPTSVIISWQPPTHPNGLVENFTIERRVKGKEEVTTLVTLPRSHSMRFIDKTSALSPWTKYEYRVLMSTLHGGTNSSAWVEVTTRPSRPAGVQPPVVTVLEPDAVQVTWKPPLIQNGDILSYEIHMPDPHITLTNVTSAVLSQKVTHLIPFTNYSVTIVACSGGNGYLGGCTESLPTYVTTHPTVPQNVGPLSVIPLSESYVVISWQPPSKPNGPNLRYELLRRKIQQPLASNPPEDLNRWHNIYSGTQWLYEDKGLSRFTTYEYMLFVHNSVGFTPSREVTVTTLAGLPERGANLTASVLNHTAIDVRWAKPTVQDLQGEVEYYTLFWSSATSNDSLKILPDVNSHVIGHLKPNTEYWIFISVFNGVHSINSAGLHATTCDGEPQGMLPPEVVIINSTAVRVIWTSPSNPNGVVTEYSIYVNNKLYKTGMNVPGSFILRDLSPFTIYDIQVEVCTIYACVKSNGTQITTVEDTPSDIPTPTIRGITSRSLQIDWVSPRKPNGIILGYDLLWKTWYPCAKTQKLVQDQSDELCKAVRCQKPESICGHICYSSEAKVCCNGVLYNPKPGHRCCEEKYIPFVLNSTGVCCGGRIQEAQPNHQCCSGYYARILPGEVCCPDEQHNRVSVGIGDSCCGRMPYSTSGNQICCAGRLHDGHGQKCCGRQIVSNDLECCGGEEGVVYNRLPGMFCCGQDYVNMSDTICCSASSGESKAHIKKNDPVPVKCCETELIPKSQKCCNGVGYNPLKYVCSDKISTGMMMKETKECRILCPASMEATEHCGRCDFNFTSHICTVIRGSHNSTGKASIEEMCSSAEETIHTGSVNTYSYTDVNLKPYMTYEYRISAWNSYGRGLSKAVRARTKEDVPQGVSPPTWTKIDNLEDTIVLNWRKPIQSNGPIIYYILLRNGIERFRGTSLSFSDKEGIQPFQEYSYQLKACTVAGCATSSKVVAATTQGVPESILPPSITALSAVALHLSWSVPEKSNGVIKEYQIRQVGKGLIHTDTTDRRQHTVTGLQPYTNYSFTLTACTSAGCTSSEPFLGQTLQAAPEGVWVTPRHIIINSTTVELYWSLPEKPNGLVSQYQLSRNGNLLFLGGSEEQNFTDKNLEPNSRYTYKLEVKTGGGSSASDDYIVQTPMSTPEEIYPPYNITVIGPYSIFVAWIPPGILIPEIPVEYNVLLNDGSVTPLAFSVGHHQSTLLENLTPFTQYEIRIQACQNGSCGVSSRMFVKTPEAAPMDLNSPVLKALGSACIEIKWMPPEKPNGIIINYFIYRRPAGIEEESVLFVWSEGALEFMDEGDTLRPFTLYEYRVRACNSKGSVESLWSLTQTLEAPPQDFPAPWAQATSAHSVLLNWTKPESPNGIISHYRVVYQERPDDPTFNSPTVHAFTVKGTSHQAHLYGLEPFTTYRIGVVAANHAGEILSPWTLIQTLESSPSGLRNFIVEQKENGRALLLQWSEPMRTNGVIKTYNIFSDGFLEYSGLNRQFLFRRLDPFTLYTLTLEACTRAGCAHSAPQPLWTDEAPPDSQLAPTVHSVKSTSVELSWSEPVNPNGKIIRYEVIRRCFEGKAWGNQTIQADEKIVFTEYNTERNTFMYNDTGLQPWTQCEYKIYTWNSAGHTCSSWNVVRTLQAPPEGLSPPVISYVSMNPQKLLISWIPPEQSNGIIQSYRLQRNEMLYPFSFDPVTFNYTDEELLPFSTYSYALQACTSGGCSTSKPTSITTLEAAPSEVSPPDLWAVSATQMNVCWSPPTVQNGKITKYLVRYDNKESLAGQGLCLLVSHLQPYSQYNFSLVACTNGGCTASVSKSAWTMEALPENMDSPTLQVTGSESIEITWKPPRNPNGQIRSYELRRDGTIVYTGLETRYRDFTLTPGVEYSYTVTASNSQGGILSPLVKDRTSPSAPSGMEPPKLQARGPQEILVNWDPPVRTNGDIINYTLFIRELFERETKIIHINTTHNSFGMQSYIVNQLKPFHRYEIRIQACTTLGCASSDWTFIQTPEIAPLMQPPPHLEVQMAPGGFQPTVSLLWTGPLQPNGKVLYYELYRRQIATQPRKSNPVLIYNGSSTSFIDSELLPFTEYEYQVWAVNSAGKAPSSWTWCRTGPAPPEGLRAPTFHVISSTQAVVNISAPGKPNGIVSLYRLFSSSAHGAETVLSEGMATQQTLHGLQAFTNYSIGVEACTCFNCCSKGPTAELRTHPAPPSGLSSPQIGTLASRTASFRWSPPMFPNGVIHSYELQFHVACPPDSALPCTPSQIETKYTGLGQKASLGGLQPYTTYKLRVVAHNEVGSTASEWISFTTQKELPQYRAPFSVDSNLSVVCVNWSDTFLLNGQLKEYVLTDGGRRVYSGLDTTLYIPRTADKTFFFQVICTTDEGSVKTPLIQYDTSTGLGLVLTTPGKKKGSRSKSTEFYSELWFIVLMAMLGLILLAIFLSLILQRKIHKEPYIRERPPLVPLQKRMSPLNVYPPGENHMGLADTKIPRSGTPVSIRSNRSACVLRIPSQNQTSLTYSQGSLHRSVSQLMDIQDKKVLMDNSLWEAIMGHNSGLYVDEEDLMNAIKDFSSVTKERTTFTDTHL

SEQ ID NO: 69424 - protein, 1546 aa, Homo sapiens
MNCPVLSLGSGFLFQVIEMLIFAYFASISLTESRGLFPRLENVGAFKKVSIVPTQAVCGLPDRSTFCHSSAAAESIQFCTQRFCIQDCPYRSSHPTYTALFSAGLSSCITPDKNDLHPNAHSNSASFIFGNHKSCFSSPPSPKLMASFTLAVWLKPEQQGVMCVIEKTVDGQIVFKLTISEKETMFYYRTVNGLQPPIKVMTLGRILVKKWIHLSVQVHQTKISFFINGVEKDHTPFNARTLSGSITDFASGTVQIGQSLNGLEQFVGRMQDFRLYQVALTNREILEVFSGDLLRLHAQSHCRCPGSHPRVHPLAQRYCIPNDAGDTADNRVSRLNPEAHPLSFVNDNDVGTSWVSNVFTNITQLNQGVTISVDLENGQYQVFYIIIQFFSPQPTEIRIQRKKENSLDWEDWQYFARNCGAFGMKNNGDLEKPDSVNCLQLSNFTPYSRGNVTFSILTPGPNYRPGYNNFYNTPSLQEFVKATQIRFHFHGQYYTTETAVNLRHRYYAVDEITISGRCQCHGHADNCDTTSQPYRCLCSQESFTEGLHCDRCLPLYNDKPFRQGDQVYAFNCKPCQCNSHSKSCHYNISVDPFPFEHFRGGGGVCDDCEHNTTGRNCELCKDYFFRQVGADPSAIDVCKPCDCDTVGTRNGSILCDQIGGQCNCKRHVSGRQCNQCQNGFYNLQELDPDGCSPCNCNTSGTVDGDITCHQNSGQCKCKANVIGLRCDHCNFGFKFLRSFNDVGCEPCQCNLHGSVNKFCNPHSGQCECKKEAKGLQCDTCRENFYGLDVTNCKACDCDTAGSLPGTVCNAKTGQCICKPNVEGRQCNKCLEGNFYLRQNNSFLCLPCNCDKTGTINGSLLCNKSTGQCPCKLGVTGLRCNQCEPHRYNLTIDNFQHCQMCECDSLGTLPGTICDPISGQCLCVPNRQGRRCNQCQPGFYISPGNATGCLPCSCHTTGAVNHICNSLTGQCVCQDASIAGQRCDQCKDHYFGFDPQTGRCQPCNCHLSGALNETCHLVTGQCFCKQFVTGSKCDACVPSASHLDVNNLLGCSKTPFQQPPPRGQVQSSSAINLSWSPPDSPNAHWLTYSLLRDGFEIYTTEDQYPYSIQYFLDTDLLPYTKYSYYIETTNVHGSTRSVAVTYKTKPGVPEGNLTLSYIIPIGSDSVTLTWTTLSNQSGPIEKYILSCAPLAGGQPCVSYEGHETSATIWNLVPFAKYDFSVQACTSGGCLHSLPITVTTAQAPPQRLSPPKMQKISSTELHVEWSPPAELNGIIIRYELYMRRLRSTKETTSEESRVFQSSGWLSPHSFVESANENALKPPQTMTTITGLEPYTKYEFRVLAVNMAGSVSSAWVSERTGESAPVFMIPPSVFPLSSYSLNISWEKPADNVTRGKVVGYDINMLSEQSPQQSIPMAFSQLLHTAKSQELSYTVEGLKPYRIYEFTITLCNSVGCVTSASGAGQTLAAAPAQLRPPLVKGINSTTIHLRWFPPEELNGPSPIYQLERRESSLPALMTTMMKGIRFIGNGYCKFPSSTHPVNTDFTGKCV

SEQ ID NO: 69425 - protein, 5226 aa, Homo sapiens
MNCPVLSLGSGFLFQVIEMLIFAYFASISLTESRGLFPRLENVGAFKKVSIVPTQAVCGLPDRSTFCHSSAAAESIQFCTQRFCIQDCPYRSSHPTYTALFSAGLSSCITPDKNDLHPNAHSNSASFIFGNHKSCFSSPPSPKLMASFTLAVWLKPEQQGVMCVIEKTVDGQIVFKLTISEKETMFYYRTVNGLQPPIKVMTLGRILVKKWIHLSVQVHQTKISFFINGVEKDHTPFNARTLSGSITDFASGTVQIGQSLNGLEQFVGRMQDFRLYQVALTNREILEVFSGDLLRLHAQSHCRCPGSHPRVHPLAQRYCIPNDAGDTADNRVSRLNPEAHPLSFVNDNDVGTSWVSNVFTNITQLNQGVTISVDLENGQYQVFYIIIQFFSPQPTEIRIQRKKENSLDWEDWQYFARNCGAFGMKNNGDLEKPDSVNCLQLSNFTPYSRGNVTFSILTPGPNYRPGYNNFYNTPSLQEFVKATQIRFHFHGQYYTTETAVNLRHRYYAVDEITISGRCQCHGHADNCDTTSQPYRCLCSQESFTEGLHCDRCLPLYNDKPFRQGDQVYAFNCKPCQCNSHSKSCHYNISVDPFPFEHFRGGGGVCDDCEHNTTGRNCELCKDYFFRQVGADPSAIDVCKPCDCDTVGTRNGSILCDQIGGQCNCKRHVSGRQCNQCQNGFYNLQELDPDGCSPCNCNTSGTVDGDITCHQNSGQCKCKANVIGLRCDHCNFGFKFLRSFNDVGCEPCQCNLHGSVNKFCNPHSGQCECKKEAKGLQCDTCRENFYGLDVTNCKACDCDTAGSLPGTVCNAKTGQCICKPNVEGRQCNKCLEGNFYLRQNNSFLCLPCNCDKTGTINGSLLCNKSTGQCPCKLGVTGLRCNQCEPHRYNLTIDNFQHCQMCECDSLGTLPGTICDPISGQCLCVPNRQGRRCNQCQPGFYISPGNATGCLPCSCHTTGAVNHICNSLTGQCVCQDASIAGQRCDQCKDHYFGFDPQTGRCQPCNCHLSGALNETCHLVTGQCFCKQFVTGSKCDACVPSASHLDVNNLLGCSKTPFQQPPPRGQVQSSSAINLSWSPPDSPNAHWLTYSLLRDGFEIYTTEDQYPYSIQYFLDTDLLPYTKYSYYIETTNVHGSTRSVAVTYKTKPGVPEGNLTLSYIIPIGSDSVTLTWTTLSNQSGPIEKYILSCAPLAGGQPCVSYEGHETSATIWNLVPFAKYDFSVQACTSGGCLHSLPITVTTAQAPPQRLSPPKMQKISSTELHVEWSPPAELNGIIIRYELYMRRLRSTKETTSEESRVFQSSGWLSPHSFVESANENALKPPQTMTTITGLEPYTKYEFRVLAVNMAGSVSSAWVSERTGESAPVFMIPPSVFPLSSYSLNISWEKPADNVTRGKVVGYDINMLSEQSPQQSIPMAFSQLLHTAKSQELSYTVEGLKPYRIYEFTITLCNSVGCVTSASGAGQTLAAAPAQLRPPLVKGINSTTIHLRWFPPEELNGPSPIYQLERRESSLPALMTTMMKGIRFIGNGYCKFPSSTHPVNTDFTGIKASFRTKVPEGLIVFAASPGNQEEYFALQLKKGRLYFLFDPQGSPVEVTTTNDHGKQYSDGKWHEIIAIRHQAFGQITLDGIYTGSSAILNGSTVIGDNTGVFLGGLPRSYTILRKDPEIIQKGFVGCLKDVHFMKNYNPSAIWEPLDWQSSEEQINVYNSWEGCPASLNEGAQFLGAGFLELHPYMFHGGMNFEISFKFRTDQLNGLLLFVYNKDGPDFLAMELKSGILTFRLNTSLAFTQVDLLLGLSYCNGKWNKVIIKKEGSFISASVNGLMKHASESGDQPLVVNSPVYVGGIPQELLNSYQHLCLEQGFGGCMKDVKFTRGAVVNLASVSSGAVRVNLDGCLSTDSAVNCRGNDSILVYQGKEQSVYEGGLQPFTEYLYRVIASHEGGSVYSDWSRGRTTGAAPQSVPTPSRVRSLNGYSIEVTWDEPVVRGVIEKYILKAYSEDSTRPPRMPSASAEFVNTSNLTGILTGLLPFKNYAVTLTACTLAGCTESSHALNISTPQEAPQEVQPPVAKSLPSSLLLSWNPPKKANGIITQYCLYMDGRLIYSGSEENYIVTDLAVFTPHQFLLSACTHVGCTNSSWVLLYTAQLPPEHVDSPVLTVLDSRTIHIQWKQPRKISGILERYVLYMSNHTHDFTIWSVIYNSTELFQDHMLQYVLPGNKYLIKLGACTGGGCTVSEASEALTDEDIPEGVPAPKAHSYSPDSFNVSWTEPEYPNGVITSYGLYLDGILIHNSSELSYRAYGFAPWSLHSFRVQACTAKGCALGPLVENRTLEAPPEGTVNVFVKTQGSRKAHVRWEAPFRPNGLLTHSVLFTGIFYVDPVGNNYTLLNVTKVMYSGEETNLWVLIDGLVPFTNYTVQVNISNSQGSLITDPITIAMPPGAPDGVLPPRLSSATPTSLQVVWSTPARNNAPGSPRYQLQMRSGDSTHGFLELFSNPSASLSYEVSDLQPYTEYMFRLVASNGFGSAHSSWIPFMTAEDKPGPVVPPILLDVKSRMMLVTWQHPRKSNGVITHYNIYLHGRLYLRTPGNVTNCTVMHLHPYTAYKFQVEACTSKGCSLSPESQTVWTLPGAPEGIPSPELFSDTPTSVIISWQPPTHPNGLVENFTIERRVKGKEEVTTLVTLPRSHSMRFIDKTSALSPWTKYEYRVLMSTLHGGTNSSAWVEVTTRPSRPAGVQPPVVTVLEPDAVQVTWKPPLIQNGDILSYEIHMPDPHITLTNVTSAVLSQKVTHLIPFTNYSVTIVACSGGNGYLGGCTESLPTYVTTHPTVPQNVGPLSVIPLSESYVVISWQPPSKPNGPNLRYELLRRKIQQPLASNPPEDLNRWHNIYSGTQWLYEDKGLSRFTTYEYMLFVHNSVGFTPSREVTVTTLAGLPERGANLTASVLNHTAIDVRWAKPTVQDLQGEVEYYTLFWSSATSNDSLKILPDVNSHVIGHLKPNTEYWIFISVFNGVHSINSAGLHATTCDGEPQGMLPPEVVIINSTAVRVIWTSPSNPNGVVTEYSIYVNNKLYKTGMNVPGSFILRDLSPFTIYDIQVEVCTIYACVKSNGTQITTVEDTPSDIPTPTIRGITSRSLQIDWVSPRKPNGIILGYDLLWKTWYPCAKTQKLVQDQSDELCKAVRCQKPESICGHICYSSEAKVCCNGVLYNPKPGHRCCEEKYIPFVLNSTGVCCGGRIQEAQPNHQCCSGYYARILPGEVCCPDEQHNRVSVGIGDSCCGRMPYSTSGNQICCAGRLHDGHGQKCCGRQIVSNDLECCGGEEGVVYNRLPGMFCCGQDYVNMSDTICCSASSGESKAHIKKNDPVPVKCCETELIPKSQKCCNGVGYNPLKYVCSDKISTGMMMKETKECRILCPASMEATEHCGRCDFNFTSHICTVIRGSHNSTGKASIEEMCSSAEETIHTGSVNTYSYTDVNLKPYMTYEYRISAWNSYGRGLSKAVRARTKEDVPQGVSPPTWTKIDNLEDTIVLNWRKPIQSNGPIIYYILLRNGIERFRGTSLSFSDKEGIQPFQEYSYQLKACTVAGCATSSKVVAATTQGVPESILPPSITALSAVALHLSWSVPEKSNGVIKEYQIRQVGKGLIHTDTTDRRQHTVTGLQPYTNYSFTLTACTSAGCTSSEPFLGQTLQAAPEGVWVTPRHIIINSTTVELYWSLPEKPNGLVSQYQLSRNGNLLFLGGSEEQNFTDKNLEPNSRYTYKLEVKTGGGSSASDDYIVQTPMSTPEEIYPPYNITVIGPYSIFVAWIPPGILIPEIPVEYNVLLNDGSVTPLAFSVGHHQSTLLENLTPFTQYEIRIQACQNGSCGVSSRMFVKTPEAAPMDLNSPVLKALGSACIEIKWMPPEKPNGIIINYFIYRRPAGIEEESVLFVWSEGALEFMDEGDTLRPFTLYEYRVRACNSKGSVESLWSLTQTLEAPPQDFPAPWAQATSAHSVLLNWTKPESPNGIISHYRVVYQERPDDPTFNSPTVHAFTVKGTSHQAHLYGLEPFTTYRIGVVAANHAGEILSPWTLIQTLESSPSGLRNFIVEQKENGRALLLQWSEPMRTNGVIKTYNIFSDGFLEYSGLNRQFLFRRLDPFTLYTLTLEACTRAGCAHSAPQPLWTDEAPPDSQLAPTVHSVKSTSVELSWSEPVNPNGKIIRYEVIRRCFEGKAWGNQTIQADEKIVFTEYNTERNTFMYNDTGLQPWTQCEYKIYTWNSAGHTCSSWNVVRTLQAPPEGLSPPVISYVSMNPQKLLISWIPPEQSNGIIQSYRLQRNEMLYPFSFDPVTFNYTDEELLPFSTYSYALQACTSGGCSTSKPTSITTLEAAPSEVSPPDLWAVSATQMNVCWSPPTVQNGKITKYLVRYDNKESLAGQGLCLLVSHLQPYSQYNFSLVACTNGGCTASVSKSAWTMEALPENMDSPTLQVTGSESIEITWKPPRNPNGQIRSYELRRDGTIVYTGLETRYRDFTLTPGVEYSYTVTASNSQGGILSPLVKDRTSPSAPSGMEPPKLQARGPQEILVNWDPPVRTNGDIINYTLFIRELFERETKIIHINTTHNSFGMQSYIVNQLKPFHRYEIRIQACTTLGCASSDWTFIQTPEIAPLMQPPPHLEVQMAPGGFQPTVSLLWTGPLQPNGKVLYYELYRRQIATQPRKSNPVLIYNGSSTSFIDSELLPFTEYEYQVWAVNSAGKAPSSWTWCRTGPAPPEGLRAPTFHVISSTQAVVNISAPGKPNGIVSLYRLFSSSAHGAETVLSEGMATQQTLHGLQAFTNYSIGVEACTCFNCCSKGPTAELRTHPAPPSGLSSPQIGTLASRTASFRWSPPMFPNGVIHSYELQFHVACPPDSALPCTPSQIETKYTGLGQKASLGGLQPYTTYKLRVVAHNEVGSTASEWISFTTQKELPQYRAPFSVDSNLSVVCVNWSDTFLLNGQLKEYVLTDGGRRVYSGLDTTLYIPRTADKTFFFQVICTTDEGSVKTPLIQYDTSTGLGLVLTTPGKKKGSRSKSTEFYSELWFIVLMAMLGLILLAIFLSLILQRKIHKEPYIRERPPLVPLQKRMSPLNVYPPGENHMFDSVADISDVSSNVTLKSYTMHFEGLADTKIPRSGTPVSIRSNRSACVLRIPSQNQTSLTYSQGSLHRSVSQLMDIQDKKVLMDNSLWEAIMGHNSGLYVDEEDLMNAIKDFSSVTKERTTFTDTHL

SEQ ID NO: 69426 - protein, 845 aa, Homo sapiens
MRTEAVVNSQGQTDYLTKDSDQDVALKLAQERAEIVAKYDRGREGAEIEPWEDADYLVYKVTDRFGFLHEEELPDHNVAVERQKHLEIERTTKWLKMLKGWEKYKNTEKFHRRIYKGIPLQLRGEVWALLLEIPKMKEETRDLYSKLKHRARGCSPDIRQIDLDVNRTFRDHIMFRDRYGVKQQSLFHVLAAYSIYNTEVGYCQGMSQITALLLMYMNEEDAFWALVKLFSGPKHAMHGFFVQGFPKLLRFQEHHEKILNKFLSKLKQHLDSQEIYTSFYTMKWFFQCFLDRTPFTLNLRIWDIYIFEGERVLTAMSYTILKLHKKHLMKLSMEELVEFFQETLAKDFFFEDDFVIEQLQISMTELKRAKLDLPEPGKEDEYPKKPLGQLPPELQSWGVHHLSNGQRSVGRPSPLASGRRESGAPHRRHEHSPHPQSRTGTPERAQPPRRKSVEEESKKLKDEADFQRKLPSGPQDSSRQYNHAAANQNSNATSNIRKEFVPKWNKPSDVSATERTAKYTMEGKGRAAHPALAVTVPGPAEVRVSNVRPKMKALDAEDGKRGSTASQYDNVPGPELDSGASVEEALERAYSQSPRHALYPPSPRKHAEPSSSPSKVSNKFTFKVQPPSHARYPSQLDGEARGLAHPPSYSNPPVYHGNSPKHFPTANSSFASPQFSPGTQLNPSRRPHGSTLSVSASPEKSYSRPSPLVLPSSRIEVLPVDTGAGGYSGNSGSPKNGKLIIPPVDYLPDNRTWSEVSYTYRPETQGQSWTRDASRGNLPKYSAFQLAPFQDHGLPAVSVDSPVRYKASPAAEDASPSGYPYSGPPPPAYHYRNRDGLSIQESVLL

SEQ ID NO: 69427 - protein, 828 aa, Homo sapiens
MNSDQDVALKLAQERAEIVAKYDRGREGAEIEPWEDADYLVYKVTDRFGFLHEEELPDHNVAVERQKHLEIERTTKWLKMLKGWEKYKNTEKFHRRIYKGIPLQLRGEVWALLLEIPKMKEETRDLYSKLKHRARGCSPDIRQIDLDVNRTFRDHIMFRDRYGVKQQSLFHVLAAYSIYNTEVGYCQGMSQITALLLMYMNEEDAFWALVKLFSGPKHAMHGFFVQGFPKLLRFQEHHEKILNKFLSKLKQHLDSQEIYTSFYTMKWFFQCFLDRTPFTLNLRIWDIYIFEGERVLTAMSYTILKLHKKHLMKLSMEELVEFFQETLAKDFFFEDDFVIEQLQISMTELKRAKLDLPEPGKEDEYPKKPLGQLPPELQSWGVHHLSNGQRSVGRPSPLASGRRESGAPHRRHEHSPHPQSRTGTPERAQPPRRKSVEEESKKLKDEADFQRKLPSGPQDSSRQYNHAAANQNSNATSNIRKEFVPKWNKPSDVSATERTAKYTMEGKGRAAHPALAVTVPGPAEVRVSNVRPKMKALDAEDGKRGSTASQYDNVPGPELDSGASVEEALERAYSQSPRHALYPPSPRKHAEPSSSPSKVSNKFTFKVQPPSHARYPSQLDGEARGLAHPPSYSNPPVYHGNSPKHFPTANSSFASPQFSPGTQLNPSRRPHGSTLSVSASPEKSYSRPSPLVLPSSRIEVLPVDTGAGGYSGNSGSPKNGKLIIPPVDYLPDNRTWSEVSYTYRPETQGQSWTRDASRGNLPKYSAFQLAPFQDHGLPAVSVDSPVRYKASPAAEDASPSGYPYSGPPPPAYHYRNRDGLSIQESVLL

SEQ ID NO: 69428 - protein, 828 aa, Homo sapiens; identical to SEQ ID NO: 69427

SEQ ID NO: 69429 - protein, 253 aa, Homo sapiens
MAAAFRKAAKSRQREHRERSQPGFRKHLGLLEKKKDYKLRADDYRKKQEYLKALRKKALEKNPDEFYYKMTRVKLQDGVHIIKETKEEVTPEQLKLMRTQDVKYIEMKRVAEAKKIERLKSELHLLDFQGKQQNKHVFFFDTKKEVEQFDVATHLQTAPELVDRVFNRPRIETLQKEKVKGVTNQTGLKRIAKERQKQYNCLTQRIEREKKLFVIAQKIQTRKDLMDKTQKVKVKKETVNSPAIYKFQSRRKR

SEQ ID NO: 69430 - protein, 148 aa, Homo sapiens
MAAAFRKAAKSRQREHRERSQPGFRKHLGLLEKKKDYKLRADDYRKKQEYLKALRKKALEKNPDEFYYKMTRVKLQDGVHIIKETKEEVTPEQLKLMRTQDVKYIEMKRVAEAKKIERLKSELHLLDFQGKQQNKHVFFFDTKKEANS

SEQ ID NO: 69431 - protein, 556 aa, Homo sapiens
MPPERRRRMKLDRRTGAKPKRKPGMRPDWKAGAGPGGPPQKPAPSSQRKPPARPSAAAAAIAVAAAEEERRLRQRNRLRLEEDKPAVERCLEELVFGDVENDEDALLRRLRGPRVQEHEDSGDSEVENEAKGNFPPQKKPVWVDEEDEDEEMVDMMNNRFRKDMMKNASESKLSKDNLKKRLKEEFQHAMGGVPAWAETTKRKTSSDDESEEDEDDLLQRTGNFISTSTSLPRGILKMKNCQHANAERPTVARISSVQFHPGAQIVMVAGLDNAVSLFQVDGKTNPKIQSIYLERFPIFKACFSANGEEVLATSTHSKVLYVYDMLAGKLIPVHQVRGLKEKIVRSFEVSPDGSFLLINGIAGYLHLLAMKTKELIGSMKINGRVAASTFSSDSKKVYASSGDGEVYVWDVNSRKCLNRFVDEGSLYGLSIATSRNGQYVACGSNCGVVNIYNQDSCLQETNPKPIKAIMNLVTGVTSLTFNPTTEILAIASEKMKEAVRLVHLPSCTVFSNFPVIKNKNISHVHTMDFSPRSGYFALGNEKGKALMYRLHHYSDF

SEQ ID NO: 69432 - protein, 521 aa, Homo sapiens
MRPDWKAGAGPGGPPQKPAPSSQRKPPARPSAAAAAIAVAAAEEERRLRQRNRLRLEEDKPAVERCLEELVFGDVENDEDALLRRLRGPRVQEHEDSGDSEVENEAKGNFPPQKKPVWVDEEDEDEEMVDMMNNRFRKDMMKNASESKLSKDNLKKRLKEEFQHAMGGVPAWAETTKRKTSSDDESEEDEDDLLQRTGNFISTSTSLPRGILKMKNCQHANAERPTVARISSVQFHPGAQIVMVAGLDNAVSLFQVDGKTNPKIQSIYLERFPIFKACFSANGEEVLATSTHSKVLYVYDMLAGKLIPVHQVRGLKEKIVRSFEVSPDGSFLLINGIAGYLHLLAMKTKELIGSMKINGRVAASTFSSDSKKVYASSGDGEVYVWDVNSRKCLNRFVDEGSLYGLSIATSRNGQYVACGSNCGVVNIYNQDSCLQETNPKPIKAIMNLVTGVTSLTFNPTTEILAIASEKMKEAVRLVHLPSCTVFSNFPVIKNKNISHVHTMDFSPRSGYFALGNEKARP

SEQ ID NO: 69433 - protein, 2785 aa, Homo sapiens
MKTKPVSHKTENTYRFLTFAERLGNVNIDIIHRIDRTASYEEEVETYFFEGLLKWRELNLTEHFGKFYKEVIDKCQSFNQLVYHQNEIVQSLKTHLQVKNSFAYQPLLDLVVQLARDLQMDFYPHFPEFFLTITSILETQDTELLEWAFTSLSYLYKYLWRLMVKDMSSIYSMYSTLLAHKKLHIRNFAAESFTFLMRKVSDKNALFNLMFLDLDKHPEKVEGVGQLLFEMCKGVRNMFHSCTGQAVKLILRKLGPVTETETQLPWMLIGETLKNMVKSTVSYISKEHFGTFFECLQESLLDLHTKVTKTNCCESSEQIKRLLETYLILVKHGSGTKIPTPADVCKVLSQTLQVASLSTSCWETLLDVISALILGENVSLPETLIKETIEKIFESRFEKRLIFSFSEVMFAMKQFEQLFLPSFLSYIVNCFLIDDAVVKDEALAILAKLILNKAAPPTAGSMAIEKYPLVFSPQMVGFYIKQKKTRSKGRNEQFPVLDHLLSIIKLPPNKDTTYLSQSWAALVVLPHIRPLEKEKVIPLVTGFIEALFMTVDKGSFGKGNLFVLCQAVNTLLSLEESSELLHLVPVERVKNLVLTFPLEPSVLLLTDLYYQRLALCGCKGPLSQEALMELFPKLQANISTGVSKIRLLTIRILNHFDVQLPESMEDDGLSERQSVFAILRQAELVPATVNDYREKLLHLRKLRHDVVQTAVPDGPLQEVPLRYLLGMLYINFSALWDPVIELISSHAHEMENKQFWKVYYEHLEKAATHAEKELQNDMTDEKSVGDESWEQTQEGDVGALYHEQLALKTDCQERLDHTNFRFLLWRALTKFPERVEPRSRELSPLFLRFINNEYYPADLQVAPTQDLRRKGKGMVAEEIEEEPAAGDDEELEEEAVPQDESSQKKKTRRAAAKQLIAHLQVFSKFSNPRALYLESKLYELYLQLLLHQDQMVQKITLDCIMTYKHPHVLPYRENLQRLLEDRSFKEEIVHFSISEDNAVVKTAHRADLFPILMRILYGRMKNKTGSKTQGKSASGTRMAIVLRFLAGTQPEEIQIFLDLLFEPVRHFKNGECHSAVIQAVEDLDLSKVLPLGRQHGILNSLEIVLKNISHLISAYLPKILQILLCMTATVSHILDQREKIQLRFINPLKNLRRLGIKMVTDIFLDWESYQFRTEEIDAVFHGAVWPQISRLGSESQYSPTPLLKLISIWSRNARYFPLLAKQKPGHPECDILTNVFAILSAKNLSDATASIVMDIVDDLLNLPDFEPTETVLNLLVTGCVYPGIAENIGESITIGGRLILPHVPAILQYLSKTTISAEKVKKKKNRAQVSKELGILSKISKFMKDKEQSSVLITLLLPFLHRGNIAEDTEVDILVTVQNLLKHCVDPTSFLKPIAKLFSVIKNKLSRKLLCTVFETLSDFESGLKYITDVVKLNAFDQRHLDDINFDVRFETFQTITSYIKEMQIVDVNYLIPVMHNCFYNLELGDMSLSDNASMCLMSIIKKLAALNVTEKDYREIIHRSLLEKLRKGLKSQTESIQQDYTTILSCLIQTFPNQLEFKDLVQLTHYHDPEMDFFENMKHIQIHRRARALKKLAKQLMEGKVVLSSKSLQNYIMPYAMTPIFDEKMLKHENITTAATEIIGAICKHLSWSAYMYYLKHFIHVLQTGQINQKLGVSLLVIVLEAFHFDHKTLEEQMGKIENEENAIEAIELPEPEAMELERVDEEEKEYTCKSLSDNGQPGTPDPADSGGTSAKESECITKPVSFLPQNKEEIERTIKNIQGTITGDILPRLHKCLASTTKREEEHKLVKSKVVNDEEVVRVPLAFAMVKLMQSLPQEVMEANLPSILLKVCALLKNRAQEIRDIARSTLAKIIEDLGVHFLLYVLKELQTTLVRGYQVHVLTFTVHMLLQGLTNKLQVGDLDSCLDIMIEIFNHELFGAVAEEKEVKQILSKVMEARRSKSYDSYEILGKFVGKDQVTKLILPLKEILQNTTSLKLARKVHETLRRITVGLIVNQEMTAESILLLSYGLISENLPLLTEKEKNPVAPAPDPRLPPQSCLLLPPTPVRGGQKAVVSRKTNMHIFIESGLRLLHLSLKTSKIKSSGECVLEMLDPFVSLLIDCLGSMDVKVITGALQCLIWVLRFPLPSIETKAEQLTKHLFLLLKDYAKLGAARGQNFHLVVNCFKCVTILVKKVKSYQITEKQLQVLLAYAEEDIYDTSRQATAFGLLKAILSRKLLVPEIDEVMRKVSKLAVSAQSEPARVQCRQVFLKYILDYPLGDKLRPNLEFMLAQLNYEHETGRESTLEMIAYLFDTFPQGLLHENCGMFFIPLCLMTINDDSATCKKMASMTIKSLLGKISLEKKDWLFDMVTTWFGAKKRLNRQLAALICGLFVESEGVDFEKRLGTVLPVIEKEIDPENFKDIMEETEEKAADRLLFSFLTLITKLIKECNIIQFTKPAETLSKIWSHVHSHLRHPHNWVWLTAAQIFGLLFASCQPEELIQKWNTKKTKKHLPEPVAIKFLASDLDQKMKSISLASCHQLHSKFLDQSLGEQVVKNLLFAAKVLYLLELYCEDKQSKIKEDLEEQEALEDGVACADEKAESDGEEKEEVKEELGRPATLLWLIQKLSRIAKLEAAYSPRNPLKRTCIFKFLGAVAMDLGIDKVKPYLPMIIAPLFRELNSTYSEQDPLLKNLSQEIIELLKKLVGLESFSLAFASVQKQANEKRALRKKRKALEFVTNPDIAAKKKMKKHKNKSEAKKRKIEFLRPGYKAKRQKSHSLKDLAMVE

SEQ ID NO: 69434 - protein, 479 aa, Homo sapiens
MVGRSRRRGAAKWAAVRAKAGPTLTDENGDDLGLPPSPGDTSYYQDQVDDFHEARSRAALAKGWNEVQSGDEEDGEEEEEEVLALDMDDEDDEDGGNAGEEEEEENADDDGGSSVQSEAEASVDPSLSWGQRKKLYYDTDYGSKSRGRQSQQEAEEEEREEEEEAQIIQRRLAQALQEDDFGVAWVEAFAKPVPQVDEAETRVVKDLAKVSVKEKLKMLRKESPELLELIEDLKVKLTEVKDELEPLLELVEQGIIPPGKGSQYLRTKYNLYLNYCSNISFYLILKARRVPAHGHPVIERLVTYRNLINKLSVVDQKLSSEIRHLLTLKDDAVKKELIPKAKSTKPKPKSVSKTSAAACAVTDLSDDSDFDEKAKLKYYKEIEDRQKLKRKKEENSTEEQALEDQNAKRAITYQIAKNRGLTPRRKKIDRNPRVKHREKFRRAKIRRRGQVREVRKEEQRYSGELSGIRAGVKKSIKLK

SEQ ID NO: 69435 - protein, 251 aa, Homo sapiens
  VARIANT 1: note = MOD_RES - Any amino acid
XIGLMSLSKGLLEEKYRYLFKEVAGPTEMCDQRQLGLLLHDAIQIPRQLGEVAAFGGSNIEPSVRSCFQQNNNKPEISVKEFIDWMHLEPQSMVWLPVLHRVAAAETAKHQAKCNICKECPIVGFRYRSLKHFNYDVCQSCFFSGRTAKGHKLHYPMVEYCIPTTSGEDVRDFTKVLKNKFRSKKYFAKHPRLGYLPVQTVLEGDNLETPSQSPQLFHDDTHSRIEQYATRLAQMERTNGSFLTDSSSTTG

SEQ ID NO: 69436 - protein, 66 aa, Homo sapiens
MIGLNFNLRELLTKFEKDIQAEIDAHNDIFKSIDGNRQKMVKALGNSEEATMLQHRLDDMNQRWND

SEQ ID NO: 69437 - protein, 988 aa, Homo sapiens
MQILRCLQKCGKLKMMAVVRTSLQKVVVLLHRLQRMAVSSPRYQKLCKDIQAEIDAHNDIFKSIDGNRQKMVKALGNSEEATMLQHRLDDMNQRWNDLKAKSASIRAHLEASAEKWNRLLMSLEELIKWLNMKDEELKKQMPIGGDVPALQLQYDHCKALRRELKEKEYSVLNAVDQARVFLADQPIEAPEEPRRNLQSKTELTPEERAQKIAKAMRKQSSEVKEKWESLNAVTSNWQKQVDKALEKLRDLQGAMDDLDADMKEAESVRNGWKPVGDLLIDSLQDHIEKIMAFREEIAPINFKVKTVNDLSSQLSPLDLHPSLKMSRQLDDLNMRWKLLQVSVDDRLKQLQEAHRDFGPSSQHFLSTSVQLPWQRSISHNKVPYYINHQTQTTCWDHPKMTELFQSLADLNNVRFSAYRTAIKIRRLQKALCLDLLELSTTNEIFKQHKLNQNDQLLSVPDVINCLTTTYDGLEQMHKDLVNVPLCVDMCLNWLLNVYDTGRTGKIRVQSLKIGLMSLSKGLLEEKYRYLFKEVAGPTEMCDQRQLGLLLHDAIQIPRQLGEVAAFGGSNIEPSVRSCFQQNNNKPEISVKEFIDWMHLEPQSMVWLPVLHRVAAAETAKHQAKCNICKECPIVGFRYRSLKHFNYDVCQSCFFSGRTAKGHKLHYPMVEYCIPTTSGEDVRDFTKVLKNKFRSKKYFAKHPRLGYLPVQTVLEGDNLETPITLISMWPEHYDPSQSPQLFHDDTHSRIEQYATRLAQMERTNGSFLTDSSSTTGSVEDEHALIQQYCQTLGGESPVSQPQSPAQILKSVEREERGELERIIADLEEEQRNLQVEYEQLKDQHLRRGLPVGSPPESIISPHHTSEDSELIAEAKLLRQHKGRLEARMQILEDHNKQLESQLHRLRQLLEQPESDSRINGVSPWASPQHSALSYSLDPDASGPQFHQAAGEDLLAPPHDTSTDLTEVMEQIHSTFPSCCPNVPSRPQAM

SEQ ID NO: 69438 - protein, 1022 aa, Homo sapiens
MAKYGEHEASPDNGQNEFSDIIKSRSDEHNDVQKKTFTKWINARFSKSGKPPINDMFTDLKDGRKLLDLLEGLTGTSLPKERGSTRVHALNNVNRVLQVLHQNNVELVNIGGTDIVDGNHKLTLGLLWSIILHWQVKDVMKDVMSDLQQTNSEKILLSWVRQTTRPYSQVNVLNFTTSWTDGLAFNAVLHRHKPDLFSWDKVVKMSPIERLEHAFSKAQTYLGIEKLLDPEDVAVQLPDKKSIIMYLTSLFEVLPQQVTIDAIREVETLPRKYKKECEEEAINIQSTAPEEEHESPRAETPSTVTEVDMDLDSYQIALEEVLTWLLSAEDTFQEQDDISDDVEEVKDQFATHEAFMMELTAHQSSVGSVLQAGNQLITQGTLSDEEEFEIQEQMTLLNARWEALRVESMDRQSRLHDVLMELQKKQLQQLSAWLTLTEERIQKMETCPLDDDVKSLQKLLEEHKSLQSDLEAEQVKVNSLTHMVVIVDENSGESATAILEDQLQKLGERWTAVCRWTEERWNRLQEINILWQELLEEQCLLKAWLTEKEEALNKVQTSNFKDQKELSVSVRRLAILKEDMEMKRQTLDQLSEIGQDVGQLLDNSKASKKINSDSEELTQRWDSLVQRLEDSSNQVTQAVAKLGMSQIPQKDLLETVRVREQAITKKSKQELPPPPPPKKRQIHVDIEAKKKFDAISAELLNWILKWKTAIQTTEIKEYMKMQDTSEMKKKLKALEKEQRERIPRADELNQTGQILVEQMGKEGLPTEEIKNVLEKVSSEWKNVSQHLEDLERKIQLQEDINAYFKQLDELEKVIKTKEEWVKHTSISESSRQSLPSLKDSCQRELTNLLGLHPKIEMARASCSALMSQPSAPDFVQRGFDSFLGRYQAVQEAVEDRQQHLENELKGQPGHAYLETLKTLKDVLNDSENKAQVSLNVLNDLAKVEKALQEKKTLDEILENQKPALHKLAEETKALEKNVHPDVEKLYKQEFDDVQGKWNKLKVLVSKDLHLLEEIALTLRAFE

SEQ ID NO: 69439 - protein, 3433 aa, Homo sapiens
MAKYGEHEASPDNGQNEFSDIIKSRSDEHNDVQKKTFTKWINARFSKSGKPPINDMFTDLKDGRKLLDLLEGLTGTSLPKERGSTRVHALNNVNRVLQVLHQNNVELVNIGGTDIVDGNHKLTLGLLWSIILHWQVKDVMKDVMSDLQQTNSEKILLSWVRQTTRPYSQVNVLNFTTSWTDGLAFNAVLHRHKPDLFSWDKVVKMSPIERLEHAFSKAQTYLGIEKLLDPEDVAVQLPDKKSIIMYLTSLFEVLPQQVTIDAIREVETLPRKYKKECEEEAINIQSTAPEEEHESPRAETPSTVTEVDMDLDSYQIALEEVLTWLLSAEDTFQEQDDISDDVEEVKDQFATHEAFMMELTAHQSSVGSVLQAGNQLITQGTLSDEEEFEIQEQMTLLNARWEALRVESMDRQSRLHDVLMELQKKQLQQLSAWLTLTEERIQKMETCPLDDDVKSLQKLLEEHKSLQSDLEAEQVKVNSLTHMVVIVDENSGESATAILEDQLQKLGERWTAVCRWTEERWNRLQEINILWQELLEEQCLLKAWLTEKEEALNKVQTSNFKDQKELSVSVRRLAILKEDMEMKRQTLDQLSEIGQDVGQLLDNSKASKKINSDSEELTQRWDSLVQRLEDSSNQVTQAVAKLGMSQIPQKDLLETVRVREQAITKKSKQELPPPPPPKKRQIHVDIEAKKKFDAISAELLNWILKWKTAIQTTEIKEYMKMQDTSEMKKKLKALEKEQRERIPRADELNQTGQILVEQMGKEGLPTEEIKNVLEKVSSEWKNVSQHLEDLERKIQLQEDINAYFKQLDELEKVIKTKEEWVKHTSISESSRQSLPSLKDSCQRELTNLLGLHPKIEMARASCSALMSQPSAPDFVQRGFDSFLGRYQAVQEAVEDRQQHLENELKGQPGHAYLETLKTLKDVLNDSENKAQVSLNVLNDLAKVEKALQEKKTLDEILENQKPALHKLAEETKALEKNVHPDVEKLYKQEFDDVQGKWNKLKVLVSKDLHLLEEIALTLRAFEADSTVIEKWMDGVKDFLMKQQAAQGDDAGLQRQLDQCSAFVNEIETIESSLKNMKEIETNLRSGPVAGIKTWVQTRLGDYQTQLEKLSKEIATQKSRLSESQEKAANLKKDLAEMQEWMTQAEEEYLERDFEYKSPEELESAVEEMKRAKEDVLQKEVRVKILKDNIKLLAAKVPSGGQELTSELNVVLENYQLLCNRIRGKCHTLEEVWSCWIELLHYLDLETTWLNTLEERMKSTEVLPEKTDAVNEALESLESVLRHPADNRTQIRELGQTLIDGGILDDIISEKLEAFNSRYEDLSHLAESKQISLEKQLQVLRETDQMLQVLQESLGELDKQLTTYLTDRIDAFQVPQEAQKIQAEISAHELTLEELRRNMRSQPLTSPESRTARGGSQMDVLQRKLREVSTKFQLFQKPANFEQRMLDCKRVLDGVKAELHVLDVKDVDPDVIQTHLDKCMKLYKTLSEVKLEVETVIKTGRHIVQKQQTDNPKGMDEQLTSLKVLYNDLGAQVTEGKQDLERASQLARKMKKEAASLSEWLSATETELVQKSTSEGLLGDLDTEISWAKNVLKDLEKRKADLNTITESSAALQNLIEGSEPILEERLCVLNAGWSRVRTWTEDWCNTLMNHQNQLEIFDGNVAHISTWLYQAEALLDEIEKKPTSKQEEIVKRLVSELDDANLQVENVRDQALILMNARGSSSRELVEPKLAELNRNFEKVSQHIKSAKLLIAQEPLYQCLVTTETFETGVPFSDLEKLENDIENMLKFVEKHLESSDEDEKMDEESAQIEEVLQRGEEMLHQPMEDNKKEKIRLQLLLLHTRYNKIKAIPIQQRKMGQLASGIRSSLLPTDYLVEINKILLCMDDVELSLNVPELNTAIYEDFSFQEDSLKNIKDQLDKLGEQIAVIHEKQPDVILEASGPEAIQIRDTLTQLNAKWDRINRMYSDRKGCFDRAMEEWRQFHCDLNDLTQWITEAEELLVDTCAPGGSLDLEKARIHQQELEVGISSHQPSFAALNRTGDGIVQKLSQADGSFLKEKLAGLNQRWDAIVAEVKDRQPRLKGESKQVMKYRHQLDEIICWLTKAEHAMQKRSTTELGENLQELRDLTQEMEVHAEKLKWLNRTELEMLSDKSLSLPERDKISESLRTVNMTWNKICREVPTTLKECIQEPSSVSQTRIAAHPNVQKVVLVSSASDIPVQSHRTSEISIPADLDKTITELADWLVLIDQMLKSNIVTVGDVEEINKTVSRMKITKADLEQRHPQLDYVFTLAQNLKNKASSSDMRTAITEKLERVKNQWDGTQHGVELRQQQLEDMIIDSLQWDDHREETEELMRKYEARLYILQQARRDPLTKQISDNQILLQELGPGDGIVMAFDNVLQKLLEEYGSDDTRNVKETTEYLKTSWINLKQSIADRQNALEAEWRTVQASRRDLENFLKWIQEAETTVNVLVDASHRENALQDSILARELKQQMQDIQAEIDAHNDIFKSIDGNRQKMVKALGNSEEATMLQHRLDDMNQRWNDLKAKSASIRAHLEASAEKWNRLLMSLEELIKWLNMKDEELKKQMPIGGDVPALQLQYDHCKALRRELKEKEYSVLNAVDQARVFLADQPIEAPEEPRRNLQSKTELTPEERAQKIAKAMRKQSSEVKEKWESLNAVTSNWQKQVDKALEKLRDLQGAMDDLDADMKEAESVRNGWKPVGDLLIDSLQDHIEKIMAFREEIAPINFKVKTVNDLSSQLSPLDLHPSLKMSRQLDDLNMRWKLLQVSVDDRLKQLQEAHRDFGPSSQHFLSTSVQLPWQRSISHNKVPYYINHQTQTTCWDHPKMTELFQSLADLNNVRFSAYRTAIKIRRLQKALCLDLLELSTTNEIFKQHKLNQNDQLLSVPDVINCLTTTYDGLEQMHKDLVNVPLCVDMCLNWLLNVYDTGRTGKIRVQSLKIGLMSLSKGLLEEKYRYLFKEVAGPTEMCDQRQLGLLLHDAIQIPRQLGEVAAFGGSNIEPSVRSCFQQNNNKPEISVKEFIDWMHLEPQSMVWLPVLHRVAAAETAKHQAKCNICKECPIVGFRYRSLKHFNYDVCQSCFFSGRTAKGHKLHYPMVEYCIPTTSGEDVRDFTKVLKNKFRSKKYFAKHPRLGYLPVQTVLEGDNLETPITLISMWPEHYDPSQSPQLFHDDTHSRIEQYATRLAQMERTNGSFLTDSSSTTGSVEDEHALIQQYCQTLGGESPVSQPQSPAQILKSVEREERGELERIIADLEEEQRNLQVEYEQLKDQHLRRGLPVGSPPESIISPHHTSEDSELIAEAKLLRQHKGRLEARMQILEDHNKQLESQLHRLRQLLEQPESDSRINGVSPWASPQHSALSYSLDPDASGPQFHQAAGEDLLAPPHDTSTDLTEVMEQIHSTFPSCCPNVPSRPQAM

SEQ ID NO: 69440 - protein, 184 aa, Homo sapiens
MHLEPQSMVWLPVLHRVAAAETAKHQAKCNICKECPIVGFRYRSLKHFNYDVCQSCFFSGRTAKGHKLHYPMVEYCIPTTSGEDVRDFTKVLKNKFRSKKYFAKHPRLGYLPVQTVLEGDNLETPSQSPQLFHDDTHSRIEQYATRLAQMERTNGSFLTDSSSTTGSVEDEHALIQQYCQTLGG

SEQ ID NO: 69441 - protein, 153 aa, Homo sapiens
MSGLAATTFHWKKCRLDLPGHVALQACKRLPDEHNDVQKKTFTKWINARFSKSGKPPINDMFTDLKDGRKLLDLLEGLTGTSLPKERGSTRVHALNNVNRVLQVLHQNNVELVNIGGTDIVDGNHKLTLGLLWSIILHWQVDVMKDVMSDLQQ

SEQ ID NO: 69442 - protein, 181 aa, Homo sapiens
MHLEPQSMVWLPVLHRVAAAETAKHQAKCNICKECPIVGFRYRSLKHFNYDVCQSCFFSGRTAKGHKLHYPMVEYCIPTTSGEDVRDFTKVLKNKFRSKKYFAKHPRLGYLPVQTVLEGDNLETPITLISMWPEHYDPSQSPQLFHDDTHSRIEQYATRLAQMERTNGSFLTDSSSTTGSV

SEQ ID NO: 69443 - protein, 47 aa, Homo sapiens
MAKYGEHEASPDNGQNEFSDIIKSRSDEHNDVQKKTFTKWINARFSK

SEQ ID NO: 69444 - protein, 186 aa, Homo sapiens
MLEEEEWYRSLKHFNYDVCQSCFFSGRTAKGHKLHYPMVEYCIPTTSGEDVRDFTKVLKNKFRSKKYFAKHPRLGYLPVQTVLEGDNLETPSQSPQLFHDDTHSRIEQYATRLAQMERTNGSFLTDSSSTTGSVEDEHALIQQYCQTLGGESPVSQPQSPAQILKSVEREERGELERIIADLEEEQ

SEQ ID NO: 69445 - protein, 66 aa, Homo sapiens; identical to SEQ ID NO: 69436

SEQ ID NO: 69446 - protein, 184 aa, Homo sapiens; identical to SEQ ID NO: 69440

SEQ ID NO: 69447 - protein, 699 aa, Homo sapiens
MSASASVGGPVPQPPPGPAAALPPGSAARALHVELPSQQRRLRHLRNIAARNIVNRNGHQLLDTYFTLHLCSTEKIYKEFYRSEVIKNSLNPTWRSLDFGIMPDRLDTSVSCFVVKIWGGKENIYQLLIEWKVCLDGLKYLGQQIHARNQNEIIFGLNDGYYGAPFEHKGYSNAQKTILLQVDQNCVRNSYDVFSLLRLHRAQCAIKQTQVTVQKIGKEIEEKLRLTSTSNELKKKSECLQLKILVLQNELERQKKALGREVALLHKQQIALQDKGSAFSAEHLKLQLQKESLNELRKECTAKRELFLKTNAQLTIRCRQLLSELSYIYPIDLNEHKDYFVCGVKLPNSEDFQAKDDGSIAVALGYTAHLVSMISFFLQVPLRYPIIHKGSRSTIKDNINDKLTEKEREFPLYPKGGEKLQFDYGVYLLNKNIAQLRYQHGLGTPDLRQTLPNLKNFMEHGLMVRCDRHHTSSAIPVPKRQSSIFGGADVGFSGGIPSPDKGHRKRASSENERLQYKTPPPSYNSALAQPVTTVPSMGETERKITSLSSSLDTSLDFSKENKKKGEDLVGSLNGGHANVHPSQEQGEALSGHRATVNGTLLPSEQAGSASVQLPGEFHPVSEAELCCTVEQAEEIIGLEATGFASGDQLEAFNCIPVDSAVAVECDEQVLGEFEEFSRRIYALNENVSSFRRPRRSSDK

SEQ ID NO: 69448 - protein, 255 aa, Homo sapiens
MFISVAQRQRENAFSCSTFLRCDRHHTSSAIPVPKRQSSIFGGADVGFSGGIPSPDKGHRKRASSENERLQYKTPPPSYNSALAQPVTTVPSMGETERKITSLSSSLDTSLDFSKENKKKGEDLVGSLNGGHANVHPSQEQGEALSGHRATVNGTLLPSEQAGSASVQLPGEFHPVSEAELCCTVEQAEEIIGLEATGFASGDQLEAFNCIPVDSAVAVECDEQVLGEFEEFSRRIYALNENVSSFRRPRRSSDK

SEQ ID NO: 69449 - protein, 327 aa, Homo sapiens
MISFFLQVPLRYPIIHKGSRSTIKDNINDKLTEKEREFPLYPKGGEKLQFDYGVYLLNKNIAQLRYQHGLGTPDLRQTLPNLKNFMEHGLMVRCDRHHTSSAIPVPKRQSSIFGGADVGFSGGIPSPDKGHRKRASSENERLQYKTPPPSYNSALAQPVTTVPSMGETERKITSLSSSLDTSLDFSKENKKKGEDLVGSLNGGHANVHPSQEQGEALSGHRATVNGTLLPSEQAGSASVQLPGEFHPVSEAELCCTVEQAEEIIGLEATGFASGDQLEAFNCIPVDSAVAVECDEQVLGEFEEFSRRIYALNENVSSFRRPRRSSDK

SEQ ID NO: 69450 - protein, 1416 aa, Homo sapiens
MKSLKSRLRRQDVPGPASSGAAAASAHAADWNKYDDRLMKAAERGDVEKVTSILAKKGVNPGKLDVEGRSVFHVVTSKGNLECLNAILIHGVDITTSDTAGRNALHLAAKYGHALCLQKLLQYNCPTEHADLQGRTALHDAAMADCPSSIQLLCDHGASVNAKDVDGRTPLVLATQMSRPTICQLLIDRGADVNSRDKQNRTALMLGCEYGCRDAVEVLIKNGADISLLDALGHDSSYYARIGDNLDILTLLKTASENTNKGRELWKKGPSLQQRNLTHMQDEVNVKSHQREHQNIQDLEIENEDLKERLRKIQQEQRILLDKVNGLQLQLNEEVMVADDLESEREKLKSLLAAKEKQHEESLRTIEALKNRFKYFESDHLGSGSHFSNRKEDMLLKQGQMYMADSQCTSPGIPAHMQSRSMLRPLELSLPSQTSYSENEILKKELEAMRTFCESAKQDRLKLQNELAHKVAECKALALECERVKEDSDEQIKQLEDALKDVQKRMYESEGKVKQMQTHFLALKEHLTSEAASGNHRLTEELKDQLKDLKVKYEGASAEVGKLRNQIKQNEMIVEEFKRDEGKLIEENKRLQKELSMCEMEREKKGRKVTEMEGQAKELSAKLALSIPAEKFENMKSSLSNEVNEKAKKLVEMEREHEKSLSEIRQLKRELENVKAKLAQHVKPEEHEQVKSRLEQKSGELGKKITELTLKNQTLQKEIEKVYLDNKLLKEQAHNLTIEMKNHYVPLKVSEDMKKSHDAIIDDLNRKLLDVTQKYTEKKLEMEKLLLENDSLSKDVSRLETVFVPPEKHEKEIIALKSNIVELKKQLSELKKKCGEDQEKIHALTSENTNLKKMMSNQYVPVKTHEEVKMTLNDTLAKTNRELLDVKKKFEDINQEFVKIKDKNEILKRNLENTQNQIKAEYISLAEHEAKMSSLSQSMRKVQDSNAEILANYRKGQEEIVTLHAEIKAQKKELDTIQECIKVKYAPIVSFEECERKFKATEKELKDQLSEQTQKYSVSEEEVKKNKQENDKLKKEIFTLQKDLRDKTVLIEKSHEMERALSRKTDELNKQLKDLSQKYTEVKNVKEKLVEENAKQTSEILAVQNLLQKQHVPLEQVEALKKSLNGTIENLKEELKSMQRCYEKEQQTVTKLHQLLENQKNSSVPLAEHLQIKEAFEKEVGIIKASLREKEEESQNKMEEVSKLQSEVQNTKQALKKLETREVVDLSKYKATKSDLETQISSLNEKLANLNRKYEEVCEEVLHAKKKEISAKDEKELLHFSIEQEIKDQKERCDKSLTTITELQRRIQESAKQIEAKDNKITELLNDVERLKQALNGLSQLTYTSGNPTKRQSQLIDTLQHQVKSLEQQLADADRQHQEVIAIYRTHLLSAAQGHMDEDVQEALLQIIQMRQGLVC

SEQ ID NO: 69451 - protein, 1403 aa, Homo sapiens
MMNCWFSCTPKNRHAADWNKYDDRLMKAAERGDVEKVTSILAKKGVNPGKLDVEGRSVFHVVTSKGNLECLNAILIHGVDITTSDTAGRNALHLAAKYGHALCLQKLLQYNCPTEHADLQGRTALHDAAMADCPSSIQLLCDHGASVNAKDVDGRTPLVLATQMSRPTICQLLIDRGADVNSRDKQNRTALMLGCEYGCRDAVEVLIKNGADISLLDALGHDSSYYARIGDNLDILTLLKTASENTNKGRELWKKGPSLQQRNLTHMQDEVNVKSHQREHQNIQDLEIENEDLKERLRKIQQEQRILLDKVNGLQLQLNEEVMVADDLESEREKLKSLLAAKEKQHEESLRTIEALKNRFKYFESDHLGSGSHFSNRKEDMLLKQGQMYMADSQCTSPGIPAHMQSRSMLRPLELSLPSQTSYSENEILKKELEAMRTFCESAKQDRLKLQNELAHKVAECKALALECERVKEDSDEQIKQLEDALKDVQKRMYESEGKVKQMQTHFLALKEHLTSEAASGNHRLTEELKDQLKDLKVKYEGASAEVGKLRNQIKQNEMIVEEFKRDEGKLIEENKRLQKELSMCEMEREKKGRKVTEMEGQAKELSAKLALSIPAEKFENMKSSLSNEVNEKAKKLVEMEREHEKSLSEIRQLKRELENVKAKLAQHVKPEEHEQVKSRLEQKSGELGKKITELTLKNQTLQKEIEKVYLDNKLLKEQAHNLTIEMKNHYVPLKVSEDMKKSHDAIIDDLNRKLLDVTQKYTEKKLEMEKLLLENDSLSKDVSRLETVFVPPEKHEKEIIALKSNIVELKKQLSELKKKCGEDQEKIHALTSENTNLKKMMSNQYVPVKTHEEVKMTLNDTLAKTNRELLDVKKKFEDINQEFVKIKDKNEILKRNLENTQNQIKAEYISLAEHEAKMSSLSQSMRKVQDSNAEILANYRKGQEEIVTLHAEIKAQKKELDTIQECIKVKYAPIVSFEECERKFKATEKELKDQLSEQTQKYSVSEEEVKKNKQENDKLKKEIFTLQKDLRDKTVLIEKSHEMERALSRKTDELNKQLKDLSQKYTEVKNVKEKLVEENAKQTSEILAVQNLLQKQHVPLEQVEALKKSLNGTIENLKEELKSMQRCYEKEQQTVTKLHQLLENQKNSSVPLAEHLQIKEAFEKEVGIIKASLREKEEESQNKMEEVSKLQSEVQNTKQALKKLETREVVDLSKYKATKSDLETQISSLNEKLANLNRKYEEVCEEVLHAKKKEISAKDEKELLHFSIEQEIKDQKERCDKSLTTITELQRRIQESAKQIEAKDNKITELLNDVERLKQALNGLSQLTYTSGNPTKRQSQLIDTLQHQVKSLEQQLADADRQHQEVIAIYRTHLLSAAQGHMDEDVQEALLQIIQMRQGLVC

SEQ ID NO: 69452 - protein, 561 aa, Homo sapiens
MMNCWFSCTPKNRHAADWNKYDDRLMKAAERGDVEKVTSILAKKGVNPGKLDVEGRSVFHVVTSKGNLECLNAILIHGVDITTSDTAGRNALHLAAKYGHALCLQKLLQYNCPTEHADLQGRTALHDAAMADCPSSIQLLCDHGASVNAKDVDGRTPLVLATQMSRPTICQLLIDRGADVNSRDKQNRTALMLGCEYGCRDAVEVLIKNGADISLLDALGHDSSYYARIGDNLDILTLLKTASENTNKGRELWKKGPSLQQRNLTHMQDEVNVKSHQREHQNIQDLEIENEDLKERLRKIQQEQRILLDKVNGLQLQLNEREKLKSLLAAKEKQHEESLRTIEALKNRFKYFESDHLGSGSHFSNRKEDMLLKQGQMYMADSQCTSPGIPAHMQSRSMLRPLELSLPSQTSYSENEILKKELEAMRTFCESAKQDRLKLQNELAHKVAECKALALECERVKEDSDEQIKQLEDALKDVQKRMYESEGKVKQMQTHFLALKEHLTSEAASGNHRLTEELKDQLKDLKVKYEGASAEVGKLRNQIKQNEMIVEEFKRDEGKLI

SEQ ID NO: 69453 - protein, 1401 aa, Homo sapiens
MMNCWFSCTPKNRHAADWNKYDDRLMKAAERGDVEKVTSILAKKGVNPGKLDVEGRSVFHVVTSKGNLECLNAILIHGVDITTSDTAGRNALHLAAKYGHALCLQKLLQYNCPTEHADLQGRTALHDAAMADCPSSIQLLCDHGASVNAKDVDGRTPLVLATQMSRPTICQLLIDRGADVNSRDKQNRTALMLGCEYGCRDAVEVLIKNGADISLLDALGHDSSYYARIGDNLDILTLLKTASENTNKGRELWKKGPSLQQRNLTHMQDEVNVKSHQREHQNIQDLEIENEDLKERLRKIQQEQRILLDKVNGLQLQLNEEVMVADDLESEREKLKSLLAAKEKQHEESLRTIEALKNRFKYFESDHLGSGSHFRKEDMLLKQGQMYMADSQCTSPGIPAHMQSRSMLRPLELSLPSQTSYSENEILKKELEAMRTFCESAKQDRLKLQNELAHKVAECKALALECERVKEDSDEQIKQLEDALKDVQKRMYESEGKVKQMQTHFLALKEHLTSEAASGNHRLTEELKDQLKDLKVKYEGASAEVGKLRNQIKQNEMIVEEFKRDEGKLIEENKRLQKELSMCEMEREKKGRKVTEMEGQAKELSAKLALSIPAEKFENMKSSLSNEVNEKAKKLVEMEREHEKSLSEIRQLKRELENVKAKLAQHVKPEEHEQVKSRLEQKSGELGKKITELTLKNQTLQKEIEKVYLDNKLLKEQAHNLTIEMKNHYVPLKVSEDMKKSHDAIIDDLNRKLLDVTQKYTEKKLEMEKLLLENDSLSKDVSRLETVFVPPEKHEKEIIALKSNIVELKKQLSELKKKCGEDQEKIHALTSENTNLKKMMSNQYVPVKTHEEVKMTLNDTLAKTNRELLDVKKKFEDINQEFVKIKDKNEILKRNLENTQNQIKAEYISLAEHEAKMSSLSQSMRKVQDSNAEILANYRKGQEEIVTLHAEIKAQKKELDTIQECIKVKYAPIVSFEECERKFKATEKELKDQLSEQTQKYSVSEEEVKKNKQENDKLKKEIFTLQKDLRDKTVLIEKSHEMERALSRKTDELNKQLKDLSQKYTEVKNVKEKLVEENAKQTSEILAVQNLLQKQHVPLEQVEALKKSLNGTIENLKEELKSMQRCYEKEQQTVTKLHQLLENQKNSSVPLAEHLQIKEAFEKEVGIIKASLREKEEESQNKMEEVSKLQSEVQNTKQALKKLETREVVDLSKYKATKSDLETQISSLNEKLANLNRKYEEVCEEVLHAKKKEISAKDEKELLHFSIEQEIKDQKERCDKSLTTITELQRRIQESAKQIEAKDNKITELLNDVERLKQALNGLSQLTYTSGNPTKRQSQLIDTLQHQVKSLEQQLADADRQHQEVIAIYRTHLLSAAQGHMDEDVQEALLQIIQMRQGLVC

SEQ ID NO: 69454 - protein, 1064 aa, Homo sapiens
MVLGTVLLPPNSYGRDQDTSLCCLCTEASESALPDLTDHFASCVEDGFEGDKTGGSSPEALHRPYGCDVEPQALNEAIRWSSKENLLGATESDPNLFVALYDFVASGDNTLSITKGEKLRVLGYNQNGEWSEVRSKNGQGWVPSNYITPVNSLEKHSWYHGPVSRSAAEYLLSSLINGSFLVRESESSPGQLSISLRYEGRVYHYRINTTADGKVYVTAESRFSTLAELVHHHSTVADGLVTTLHYPAPKCNKPTVYGVSPIHDKWEMERTDITMKHKLGGGQYGEVYVGVWKKYSLTVAVKTLKEDTMEVEEFLKEAAVMKEIKHPNLVQLLGVCTLEPPFYIVTEYMPYGNLLDYLRECNREEVTAVVLLYMATQISSAMEYLEKKNFIHRDLAARNCLVGENHVVKVADFGLSRLMTGDTYTAHAGAKFPIKWTAPESLAYNTFSIKSDVWAFGVLLWEIATYGMSPYPGIDLSQVYDLLEKGYRMEQPEGCPPKVYELMRACWKWSPADRPSFAETHQAFETMFHDSSISEEVAEELGRAASSSSVVPYLPRLPILPSKTRTLKKQVENKENIEGAQDATENSASSLAPGFIRGAQASSGSPALPRKQRDKSPSSLLEDAKETCFTRDRKGGFFSSFMKKRNAPTPPKRSSSFREMENQPHKKYELTGLPEQDRMAMTLPRNCQRSKLQLERTVSTSSQPEENVDRANDMLPKKSEESAAPSRERPKAKLLPRGATALPLRTPSGDLAITEKDPPGVGVAGVAAAPKGKEKNGGARLGMAGVPEDGEQPGWPSPAKAAPVLPTTHNHKVPVLISPTLKHTPADVQLIGTDSQGNKFKLLSEHQVTSSGDKDRPRRVKPKCAPPPPPVMRLLQHPSICSDPTEEPTALTAGQSTSETQEGGKKAALGAVPISGKAGRPVMPPPQVPLPTSSISPAKMANGTAGTKVALRKTKQAAEKISADKISKEALLECADLLSSALTEPVPNSQLVDTGHQLLDYCSGYVDCIPQTRNKFAFREAVSKLELSLQELQVSSAAAGVPGTNPVLNNLLSCVQEISDVVQR

SEQ ID NO: 69455 - protein, 542 aa, Homo sapiens
MGQQVGRVGEAPGLQQPQPRGIRGSSAARPSGRRRDPAGRTTETGFNIFTQHEALHRPYGCDVEPQALNEAIRWSSKENLLGATESDPNLFVALYDFVASGDNTLSITKGEKLRVLGYNQNGEWSEVRSKNGQGWVPSNYITPVNSLEKHSWYHGPVSRSAAEYLLSSLINGSFLVRESESSPGQLSISLRYEGRVYHYRINTTADGKVYVTAESRFSTLAELVHHHSTVADGLVTTLHYPAPKCNKPTVYGVSPIHDKWEMERTDITMKHKLGGGQYGEVYVGVWKKYSLTVAVKTLKEDTMEVEEFLKEAAVMKEIKHPNLVQLLGVCTLEPPFYIVTEYMPYGNLLDYLRECNREEVTAVVLLYMATQISSAMEYLEKKNFIHRDLAARNCLVGENHVVKVADFGLSRLMTGDTYTAHAGAKFPIKWTAPESLAYNTFSIKSDVWAFGVLLWEIATYGMSPYPGIDLSQVYDLLEKGYRMEQPEGCPPKVYELMRACWKWSPADRPSFAETHQAFETMFHDSSISEVLLHCANQTCITL

SEQ ID NO: 69456 - protein, 1146 aa, Homo sapiens
MVLGTVLLPPNSYGRDQDTSLCCLCTEASESALPDLTEALHRPYGCDVEPQALNEAIRWSSKENLLGATESDPNLFVALYDFVASGDNTLSITKGEKLRVLGYNQNGEWSEVRSKNGQGWVPSNYITPVNSLEKHSWYHGPVSRSAAEYLLSSLINGSFLVRESESSPGQLSISLRYEGRVYHYRINTTADGKVYVTAESRFSTLAELVHHHSTVADGLVTTLHYPAPKCNKPTVYGVSPIHDKWEMERTDITMKHKLGGGQYGEVYVGVWKKYSLTVAVKTLKEDTMEVEEFLKEAAVMKEIKHPNLVQLLGVCTLEPPFYIVTEYMPYGNLLDYLRECNREEVTAVVLLYMATQISSAMEYLEKKNFIHRDLAARNCLVGENHVVKVADFGLSRLMTGDTYTAHAGAKFPIKWTAPESLAYNTFSIKSDVWAFGVLLWEIATYGMSPYPGIDLSQVYDLLEKGYRMEQPEGCPPKVYELMRACWKWSPADRPSFAETHQAFETMFHDSSISEEVAEELGRAASSSSVVPYLPRLPILPSKTRTLKKQVENKENIEGAQDATENSASSLAPGFIRGAQASSGSPALPRKQRDKSPSSLLEDAKETCFTRDRKGGFFSSFMKKRNAPTPPKRSSSFREMENQPHKKYELTGNFSSVASLQHADGFSFTPAQQEANLVPPKCYGGSFAQRNLCNDDGGGGGGSGTAGGGWSGITGFFTPRLIKKTLGLRAGKPTASDDTSKPFPRSNSTSSMSSGLPEQDRMAMTLPRNCQRSKLQLERTVSTSSQPEENVDRANDMLPKKSEESAAPSRERPKAKLLPRGATALPLRTPSGDLAITEKDPPGVGVAGVAAAPKGKEKNGGARLGMAGVPEDGEQPGWPSPAKAAPVLPTTHNHKVPVLISPTLKHTPADVQLIGTDSQGNKFKLLSEHQVTSSGDKDRPRRVKPKCAPPPPPVMRLLQHPSICSDPTEEPTALTAGQSTSETQEGGKKAALGAVPISGKAGRPVMPPPQVPLPTSSISPAKMANGTAGTKVALRKTKQAAEKISADKISKEALLECADLLSSALTEPVPNSQLVDTGHQLLDYCSGYVDCIPQTRNKFAFREAVSKLELSLQELQVSSAAAGVPGTNPVLNNLLSCVQEISDVVQR

SEQ ID NO: 69457 - protein, 1182 aa, Homo sapiens
MGQQVGRVGEAPGLQQPQPRGIRGSSAARPSGRRRDPAGRTTETGFNIFTQHDHFASCVEDGFEGDKTGGSSPEALHRPYGCDVEPQALNEAIRWSSKENLLGATESDPNLFVALYDFVASGDNTLSITKGEKLRVLGYNQNGEWSEVRSKNGQGWVPSNYITPVNSLEKHSWYHGPVSRSAAEYLLSSLINGSFLVRESESSPGQLSISLRYEGRVYHYRINTTADGKVYVTAESRFSTLAELVHHHSTVADGLVTTLHYPAPKCNKPTVYGVSPIHDKWEMERTDITMKHKLGGGQYGEVYVGVWKKYSLTVAVKTLKEDTMEVEEFLKEAAVMKEIKHPNLVQLLGVCTLEPPFYIVTEYMPYGNLLDYLRECNREEVTAVVLLYMATQISSAMEYLEKKNFIHRDLAARNCLVGENHVVKVADFGLSRLMTGDTYTAHAGAKFPIKWTAPESLAYNTFSIKSDVWAFGVLLWEIATYGMSPYPGIDLSQVYDLLEKGYRMEQPEGCPPKVYELMRACWKWSPADRPSFAETHQAFETMFHDSSISEEVAEELGRAASSSSVVPYLPRLPILPSKTRTLKKQVENKENIEGAQDATENSASSLAPGFIRGAQASSGSPALPRKQRDKSPSSLLEDAKETCFTRDRKGGFFSSFMKKRNAPTPPKRSSSFREMENQPHKKYELTGNFSSVASLQHADGFSFTPAQQEANLVPPKCYGGSFAQRNLCNDDGGGGGGSGTAGGGWSGITGFFTPRLIKKTLGLRAGKPTASDDTSKPFPRSNSTSSMSSGLPEQDRMAMTLPRNCQRSKLQLERTVSTSSQPEENVDRANDMLPKKSEESAAPSRERPKAKLLPRGATALPLRTPSGDLAITEKDPPGVGVAGVAAAPKGKEKNGGARLGMAGVPEDGEQPGWPSPAKAAPVLPTTHNHKVPVLISPTLKHTPADVQLIGTDSQGNKFKLLSEHQVTSSGDKDRPRRVKPKCAPPPPPVMRLLQHPSICSDPTEEPTALTAGQSTSETQEGGKKAALGAVPISGKAGRPVMPPPQVPLPTSSISPAKMANGTAGTKVALRKTKQAAEKISADKISKEALLECADLLSSALTEPVPNSQLVDTGHQLLDYCSGYVDCIPQTRNKFAFREAVSKLELSLQELQVSSAAAGVPGTNPVLNNLLSCVQEISDVVQR

SEQ ID NO: 69458 - protein, 1043 aa, Homo sapiens
MVLGTVLLPPNSYGRDQDTSLCCLCTEASESALPDLTEALHRPYGCDVEPQALNEAIRWSSKENLLGATESDPNLFVALYDFVASGDNTLSITKGEKLRVLGYNQNGEWSEVRSKNGQGWVPSNYITPVNSLEKHSWYHGPVSRSAAEYLLSSLINGSFLVRESESSPGQLSISLRYEGRVYHYRINTTADGKVYVTAESRFSTLAELVHHHSTVADGLVTTLHYPAPKCNKPTVYGVSPIHDKWEMERTDITMKHKLGGGQYGEVYVGVWKKYSLTVAVKTLKEDTMEVEEFLKEAAVMKEIKHPNLVQLLGVCTLEPPFYIVTEYMPYGNLLDYLRECNREEVTAVVLLYMATQISSAMEYLEKKNFIHRDLAARNCLVGENHVVKVADFGLSRLMTGDTYTAHAGAKFPIKWTAPESLAYNTFSIKSDVWAFGVLLWEIATYGMSPYPGIDLSQVYDLLEKGYRMEQPEGCPPKVYELMRACWKWSPADRPSFAETHQAFETMFHDSSISEEVAEELGRAASSSSVVPYLPRLPILPSKTRTLKKQVENKENIEGAQDATENSASSLAPGFIRGAQASSGSPALPRKQRDKSPSSLLEDAKETCFTRDRKGGFFSSFMKKRNAPTPPKRSSSFREMENQPHKKYELTGLPEQDRMAMTLPRNCQRSKLQLERTVSTSSQPEENVDRANDMLPKKSEESAAPSRERPKAKLLPRGATALPLRTPSGDLAITEKDPPGVGVAGVAAAPKGKEKNGGARLGMAGVPEDGEQPGWPSPAKAAPVLPTTHNHKVPVLISPTLKHTPADVQLIGTDSQGNKFKLLSEHQVTSSGDKDRPRRVKPKCAPPPPPVMRLLQHPSICSDPTEEPTALTAGQSTSETQEGGKKAALGAVPISGKAGRPVMPPPQVPLPTSSISPAKMANGTAGTKVALRKTKQAAEKISADKISKEALLECADLLSSALTEPVPNSQLVDTGHQLLDYCSGYVDCIPQTRNKFAFREAVSKLELSLQELQVSSAAAGVPGTNPVLNNLLSCVQEISDVVQR

SEQ ID NO: 69459 - protein, 1167 aa, Homo sapiens
MVLGTVLLPPNSYGRDQDTSLCCLCTEASESALPDLTDHFASCVEDGFEGDKTGGSSPEALHRPYGCDVEPQALNEAIRWSSKENLLGATESDPNLFVALYDFVASGDNTLSITKGEKLRVLGYNQNGEWSEVRSKNGQGWVPSNYITPVNSLEKHSWYHGPVSRSAAEYLLSSLINGSFLVRESESSPGQLSISLRYEGRVYHYRINTTADGKVYVTAESRFSTLAELVHHHSTVADGLVTTLHYPAPKCNKPTVYGVSPIHDKWEMERTDITMKHKLGGGQYGEVYVGVWKKYSLTVAVKTLKEDTMEVEEFLKEAAVMKEIKHPNLVQLLGVCTLEPPFYIVTEYMPYGNLLDYLRECNREEVTAVVLLYMATQISSAMEYLEKKNFIHRDLAARNCLVGENHVVKVADFGLSRLMTGDTYTAHAGAKFPIKWTAPESLAYNTFSIKSDVWAFGVLLWEIATYGMSPYPGIDLSQVYDLLEKGYRMEQPEGCPPKVYELMRACWKWSPADRPSFAETHQAFETMFHDSSISEEVAEELGRAASSSSVVPYLPRLPILPSKTRTLKKQVENKENIEGAQDATENSASSLAPGFIRGAQASSGSPALPRKQRDKSPSSLLEDAKETCFTRDRKGGFFSSFMKKRNAPTPPKRSSSFREMENQPHKKYELTGNFSSVASLQHADGFSFTPAQQEANLVPPKCYGGSFAQRNLCNDDGGGGGGSGTAGGGWSGITGFFTPRLIKKTLGLRAGKPTASDDTSKPFPRSNSTSSMSSGLPEQDRMAMTLPRNCQRSKLQLERTVSTSSQPEENVDRANDMLPKKSEESAAPSRERPKAKLLPRGATALPLRTPSGDLAITEKDPPGVGVAGVAAAPKGKEKNGGARLGMAGVPEDGEQPGWPSPAKAAPVLPTTHNHKVPVLISPTLKHTPADVQLIGTDSQGNKFKLLSEHQVTSSGDKDRPRRVKPKCAPPPPPVMRLLQHPSICSDPTEEPTALTAGQSTSETQEGGKKAALGAVPISGKAGRPVMPPPQVPLPTSSISPAKMANGTAGTKVALRKTKQAAEKISADKISKEALLECADLLSSALTEPVPNSQLVDTGHQLLDYCSGYVDCIPQTRNKFAFREAVSKLELSLQELQVSSAAAGVPGTNPVLNNLLSCVQEISDVVQR

SEQ ID NO: 69460 - protein, 1161 aa, Homo sapiens
MGQQVGRVGEAPGLQQPQPRGIRGSSAARPSGRRRDPAGRTTETGFNIFTQHEALHRPYGCDVEPQALNEAIRWSSKENLLGATESDPNLFVALYDFVASGDNTLSITKGEKLRVLGYNQNGEWSEVRSKNGQGWVPSNYITPVNSLEKHSWYHGPVSRSAAEYLLSSLINGSFLVRESESSPGQLSISLRYEGRVYHYRINTTADGKVYVTAESRFSTLAELVHHHSTVADGLVTTLHYPAPKCNKPTVYGVSPIHDKWEMERTDITMKHKLGGGQYGEVYVGVWKKYSLTVAVKTLKEDTMEVEEFLKEAAVMKEIKHPNLVQLLGVCTLEPPFYIVTEYMPYGNLLDYLRECNREEVTAVVLLYMATQISSAMEYLEKKNFIHRDLAARNCLVGENHVVKVADFGLSRLMTGDTYTAHAGAKFPIKWTAPESLAYNTFSIKSDVWAFGVLLWEIATYGMSPYPGIDLSQVYDLLEKGYRMEQPEGCPPKVYELMRACWKWSPADRPSFAETHQAFETMFHDSSISEEVAEELGRAASSSSVVPYLPRLPILPSKTRTLKKQVENKENIEGAQDATENSASSLAPGFIRGAQASSGSPALPRKQRDKSPSSLLEDAKETCFTRDRKGGFFSSFMKKRNAPTPPKRSSSFREMENQPHKKYELTGNFSSVASLQHADGFSFTPAQQEANLVPPKCYGGSFAQRNLCNDDGGGGGGSGTAGGGWSGITGFFTPRLIKKTLGLRAGKPTASDDTSKPFPRSNSTSSMSSGLPEQDRMAMTLPRNCQRSKLQLERTVSTSSQPEENVDRANDMLPKKSEESAAPSRERPKAKLLPRGATALPLRTPSGDLAITEKDPPGVGVAGVAAAPKGKEKNGGARLGMAGVPEDGEQPGWPSPAKAAPVLPTTHNHKVPVLISPTLKHTPADVQLIGTDSQGNKFKLLSEHQVTSSGDKDRPRRVKPKCAPPPPPVMRLLQHPSICSDPTEEPTALTAGQSTSETQEGGKKAALGAVPISGKAGRPVMPPPQVPLPTSSISPAKMANGTAGTKVALRKTKQAAEKISADKISKEALLECADLLSSALTEPVPNSQLVDTGHQLLDYCSGYVDCIPQTRNKFAFREAVSKLELSLQELQVSSAAAGVPGTNPVLNNLLSCVQEISDVVQR

SEQ ID NO: 69461 - protein, 1058 aa, Homo sapiens
MGQQVGRVGEAPGLQQPQPRGIRGSSAARPSGRRRDPAGRTTETGFNIFTQHEALHRPYGCDVEPQALNEAIRWSSKENLLGATESDPNLFVALYDFVASGDNTLSITKGEKLRVLGYNQNGEWSEVRSKNGQGWVPSNYITPVNSLEKHSWYHGPVSRSAAEYLLSSLINGSFLVRESESSPGQLSISLRYEGRVYHYRINTTADGKVYVTAESRFSTLAELVHHHSTVADGLVTTLHYPAPKCNKPTVYGVSPIHDKWEMERTDITMKHKLGGGQYGEVYVGVWKKYSLTVAVKTLKEDTMEVEEFLKEAAVMKEIKHPNLVQLLGVCTLEPPFYIVTEYMPYGNLLDYLRECNREEVTAVVLLYMATQISSAMEYLEKKNFIHRDLAARNCLVGENHVVKVADFGLSRLMTGDTYTAHAGAKFPIKWTAPESLAYNTFSIKSDVWAFGVLLWEIATYGMSPYPGIDLSQVYDLLEKGYRMEQPEGCPPKVYELMRACWKWSPADRPSFAETHQAFETMFHDSSISEEVAEELGRAASSSSVVPYLPRLPILPSKTRTLKKQVENKENIEGAQDATENSASSLAPGFIRGAQASSGSPALPRKQRDKSPSSLLEDAKETCFTRDRKGGFFSSFMKKRNAPTPPKRSSSFREMENQPHKKYELTGLPEQDRMAMTLPRNCQRSKLQLERTVSTSSQPEENVDRANDMLPKKSEESAAPSRERPKAKLLPRGATALPLRTPSGDLAITEKDPPGVGVAGVAAAPKGKEKNGGARLGMAGVPEDGEQPGWPSPAKAAPVLPTTHNHKVPVLISPTLKHTPADVQLIGTDSQGNKFKLLSEHQVTSSGDKDRPRRVKPKCAPPPPPVMRLLQHPSICSDPTEEPTALTAGQSTSETQEGGKKAALGAVPISGKAGRPVMPPPQVPLPTSSISPAKMANGTAGTKVALRKTKQAAEKISADKISKEALLECADLLSSALTEPVPNSQLVDTGHQLLDYCSGYVDCIPQTRNKFAFREAVSKLELSLQELQVSSAAAGVPGTNPVLNNLLSCVQEISDVVQR

SEQ ID NO: 69462 - protein, 1079 aa, Homo sapiens
MGQQVGRVGEAPGLQQPQPRGIRGSSAARPSGRRRDPAGRTTETGFNIFTQHDHFASCVEDGFEGDKTGGSSPEALHRPYGCDVEPQALNEAIRWSSKENLLGATESDPNLFVALYDFVASGDNTLSITKGEKLRVLGYNQNGEWSEVRSKNGQGWVPSNYITPVNSLEKHSWYHGPVSRSAAEYLLSSLINGSFLVRESESSPGQLSISLRYEGRVYHYRINTTADGKVYVTAESRFSTLAELVHHHSTVADGLVTTLHYPAPKCNKPTVYGVSPIHDKWEMERTDITMKHKLGGGQYGEVYVGVWKKYSLTVAVKTLKEDTMEVEEFLKEAAVMKEIKHPNLVQLLGVCTLEPPFYIVTEYMPYGNLLDYLRECNREEVTAVVLLYMATQISSAMEYLEKKNFIHRDLAARNCLVGENHVVKVADFGLSRLMTGDTYTAHAGAKFPIKWTAPESLAYNTFSIKSDVWAFGVLLWEIATYGMSPYPGIDLSQVYDLLEKGYRMEQPEGCPPKVYELMRACWKWSPADRPSFAETHQAFETMFHDSSISEEVAEELGRAASSSSVVPYLPRLPILPSKTRTLKKQVENKENIEGAQDATENSASSLAPGFIRGAQASSGSPALPRKQRDKSPSSLLEDAKETCFTRDRKGGFFSSFMKKRNAPTPPKRSSSFREMENQPHKKYELTGLPEQDRMAMTLPRNCQRSKLQLERTVSTSSQPEENVDRANDMLPKKSEESAAPSRERPKAKLLPRGATALPLRTPSGDLAITEKDPPGVGVAGVAAAPKGKEKNGGARLGMAGVPEDGEQPGWPSPAKAAPVLPTTHNHKVPVLISPTLKHTPADVQLIGTDSQGNKFKLLSEHQVTSSGDKDRPRRVKPKCAPPPPPVMRLLQHPSICSDPTEEPTALTAGQSTSETQEGGKKAALGAVPISGKAGRPVMPPPQVPLPTSSISPAKMANGTAGTKVALRKTKQAAEKISADKISKEALLECADLLSSALTEPVPNSQLVDTGHQLLDYCSGYVDCIPQTRNKFAFREAVSKLELSLQELQVSSAAAGVPGTNPVLNNLLSCVQEISDVVQR

SEQ ID NO: 69463 - protein, 782 aa, Homo sapiens
MNPEKDFAPLTPNIVRALNDKLYEKRKVAALEIEKLVREFVAQNNTVQIKHVIQTLSQEFALSQHPHSRKGGLIGLAACSIALGKDSGLYLKELIEPVLTCFNDADSRLRYYACEALYNIVKVARGAVLPHFNVLFDGLSKLAADPDPNVKSGSELLDRLLKDIVTESNKFDLVSFIPLLRERIYSNNQYARQFIISWILVLESVPDINLLDYLPEILDGLFQILGDNGKEIRKMCEVVLGEFLKEIKKNPSSVKFAEMANILVIHCQTTDDLIQLTAMCWMREFIQLAGRVMLPYSSGILTAVLPCLAYDDRKKSIKEVANVCNQSLMKLVTPEDDELDELRPGQRQAEPTPDDALPKQEGTASGGPDGSCDSSFSSGISVFTAASTERAPVTLHLDGIVQVLNCHLSDTAIGMMTRIAVLKWLYHLYIKTPRKMFRHTDSLFPILLQTLSDESDEVILKDLEVLAEIASSPAGQTDDPGPLDGPDLQASHSELQVPTPGRAGLLNTSGTKGLECSPSTPTMNSYFYKFMINLLKRFSSERKLLEVRGPFIIRQLCLLLNAENIFHSMADILLREEDLKFASTMVHALNTILLTSTELFQLRNQLKDLKTLESQNLFCCLYRSWCHNPVTTVSLCFLTQNYRHAYDLIQKFGDLEVTVDFLAEVDKLVQLIECPIFTYLRLQLLDVKNNPYLIKALYGLLMLLPQSSAFQLLSHRLQCVPNPELLQTEDSLKAAPKSQKADSPSIDYAELLQHFEKVQNKHLEVRHQRSGRGDHLDRRVVL

SEQ ID NO: 69464 - protein, 214 aa, Homo sapiens
MADILLREEDLKFASTMVHALNTILLTSTELFQLRNQLKDLKTLESQNLFCCLYRSWCHNPVTTVSLCFLTQNYRHAYDLIQKFGDLEVTVDFLAEVDKLVQLIECPIFTYLRLQLLDVKNNPYLIKALYGLLMLLPQSSAFQLLSHRLQCVPNPELLQTEDSLKAAPKSQKADSPSIDYAELLQHFEKVQNKHLEVRHQRSGRGDHLDRRVVL

SEQ ID NO: 69465 - protein, 396 aa, Homo sapiens
MPRVKAAQAGRQSSAKRHLAEQFAVGEIITDMAKKEWKVGLPIGQGGFGCIYLADMNSSESVGSDAPCVVKVEPSDNGPLFTELKFYQRAAKPEQIQKWIRTRKLKYLGVPKYWGSGLHDKNGKSYRFMIMDRFGSDLQKIYEANAKRFSRKTVLQLSLRILDILEYIHEHEYVHGDIKASNLLLNYKNPDQVYLVDYGLAYRYCPEGVHKEYKEDPKRCHDGTIEFTSIDAHNGVAPSRRGDLEILGYCMIQWLTGHLPWEDNLKDPKYVRDSKIRYRENIASLMDKCFPEKNKPGEIAKYMETVKLLDYTEKPLYENLRDILLQGLKAIGSKDDGKLDLSVVENGGLKAKTITKKRKKEIEESKEPGVEDTEWSNTQTEEAIQTRSRTRKRVQK

SEQ ID NO: 69466 - protein, 508 aa, Homo sapiens
MPPKRNEKYKLPIPFPEGKVLDDMEGNQWVLGKKIGSGGFGLIYLAFPTNKPEKDARHVVKVEYQENGPLFSELKFYQRVAKKDCIKKWIERKQLDYLGIPLFYGSGLTEFKGRSYRFMVMERLGIDLQKISGQNGTFKKSTVLQLGIRMLDVLEYIHENEYVHGDIKAANLLLGYKNPDQVYLADYGLSYRYCPNGNHKQYQENPRKGHNGTIEFTSLDAHKGVALSRRSDVEILGYCMLRWLCGKLPWEQNLKDPVAVQTAKTNLLDELPQSVLKWAPSGSSCCEIAQFLVCAHSLAYDEKPNYQALKKILNPHGIPLGPLDFSTKGQSINVHTPNSQKVDSQKAATKQVNKAHNRLIEKKVHSERSAESCATWKVQKEEKLIGLMNNEAAQESTRRRQKYQESQEPLNEVNSFPQKISYTQFPNSFYEPHQDFTSPDIFKKSRSPSWYKYTSTVSTGITDLESSTGLWPTISQFTLSEETNADVYYYRIIIPVLLMLVFLALFFL

SEQ ID NO: 69467 - protein, 400 aa, Homo sapiens
MPPKRNEKYKLPIPFPEGKVLDDMEGNQWVLGKKIGSGGFGLIYLAFPTNKPEKDARHVVKVEYQENGPLFSELKFYQRVAKKDCIKKWIERKQLDYLGIPLFYGSGLTEFKGRSYRFMVMERLGIDLQKISGQNGTFKKSTVLQLGIRMLDVLEYIHENEYVHGDIKAANLLLGYKNPDQVYLADYGLSYRYCPNGNHKQYQENPRKGHNGTIEFTSLDAHKGVALSRRSDVEILGYCMLRWLCGKLPWEQNLKDPVAVQTAKTNLLDELPQSVLKWAPSGSSCCEIAQFLVCAHSLAYDEKPNYQALKKILNPHGIPLGPLDFSTKGQSINVHTPNSQKVDSQKAATKQVNKAHNRLIEKKVHSERSAESCATWKVQKEEKLIGLMNNEAAQIRQLGY

SEQ ID NO: 69468 - protein, 396 aa, Homo sapiens
MPPKRNEKYKLPIPFPEGKVLDDMEGNQWVLGKKIGSGGFGLIYLAFPTNKPEKDARHVVKVEYQENGPLFSELKFYQRVAKKDCIKKWIERKQLDYLGIPLFYGSGLTEFKGRSYRFMVMERLGIDLQKISGQNGTFKKSTVLQLGIRMLDVLEYIHENEYVHGDIKAANLLLGYKNPDQVYLADYGLSYRYCPNGNHKQYQENPRKGHNGTIEFTSLDAHKGVALSRRSDVEILGYCMLRWLCGKLPWEQNLKDPVAVQTAKTNLLDELPQSVLKWAPSGSSCCEIAQFLVCAHSLAYDEKPNYQALKKILNPHGIPLGPLDFSTKGQSINVHTPNSQKVDSQKAATKQVNKAHNRLIEKKVHSERSAESCATWKVQKEEKLIGLMNNEAAQFR

SEQ ID NO: 69469 - protein, 291 aa, Homo sapiens [sequence omitted]

SEQ ID NO: 69470 - protein, 508 aa, Homo sapiens; identical to SEQ ID NO: 69466

SEQ ID NO: 69471 - protein, 485 aa, Homo sapiens
MEGNQWVLGKKIGSGGFGLIYLAFPTNKPEKDARHVVKVEYQENGPLFSELKFYQRVAKKDCIKKWIERKQLDYLGIPLFYGSGLTEFKGRSYRFMVMERLGIDLQKISGQNGTFKKSTVLQLGIRMLDVLEYIHENEYVHGDIKAANLLLGYKNPDQVYLADYGLSYRYCPNGNHKQYQENPRKGHNGTIEFTSLDAHKGVALSRRSDVEILGYCMLRWLCGKLPWEQNLKDPVAVQTAKTNLLDELPQSVLKWAPSGSSCCEIAQFLVCAHSLAYDEKPNYQALKKILNPHGIPLGPLDFSTKGQSINVHTPNSQKVDSQKAATKQVNKAHNRLIEKKVHSERSAESCATWKVQKEEKLIGLMNNEAAQESTRRRQKYQESQEPLNEVNSFPQKISYTQFPNSFYEPHQDFTSPDIFKKSRSPSWYKYTSTVSTGITDLESSTGLWPTISQFTLSEETNADVYYYRIIIPVLLMLVFLALFFL

SEQ ID NO: 69472 - protein, 176 aa, Homo sapiens
MAMSFEWPWQYRFPPFFTLQPNVDTRQKQLAAWCSLVLSFCRLHKQSSMTVMEAQESPLFNNVKLQRKLPVESIQIVLEELRKKGNLEWLDKSKSSFLIMWRRPEEWGKLIYQWVSRSGQNNSVFTLYELTNGEDTEDEEFHGLDEATLLRALQALQQEHKAEIITVSDGRGVKFF

SEQ ID NO: 69473 - protein, 327 aa, Homo sapiens
MSFLGGFFGPICEIDIVLNDGETRKMAEMKTEDGKVEKHYLFYDGESVSGKVNLAFKQPGKRLEHQGIRIEFVGQIELFNDKSNTHEFVNLVKELALPGELTQSRSYDFEFMQVEKPYESYIGANVRLRYFLKVTIVRRLTDLVKEYDLIVHQLATYPDVNNSIKMEVGIEDCLHIEFEYNKSKYHLKDVIVGKIYFLLVRIKIQHMELQLIKKEITGIGPSTTTETETIAKYEIMDGAPVKGESIPIRLFLAGYDPTPTMRDVNKKFSVRYFLNLVLVDEEDRRYFKQQEIILWRKAPEKLRKQRTNFHQRFESPESQASAEQPEM

SEQ ID NO: 69474 - protein, 327 aa, Homo sapiens; identical to SEQ ID NO: 69473

SEQ ID NO: 69475 - protein, 251 aa, Homo sapiens
MSFLGGFFGPICEIDIVLNDGETRKMAEMKTEDGKVEKHYLFYDGESVSGKVNLAFKQPGKRLEHQGIRIEFVGQIELFNDKSNTHEFVNLVKELALPGELTQSRSYDFEFMQVEKPYESYIGANVRLRYFLKVTIVRRLTDLVKEYDLIVHQLATYPDVNNSIKMEVGIEDCLHIEFEYNKSKYHLKDVIVGKIYFLLVRIKIQHMELQLIKKEITGIGPSTTTETETIAKYEIMDGAPVKGDNFMEKSS

SEQ ID NO: 69476 - protein, 216 aa, Homo sapiens
MQVEKPYESYIGANVRLRYFLKVTIVRRLTDLVKEYDLIVHQLATYPDVNNSIKMEVGIEDCLHIEFEYNKSKYHLKDVIVGKIYFLLVRIKIQHMELQLIKKEITGIGPSTTTETETIAKYEIMDGAPVKGESIPIRLFLAGYDPTPTMRDVNKKFSVRYFLNLVLVDEEDRRYFKQQEIILWRKAPEKLRKQRTNFHQRFESPESQASAEQPEM

SEQ ID NO: 69477 - protein, 310 aa, Homo sapiens
MTENPFQERYSVEDLSTFGMCLCMVRYVYDAFYKVNLAFKQPGKRLEHQGIRIEFVGQIELFNDKSNTHEFVNLVKELALPGELTQSRSYDFEFMQVEKPYESYIGANVRLRYFLKVTIVRRLTDLVKEYDLIVHQLATYPDVNNSIKMEVGIEDCLHIEFEYNKSKYHLKDVIVGKIYFLLVRIKIQHMELQLIKKEITGIGPSTTTETETIAKYEIMDGAPVKGESIPIRLFLAGYDPTPTMRDVNKKFSVRYFLNLVLVDEEDRRYFKQQEIILWRKAPEKLRKQRTNFHQRFESPESQASAEQPEM

SEQ ID NO: 69478 - protein, 336 aa, Homo sapiens
MSFFGFGQSVEVEILLNDAESRKRAEHKTEDGKKEKYFLFYDGETVSGKVSLALKNPNKRLEHQGIKIEFIGQIELYYDRGNHHEFVSLVKDLARPGEITQSQAFDFEFTHVEKPYESYTGQNVKLRYFLRATISRRLNDVVKEMDIVVHTLSTYPELNSSIKMEVGIEDCLHIEFEYNKSKYHLKDVIVGKIYFLLVRIKIKHMEIDIIKRETTGTGPNVYHENDTIAKYEIMDGAPVRGESIPIRLFLAGYELTPTMRDINKKFSVRYYLNLVLIDEEERRYFKQQEVVLWRKGDIVRKSMSHQAAIASQRFEGTTSLGEVRTPSQLSDNNCRQ

SEQ ID NO: 69479 - protein, 221 aa, Homo sapiens
MFHGIPATPGIGAPGNKPELYEEVKLYKNAREREKYDNMAELFAVVKTMQALEKAYIKDCVSPSEYTAACSRLLVQYKAAFRQVQGSEISSIDEFCRKFRLDCPLAMERIKEDRPITIKDDKGNLNRCIADVVSLFITVMDKLRLEIRAMDEIQPDLRELMETMHRMSHLPPDFEGRQTVSQWLQTLSGMSASDELDDSQVRQMLFDLESAYNAFNRFLHA

SEQ ID NO: 69480 - protein, 233 aa, Homo sapiens
MFHGIPATPGIGAPGNKPELYEEVKLYKNAREREKYDNMAELFAVVKTMQALEKAYIKDCVSPSEYTAACSRLLVQYKAAFRQVQGSEISSIDEFCRKFRLDCPLAMERIKEDRPITIKDDKGNLNRCIADVVSLFITVMDKLRLEIRAMDEIQPDLRELMETMHRMSHLPPDFEGRQTVSQWWVSLPARQSPAVPETLPARRSPAVPLRPSAPTCPVLHSQAADPERHVGVR

SEQ ID NO: 69481 - protein, 221 aa, Homo sapiens; identical to SEQ ID NO: 69479

SEQ ID NO: 69482 - protein, 596 aa, Homo sapiens
MAAHLSYGRVNLNVLREAVRRELREFLDKCAGSKAIVWDEYLTGPFGLIAQYSLLKEHEVEKMFTLKGNRLPAADVKNIIFFVRPRLELMDIIAENVLSEDRRGPTRDFHILFVPRRSLLCEQRLKDLGVLGSFIHREEYSLDLIPFDGDLLSMESEGAFKECYLEGDQTSLYHAAKGLMTLQALYGTIPQIFGKGECARQVANMMIRMKREFTGSQNSIFPVFDNLLLLDRNVDLLTPLATQLTYEGLIDEIYGIQNSYVKLPPEKFAPKKQGDGGKDLPTEAKKLQLNSAEELYAEIRDKNFNAVGSVLSKKAKIISAAFEERHNAKTVGEIKQFVSQLPHMQAARGSLANHTSIAELIKDVTTSEDFFDKLTVEQEFMSGIDTDKVNNYIEDCIAQKHSLIKVLRLVCLQSVCNSGLKQKVLDYYKREILQTYGYEHILTLHNLEKAGLLKPQTGGRNNYPTIRKTLRLWMDDVNEQNPTDISYVYSGYAPLSVRLAQLLSRPGWRSIEEVLRILPGPHFEERQPLPTGLQKKRQPGENRVTLIFFLGGVTFAEIAALRFLSQLEDGGTEYVIATTKLMNGTSWIEALMEKPF

SEQ ID NO: 69483 - protein, 617 aa, Homo sapiens
MAFPHRPDAPELPDFSMLKRLARDQLIYLLEQLPGKKDLFIEADLMSPLDRIANVSILKQHEVDKLYKVENKPALSSNEQLCFLVRPRIKNMRYIASLVNADKLAGRTRKYKVIFSPQKFYACEMVLEEEGIYGDVSCDEWAFSLLPLDVDLLSMELPEFFRDYFLEGDQRWINTVAQALHLLSTLYGPFPNCYGIGRCAKMAYELWRNLEEEEDGETKGRRPEIGHIFLLDRDVDFVTALCSQVVYEGLVDDTFRIKCGSVDFGPEVTSSDKSLKVLLNAEDKVFNEIRNEHFSNVFGFLSQKARNLQAQYDRRRGMDIKQMKNFVSQELKGLKQEHRLLSLHIGACESIMKKKTKQDFQELIKTEHALLEGFNIRESTSYIEEHIDRQVSPIESLRLMCLLSITENGLIPKDYRSLKTQYLQSYGPEHLLTFSNLRRAGLLTEQAPGDTLTAVESKVSKLVTDKAAGKITDAFSSLAKRSNFRAISKKLNLIPRVDGEYDLKVPRDMAYVFGGAYVPLSCRIIEQVLERRSWQGLDEVVRLLNCSDFAFTDMTKEDKASSESLRLILVVFLGGCTFSEISALRFLGREKGYRFIFLTTAVTNSARLMEAMSEVKA

SEQ ID NO: 69484 - protein, 572 aa, Homo sapiens [sequence omitted]

SEQ ID NO: 69485 - protein, 796 aa, Homo sapiens
MPTTQQSPQDEQEKLLDEAIQAVKVQSFQMKRCLDKNKLMDALKHASNMLGELRTSMLSPKSYYELYMAISDELHYLEVYLTDEFAKGRKVADLYELVQYAGNIIPRLYLLITVGVVYVKSFPQSRKDILKDLVEMCRGVQHPLRGLFLRNYLLQCTRNILPDEGEPTDEETTGDISDSMDFVLLNFAEMNKLWVRMQHQGHSRDREKRERERQELRILVGTNLVRLSQLEGVNVERYKQIVLTGILEQVVNCRDALAQEYLMECIIQVFPDEFHLQTLNPFLRACAELHQNVNVKNIIIALIDRLALFAHREDGPGIPADIKLFDIFSQQVATVIQSRQDMPSEDVVSLQVSLINLAMKCYPDRVDYVDKVLETTVEIFNKLNLEHIATSSAVSKELTRLLKIPVDTYNNILTVLKLKHFHPLFEYFDYESRKSMSCYVLSNVLDYNTEIVSQDQVDSIMNLVSTLIQDQPDQPVEDPDPEDFADEQSLVGRFIHLLRSEDPDQQYLILNTARKHFGAGGNQRIRFTLPPLVFAAYQLAFRYKENSKVDDKWEKKCQKIFSFAHQTISALIKAELAELPLRLFLQGALAAGEIGFENHETVAYEFMSQAFSLYEDEISDSKAQLAAITLIIGTFERMKCFSEENHEPLRTQCALAASKLLKKPDQGRAVSTCAHLFWSGRNTDKNGEELHGGKRVMECLKKALKIANQCMDPSLQVQLFIEILNRYIYFYEKENDAVTIQVLNQLIQKIREDLPNLESSEETEQINKHFHNTLEHLRLRRESPESEGPIYEGLIL

SEQ ID NO: 69486 - protein, 662 aa, Homo sapiens
MCRGVQHPLRGLFLRNYLLQCTRNILPDEGEPTDEETTGDISDSMDFVLLNFAEMNKLWVRMQHQGHSRDREKRERERQELRILVGTNLVRLSQLEGVNVERYKQIVLTGILEQVVNCRDALAQEYLMECIIQVFPDEFHLQTLNPFLRACAELHQNVNVKNIIIALIDRLALFAHREDGPGIPADIKLFDIFSQQVATVIQSRQDMPSEDVVSLQVSLINLAMKCYPDRVDYVDKVLETTVEIFNKLNLEHIATSSAVSKELTRLLKIPVDTYNNILTVLKLKHFHPLFEYFDYESRKSMSCYVLSNVLDYNTEIVSQDQVDSIMNLVSTLIQDQPDQPVEDPDPEDFADEQSLVGRFIHLLRSEDPDQQYLILNTARKHFGAGGNQRIRFTLPPLVFAAYQLAFRYKENSKVDDKWEKKCQKIFSFAHQTISALIKAELAELPLRLFLQGALAAGEIGFENHETVAYEFMSQAFSLYEDEISDSKAQLAAITLIIGTFERMKCFSEENHEPLRTQCALAASKLLKKPDQGRAVSTCAHLFWSGRNTDKNGEELHGGKRVMECLKKALKIANQCMDPSLQVQLFIEILNRYIYFYEKENDAIVTIQVLNQLIQKIREDLPNLESSEETEQINKHFHNTLEHLRLRRESPESEGPIYEGLIL

SEQ ID NO: 69487 - protein, 386 aa, Homo sapiens
MDRFVWTSGLLEINETLVIQQRGVRIYDGEEKIKFDAGTLLLSTHRLIWRDQKNHECCMAILLSQIVFIEEQAAGIGKSAKIVVHLHPAPPNKEPGPFQSSKNSYIKLSFKEHGQIEFYRRLSEEMTQRRWENMPVSQSLQTNRGPQPGRIRAVGIVGIERKLEEKRKETDKNISEAFEDLSKLMIKAKEMVELSKSIANKIKDKQGDITEDETIRFKSYLLSMGIANPVTRETYGSGTQYHMQLAKQLAGILQVPLEERGGIMSLTEVYCLVNRARGMELLSPEDLVNACKMLEALKLPLRLRVFDSGVMVIELQSHKEEEMVASALETVSEKGSLTSEEFAKLVGMSVLLAKERLLLAEKMGHLCRDDSVEGLRFYPNLFMTQS

SEQ ID NO: 69488 - protein, 185 aa, Homo sapiens
MSWLFPLTKSASSSAAGSPGGLTSLQQQKQRLIESLRNSHSSIAEIQKDVEYRLPFTINNLTININILLPPQFPQEKPVISVYPPIRHHLMDKQGVYVTSPLVNNFTMHSDLGKIIQSLLDEFWKNPPVLAPTSTAFPYQLEIRWHHPHCLEISLARSSNSLGFSISSSISSTRSKQEYHFFICC

SEQ ID NO: 69489 - protein, 397 aa, Homo sapiens
MSWLFPLTKSASSSAAGSPGGLTSLQQQKQRLIESLRNSHSSIAEIQKDVEYRLPFTINNLTININILLPPQFPQEKPVISVYPPIRHHLMDKQGVYVTSPLVNNFTMHSDLGKIIQSLLDEFWKNPPVLAPTSTAFPYLYSNPSGMSPYASQGFPFLPPYPPQEANRSITSLSVADTVSSSTTSHTTAKPAAPSFGVLSNLPLPIPTVDASIPTSQNGFGYKMPDVPDAFPELSELSVSQLTDMNEQEEVLLEQFLTLPQLKQIITDKDDLVKSIEELARKNLLLEPSLEAKRQTVLDKYELLTQMKSTFEKKMQRQHELSESCSASALQARLKVAAHEAEEESDNIAEDFLEGKMEIDDFLSSFMEKRTICHCRRAKEEKLQQAIAMHSQFHAPL

SEQ ID NO: 69490 - protein, 372 aa, Homo sapiens
MSWLFPLTKSASSSAAGSPGGLTSLQQQKQRLIESLRNSHSRLLPPQFPQEKPVISVYPPIRHHLMDKQGVYVTSPLVNNFTMHSDLGKIIQSLLDEFWKNPPVLAPTSTAFPYLYSNPSGMSPYASQGFPFLPPYPPQEANRSITSLSVADTVSSSTTSHTTAKPAAPSFGVLSNLPLPIPTVDASIPTSQNGFGYKMPDVPDAFPELSELSVSQLTDMNEQEEVLLEQFLTLPQLKQIITDKDDLVKSIEELARKNLLLEPSLEAKRQTVLDKYELLTQMKSTFEKKMQRQHELSESCSASALQARLKVAAHEAEEESDNIAEDFLEGKMEIDDFLSSFMEKRTICHCRRAKEEKLQQAIAMHSQFHAPL

SEQ ID NO: 69491 - protein, 285 aa, Homo sapiens
MAGAGSEARFAGLSLVQLNELLEDEGQLTEMVQKMEETQNVQLNKEMTLASNRSLAEGNLLYQPQLDTLKARLTQKYQELQVLFEAYQIKKTKLDRQSSSASLETLLALLQAEGAKIEEDTENMAEKFLDGELPLDSFIDVYQSKRKLAHMRRVKIEKLQEMVLKGQRLPQALAPLPPRLPELAPTAPLPYPAPEASGPPAVAPRRIPPPPPPVPAGRLATPFTAAMSSGQAVPYPGLQCPPLPPRVGLPTQQGFSSQFVSPYPPPLPQRPPPRLPPHQPGFILQ

SEQ ID NO: 69492 - protein, 355 aa, Homo sapiens
METLKDKTLQELEELQNDSEAIDQLALESPEVQDLQLEREMALATNRSLAERNLEFQGPLEISRSNLSDRYQELRKLVERCQEQKAKLEKFSSALQPGTLLDLLQVEGMKIEEESEAMAEKFLEGEVPLETFLENFSSMRMLSHLRRVRVEKLQEVVRKPRASQELAGDAPPPRPPPPVRPVPQGTPPVVEEQPQPPLAMPPYPLPYSPSPSLPVGPTAHGALPPAPFPVVSQPSFYSGPLGPTYPAAQLGPRGAAGYSWSPQRSMPPRPGYPGTPMGASGPGYPLRGGRAPSPGYPQQSPYPATGGKPPYPIQPQLPSFPGQPQPSVPLQPPYPPGPAPPYGFPPPPGPAWPGY

SEQ ID NO: 69493 - protein, 148 aa, Homo sapiens
METLKDKTLQELEELQNDSEAIDQLALESPEVQDLQLEREMALATNRSLAERNLEFQGPLEISRSNLSDRYQELRKLVERCQEQKAKLEKFSSALQPGTLLDLLQVEGMKIEEESEAMAEKFLEGEVPLETFLENFSSMRMLSHLRRV

SEQ ID NO: 69494 - protein, 322 aa, Homo sapiens
METLKDKTLQELEELQNDSEAIDQLALESPEVQDLQLEREMALATNRSLAERNLEFQGPLEISRSNLSDRYQELRKLVERCQEQKAKLEKFSSALQPGTLLDLLQVEGMKIEEESEAMAEKFLEGEVPLETFLENFSSMRMLSHLRRVRVEKLQEVVRKPRASQELAGDAPPPRPPPPVRPVPQGTPPVVEEQPQPPLAMPPYPLPYSPSPSLPVGPTAHGALPPAPFPVVSQPSFYSGPLGPTYPAAQLGPRGAAGYSWSPQRSMPPRPGYPGTPMGASGPGYPLRGGRAPSPGYPQQSPYPATGGKPPYPIQPQLPFSLC

SEQ ID NO: 69495 - protein, 251 aa, Homo sapiens
MYRARAARAGPEPGSPGRFGILSTGQLRDLLQDEPKLDRIVRLSRKFQGLQLEREACLASNYALAKENLALRPRLEMGRAALAIKYQELREVAENCADKLQRLEESMHRWSPHCALGWLQAELEEAEQEAEEQMEQLLLGEQSLEAFLPAFQRGRALAHLRRTQAEKLQELLRRRERSAQPAPTSAADPPKSFPAAAVLPTGAARGPPAVPRSLPPLDSRPVPPLKGSPGCPLGPAPLLSPRPSQPEPPHR

SEQ ID NO: 69496 - protein, 875 aa, Homo sapiens
MHDAFEPVPILEKLPLQIDCLAAWEEWLLVGTKQGHLLLYRIRKDVGCNRFEVTLEKSNKNFSKKIQQIHVVSQFKILVSLLENNIYVHDLLTFQQITTVSKAKGASLFTCDLQHTETGEEVLRMCVAVKKKLQLYFWKDREFHELQGDFSVPDVPKSMAWCENSICVGFKRDYYLIRVDGKGSIKELFPTGKQLEPLVAPLADGKVAVGQDDLTVVLNEEGICTQKCALNWTDIPVAMEHQPPYIIAVLPRYVEIRTFEPRLLVQSIELQRPRFITSGGSNIIYVASNHFVWRLIPVPMATQIQQLLQDKQFELALQLAEMKDDSDSEKQQQIHHIKNLYAFNLFCQKRFDESMQVFAKLGTDPTHVMGLYPDLLPTDYRKQLQYPNPLPVLSGAELEKAHLALIDYLTQKRSQLVKKLNDSDHQSSTSPLMEGTPTIKSKKKLLQIIDTTLLKCYLHTNVALVAPLLRLENNHCHIEESEHVLKKAHKYSELIILYEKKGLHEKALQVLVDQSKKANSPLKGHERTVQYLQHLGTENLHLIFSYSVWVLRDFPEDGLKIFTEDLPEVESLPRDRVLGFLIENFKGLAIPYLEHIIHVWEETGSRFHNCLIQLYCEKVQGLMKEYLLSFPAGKTPVPAGEEEGELGEYRQKLLMFLEISSYYDPGRLICDFPFDGLLEERALLLGRMGKHEQALFIYVHILKDTRMAEEYCHKHYDRNKDGNKDVYLSLLRMYLSPPSIHCLGPIKLELLEPKANLQAALQVLELHHSKLDTTKALNLLPANTQINDIRIFLEKVLEENAQKKRFNQVLKNLLHAEFLRVQEERILHQQVKCIITEEKVCMVCKKKIGNSAFARYPNGVVVHYFCSKEVNPADT

SEQ ID NO: 69497 - protein, 886 aa, Homo sapiens
MHDAFEPVPILEKLPLQIDCLAAWEEWLLVGTKQGHLLLYRIRKDVVPADVASPESGSCNRFEVTLEKSNKNFSKKIQQIHVVSQFKILVSLLENNIYVHDLLTFQQITTVSKAKGASLFTCDLQHTETGEEVLRMCVAVKKKLQLYFWKDREFHELQGDFSVPDVPKSMAWCENSICVGFKRDYYLIRVDGKGSIKELFPTGKQLEPLVAPLADGKVAVGQDDLTVVLNEEGICTQKCALNWTDIPVAMEHQPPYIIAVLPRYVEIRTFEPRLLVQSIELQRPRFITSGGSNIIYVASNHFVWRLIPVPMATQIQQLLQDKQFELALQLAEMKDDSDSEKQQQIHHIKNLYAFNLFCQKRFDESMQVFAKLGTDPTHVMGLYPDLLPTDYRKQLQYPNPLPVLSGAELEKAHLALIDYLTQKRSQLVKKLNDSDHQSSTSPLMEGTPTIKSKKKLLQIIDTTLLKCYLHTNVALVAPLLRLENNHCHIEESEHVLKKAHKYSELIILYEKKGLHEKALQVLVDQSKKANSPLKGHERTVQYLQHLGTENLHLIFSYSVWVLRDFPEDGLKIFTEDLPEVESLPRDRVLGFLIENFKGLAIPYLEHIIHVWEETGSRFHNCLIQLYCEKVQGLMKEYLLSFPAGKTPVPAGEEEGELGEYRQKLLMFLEISSYYDPGRLICDFPFDGLLEERALLLGRMGKHEQALFIYVHILKDTRMAEEYCHKHYDRNKDGNKDVYLSLLRMYLSPPSIHCLGPIKLELLEPKANLQAALQVLELHHSKLDTTKALNLLPANTQINDIRIFLEKVLEENAQKKRFNQVLKNLLHAEFLRVQEERILHQQVKCIITEEKVCMVCKKKIGNSAFARYPNGVVVHYFCSKEVNPADT

SEQ ID NO: 69498 - protein, 437 aa, Homo sapiens
MTTSTLQKAIDLVTKATEEDKAKNYEEALRLYQHAVEYFLHAIKYEAHSDKAKESIRAKCVQYLDRAEKLKDYLRSKEKHGKKPVKENQSEGKGSDSDSEGDNPEKKKLQEQLMGAVVMEKPNIRWNDVAGLEGAKEALKEAVILPIKFPHLFTGKRTPWRGILLFGPPGTGKSYLAKAVATEANNSTFFSVSSSDLMSKWLGESEKLVKNLFELARQHKPSIIFIDEVDSLCGSRNENESEAARRIKTEFLVQMQGVGNNNDGTLVLGATNIPWVLDSAIRRRFEKRIYIPLPEEAARAQMFRLHLGSTPHNLTDANIHELARKTEGYSGADISIIVRDSLMQPVRKVQSATHFKKVCGPSRTNPSMMIDDLLTPCSPGDPGAMEMTWMDVPGDKLLEPVVCMSDMLRSLATTRPTVNADDLLKVKKFSEDFGQES

SEQ ID NO: 69499 - protein, 444 aa, Homo sapiens
MSSTSPNLQKAIDLASKAAQEDKAGNYEEALQLYQHAVQYFLHVVKYEAQGDKAKQSIRAKCTEYLDRAEKLKEYLKNKEKKAQKPVKEGQPSPADEKGNDSDGEGESDDPEKKKLQNQLQGAIVIERPNVKWSDVAGLEGAKEALKEAVILPIKFPHLFTGKRTPWRGILLFGPPGTGKSYLAKAVATEANNSTFFSISSSDLVSKWLGESEKLVKNLFQLARENKPSIIFIDEIDSLCGSRSENESEAARRIKTEFLVQMQGVGVDNDGILVLGATNIPWVLDSAIRRRFEKRIYIPLPEPHARAAMFKLHLGTTQNSLTEADFRELGRKTDGYSGADISIIVRDALMQPVRKVQSATHFKKVRGPSRADPNHLVDDLLTPCSPGDPGAIEMTWMDVPGDKLLEPVVSMSDMLRSLSNTKPTVNEHDLLKLKKFTEDFGQEG

SEQ ID NO: 69500 - protein, 209 aa, Homo sapiens
MAEAEEQETGSLEESTDESEEEESEEEPKLKYERLSNGVTEILQKDAASCMTVHDKFLALGTHYGKVYLLDVQGNITQKFDVSPVKINQISLDESGEHMGVCSEDGKVQVFGLYSGEEFHETFDCPIKIIAVHPHFVRSSCKQFVTGGKKLLLFERSWMNRWKSAVLHEGEGNIRSVKWRGHLIAWANNMSKKPEAWRVAKKMKSYLNN

SEQ ID NO: 69501 - protein, 854 aa, Homo sapiens
MAEAEEQETGSLEESTDESEEEESEEEPKLKYERLSNGVTEILQKDAASCMTVHDKFLALGTHYGKVYLLDVQGNITQKFDVSPVKINQISLDESGEHMGVCSEDGKVQVFGLYSGEEFHETFDCPIKIIAVHPHFVRSSCKQFVTGGKKLLLFERSWMNRWKSAVLHEGEGNIRSVKWRGHLIAWANNMGVKIFDIISKQRITNVPRDDISLRPDMYPCSLCWKDNVTLIIGWGTSVKVCSVKERHASEMRDLPSRYVEIVSQFETEFYISGLAPLCDQLVVLSYVKEISEKTEREYCARPRLDIIQPLSETCEEISSDALTVRGFQENECRDYHLEYSEGESLFYIVSPRDVVVAKERDQDDHIDWLLEKKKYEEALMAAEISQKNIKRHKILDIGLAYINHLVERGDYDIAARKCQKILGKNAALWEYEVYKFKEIGQLKAISPYLPRGDPVLKPLIYEMILHEFLESDYEGFATLIREWPGDLYNNSVIVQAVRDHLKKDSQNKTLLKTLAELYTYDKNYGNALEIYLTLRHKDVFQLIHKHNLFSSIKDKIVLLMDFDSEKAVDMLLDNEDKISIKKVVEELEDRPELQHVYLHKLFKRDHHKGQRYHEKQISLYAEYDRPNLLPFLRDSTHCPLEKALEICQQRNFVEETVYLLSRMGNSRSALKMIMEELHDVDKAIEFAKEQDDGELWEDLILYSIDKPPFITGLLNNIGTHVDPILLIHRIKEGMEIPNLRDSLVKILQDYNLQILLREGCKKILVADSLSLLKKMHRTQMKGVLVDEENICESCLSPILPSDAAKPFSVVVFHCRHMFHKECLPMPSMNSAAQFCNICSAKNRGPGSAILEMKK

SEQ ID NO: 69502 - protein, 829 aa, Homo sapiens
MAEAEEQETGSLEESTDESEEEESEEEPKLKYERLSNGVTEILQKDAASCMTVHDKFLALGTHYGKVYLLDVQGNITQKFDVVQVFGLYSGEEFHETFDCPIKIIAVHPHFVRSSCKQFVTGGKKLLLFERSWMNRWKSAVLHEGEGNIRSVKWRGHLIAWANNMGVKIFDIISKQRITNVPRDDISLRPDMYPCSLCWKDNVTLIIGWGTSVKVCSVKERHASEMRDLPSRYVEIVSQFETEFYISGLAPLCDQLVVLSYVKEISEKTEREYCARPRLDIIQPLSETCEEISSDALTVRGFQENECRDYHLEYSEGESLFYIVSPRDVVVAKERDQDDHIDWLLEKKKYEEALMAAEISQKNIKRHKILDIGLAYINHLVERGDYDIAARKCQKILGKNAALWEYEVYKFKEIGQLKAISPYLPRGDPVLKPLIYEMILHEFLESDYEGFATLIREWPGDLYNNSVIVQAVRDHLKKDSQNKTLLKTLAELYTYDKNYGNALEIYLTLRHKDVFQLIHKHNLFSSIKDKIVLLMDFDSEKAVDMLLDNEDKISIKKVVEELEDRPELQHVYLHKLFKRDHHKGQRYHEKQISLYAEYDRPNLLPFLRDSTHCPLEKALEICQQRNFVEETVYLLSRMGNSRSALKMIMEELHDVDKAIEFAKEQDDGELWEDLILYSIDKPPFITGLLNNIGTHVDPILLIHRIKEGMEIPNLRDSLVKILQDYNLQILLREGCKKILVADSLSLLKKMHRTQMKGVLVDEENICESCLSPILPSDAAKPFSVVVFHCRHMFHKECLPMPSMNSAAQFCNICSAKNRGPGSAILEMKK

SEQ ID NO: 69503 - protein, 538 aa, Homo sapiens
MVYTQSEILQKEVYLFERIDSQNREIMKHLKAICFLRPTKENVDYIIQELRRPKYTIYFIYFSNVISKSDVKSLAEADEQEVVAEVQQVITKEYELFEFRRTEVPPLLLILDRCDDAITPLLNQWTYQAMVHELLGINNNRIDLSRVPGISKDLREVVLSAENDEFYANNMYLNFAEIGSNIKNLMEDFQKKKPKEQQKLESIADMKAFVENYPQFKKMSGTVSKHVTVVGELSRLVSERNLLEVSEVEQELACQNDHSSALQNIKRLLQNPKVTEFDAARLVMLYALHYERHSSNSLPGLMMDLRNKGVSEKYRKLVSAVVEYGGKRVRGSDLFSPKDAVAITKQFLKGLKGVENVYTQHQPFLHETLDHLIKGRLKENLYPYLGPSTLRDRPQDIIVFVIGGATYEEALTVYNLNRTTPGVRIVLGGTTVHNTKRDGVSLCSPAWFRTPGLKRSTRLSLPKCWDYSFPRGSSGFWTAQPKQGELSSHIKVSEQKMKRWLGEGHSFLSCPHYRFSLLNKGVGEQLWVLCWLLELISR

SEQ ID NO: 69504 - protein, 570 aa, Homo sapiens
MNVVFAVKQYISKMIEDSGPGMKVLLMDKETTGIVSMVYTQSEILQKEVYLFERIDSQNREIMKHLKAICFLRPTKENVDYIIQELRRPKYTIYFIYFSNVISKSDVKSLAEADEQEVVAEVQEFYGDYIAVNPHLFSLNILGCCQGRNWDPAQLSRTTQGLTALLLSLKKCPMIRYQLSSEAAKRLAECVKQVITKEYELFEFRRTEVPPLLLILDRCDDAITPLLNQWTYQAMVHELLGINNNRIDLSRVPGISKDLREVVLSAENDEFYANNMYLNFAEIGSNIKNLMEDFQKKKPKEQQKLESIADMKAFVENYPQFKKMSGTVSKHVTVVGELSRLVSERNLLEVSEVEQELACQNDHSSALQNIKRLLQNPKVTEFDAARLVMLYALHYERHSSNSLPGLMMDLRNKGVSEKYRKLVSAVVEYGGKRVRGSDLFSPKDAVAITKQFLKGLKGVENVYTQHQPFLHETLDHLIKGRLKENLYPYLGPSTLRDRPQDIIVFVIGGATYEEALTVYNLNRTTPGVRIVLGGTTVHNTKSFLEEVLASGLHSRSKESSQVTSRSASRR

SEQ ID NO: 69505 - protein, 316 aa, Homo sapiens
MNVVFAVKQYISKMIEDSGPGMKVLLMDKETTGIVSMVYTQSEILQKEVYLFERIDSQNREIMKHLKAICFLRPTKENVDYIIQELRRPKYTIYFIYFSNVISKSDVKSLAEADEQEVVAEVQQVITKEYELFEFRRTEVPPLLLILDRCDDAITPLLNQWTYQAMVHELLGINNNRIDLSRVPGISKDLREVVLSAENDEFYANNMYLNFAEIGSNIKNLMEDFQKKKPKEQQKLESIADMKAFVENYPQFKKMSGTVSKHVTVVGELSRLVSERNLLEVSEVEQELACQNDHSSALQNIKRLLQNPKVTEFDAA

SEQ ID NO: 69506 - protein, 434 aa, Homo sapiens
MNVVFAVKQYISKMIEDSGPGMKVLLMDKETTGIVSMVYTQSEILQKEVYLFERIDSQNREIMKHLKAICFLRPTKENVDYIIQELRRPKYTIYFIYFSNVISKSDVKSLAEADEQEVVAEVQQVITKEYELFEFRRTEVPPLLLILDRCDDAITPLLNQWTYQAMVHELLGINNNRIDLSRVPGISKDLREVVLSAENDEFYANNMYLNFAEIGSNIKNLMEDFQKKKPKEQQKLESIADMKAFVENYPQFKKMSGTVSKHVTVVGELSRLVSERNLLEVSEVEQELACQNDHSSALQNIKRLLQNPKVTEFDAARLVMLYALHYERHSSNSLPGLMMDLRNKGVSEKYRKLVSAVVEYGGKRVRGSDLFSPKDAVAITKQFLKGLKGVENVYTQHQPFLHETLDHLIKGRLKENLYPYLGPSTLRDRIASCL

SEQ ID NO: 69507 - protein, 445 aa, Homo sapiens [sequence omitted]

SEQ ID NO: 69508 - protein, 375 aa, Homo sapiens
MSLAGGRAPRKTAGNRLSGLLEAEEEDEFYQTTYGGFTEESGDDEYQGDQSDTEDEVDSDFDIDEGDEPSSDGEAEEPRRKRRVVTKAYKEPLKSLRPRKVNTPAGSSQKAREEKALLPLELQDDGSDSRKSMRQSTAEHTRQTFLRVQERQGQSRRRKGPHCERPLTQEELLREAKITEELNLRSLETYERLEADKKKQVHKKRKCPGPIITYHSVTVPLVGEPGPKEENVDIEGSLCFSLSFVLRLDPAPSVSALTPHAGTGPVNPPARCSRTFITFSDDATFEEWFPQGRPPKVPVREVCPVTHRPALYRDPVTDIPYATARAFKIIREAYKKYITAHGLPPTASALGPGPPPPEPLPGSGPRALRQKIVIK

SEQ ID NO: 69509 - protein, 364 aa, Homo sapiens
MSLAGGRAPRKTAGNRLSGLLEAEEEDEFYQTTYGGFTEESGDDEYQGDQSDTEDEVDSDFDIDEGDEPSSDGEAEEPRRKRRVVTKAYKEPLKSLRPRKVNTPAGSSQKAREEKALLPLELQDDGSDSRKSMRQSTAEHTRQTFLRVQERQGQSRRRKGPHCERPLTQEELLREAKITEELNLRSLETYERLEADKKKQVHKKRKCPGPIITYHSVTVPLVGEPGPKEENVDIEGLDPAPSVSALTPHAGTGPVNPPARCSRTFITFSDDATFEEWFPQGRPPKVPVREVCPVTHRPALYRDPVTDIPYATARAFKIIREAYKKYITAHGLPPTASALGPGPPPPEPLPGSGPRALRQKIVIK

SEQ ID NO: 69510 - protein, 406 aa, Homo sapiens
MAENGKNCDQRRVAMNKEHHNGNFTDPSSVNEKKRREREERQNIVLWRQPLITLQYFSLEILVILKEWTSKLWHRQSIVVSFLLLLAVLIATYYVEGVHQQYVQRIEKQFLLYAYWIGLGILSSVGLGTGLHTFLLYLGPHIASVTLAAYECNSVNFPEPPYPDQIICPDEEGTEGTISLWSIISKVRIEACMWGIGTAIGELPPYFMARAARLSGAEPDDEEYQEFEEMLEHAESAQDFASRAKLAVQKLVQKVGFFGILACASIPNPLFDLAGITCGHFLVPFWTFFGATLIGKAIIKMHIQKIFVIITFSKHIVEQMVAFIGAVPGIGPSLQKPFQEYLEAQRQKLHHKSEMGTPQGENWLSWMFEKLVVVMVCYFILSIINSMAQSYAKRIQQRLNSEEKTK

SEQ ID NO: 69511 - protein, 309 aa, Homo sapiens
MDLKYVQRIEKQFLLYAYWIGLGILSSVGLGTGLHTFLLYLGPHIASVTLAAYECNSVNFPEPPYPDQIICPDEEGTEGTISLWSIISKVRIEACMWGIGTAIGELPPYFMARAARLSGAEPDDEEYQEFEEMLEHAESAQDFASRAKLAVQKLVQKVGFFGILACASIPNPLFDLAGITCGHFLVPFWTFFGATLIGKAIIKMHIQKIFVIITFSKHIVEQMVAFIGAVPGIGPSLQKPFQEYLEAQRQKLHHKSEMGTPQGENWLSWMFEKLVVVMVCYFILSIINSMAQSYAKRIQQRLNSEEKTK

SEQ ID NO: 69512 - protein, 272 aa, Homo sapiens
MDLKGPHIASVTLAAYECNSVNFPEPPYPDQIICPDEEGTEGTISLWSIISKVRIEACMWGIGTAIGELPPYFMARAARLSGAEPDDEEYQEFEEMLEHAESAQDFASRAKLAVQKLVQKVGFFGILACASIPNPLFDLAGITCGHFLVPFWTFFGATLIGKAIIKMHIQKIFVIITFSKHIVEQMVAFIGAVPGIGPSLQKPFQEYLEAQRQKLHHKSEMGTPQGENWLSWMFEKLVVVMVCYFILSIINSMAQSYAKRIQQRLNSEEKTK

SEQ ID NO: 69513 - protein, 214 aa, Homo sapiens
MWGIGTAIGELPPYFMARAARLSGAEPDDEEYQEFEEMLEHAESAQDFASRAKLAVQKLVQKVGFFGILACASIPNPLFDLAGITCGHFLVPFWTFFGATLIGKAIIKMHIQKIFVIITFSKHIVEQMVAFIGAVPGIGPSLQKPFQEYLEAQRQKLHHKSEMGTPQGENWLSWMFEKLVVVMVCYFILSIINSMAQSYAKRIQQRLNSEEKTK

SEQ ID NO: 69514 - protein, 350 aa, Homo sapiens
MAENGKNCDQRRVAMNKEHHNGNFTDPSSVNEKKRREREERQNIVLWRQPLITLQYFSLEILVILKEWTSKLWHRQSIVVSFLLLLAVLIATYYVEGVHQQYVQRIEKQFLLYAYWIGLGILSSVGLGTGLHTFLLYLGIGTAIGELPPYFMARAARLSGAEPDDEEYQEFEEMLEHAESAQDFASRAKLAVQKLVQKVGFFGILACASIPNPLFDLAGITCGHFLVPFWTFFGATLIGKAIIKMHIQKIFVIITFSKHIVEQMVAFIGAVPGIGPSLQKPFQEYLEAQRQKLHHKSEMGTPQGENWLSWMFEKLVVVMVCYFILSIINSMAQSYAKRIQQRLNSEEKTK

SEQ ID NO: 69515 - protein, 480 aa, Homo sapiens [sequence omitted]

SEQ ID NO: 69516 - protein, 480 aa, Homo sapiens [sequence omitted]
